United States Patent Application Publication US 2008/0301839 A1 - sequence listing, part 2

SEQ ID NO: 4874 - protein, 2761 aa, Ustilago maydis 521
MHPRQPSGPGSTDAMEIYDHLHTPKHEIDVADAFAAAMPSAIDPNQPSLRSVPEDAQLDTQQLSSLNASPLASSLQPSSQVAQQESPTSRRSDKLATSSYGLVQPGGRPDLASRRSSDVLKSLPGLPLALTNAEQTFLPATLNGGTSSAIPHPSAAIGSLVDHRAPPADTLPPQHIPRPLPGSATPSASASPSAMQTPPKKTPYDAIAAGVQTLAMPNSISVGPLSPPESDPHRSMMDSNRKSIDDIRRNHAARAAQRQSNNSSPIETRPGNGLVPDSAYTPTRAHAQYQSEFASSPDPTQRQRRAMASEPPRPASVLDTRAAQMQAVQRRQHDSRLGQGSSDTFDATDTLGSSRDTQLDRASQQHLQLRAAREQELERERLQHQQLQEQQREKEQQRQREKLKEREREKEREREREKERGERDRDRDRERRSRRLLGDYALGKTLGAGSMGKVKLGVKMGNGEKVAIKIIPRHTSMAAAQSPRAAVDENGKPQPPPPPPTASFLAKAAAKDQSKEIRTIREGSLQILLHHPYVCGMREMIIHTNHYYMVFEYVNGGQMLDYIISHGRLRERSARKFARQIGSALEYCHRNSIVHRDLKIENILISKTGNIKIIDFGLSNLFSPHSHLSTFCGSLYFAAPELLNAKVYTGPEVDVWSFGIVLYVLVCGKVPFDDQSMPALHAKIKRGQVEYPAWLSGECKHLLSRMLVTNPANRATLAEVLAHPWMVKGYEGVPDPHLPDRTPLRPHNIDQEVIKGMTGFEFGSPEAITAKLIEVLNSEAYQTSLYHWELKNLPASLTGLSTVSNSGSSIDSPGLNRPSTRGSFTATSGSDTVKSKAGSRRFSGIDFYKKKLTTNPLAAAFGSKDDSAVGSANGSSNGLGSGTGLLPFGKEPLDPTRGFHPLISIYFLVKEKMERERLYGHSFFASSNLSLNGPPVPSTGAVAGAGTGARAAAAGAMPTAADIPQEALRVPEVPHVSHRAYDPSRQQEAALASPAPPRPAAAMIPVPASPTPVFESREKSRPSGLMAGPPRARANADEMEAALREKCLPSPKDAGFAPGIGGMAPVPAASTPGMRQSFSVVPPGPEVAIGHNHRHSMMAPDISMAITNNHKRSVSLTARRPPGAAAAGRTPVGAMVEPSTPDAFSMDTRRMSTMSPARLPARASYIATPSKSEAGSAEPSSSPAATAHNTSSTLGYGATLARRFSSFMGRSPSQPLDTEARERKKQSRMSMPLGGLPQQQQQQHQQRRGSAHMPLSEVDEADTGTDVDAYDYDEVEEHLVTHDEDMPLGSGTTVRRSGTMGDMPASHANTRVSEASMGALSVGRAAGLSMSPKSTAAAKSGRRPSTGISPSTSMPLNVLDAGGAARQKEDALQQVSPSNARTGWMGPSTPGQAEVLPALVTRRRFGGGSNATGGQQNGSSASEGGSKPIFLKGLFSVQTTSTKPRTVIHASLVKVLDRIGIQYRELRGGYECVHLPSLDFSGSDSLGRGNARIPLETMAAAAAADAEASERSPTSEENNRQPKRKPSRLSFVSGRSKDKDRANRKEGSVAESIGALTGAGGTVRSRTPSLTSNAAFANADSTTLPPLPPKTPSKPSLLIRSPRQRADSMGAASMLGPSGSRDSNLMLDTTVAAGSGGDACALSPASAAGTVTARTMNAAQATELAVRFEIFVVKVPLLLGVNGLQFRRVGGNPWQYQMLAKRILQELKLPVLWNDRGSWIRMVAFHVWKHSRFTIHDSRFGVSKEAGEIHREWSRSRVGRIVCETRHAAVEPVLGTTFYHTFILTIKNAADDHKQVWQRYISPARIRNETCSISKMHKDYTTLHSVAPDKARIDNLCCDIERCCFTDTIHTQGSFHSSSSAHKTLLSDIPSISPRSLVKYLDSYVVGQTRAKKVLAVGVWNHYLRVASNQRMKHEAEARLEAQQQQQQQQQQQQQLSEEETETQLQRNCTIPDHGVSEAASRSLRLGKYKARSEEAAGPISNPTAMQEKDEAMASLQDSWRSQHQIEQERNAERARDPHGEATRSLMFGRSEREWLVNAGGPSAIIEDDSKVAIQNGSGYAGRIAPKFGDDLKPPEKPEKPEKPMKRVSAQTPAEEASWKLEQRKWSSTTAAQENALAEAASRMHNAVLSDYTRDFHQKDHVVEGTSRIGVFGADEPLYFSSNTMRGSQHAGVRGPGSQSQMSRTDETENKWESSQERAAYAAGIAQERTKRALRLARERLSTSRNSDHPSERASTVDVCHVSDCTPRTHDAGKETASTSNPGIAFLSTQPGSLPFFEKSNILLLGPSGSGKTLLLRTLAQALDVPFVHVDATPLTMAGYVGEDVESIIQRLLVEAGWDVDRAQRGIVCIDEIDKLRKTGLGGGGGGAGGAGGGGGKDVGGEGVQQALLRILEGTTIQIANKAGANAGASAAGTATAASKVPKSYPRQAATGDVNGVETAGGLGPWYNHRRAQADSADAKWNSNSLSSSQTQAASLSVDTSSILFVLSGAFVGIDHVIRNRLDRLSGDPTTLNVSSEDQNEKPHAATLSQCDLLSRLEPSDLEQYGMIPEFIGRVPVSVVLNPLSHQDLIRVMTEPRNSLVDQYTSLFKLNGIELHISRGAIEEVVHRAMGTCSAANSKALVRNSADRGGGGGGARSLRRIMEDVLLDAFYESYGSSSVKYILVDRQSVRDTSEVKLFSRGQKLDFEARVKTEAQDWCTRQQQQKQTRHQGANPAKAIRKDGGALGDMDAARTAMARHKARALIRSRLRRTNRLVDPVIYV

SEQ ID NO: 4875 - protein, 316 aa, Caulobacter crescentus CB15
MIKVRVASRARAAEGIAQLDLVCAEGRDLPAFEAGAHIDLFLGNGLTRQYSLCSDPAERSFYRIAVLRELTSRGGSAYVHEALTEGATLEISPPRNLFALDETAEEHLLFAGGVGVTPILAMAKRLSALGRAFTFHYCARDRSRAAFLNELSTAPFTSAVRLSFDAEPDTRLDLDVALARPKPGRRLYVCGPGGFMTHVIDGALARGWSGDQIRKEHFAAAPLSAGQDQPFELVIASSGQIVTVAADQTAAQALEAAGVFVPVSCEQGVCGTCLTRVIDGQPDHRDAFQTDEERAANDQFTPCCSRARSPRLVLDL

SEQ ID NO: 4876 - protein, 142 aa, Triticum aestivum
AGSGPYPPPPAFRLQAEGLRYHHQLSRHIAQLGRIEAMASRLLAAASSSSASSSPLARLISSRRMAGAADHHGSTKVNMWQEPLNPGNWKEEHFVLASLAMWGAYYIWWIEGICVRNTEPTNRRQAHPASTGHDYPCTPKPL

SEQ ID NO: 4877 - protein, 457 aa, Zea mays
MAASARDSADAAERVVDDHDGWASDGEMGMEMDVEGEFHDRDADRRDGGVDGDDEYLLLTRIRDTSAAEARAGKDIQGIPWERIHIARQDYRKARLEQYKNYENFPQSGELMDKLCKQVEKSSKYYEFQHNTRSVKPSILHFQLRNLLWATSRHDVYFMSNSTVTHWSSLSHKLSEVLDFSGHIAPVEKHPGSLLEGFSGVQVSTLAVNEGLLVAGGFQGELIGKDLEGCNIKFCARTTLSDNAITNAIDIHRSTSGSLRITVSNNDCGVREYDMERFQLLNHYRYNWPVNHTSVSPDKKLLAVVGDDRDALLVDSRNGKVTSTLVGHLDYSFATAWHPDSRTFATGNQDKTCRIWDTRNLSTSLAVLRGNIGAIRCIRYSSDGRFLVFSEPADFVHVYSVAADYKKRQEIDFFGEVSGITLSPDDESLFVGVCDRVYASLLQYRMIHAFDYLDSYV

SEQ ID NO: 4878 - protein, 496 aa, Pseudomonas aeruginosa PAO1
MFELSDWQRRAATQRFIDQALIGGRQRPAASGATFDAIDPASNRLLARVAACDAADVDAAVAAARRAFDEGPWARLAPVERKRVLLRLAELMLAHREELALLDSLNMGKPVMDAWNIDVPGAAHVFAWYAESLDKLYDQVAPTAQQTLATITRVPLGVIGAVVPWNFPLDMAAWKLAPALAAGNSVVLKPAEQSPFSALRLAELALEAGVPEGVLNVVPGLGEQAGKALGLHPEVDALVFTGSTEVGKYFMQYSAQSNLKQVWLECGGKSPNLVFADCRDLDLAAEKAAFGIFFNQGEVCSANSRLLVERSIHDEFVERLLAKARDWQPGDPLDPASRAGAIVDRRQTAGILAAIERAQGEGATLLGGGRQLTINGSDNFIEPTLFGDVRPDMQLAREEIFGPVLAISAFDSEDEAIRLANDSRYGLAASLWSDDLHRAHRVARRLNAGTVSVNTVDALDVAVPFGGGKQSGFGRDLSLHSFDKYTQLKTTWFQLR

SEQ ID NO: 4879 - protein, 352 aa, Triticum aestivum
  misc_feature (186)..(186): Xaa can be any naturally occurring amino acid
  misc_feature (195)..(195): Xaa can be any naturally occurring amino acid
MADEEGCMHAVQLALSSVLPMTLKAAIELGLLEILVGAGGEALSPEEVAAKLPAEANPDAASMVDRMLRVLASHDIVSCMVEEGKDGNLSRRYSPAPVCKWLTPNEDGVSMAPYVVVAQDKVFMEPWCYMKKAVLEGGSPFNMAYGMSWYDYAGTDPRFNRLFNEAMRHHSVIITKKLLELYTGFXGVGTLVDVXGGIGTTIHAITSKYPRIKGINFDLSHVISEAPPYPGLQVEHVGGDMFDKVPSGDAILMKWILLHFRDETCVALLKNCYHALPVNGKVINMECILPAELDATHRVQGCVSADMSMLAYSPDGKERYLTDFERLAKEAGFASVKATYIYTNFWAIEYIK

SEQ ID NO: 4880 - protein, 464 aa, Listeria monocytogenes EGD-e
MLYSKENKESYLEPVFGSSAEDRDIPKYTLGKEPLEPRIAYRLVKDELLDEGSARQNLATFCQTYMEDEATKLMSETLEKNAIDKSEYPRTAELENRCVNIIADLWHAPKDQKFMGTSTIGSSEACMLGGMAMKFAWRKRAEKLGLDIYAKKPNLVISSGYQVCWEKFCVYWDIDMRVVPMDKEHMQLNTDQVLDYVDEYTIGVVGILGITYTGRYDDIYALNEKLEEYNSKTDYKVYIHVDAASGGFFTPFVEPDIIWDFRLKNVISINTSGHKYGLVYPGIGWVLWKDESYLPEELIFKVSYLGGEMPTMQINFSRSASHIIGQYYNFLRYGFEGYRTIHQKTSDVAQYLAHAVEQTGYFDIFNDGSHLPIVCYKLKDDANVNWTLYDLADRLQMRGWQVPAYPLPKSLENIIIQRYVCRADLGFNMAEEFIQDFQASIQELNNAHILFHDTQQSGVHGFTH

SEQ ID NO: 4881 - protein, 460 aa, Pseudomonas aeruginosa PAO1
MTAQLNPQRDTRDYQQLDAAHHIHAFLDQKALNREGPRVMVRGDGLQLWDNDGKRYLDGMSGLWCTNLGYGRQDLAAAASRQLEQLPYYNMFFHTTHPAVVELSEMLFSLLPDHYSHAIYTNSGSEANEVLIRTVRRYWQILGKPQKKIMIGRWNGYHGSTLGSTALGGMKFMHEMGGMLPDFAHIDEPYWYANGGELSPAEFGRRAALQLEEKILELGAENVAAFVAEPFQGAGGMIFPPQSYWPEIQRICRQYDVLLCADEVIGGFGRTGEWFAHEHFGFQPDTLSIAKGLTSGYIPMGGLVLGKRIAEVLVEQGGVFAHGLTYSGHPVAAAVAIANLKALRDEGVVTRVREETGPYLQRCLREVFGDHPLVGEVQGAGFVAALQFAEDKVTRKRFANENDLAWRCRTIGFEEGVIIRSTLGRMIMAPALVAGRAEIDELIDKTRIAVDRTAREIGVL

SEQ ID NO: 4882 - protein, 138 aa, Gibberella zeae PH-1
MSDHEFGGNEDLSLPKATVQKIVSEILPPQAGVAFAKEARDLLIECCVEFITLISSEANEISEKEAKKTIACDHITKALEQLGFTDMVPAVLEAAAEHKEVQKGREKKADKFANSGMSMEELARLQEEQFAAARERHG

SEQ ID NO: 4883 - protein, 153 aa, Glycine max
  misc_feature (143)..(143): Xaa can be any naturally occurring amino acid
ISNNGARDNSEWMRNGDYSPSRFQAQADAVNLICGAKTQSNPENTVGVLTMAGKGVRVLVTPTSDLGKILACMHGLEISGEMNLAAGIQVAQLALKHRQNKKQQQRIIVFAGGPVNHEKKMLEMIGRKLKKNSVALDIVNFGXEEDEGKTEKL

SEQ ID NO: 4884 - protein, 305 aa, Saccharomyces cerevisiae
MSSSSQFKQLEKLGNGTYATVYKGLNKTTGVYVALKEVKLDSEEGTPSTAIREISLMKELKHENIVRLYDVIHTENKLTLVFEFMDNDLKKYMDSRTVANTPRGLELNLVKYFQWQLLQGLAFCHENKILHRDLKPQNLLINKRGQLKLGDFGLARAFGIPVNTFSSEVVTLWYRAPDVLMGSRTYSTSIDIWSCGCILAEMITGKPLFPGTNDEEQLKLIFDIMGTPNESLWPSVTKLPKYNPNIQQRPPRDLRQVLQPHTKEPLDGNLMDFLHGLLQLNPDMRLSAKQALHHPWFAEYYHHAS

SEQ ID NO: 4885 - protein, 125 aa, Triticum aestivum
  misc_feature (34)..(34): Xaa can be any naturally occurring amino acid
  misc_feature (68)..(68): Xaa can be any naturally occurring amino acid
  misc_feature (74)..(74): Xaa can be any naturally occurring amino acid
  misc_feature (96)..(96): Xaa can be any naturally occurring amino acid
  misc_feature (103)..(103): Xaa can be any naturally occurring amino acid
PARRTFQGSPDLKAAREVADYLGTIHHEFHFTVXDGIDAIEEVIYHDETYDVTTIRANTPMFLMARKXIKSLGXVRWCVPGKGSEQLLGRLLYFNXAPNKEGXHKEDCRKGEGLHNTPARNKATS

SEQ ID NO: 4886 - protein, 443 aa, Methylobacter alcaliphilus
MKIFEEIESEVRSYARAFPRVFDRAQGAKIYDHEGNEYLDFLAGAGSLNYGHNHPVFKEKLLEYIQNDGITQGLDLHTRAKGEFLESFNEHILKPRNLDYIVMFTGPTGTNAVEAALKIARKKTGRENIISFTNGWHGQTLGSLSVTGNSTHRGGAGIALHGSTRIPYDGYLGDDFDTTNLLDKMLSDSSSGVDKPAAVIVETVQGEGGINAASMTWLRSLSEICKRHDVLLIIDDIQAGCGRTGTFFSFEEAGIYPDIVTLSKSLSGYGLPLAIVLMKPEIDQWSPGEHNGTFRGNNHAFVTAKAAIDHFWKDDSFAKDVQRKGRYIADRVDVIVAKYGEGNFNSHGRGMFRGINCVSGDLAGQITRRCFQKGLIIETSGADDHVVKFLCPLIITDEELEKGIDILEQAIKEVCDKADTIPEGKDFFEGDYSVSKEVSKAGH

SEQ ID NO: 4887 - protein, 179 aa, Vibrio vulnificus CMCP6
MKYSSIALLLLSSVAASTSYAGDFSLTSHDIMEGQRMAKTFEFTGFGCSGDNLSPQLSWQNAPKGTKSFAITAYDPDAPTGSGWWHWSTIDIPANVSELPRGVDLKKVGATEIRNDYGAKGFGGVCPPEGDGMHRYQFTVWALPEAKLDLDSNSSPALVGFMLNAMALDKATLTATYVR

SEQ ID NO: 4888 - protein, 509 aa, Arabidopsis thaliana
MDAQSVSEKLRSSGLLRTQGLIGGKWLDSYDNKTIKVNNPATGEIIADVACMGTKETNDAIASSYEAFTSWSRLTAGERSKVLRRWYNLLSRSEPLHFTKHRYDLLIAHKEELGQLITLEQGKPLKEAIGEVAYGASFIEYYAEEAKRVYGDIIPPNLSDRRLLVLKQPVGVVGAITPWNFPLAMITRKVGPALASGCTVVVKPSELTPLTALAAAELALQAGVPPGALNVVMGNAPEIGDALLTSPQVRKITFTGSTAVGKKLMAAAAPTVKKVSLELGGNAPSIVFDDADLDVAVKGTLAAKFRNSGQTCVCANRVLVQDGIYDKFAEAFSEAVQKLEVGDGFRDGTTQGPLINDAAVQKVETFVQDAVSKGAKIIIGGKRHSLGMTFYEPTVIRDVSDNMIMSKEEIFGPVAPLIRFKTEEDAIRIANDTIAGLAAYIFTNSVQRSWRVFEALEYGLVGVNEGLISTEVAPFGGVKQSGLGREGSKYGMDEYLEIKYVCLGDMNRH

SEQ ID NO: 4889 - protein, 214 aa, Glycine max
MTGKRNQITTSPVGSPTSGNISDSSSSKEQDRFLPIANVSRIMKRALPANAKISKEAKETVQECVSEFISFITGEASDKCQREKRKTINGDDLLWAMTTLGFENYVGPLKFYLNNYRETEGEKSSMAKQEEHSPTHQTNIDGVVVEINKLHHFCGSNQQSCRLQHFQWVVASILWGLKWLLQRASLRLEGSMAIKKVPLLKVRSVVIMMQVAIE

SEQ ID NO: 4890 - protein, 495 aa, Pisum sativum
MALQVLTLPSWVTLFTTFAILLLFSRRLRRRQYNLPPGPKPWPIIGNFNLIGTLPHQSLHGLTQKYGPIMHLWFGSKRVVVGSTVEMAKAFLKTHDATLAGRPKFSAGKYTTYNYSDITWSQYGPYWRQARRMCLLELFSAKRLESYEYIRKQELHVFLHELFDSRNKTILLKDHLSSLSLNVISRMVLGRKYLEKVENSIISPDEFKNMLDELFLLNGILNIGDFIPWIHFLDFQGYVKRMKVLSKKFDGFMEHVLEEHIERRKGVKDYVAKDMVDVLLQLAEDPDLEVKLERHGVKAFTQDLIAGGTESSAVTVEWAISELIRKPEIFKKATEELDRVIGRERWVEEKDIANLPYVYAIAKETMRLHPVAPMLVPREAREDCNINGYDIPKGSLILVNTWTIARDSNVWDNPNEFMPERFLGKDIDVKGHDYELLPFGAGRRMCPGYPLGIKVIQSSLANLLHGFNWRLSDDVKKEDLNMEEIFGLSTPKKIH

SEQ ID NO: 4891 - protein, 357 aa, Zea mays
  misc_feature (108)..(108): Xaa can be any naturally occurring amino acid
  misc_feature (225)..(225): Xaa can be any naturally occurring amino acid
MDKPVAPGIIKEELLEQQPPTQDGVGGGGDAPRPMEGLHEVGPPPFLTKTFDLVEDPATDAVLSWSRAGNSFIVWDPHVFADGLLPRLFKHSNFSSFVRQLNTYGFRXVDPDRWEFANEGFLRGQRHLLKMIKRRKPPSAVAPLRQQRAPASCLEVGEFGFEEEIDRLKRDKNILITEVVKLRQEQQSTKDHVRAMEERLRVAEQKQVQMMGFLARAMRNPEFFXQLAQQQDKRKELEDTISKKRRRPIDNTPFYSDGESEQLDSQLKMFESGVLNGLNEPELENLAVNIQELGKGSIDDGNLTQVSDQSELNDDFWAELLVEDFGDKAGQPELEGRTEDVNDLAQQLGYLSSSSPK

SEQ ID NO: 4892 - protein, 217 aa, Shigella flexneri
LDLYICLRPVRYYQGTPSPVKHPELTDMVIFRENSEDIYAGIEWKADSADAEKVIKFLREEMGVKKIRFPEHCGIGIKPCSEEGTKRLVRAAIEYAIANDRDSVTLVHKGNIMKFTEGAFKDWGYQLAREEFGGELIDGGPWLKVKNPNTGKEIVIKDVIADAFLQQILLRPAEYDVIACMNLNGDYISDALAAQVGGIGIAPGANIGDECALFEAT

SEQ ID NO: 4893 - protein, 356 aa, Anabaena variabilis ATCC 29413
METNVKAQVFRGVNQLSYEEIPLPTLEPDEVLVQVQVVGLCQSDIKKIRYPLYEPPRIFGHETAGTIAAVGSQVKGWQVGQRVAVMHHIPCMRCAYCMNDNFSMCDVYKNISTTAGFNASGGGFAEYVKVPGHIVENGGLIPIPDEISFEEASFVEPTNCCLKAVKKAQIAPGQTVLVTGAGPIGLMFVMLVKYFGAKAIATDLLPSRIEKALNVGAEAAFDARDPDLPAKIHALTNGLGVDVTLLAVPSEKAFFQALDCTRKGGKILFFAEFPDELEIPINPNILYRREIDLMGSYSSSYRLQNLSADIVFNRRIDVQALISDRYPLKDLSAAVDQAIAPTPETYKILIYPKIGD

SEQ ID NO: 4894 - protein, 76 aa, Glycine max
MVGIGVPICVQCGNTSNPCRCKVVGPTLGFLAFAAAAVVEWPVGALVYCFRHSKGRKIMGHPATVIYPSVTNAIPI

SEQ ID NO: 4895 - protein, 357 aa, Zea mays
MDKPVAPGIIKEELLEQQPPTQDGVGGGGDAPRPMEGLHEVGPPPFLTKTFDLVEDPATDAVLSWSRAGNSFIVWDPHVFADGLLPRLFKHSNFSSFVRQLNTYGFRKVDPDRWEFANEGFLRGQRHLLKMIKRRKPPSAVAPLRQQRAPASCLEVGEFGFEEEIDRLKRDKNILITEVVKLRQEQQSTKDHVRAMEERLRVAEQKQVQMMGFLARAMRNPEFFQQLAQQQDKRKELEDTISKKRRRPIDNTPFYSDGESEQLDSQLKMFESGVLNGLNEPELENLAVNIQELGKGSIDDGNLTQVSDQSELNDDFWAELLVEDFGDKAGQPELEGRTEDVNDLAQQLGYLSSSSPK

SEQ ID NO: 4896 - protein, 336 aa, Glycine max
MATRRLSLLLSRSLSSTSFQAASLLHSLGRNSGKWGNFNRFSTAAAVEDLITPQVPITYTKHLINGQFVDAASGKTFPTYDPRTGEVIAQVAEGDAEDINRAVSAARKAFDEGPWPKLTAYERCKIILRFADLVEKHGDELAALETWNNGKPYEQSATAELPTFVRLFRYYAGWADKIHGLTVPADGNYHVETLHEPIGVAGQIIPWNFPLLMFAWKVGPALACGNTVILKTAEQTPLTALYVAKLFHEAGLPPGVLNVVSGYGPTAGAALASHMDVDKLAFTGSTETGKVVLGLAAQSNLKPVTLELGGKSPFIVGEDADGGEICGRGRLELLFG

SEQ ID NO: 4897 - protein, 501 aa, Aspergillus nidulans FGSC A4
MATAVSLTAPNGHKYEQPIGLFINNEFVASKSGEKFATVNPSDEEEITQVYAAGEEDIDIAVKAARKALKDPSWKLLTATDRGNLMLKLADLIDQNKETLAVIETWDNGKPYQVSLNDDLSEVVNTIRYCAGWADKIHGQTISTTPAKFAYTLRQPIGVVGQIIPWNFPLAMAAWKLGPALACGNTVVLKPAEQTPLSILYLAKFIKEAGFPPGVVNIVNGLGRVAGSALVTHPGVDKVAFTGSTMTGKEIMKMAAGTMKNVTLETGGKSPLLVFDDADLEQAAKWAHIGIMYNQGQVCTATSRILVHEKVHDEFIRLFREAVATTSKVGDPFSDDTFQGPQVTKAQYERVLSYIESGKQEGATLVDGGVPYKNVKDGKGFFIAPTIFTNVKDNMRIYREEVFGPFVAIARFSTEEEAIDRANDTTYGLGAAVFTKDIERAHRVASEIEAGMVWINSSNDSDFRVPFGGVKQSGIGRELGEAGLEAYTQIKAVHVNMGTKL

SEQ ID NO: 4898 - protein, 401 aa, Ralstonia solanacearum
MLSEQSKPLIDASVPVLREHGLTITQTFYRNMFASHPELTNLFNMGNQANGSQQQSLASAVFAYAANHGNNAALAPVVGRIVHKHAAVGIRPSHYPIVGRHLLGAIAEVLGDAATPELLAAWDEAYWLLAAELIAAEARLYAHTQSGPDHRQPVRIIERHAQAEDVVSFTLEAVGGAKLADFLPGQYISVQVELAPGVLQQRQYSLSDAPNGRTWRISVKRDAGGSGRPAGTVSNWLHDNARPGEVLLVSQPYGDFVPQLATDSPIVLMSAGVGITPMIATLNALARRNTARKVVFSHAGQAASHVAHADDLERAAQVLPDFAAHVFLESGEAADFAARPARPGRMTVETFLDDGVADADFYLCGPLPFMQAQRAALLAGGVPAGRIHREVFGPDLLDDIL

SEQ ID NO: 4899 - protein, 214 aa, Shigella boydii
YICLRPVRYYQGTPSPVKHPELTDMVIFRENSEDIYAGIEWKADSADAEKVIKFLREEMGVKKIRFPEHCGIGIKPCSEEGTKRLVRAAIEYAIANDRDSVTLVHKGNIMKFTEGAFKDWGYQLAREEFGGELIDGGPWLKVKNPNTGKEIVIKDVIADAFLQQILLRPAEYDVIACMNLNGDYISDALAAQVGGIGIAPGANIGDECALFEAT

SEQ ID NO: 4900 - protein, 374 aa, Dechloromonas aromatica RCB
MGPSENGTMQAARVHGAGGQFEMDSIERPRIKRPTDVIINVKASGVVPNLRNVMSNYGERAYLTVPELPAIYGLDTAGVIAEIGSGVTGLTVGDRVYLNPGRSCGTCHACRCGEPINCSAYTFQGYFGFGPASRQIYREYPYGGFCEFATGPANGLIKLPDTISFEQAARFGYLGTAYSGLRKADVRAGRTVLISGASGTLGLGAVQIARAMGATRILCVARNADLLERVRLLDPQRIRTFSYGTGDLATWARDETDGIGVDAVLDAIGPGASHQVTLDCIAALRRGGKLVEVGAMSDPMPVNLHQMMCAQVSLIGSLWFSVAEGQELAAMADAGTLDLSIFEHHRFPLERVNQALELAEKRIGGFMNVVITQE

SEQ ID NO: 4901 - protein, 389 aa, Bacillus sp. KSM-K16
MLQARKQREAAIALHKHGKMEMKSTVPLINEYDMSLAYTPGVAEPCKRIAENKDEVYDHTIKGNLVAIVTDGSAVLGLGNIGPEAAMPVMEGKAVLFKQFAGVDAIPLCLETQDVDAIVATIKAVAPTFGGINLEDIAAPRCFEIEQRLQEELNIPVFHDDQHGTAIVVLAALINALKVVDKGLNSARIVINGAGAAGLSIATLLLEAGCSDITLVSLEGIVQENEPWLNQRQKELAAQTNRRHLTGKLDQAIEGADVFIGVSGPRALTGEQVKRMNSDAVVFALANPTPEIYPEEASAAGAAVVGTGRSDFPNQINNVLAFPGIFRGALDARASTITTTMKLAAAKAIANIVGQDLHAGHILPSPFDERIAPAVAKAVADEAKEKVCS

SEQ ID NO: 4902 - protein, 475 aa, Saccharomyces kluyveri
MTSILSSTYRSPVARNLLKSSKTRGGLFLAARNYSNGEKTLKERFAEIFPSKAEEIKKLKKEHGKTVIGEVLLEQAYGGMRGIKGLVWEGSVLDPEEGIRFRGRTIPEIQKELPKAADGSEPLPEAIFWLLLTGEIPTETQVKALSADLASRSELPEHVVDLLDRLPKDLHPMAQFSIAVTALESESKLPKAYAQGVAKKDYWNYTFEDSLDLLGKLPVIASKIYRNVFKDGKLASVDPNADYGKNLANLLGFQNKDFVDLMRLYLTIHSDHEGGNVSAHTTHLVGSALSSPYLSLAAGLNGLAGPFDGRANQEVLEWLFKLREEVKGDYSKETIEKYLWDTLNSGRVVPGYGHAVLRKTDPRYTAQREFALKHFPDYELFKLVSTIYEVAPGVLTKQGKTKNPWPNVDSHSGVLLQYYGLTEASFYTVLFGVARAFGVLPQLIIDRAVGQPIERPKSFSTEKYIELVNSIKAKN

SEQ ID NO: 4903 - protein, 225 aa, Listeria monocytogenes str. 4b F2365
MNEINHTSERANTEKRTEKQIIMQKILNWFVFSLLLASIGAAIGSKLSPELYLPLVVLEVALLITAMVVRRSKTINKVVGYPVVLAFAFVTGLTLGPTLTYYFGAGQGAAVLMAFVTATVTFTTLAFIGAKMKKDLSFLSSALFAAIIILVIFSFVGVFLPLGSMLSTIISAGGTIIFSLYILYDFNQIMKRDVELADVPMLALNLYLDFLNLFMFLLRLFTGRD

SEQ ID NO: 4904 - protein, 147 aa, Bdellovibrio bacteriovorus HD100
MPMRSLSPWGGRRLPSSDLFSQFQDFINEFDRGESSALTRAGFDFSPSVDVEEKDNAYLVSADLPGMKKDEIKVELNDNILTISGERTRESKSEGGYSERSYGRFQRSFTLPVQVNSEKIEAHFEDGVLQITVPKAEGARSHSIKIM

SEQ ID NO: 4905 - protein, 330 aa, Glycine max
MGSTGETQITPTHVSDEEANLFAMQLASASVLPMILKSALELDLLEIIAKAGPGVHLSPTDISSQLPTQNPDAPVMLDRILRLLACYNILSSRFCITMTRLCSCRYYLKDAVLEGGIPFNKAYGMTAFEYHGTDPRFNKVFNKGMADHSTITMKKILETYTGFEGLKSLVDVGGGTGAVVNMIVSKYPTIKGINFDLPHVIEDAPSYPGVEHVGGDMFVSVPKADAIFMKWICHDWSDEHCLKFLKNCYEALPDNGKVIVAECILPVAPDSSLATKGVVHIDVIMLAHNPGGKERTEKEFEALAKGSGFQGFRVLCCAFNTYVMEFLKKI

SEQ ID NO: 4906 - protein, 227 aa, Brassica napus
  misc_feature (198)..(198): Xaa can be any naturally occurring amino acid
MWIGIAVSHCLRELEMLYESDPAKPIVLPSNLYACKSLVVLKLDGDILLDVPQMVSLPSLKTLKLQSVRYSSDKTLPLLLSKCPLLEDLVLDLCEDDTPRHLIVAVPSLQSLSLSILYNNHIIDGFVLTTPALKYFKLMDYNEHYCLIENMPNLIEAYLDVDCPDIKDLIESITSVKRLSICSKAMLDEGFVFNQLEXLEVCLCMEHSSNQLFRLLKASSNLKRLDI

SEQ ID NO: 4907 - protein, 244 aa, Triticum aestivum
MPSRPAPLVHRLRLLRSAVVSPSSALLPCSRPRLAIPFAQPPLRAPAFAAASSPLLRPVGARFSLFSSMAAAASSASSIHDFTVKDASGKDVDLSTYKGKDDLIVKLTKIIVAYNYCSGLTNSNYTELAQLYEKYKDQGFEILAFPCNQFGGQEPPRVREIVQFACTRFKAEYPIFDKVDVNGDNVAPVYKFLKSRKGSLFGDNIKWNFSKFLVDKEGHVVDRYAPTTSPLSIEKDIKKLLASS

SEQ ID NO: 4908 - protein, 167 aa, Limonium latifolium
GYDGFEGVKTLVDVGGSSGDCLRMIINKYKDIPKAINFDLPEVVAKAPKIPGITHVGGNTFESVPSGDAIFVKWVLTCFTDEEVITLMRNCNKALPVGGKLICSEPTLPENSDESHRTRALLVADIFIMTTYRAKGKHRTEEEYRQLGLLAGFPKFRVIHVDYFFPV

SEQ ID NO: 4909 - protein, 233 aa, Zea mays
  misc_feature (157)..(157): Xaa can be any naturally occurring amino acid
MSSLYDVSCFAAGLAGNVFALALFLSPVPTFKRVLKAKSTEQFDGLPYLLSLLNCCICLWYGLPWVSDGGRALVATVNCTGALFQLAYISLFIFYADSRTTRLKVAGLLVLVVFAFALIAHASIAFFDQPLRQLFVGSVSMASLVSMFASPLAVMGXVVVRTECVEFMPFYLSLSTFLMSASFAVYGLLLRDFFIYFPNGARSHPGSQCSWLYAYYQPEMGKQRLVSTVACLI

SEQ ID NO: 4910 - protein, 409 aa, Vibrio parahaemolyticus RIMD 2210633
MELATTVTELRYALDTFFFLISGALVMWMAAGFAMLEAGLVRSKNTTEILTKNFCLYAIACTTYLVIGYNIMYVDNGEGGWLPSFGGLIGTQGEGADHSLESDFFFQVVFVATAMSVVSGAVAERMKLWSFLLFSAVLTAFIYPMEGYWTWGGGFLSEAGFSDFAGSGIVHMAGASAALAGVLLLGARKGKYGKNGEIYPIPGSNMPLATLGTFILWFGWFGFNGGSQLMVSDFENATAVGQIFLNTNAAAAAGSIAALFVCKTTWGKADLTMILNGALAGLVAITADPLSPSPLYAVAIGAVSGALVVFSIIGLDKLKIDDPVGAISVHGVCGFFGLMVVPLSNGEATFGAQLLGAAVIFAWVFGASLVVWAILKATVGIRVTEEEEMEGMDMHDCGVGAYPEFVTVK

SEQ ID NO: 4911 - protein, 430 aa, Triticum aestivum
  misc_feature (3)..(3): Xaa can be any naturally occurring amino acid
DSXAISESDGEDDFHSVQDDAFSPNGFENEAALGMRDANGGSFNGAEHPHRKPRSSELPKGHLENGARPSASHEDGASVSGGASPSSGGILDNCGLLPNNCLPCMASAVGVNEKKRALSTSPTHSMKMPSLKLSFKKKSGEANPSSTLLSTKDFLERPIAGSQVPACLLEKKVLNSWSHIDPGTFRVRGSNYLRDKNKELAQNCAAYYPFGVDVYLSPQKLHHISRFVKLPDIQTSSKLPPLLVVNVQVPLYPASLFQNETDGEGMSFVLYFRLSEGYSKELSPLFIENIRRLVDDDVEKIKGFPMETSISFRERLKILGRVANLEDLPLSAAERKLMHAYNEKPVLSRPQHQFFLGDNYFEVDIDMHRFGYISRKGFETFLDRLKICMLDVGLTIQGNKPEELPEQVLCCVRLNGIDYAKYQPLMTNGA

SEQ ID NO: 4912 - protein, 116 aa, Zea mays
SWRRTNSPGRSSSGSRIGGRPWSSAERAPQRWPKGSSVRTLRRRRPSLRPRAGSARRRSWFLRASPCRLVVLPLVLPPLPPPPPLLLLVPVCLLLLLAALATFVPSDVRSMPSSNL

SEQ ID NO: 4913 - protein, 61 aa, Zea mays
  misc_feature (50)..(51): Xaa can be any naturally occurring amino acid
GKLATMFKIIKEMLPPDVRVARDAQDLLVECCVEFINLLSSESNEVCSRXXKKTIAPEHVI

SEQ ID NO: 4914 - protein, 87 aa, Triticum aestivum
  misc_feature (35)..(35): Xaa can be any naturally occurring amino acid
  misc_feature (49)..(50): Xaa can be any naturally occurring amino acid
PPPLKPQPGPPPGSGPQTTGLPTRTQHGFATLPLXNGSPKDDLKLPTNXXIRTQLKDGFPEGKDLALPVMSAMGEEQICAVKDVGPR

SEQ ID NO: 4915 - protein, 193 aa, Streptococcus gordonii
INDYSYEEVERIVRKAFDIARGRRKRVTSIDKQNVLATSKLWRRVADEVAKDYPDVTLEHQLVDSAAMLMITNPAKFDVVVTENLFGDILSDESSVLSGTLGVMPSASHSADGPSLYEPIHGSAPDIAGQCIANPISMILSVAMMLRDSFAELEAAEAIEAAVEKTLAQGILTRDLGGQVGTAQMTESIINNL

SEQ ID NO: 4916 - protein, 573 aa, Glycine max
MGRSSGFIAMQASLSSGQVPFNLHGPQGVLSHLKYLLETKGSAVVCAAEGAGHNLLQKTNATDASGNVVFGDIGVYIQQETKKYFKEIGVHADVKYIDPTYMIRAIRANASDGILYTGLGQNHLTDIFPNAPPIPSTFCLKMRTPIDRDFPGHYSLDEEWHGYINNNDRVLLKTIYYSSPTSAGAECIDPDCTWVEQWVHRAGPREKIYYKPEEVKAAIVTCGGLCPGLNDVIRQQIVITLEIYGVKNIVGIPFGYRGFSDKELTEVPLSRKVVQNIHLSGGSLLGVSRGGPGVSDIVDSLEKRGINMLFVLGGNGTHAGANAIHHECRKRRLKVSVIGVPKTIDNDILLMDKTFGFDTAVEEAQRAINSAYIEAHSAYHGIGVVKLMGRSSGFIAMQASLFSGQVDICLIPEVPFNLHGPHGVLSHLKYLLETKGSAVVCVAEGAGQNLLQKTNATDASGNVVFGDIGVYIQQETKKYFKEIGVHADVKYIDPTYMIRAIRANASDGILCTVLGQNAVHGAFAGYSGITVGLCNTHYVYFPIPEVISHPRLVDPNSRMWHRCLTSTGQPDFI

SEQ ID NO: 4917 - protein, 97 aa, Zea mays
MEDEEHEVYGQEIPVDGEDVDMAAGDDATKLQELDDMKRRLKEMEEEAAALREMQAKVAKEMQGVDPNATTSENKEEMDSRSVFIGNVSFISSLYVN

SEQ ID NO: 4918 - protein, 216 aa, Shigella boydii
YICLRPVRYYQGTPSPVKHPELTDMVIFRENSEDIYAGIEWKADSADAEKVIKFLREEMGVKKIRFPEHCGIGIKPCSEEGTKRLVRAAIEYAIANDRDSVTLVHKGNIMKFTEGAFKDWGYQLAREEFGGELIDGGPWLKVKNPNTGKEIVIKDVIADAFLQQILLRPAEYDVIACMNLNGDYISDALAAQVGGIGIAPGANIGDECALFEATHG

SEQ ID NO: 4919 - protein, 490 aa, Comamonas testosteroni
MKQYRNYINGEWVESARRFDDVNPVDGTVVAQVHEADREAVDSAIRAGHAAVRGAWGRTTVAERAAILCRIADEIDRRYDDFLAAEIADTGKPVAMASTIDIPRGAANFRVFADILKTAPLDTFQTDLPDGARALNYAVRKPLGVVGVISPWNLPLLLLTWKIAPALACGNAVVAKPSEETPGTATLLAEVMHTVGVPPGVFNLVHGFGPDSAGEFITTNDDIDAITFTGESRTGSAIMRAAATHVKPVSFELGGKNAAIIFADCDFEKMIDGMMRAVFLHSGQVCLCAERVYVERPIYNRFLDAFVERVKALKLGWPQDGTTGMGPLISAEHRDKVLSYFKLAREEGAQVLVGGGVPKFGDARDAGFWVEPTIITGLPQTARCIKEEVFGPICHVSPFDTEAEAIALANDTKYGLSATTWTGNLNRGHRVSEAMRVGLSWVNSWFLRDLRTPFGGVGLSGIGREGGMHSLNFYSELTNVCVRIDQEAVS

SEQ ID NO: 4920 - protein, 221 aa, Shigella boydii
QELDLYICLRPVRYYQGTPSPVKHPELTDMVIFRENSEDIYAGIEWKADSADAEKVIKFLREEMGVKKIRFPEHCGIGIKPCSEEGTKRLVRAAIEYAIANDRDSVTLVHKGNIMKFTEGAFKDWGYQLAREEFGGELIDGGPWLKVKNPNTGKEIVIKDVIADAFLQQILLRPAEYDVIACMNLNGDYISDALAAQVGGIGIAPGANIGDECALFEATHG

SEQ ID NO: 4921 - protein, 298 aa, Arabidopsis thaliana
MGKEVMVSDYGDDDGEDAGGGDEYRIPEWEIGLPNGDDLTPLSQYLVPSILALAFSMIPERSRTIHDVNRASQITLSSLRSSTNASSVMEEVVDRVESSVPGSDPKKQKKSDGGEAAAVEDSTAEEGDSGPEDASGKTSKRPRLVWTPQLHKRFVDVVAHLGIKNAVPKTIMQLMNVEGLTRENVASHLQKYRLYLKRIQGLTTEEDPYSSSDQLFSSTPVPPQSFQDGGGSNGKLGVPVPVPSMVPIPGYGNQMGMQGYYQQYSNHGNESNQYMMQQNKFGTMVTYPSVGGGDVNDK

SEQ ID NO: 4922 - protein, 490 aa, Bordetella parapertussis 12822
MTISPLQLLNDPSLLRTDALVDGRWIAASQRFAVHDPATGRKLADVANLDAAHAREAIAAAQAAWPAWRARTVKERSAILRKWFDLLLANQDDLARLLTAEQGKPFGEARGEIAYAASFVEWFAEEAKRINGETLPAFDNNRRLLVLREPIGVCAAITPWNFPLAMITRKVAPALAAGCPVIVKPAEHTPLTALAAAQLAVRAGVPAGVLGVLPADGANSIAIGKELCANDAVRHLSFTGSTEVGRILMAQSAATVKKLSLELGGNAPFIVFDDADLDSAVEGAMQSKYRNAGQTCVCANRIYVQDGVYDAFVEKLADAVRALKVGPGFDEGVTQGPLIEPEAVDKIERHIEDAVSKGGRVVAGGRRLGGLFFEPTVLVDATSQMLCAREETFGPLAPVFRFHADEDAIAAANATEFGLASYLYSRDVGRIFRAAEALESGMVGVNVGILATEHVPFGGVKQSGLGREGGRHGIDDYVEIKYMCVGDILK

SEQ ID NO: 4923 - protein, 208 aa, Shigella boydii
DLYICLRPVRYYQGTPSPVKHPELTDMVIFRENSEDIYAGIEWKADSADAEKVIKFLREEMGVKKIRFPEHCGIGIKPCSEEGTKRLVRAAIEYAIANDRDSVTLVHKGNIMKFTEGAFKDWGYQLAREEFGGELIDGGPWLKVKNPNTGKEIVIKDVIADAFLQQILLRPAEYDVIACMNLNGDYISDALAAQVGGIGIAPGANIGD

SEQ ID NO: 4924 - protein, 310 aa, Alicyclobacillus acidocaldarius
MPLDPVIQQVLDQLNRMPAPDYKHLSAQQFRSQQSLFPPVKKEPVAEVREFDMDLPGRTLKVRMYRPEGVEPPYPALVYYHGGGWVVGDLETHDPVCRVLAKDGRAVVFSVDYRLAPEHKFPAAVEDAYDALQWIAERAADFHLDPARIAVGGDSAGGNLAAVTSILAKERGGPALAFQLLIYPSTGYDPAHPPASIEENAEGYLLTGGMSLWFLDQYLNSLEELTHPWFSPVLYPDLSGLPPAYIATAQYDPLRDVGKLYAEALNKAGVKVEIENFEDLIHGFAQFYSLSPGATKALVRIAEKLRDALA

SEQ ID NO: 4925 - protein, 402 aa, Oryza sativa (japonica cultivar-group)
MNLNRVHVDSVSGTAWVKSGATLGELYYAIGQLNRSLAFSAGSCSTVGMGGFVSGGGFGLISRKFALAADNVLDAILMDPNGNALNRGSMGDDVFWAIRGGGGGSWGVVYAWKLQLVHVPHSITVFSLNRTGPLEQTAKLMHKWQFVGPHLPDEFYLSIHILTGTSNGNVSMSFTGQVIGPKQYAMLVLHHTFPELGIVESDLSEMSWIESTAKFARLNSTADLTNRRLGIKYYSKSKSDYVHSPISMQDTIKIIEYLSNGPQGFIQLNPYGGAMARIGSSELPFPYRAGYLYSIEYNVSWKASDNDRADEFIRWLRSFYAYMAPHVSKNPLAAYVNYLDLDLGTNTWRNATDGTSNNSVIHAKSWGIRYFSKNFDRLVRAKTMIDPENVFNNAQSIPPLQY

SEQ ID NO: 4926 - protein, 236 aa, Anabaena variabilis ATCC 29413
MTVTADPVTLMKQEVGKAAAALVKSGSIVGLGTGSTTAYTIQYLGDRLKSGELTDIVGIPTSFQSEVLSKQYGVPLTTLDAVDHIDIAIDGADEVDPQKNLIKGGGAAHTREKVVDYLANQFIVVVDSGKLVDRLGSVFAVPVEVIPMAITPVTNAIKQLGGKPELRMGVKKAGPVITDQGNFVLDVRFDSIDDPVNLEKILNNIPGVLENGIFVNCADIVLVGEVKDGQPLVRQL

SEQ ID NO: 4927 - protein, 165 aa, Solanum tuberosum
KEVVEAMACMNKRPLIMALSNPTSQAECTAEEAYTWSEGRVVFASGSPFPSFEYDGKLNIPGQANNCYIFPGFGFGLVMSGTIRVHDDMLLAASEALAAQVTEEHYAKGMIYPPFADIRKISAHIAASVAAKAYELGVATRLPRPADLVKYAESCMYTPNYRSYR

SEQ ID NO: 4928 - protein, 234 aa, Limonium latifolium
ETLLKAWPFLHTAILDASTEPFARVNGEPAYQYYGKNDELNKNMQYAMSGVSVPYMKALLGSGYDGFEGVKTLVDVGGSSGDCLRMIINKYKDIPKAINFDLPEVVAKAPKIPGITHVGGNMFESVPSGDAIFVKWVLTCFTDEEVITLMRNCNKALPVGGKLICSEPTLPENSDESHRTRALLVADIFIMTTYRAKGKHRTEEEYRQLGLLAGFPKFRVIHVDYFFPVVEFQK

SEQ ID NO: 4929 - protein, 402 aa, Archaeoglobus fulgidus DSM 4304
MRALVVELRLWKAALSLLLGKVTKSVYYSPLSLLKYYKNYPEPALPDEDWVKVKTRLCGICGSDLRIITLQESFYLAPLTSFPFIPGHEVVGEVVEVGKEADAQEGERVVINTALSCRVRGFDDCDACRKGHFAACHNVDRGRISPGIFTGTCRDTGGGWAEYFVAHESQLVRVPEGIRDENAVFAEPLTIGIHSALRSFPDDGEVVAIVGCGVIGICTIIALRHLGFRGEIIGIDISERQAELARKFGADGVVTENPVERIAEMTGGRVYRPPRDKPMFIGGGVDVAFECTGIPQTVDTALRITKPLGRVVIAGTVAKMGVDWAPVFAKELSVLGTFGCGIEEVNGEKRDAFDIAFEILKKVDLSSLLTHRFTIEDYKKALRAAIEKGKSGAVKVAFDFTL

SEQ ID NO: 4930 - protein, 353 aa, Neurospora crassa
MADNQIPSSVADAVLVKSIEMPEGSQKVEELDFNKFKGRPITVDDLLQGMKHMGFQASSMCEAVRIINEMRAYRDPTTSEKTTIFLGYTSNLISSGLRGTLRYLVQHKHVSAIVTTAGGIEEDFIKCLGDTYMSSFSAVGADLRSKGLNRIGNLVVPNSNYCAFEDWVVPILDKMLEEQEASRGTENEINWTPSKVIHRLGKEINDERSVYYWAWKNDIPVFCPALTDGSLGDMLYFHTFKASPKQLRIDIVEDIRKINTIAVRAKRAGMIILGGGIVKHHIANACLMRNGAESAVYINTAQEFDGSDAGARPDEAVSWGKIKVGADAVKVYMEATAAFPFIVANTFAKEDGL

SEQ ID NO: 4931 - protein, 206 aa, Limonium latifolium
RAYQYYGKNDELNKNMQYAMSGVSVPYMKALLGSGYDGFEGVKTLVDVGGSSGDCLRMIINKYKDIPKAINFDLPEVVAKAPKIPGITHVGGNMFESVPSGDAIFVKWVLTCFTDEEVITLMRNCNKALPVGGKLICSEPTLPENSDESHRTRALLVADIFIMTTYRAKGKHRTEEEYRQLGLLAGFPKFRVIHVDYFFPVVEFQK

SEQ ID NO: 4932 - protein, 164 aa, Glycine max
  misc_feature (67)..(67): Xaa can be any naturally occurring amino acid
  misc_feature (85)..(85): Xaa can be any naturally occurring amino acid
ASSMISSPAVTTVNRAGAGMVAPFTGLKSMAGFPTRKTNDGITSIASNGGTVHCVQVWPPFGKKKFXTLSYLPDLNDAQLANDVXYLLRKGWIPCLESDLDHGFMYREHNRSPSYYDGRYWTMWNLPMFGCADASHVSNELQDVYTAYPLGSIPFTLVDDARQI

SEQ ID NO: 4933 - protein, 188 aa, Limonium latifolium
HGTTRSRHGSSSSSSPTANGFEGVKTLVDVGGSSGDCLRMIINKYKDIPKAINFDLPEVVAKAPKIPGITHVGGNMFESVPSGDAIFVKWVLTCFTDEEVITLMRNCNKALPVGGKLICSEPTLPENSDESHRTRALLVADIFIMTTYRAKGKHRTEEEYRQLGLLAGFPKFRVIHVDYFFPVVEFQK

SEQ ID NO: 4934 - protein, 397 aa, Xylella fastidiosa Temecula1
MSASFSPHTITLIKSTVPLLAEHGTTIIEAMYHRLFEDPQIEALFNQANQKNGTQIHALAGAILAYARNIDNPGVLASAIERISQKHVGYAIHPEHYPHVATALLGAIKQVLGDVATSEVLEAWGEAYWFIANLLKDREAVIREGIMTKNGGWIHWRRFVISKRIPESETITSFMLHPEDGGPVVPHQAGQYLTFRFDAAGMPGMKRNYSISCGPNSDHYRITVKREHGTGASAFLHDQAKVGTIIECTPPVGDFFLPSVIERPIVLLSGGVGLTPMVSMMEQIAEAYPDAQVWYVHGTQNRETHAMDAHIRALVSRHKHMKATTFYTQRSEADDAEAGFITIDWLRANTPFQKADFYLCGPRPFLRTFVRDLIGAGVPAAQVHYEFFGPMDEEMAA

SEQ ID NO: 4935 - protein, 375 aa, Limonium latifolium
MANHSSAAAMVVDETSEARNNARLKIIELANLISVPMSLTAIVRLKVPEAIWSNGSNTPVSAAEILSRLPDAPATADAENLQRLLRVLTSFGVFSEHLDTTSSSSSSTSERRYCLTEVGQTLVSFDESCPSHGAYVLQHHQETLLKAWPFLHTAILDASTEPFARVNGEPAYQYYGKNDELNKNMQYAMSGVSVPYMKALLGSGYDGFEGVKTLVDVGGSSGDCLRMIINKYKDIPKAINFDLPEVVAKAPKIPGITHVGGNMFESVPSGDAIFVKWVLTCFTDEEVITLMRNCNKALPVGGKLICSEPTLPENSDESHRTRALLVADIFIMTTYRAKGKHRTEEEYRQLGLLAGFPKFRVIHVDYFFPVVEFQK

SEQ ID NO: 4936 - protein, 188 aa, Brassica rapa
LDNPAPFVSPFQFEISYECLTSLQDDLEWKLVYVGSAEDETYDQTLESVLVGPVNVGNYRFVLQADPPDPSKIREEDIIGVTVLLLTCSYMGQEFLRVGYYVNNDYEDEQLREEPPTKVLLDKVQRNILSDKPRVTKFPINFHPEDEQTPAAADPPPPTEQSDDQQQADDNCDEAQVLPEQPPIPHES

SEQ ID NO: 4937 - protein, 506 aa, Gibberella zeae PH-1
MINSFSLFAHITPIIRSSLHSRYSVISSRKAMSSLAAAPYRHVMMPFSPAQDAQVHGNSALTKLTDAIPDLKIYTRSSPHYESLRGVYNKLITAQPLAICRPTSVAQVQAIVKTVSGLGIPLGVRGGGHDVFGRGCIADSVTIDMRELDTQELSQDKKTVKVGGGITSKNLVGFLGSHNLCTSNGFAGEAGWTSWASWGGYGPLGDYVGLGVDNIVGAKIVTASGDVVDAKGDSELLWALRGGGGNFGVIAETDVRVYPMSTIQAGFIVYPWPETADVLLRLQALLDSGVPDKLCLQAGFTKGEWGLGMAITYIWPEAETIGPESEEWLQKLKGLGTCIVDTVAETTFEAFQASISSAISNPVNVTSRHISISKFTSDTLNQLIGACESMPAEADCSITCTILHGKAAQANVLSAFGTRRPHIMLHINAVTEEAAHEHVAIAWADRLVDGVEATGDSIGSTYVSFMESDKDPKGCYGENWERLKAVKKEVDPNDVFRFVHGRIPAA

SEQ ID NO: 4938 - protein, 78 aa, Glycine max
MAFWTLIKGLLLFANAFAILNEDRFLAPRGWTLEKLHQTGRRNSPKGQIIGLIYACQYMRLPLLLINLVVIAMKIIAG

SEQ ID NO: 4939 - protein, 480 aa, Streptococcus pneumoniae R6
MPIQNKTMLITYSDSLGNNLKDLYDNLEEHFGDAIGGVHLLPFFPSTGDRGFAPVDYDEVDSAFGDWEDVKRLGERYYLMFDFMINHISRQSKYYKDYQEKHEASEFKALFLNWDKFWPENRPTQSDVDLIYKRKDRAPKQEIVFEDGSVEHLWNTFGEEQIDLDVTKEVTMEFIRKTIQHLASNGCDLIRLDAFAYAVKKLDTNDFFVEPDIWDLLDKVRDIAAEYGTELLPEIHEHYSIQFKIADHDYYVYDFALPMVTLYTLYSSRTERLAKWLKMSPMKQFTTLDTHDGIGVVDVKDILTDEEIDYASNELYKVGANVKRKYSSAEYNNLDIYQINSTYYSALGDDDVKYFLARLIQAFAPGIPQVYYVGLLAGKNDLKLLEETKEGRNINRHYYSNEEIAKEVQRPVVKALLNLFSFRNRSEAFDLEGTTEIETPTAHSIVIKRQNKDKSVTAVVEIDLQNQTYRVIENGVEVTF

SEQ ID NO: 4940 - protein, 378 aa, Medicago sativa
MAIHHHHQQHTCSLFDALYCDEEKWEDDEGEVVDEGEQSDVTTTNYDILDSTSLLPLLLLEQNLFNEDEELNTLFSKEKIQQETYYEDLKNVINFDSLSQPRREAVEWMLKVNAHYGFSALTATLAVNYLDRFLLSFHFQKEKPWMIQLVAVTCISLAAKVEETQVPLLLDLQVQDTKYVFEAKTIQRMELLILSTLKWKMHPVTTHSFLDHIIRRLGLKTNLHWEFLRRCENLLLSVLLDSRFVGCVPSVLATATMLHVIDQIEQSDDHGVDYKNQLLNVLKTSKEKVDECYNAILHLTNANNYGHKRKYEEIPGSPSGVIDAVFSSDGSNDSWTVGASSYSTSEPVFKKTKNQGQNMNLSPINRVIVGILATATSP

SEQ ID NO: 4941 - protein, 222 aa, Medicago sativa
MAIHHHHHNHQQLQQHTSSLFDALYCDEEEKWEDDEGEVVDEGEQSDVTTTNYDILDSTSLLPLLLLEQNLFNEDEELNTLFSKEITQQETYYEDLKNVINFDSLSQPRREAVEWMLKVNAHYGFSALTATLAVNYLDRFLLSFHFQKEKPWMIQLVAVTCISLAAKVEETQVPLLLDLQVQDTKYVFEAKTIQRMELLILSTLKWKMHPVTTHSFLDPGNS

SEQ ID NO: 4942 - protein, 348 aa, Pseudomonas putida
MLAIRKTKAGPGGLSVDDVAAPKEAHSTDVLVKVEAAGICGTDLLIYKWGEFAKRMKLPTILGHEVSGVIEQVGSDVKGLRPGMRVSLESHLPCGTCYTCRRGWAHVCPNTRYPGVDFDGGFASFVVVPESVCWPVPCGIPPLQAAMMEPFGLAVHASLEGSGVSGLNVLVSGCGPIGLMNIAAAKALGASKVIATDIHPLRLTAAAKMGADECINATEESVYKTVRSLLGERGVDVAIDYSGQAAALKELIQSITHGGELRLMGVPSHDILLNLEEWLFKGLIVRGLHGRRLFETWERSTSLLVTGRVDLSSLVSHRLPLSAAEDAFEMALNGESLKILFEPNGTCI

SEQ ID NO: 4943 - protein, 241 aa, Glycine max
  misc_feature (61)..(61): Xaa can be any naturally occurring amino acid
  misc_feature (130)..(130): Xaa can be any naturally occurring amino acid
  misc_feature (140)..(140): Xaa can be any naturally occurring amino acid
  misc_feature (151)..(151): Xaa can be any naturally occurring amino acid
SFYPSQEIIDMCDYCVGLSRQLNGSIIPSERPDHMMFEVWNPLGIVGVITAFNFPCAVLGXGAPTTPLITIAVTKLVAEVLERNKLPGAIFTSFCGGADIGQAIAKDTRIPLVSFTGSSKVGLMVQQTVXERFGKCLLEXLSGNNAIIVMXDDADIKLAVRSILFAAVGTAGQRCTTCRRLFLHESIYADVLDQLIGVYKQVKIGNPLEKGTLVGPLHTPTSVENFQKGISVIKSQGINFG

SEQ ID NO: 4944 - protein, 229 aa, Streptococcus mutans UA159
MNNNTIYTQSDSRLSSFFAKIYGLVGMGIGLSAVVSYLMLYVFRNNMIAIMVNAPWVYYVAIFAELALVLIASNAARKNSPTALPLFLVYSALNGFTLSFIIALYTQTTVLQAFVSSAAVFFVMALIGVTIKKDLSGMGKALLAALIGIIIASLINMFIGSGTMSYVISIISVLIFSGLIAYDNQLIKRVYDYNSGNVSDGWAVSMALNLYLDFINLFLSLLRIFGRND

SEQ ID NO: 4945 - protein, 418 aa, Pseudomonas putida KT2440
MGYQKIKVPTDGTKITVNADHSLNVPDHPIIPYIEGDGIGVDVSPVMIKVVDAAVQKAYGGKRKIAWMEVYAGEKATQVYDQDTWLPQETLDAVRDYVVSIKGPLTTPVGGGIRSLNVALRQQLDLYVCLRPVLWFQGVPSPVKKPGDVDMVIFRENSEDIYAGIEWKAGSPEANKVIKFLKEEMGVTKIRFDQDCGIGVKPVSKEGTKRLVRKALQYVVDNDRESLTLVHKGNIMKFTEGAFKDWGYEVARDEFGAELLDGGPWMKFKNPKTGREVIVKDAIADAMLQQILLRPAEYDVIATLNLNGDYLSDALAAEVGGIGIAPGANLSDTVAMFEATHGTAPKYAGQDKVNPGSVILSAEMMLRHMGWTEAADLIIKGTNGAIAAKTVTYDFERLMEGAKLVSSSGFGDEMIKHM

SEQ ID NO: 4946 - protein, 279 aa, Mesembryanthemum crystallinum
MCESFKREYQLCEEIGRGRFGVVYRCYNPSSTEDSDTPLAVKSIDKRLFLDDETDRECLDKEPKILHLLSPHPNILQIHNLFDSDTHLLIVTDLCQEETLYERIISNGPFSEPDAAAIFCQLAEALAHCHRNYVAHRDIKPDNILFDSRNRLKLCDFGSAEWFGAGDREMRGVVGTPYYVAPEVLSGKDYNEKADVWSAGVILYIMLGGVPPFYGETVEETFEAVLRGNLRFPARIFRNVSTQARDLLRKMMCKDVSRRFSAEQVLRHPWVTSGGLANM

SEQ ID NO: 4947 - protein, 202 aa, Schizosaccharomyces pombe
MATNITFHPGSVTKEERIKFVGHPGMTIWMTGLSASGKSTIACALEQYLLQRGVTTYRLDGDNVRFGLNSDLGFSEQDRNENIRRIGHVAKLFADACVVAVTSFISPYRKDRDQAREFHKKDGLPFIEVYVECPVEVAEQRDPKGLYKRARAGEIKEFTGISAPYEAPISPEIVVSSHTQSIEECVEKIVNYLLEKDLITLK

SEQ ID NO: 4948 - protein, 253 aa, Zea mays
  misc_feature (54)..(54): Xaa can be any naturally occurring amino acid
  misc_feature (198)..(198): Xaa can be any naturally occurring amino acid
  misc_feature (215)..(215): Xaa can be any naturally occurring amino acid
  misc_feature (246)..(246): Xaa can be any naturally occurring amino acid
MQLNKKSRLLQLPHFSSFTTTTTSSLISSSRPFSLSSIKMSNEEITHPTIVDGXFREISDMWPGHAMTLRVEKVLVHEKSKYQDVLIFKSTDFGNVLVLDNVIQCTERDEFSYQEMIAHLALNSHPNPKKVLVIGGGDGGVLREIVKHDCVEEATLCDIDEAVIRLSKEHLPSMACGFDHPKSKTHVGDGFKFLNDYXNEFDVIITDSSDPDGPXEALFQKSYFQLPHDALREGGVITTQAESPWXHLPLIAR

SEQ ID NO: 4949 - protein, 302 aa, Pinus taeda
MERFANDGDEHSLKETELRLGLPGVCESDTGLGQTRNGKRAFSEVMDSTKASSFNDNKWIFPSVKCQPPTSAITETAEACKGSQPGLFSATPGQKIMMQGGCGAPQSWAGDNGLSKSTAPKDELHPKTPRGGPTEKTNAASQSQAATDPAMAPAPKAQVVGWPPIRSFRKNTLAANSKPNDEGSSSNALYVKVSMDGAPYLRKVDLKMYSTYHELSSALEKMFSCFTMGQCGSPGLSESKLIDLLNGSEYVPTYEDKDGDWMLVGDVPWEMFVDSCKRLRITKASEAIGLAPRAMEKSRSKN

SEQ ID NO: 4950 - protein, 252 aa, Pinus taeda
MSCSVGNMAMVLEKSGGNAQHEKRDSLDFAETELKLGLPGVAAGARQRICGKRSFSEAMESRNYTIPDEDITNTSTHEDLDKFKGPIVKEKQMALSANDPPRMGPPPPSKAQVVGWPPVRDFRKVRTVAASNSLYVKVSMDGAPYLRKVDLKLYSTYHELTSALEKMFSCLIIMGKCGSLALNESNLMDLPNGSEYVPTYEDKDGDWMLIGDVPWQMFVDSCQRMRIMTASEAIGLAPRTMENCKNRNRVHP

SEQ ID NO: 4951 - protein, 498 aa, Leptospira interrogans serovar Lai str. 56601
MQTALYISVLIISSCGLVYELLAGTIASYLLGETVTQFSLIIGTYLFSMGVGSWLSKYLEKDLIPKFLEIELAIGLVGGFSSAILYLSFGQIRYFQIPLFLLVILIGILVGLEIPVLLRILKKELQFKELVSRVLSLDYVGALLASILFPIFFAPKLGLMRTGFIFGILNVGVALWGTWVLPLRQSKIIILRAQSVVVLTLLILGFSYSDLITYYSEESLYTDEIILSKQTQYQRIIVTRWKNEIRLFLNGHLQFSSRDEYRYHETLVHPALLAHPAPKKVLVLGGGDGLAVREILKHKNVESVTLVDLDSAITNLFSEHGILKELNEESLKNSKVTVINTDAFLWLEESDQTFDVVLIDFPDPSNFSLGKLYTTAFFHTLKRRMNETSVLEIQSTSPLFARSSYWCIERTIASLGFYTLPLHVYVPSFGEWGFVLAGQRPIQFKKKFPKDLKFLNIQELESIQTFPQDMSRVPVEINRLDNQALVRYYDREWNRILD

SEQ ID NO: 4952 - protein, 231 aa, Pinus taeda
MSCSVGGMEKSSTGAQQENKCSLDIFAETELRLGLPGVAAGERQRICGKRSFSEAMESRNFSIPQEEAHKFHEPNLGTEKQMVRPANDPPKMGPTPPKAQIVGWPPVKDFRKVRTIAASSSLYVKVSMDGAPYLRKVDLKMYSTYHDLSSALENMFGCLITMGKCGSSGIKESNLMDVVNGSEYVATYEDKDGDWMLVGDVPWQMFVDSCQRVRIMKASEAIGLAPRAMEK

SEQ ID NO: 4953 - protein, 175 aa, Triticum aestivum
MAPTVMASSATSVAPFQGLKSTAGLPVSRRSSSAGLGSVSNGGRIRCMQVWPIEGIKKFETLSYLPPLSTEALLKQVDYLIRSKWVPCLEFSKVGFVFREHNSSPGYYDGRYWTMWKLPMFGCTDATQVLNEVEEVKKEYPDAYVRVIGFDNLRQVQCVSFIAFRPPGCEESGKA

SEQ ID NO: 4954 - protein, 1082 aa, Solanum demissum
MADFQRSSLADRDIDQAIAALKKGANLLKYGRRGKPKFCPFRLSNYAVAEDRKNALKSLFSQNLDIKDESAVVWYHDKEEKQLELCHVSRIIPGQRTVSLSIPTTFFPYKGKAIFQQYPRPEKEYQSFSLICNDRSLDLICKDKDEAEVWITGLKAIITRGRSRKGKYDARSETVFSDSPHGQRVTTSTSSIDQGDNQRTESLPQSRLGKAYADIIQYTAAGKSPTLVETGSFNLSSLSAGAVDNSNARSSTADTFRVSLSSALSSSSQGSCLEDFDNLGDVFIWGEGTGNGLLGGGKHRIGKSSGTRIDANTPKSLESSVVLDVQNISCGNRHAMLVTKQGEAFSWGEEAGGRLGHGAETDVSHPKLIKNFKGMNVELIACGEYHSCAVTSSGDLYTWGDGAKSSGLLGHRSEASHWIPKKVCGLMEGLRVSHVSCGPWHTALITSAGRLFTFGDGTFGALGHGDRSGCITPREVETFNGLKTLKVACGVWHTAAVVELMSGLDSRPSDAPSGTLFTWGDGDKGKLGHGDNKPRLAPQCITALVDKSFSEVACSYAMTVALTTTGRVYTMGSNVYGQLGCPLANGMSPICVEDYLVDSTVEEISCGSHHVAVLTSRTEVYTWGKGENGQLGHGDCENKCTPTLVDILRDKQVKRIVCGSNFSAAICVHNWALSADNSICFGCRIPFNFRRKRHNCYNCGFVFCKACSSKKSLKASLAPSTSKPYRVCDDCYDKLQKAIESEPFSRVPKVKAGNALYKASEQTDKESGFPLLVGHTSRLSSSDSFNRAQGRISRVDQYENRASSFQNENPPRESFSLSKSPISAFRVSKSLFSASLPSTRVVPQSTSPLLGKASALWSAIPAPYPPVRTAEVVVDNLKPINDSLSQEVKQLKAQLEAMLLGLFKNANGLEELASKSQLLEAELGRKTKQLMDATAKAAVEAEKRRAAKHVIKSLTAQLKEVTERLPEEQISTSNLDFNVEQTSFNRTRPSNGKCVTTTTLTECSGSSNTVVSAKKSRGQKPERMLQVEPGVYLYLISLPDGGNELKRVHFSRKCFSEDEAEKWWNENGQKICEKYNITPEHV

SEQ ID NO: 4955 - protein, 461 aa, Desulfovibrio desulfuricans G20
MHAPVSSPRHPAKRFARTAALWLVVATLLHASPALAEDAPAMLSQQHGNILWTLIAAILVMLMQAGFAMVECGFTRAKNAGNILMKNFVDFAAGSLVFFLVGYAFMFGADAGGFIGTSGFALAHVDPATEGGMWDLTFWFFQSVFAATAATIVSGGIAERTRFASYIIVSVLVTGIIYPVSGHWAWGGLAGNAGWLEGLGFADFAGSTVVHSVGGWVALAGAIVVGPRAGKYGPDGSVRAIPGHNIPLAALGVFILWFGWFGFNPGSTTTADGTIGYIAVNTSLAACAGTVTAMLTAWIRFGKPDASITMNGALAGLVGITAGCYELSPSGAIIVGIICGFVVVLSIEFLDKILKIDDPVGAVSVHGVCGAIGTLMVGLLAHPSYGGSTGLVYGGDASLLMVQALGVAVVFAWAFGMGLVVFRIVAAVAGLRVSPEEELKGLDITEHGSESYNGFQIFTVE

SEQ ID NO: 4956 - protein, 429 aa, Deinococcus radiodurans
MTGNEQNPSKWLAAEKKYDSGVYNKHDVVMVRGQGATVWDENGRSYIDCVVGYGVATLGHSHPDVVKAVQEQAGKLMVMPQTVPNDKRAEFLQELVGVLPQGLDRVFLCNSGTEAMEAAKKFAITATGRSRFVSMKRGFSGRSLGALSFTWEPKYREPFGDAVDNKSVDFVTYGNLDELRAAVTEQTAAVIMEPVQGEGGVRPASAEFIQEARRITREKGALLILDEIQTGFCRTGKMFACEHFGVIPDGMTLAKAIAGGTPTAAFAMMSEVADRMPAGGHGTTFGGNPLSMAAGVASLRAMKREGLAEQAREKGAYMMDKLRAIQSPKIREVRGLGLMIGVELKEKSAPYIHAMEHDEGVLCLAATPLVVRFLPPAVISKEQIDQVVAAFERVLNNVNPREERQAELRAQQSEMGQQQVSQGESVQTE

SEQ ID NO: 4957 - protein, 321 aa, Zea mays
  misc_feature (191)..(191): Xaa can be any naturally occurring amino acid
ADHDDDERDQPALHVLPDGDPERWHAQVFRSVDAGSVKRFPRPWERAEMARRHLVGDKNLAVERSIHAAYVAAIRSAERFVYVENQYFIGGSYAWPSYRNGGACNLVPMEIALKVASKVRAGEPFAAYVVLPMWPEGNPGSGPAQEILFWQNQTMEMMYSVVAAALEGKGGHPQEHLNFYCLGNREPAEDXATAINGPIQAHARRHRRFMVYVHSKGMIVDDEYVIIGSANINQRSLAGSRDTEIAVGAYQPDHTGACPRGKVHGYRMSLWEEHLGKEAVRRPEVLRPESPRCVKLVNRIARDNWRRYAADDDKLGPLQAC

SEQ ID NO: 4958 - protein, 487 aa, Streptococcus mutans
MPITIKTMLITYADSLGKNLKELNENIENYFADAVGGVHLLPFFPSTGDRGFAPIDYHEVDSAFGDWDDVKRLGEKYYLMFDFMINHISRQSKYYKDYQEKHEASAYKDLFLNWDKFWPKNRPTQEDVDLIYKRKDRAPKQEIQFADGSVEHLWNTFGEEQIDLDVTKEVTMDFIRSTIENLAANGCDLIRLDAFAYAVKKLDTNDFFVEPEIWTLLDKVRDIAAVSGAEILPEIHEHYTIQFKIADHDYYVYDFALPMVTLYSLYSGKVDRLAKWVKMSPMKQFTTLDTHDGIGVVDVKDILTDEEITYTSNELYKVGANVNRKYSTAEYNNLDIYQINSTYYSALGDDDQKYFLARLIQAFAPGIPQVYYVGFLAGKNDLELLESTKEGRIINRHYYSSEEIAKEVKRPVVKALLNLFTYRIQSAAFDLDGRIEVETPNEENIVIERQNKDGSHIATAEINLQDMTYRVTENDQTISLSMISCQT

SEQ ID NO: 4959 - protein, 495 aa, Pirellula sp. 1
MLGMGEPGRVRASKSKIVLSDRRMWVPLIVACMTQGYTTSVTPKTSRQLVHCIYRSPMSSSSSLEIQRADTVRVQFGDTNLELPLVEGSEGEKAIDISRLRADTGVITLDDGFVNTGSTRSAITFLDGEKGILRYRGYPIEELAKSCDFVEVAYLLIFGDLPNAEEIETFRSGIRDHTMIHEDMRSFYNGFPRDAHPMAILSSVVGALSTFYQDSMDLNDPRQVEISLYRLIAKLPTIAAYSYKKSMGQPFMYPKNELDYCENFLHMMFATPTSDYLVDPDFAEALNLLFIVHADHEQNCSTSTVRMVGSSNANLFASISAGIGALWGPLHGGANEACVNMLEQIAADGGDVKKYVDMAKDKSNDFRIMGFGHRVYKNSDPRATIIRASCDKLLAKLNLDDPLFEVAQKLEEVALKDEYFIERKLYPNVDFYSGVIYRALGIPVQMFTVLFAIGRLPGWLAHWREMHANPASRINRPRQIYTGATQRDVVPVDQR

SEQ ID NO: 4960 - protein, 267 aa, Ralstonia eutropha JMP134
MSIPSFGVGTFRLTGQAAVDSVYNALDLGYRAIDTAQIYGNEADVGQAIAESGVKRDELFLTTKIWTEHYAADKLVPSLRESLDKLRTDYVDLTLIHWPAPGNGVPLREFMEALAAAKSLGLTRQIGVSNFNIALTHQAIDVVGKGEIATNQIELSPYLQSRKLTAFLTEQGIAVTSYMTLAYGKVLTDPVLAQIAAKHGATVAQVALAWALQLGYAVIPSSTKRENLASNLLARDLKLDAGDMAQITALERNGREVNPEGLAPEWD

SEQ ID NO: 4961 - protein, 363 aa, Mycoplasma mycoides subsp. mycoides SC str. PG1
MAICKIGSKYTFTIRGILFCYIIKFMLMCFLERGLYLMIKKIGILTSGGDAPGMNNAIAGVVKTAASKGIEVYGINDGYKGLVNGWFEKLNVEKTLDILSRGGTYLGSARLPEFKELEVRQKAVANLKKAGIEALVVIGGDGSYMGAQKLTEMGINCIGLPGTIDNDISSTDYTIGFHTALNTIVEAVDRIRDTMQSHNRADVVEIMGNGCGDLVTYTAVATGAEIFSPAEDLLTIEQMGQKAKQFRLLGKKSLIILVSEKSYGISAKEIAEKIQKISGYETKATVLGHIQRGGRPTAMDRYIAFTAGMFAVEKLAEGKGGLFIGLENNKLVARDIDSTLNMKKEDKKPFIKYLREINGYFSK

SEQ ID NO: 4962 - protein, 226 aa, Clostridium tetani E88
MVIIDLLKGVVYMKFFIDTANVEEIKKVAKWGVLDGVTTNPTLIAREGRDLKEVIEEICSIVDGPISAEVISLESEKMVEEAKELIKIHKNIVIKVPMCEEGLKAVSELTKLGIKTNVTLIFSAQQALLAAKAGATYVSPFLGRIDDIGSFGIQLVEDIVTIFTNFGIESEIICASIRTPIHVLECARVGGDIATVPYKVFAQMLKHPLTDRGIEQFLEDYKSMNK

SEQ ID NO: 4963 - protein, 287 aa, Prochlorococcus marinus subsp. marinus str. CCMP1375
MFENENPNGSWLDEYQNDVRYGLKGKKIIEEISNFQKITIFESNRYGKALLLDNCWMTAEYQEKQYHECIVHPALCGSKEINKVLIIGGGDGGSARECLKYQELKNLDLIEIDKRVVELSQQYLSVIGGNCWKDQRLNLKLTNGINWVKDAKDNSYDVIIIDGSDPKGPAKGLFNKDFFKDCHRILKPDGVLGAQTESPESFEDIHINTVKMIKEVFKYADPLYGYVPIYPSGIWSWTFASIKKPRHLYPIISRANTISKTCQVWSPRWQRGGFDAIPANIERKLQQ

SEQ ID NO: 4964 - protein, 502 aa, Oryza sativa (japonica cultivar-group)
MMDGRSILMGRYEVGKQLGQGTFAKVYYARNLTTGQAVAIKMINKDKVMKVGLMEQIKREISIMRLVKHPNVLQLFEVMASKSKIYFVLEYAKGGELFNKIAKEGKLSEDSARRYFHQLINAVDYCHSRGVYHRDLKPENLLLDENENLKVSDFGLSALAESKRQDGLLHTTCGTPAYVAPEVLSRKGYDGAKADVWSCGVILFVLVAGYLPFHDPNLIEMYRKICRADFRCPRYFSAELKDLIHKILDSDPSTRISIPRIKRSTWYRKPVEINAKNSEAATTNSISSGVATTSGSAECSTSEENQGSLSLPNLNAFDIISLSTGFNLSGFFEDTHGHQEERFTTRQPVTTVLGKLKELAKRLKLKVKKKDNGVLRLAAPKEGKKGFLELDAEIFEVTPSFLLVELKKTNGDTMEYRKLVKEDIRPALKDIVWVWQGDEHLNSQSILQGEQQQSPLPPELPQDQLQPSLPQQEKQDMPEPPLLPQVPQEEVQTSIPAEQTKN

SEQ ID NO: 4965 - protein, 121 aa, Arachis hypogaea
DGITHVGGDMFVSVPKADAIYMKWILHDWSDQHCIKILKNCRKAIPENGKVIIVDHVLQPEGNDLFDDTGFAFDMMLLAHNAGGKERTEENWKWLFAETGFPRYNIIKIKALPSIIEAFPN

SEQ ID NO: 4966 - protein, 120 aa, Chara vulgaris
MITVGTYLQVSDNSGAKIVQCIKILHPFKKQRAIIGDTIIVSLKQARMGRNTQNVLKAIVVETKKATKYRKDGSYLQFDRNAVVLINNGLPIGTRILGCVTHELRKKRYLKIVSMAPYVI

SEQ ID NO: 4967 - protein, 229 aa, Oryza sativa (japonica cultivar-group)
MADEQYMDLGGGGAAAAPGRGGAGERKRRFTEEQIRSLESMFHAHHAKLEPREKAELARELGLQPRQVAIWFQNKRARWRSKQLEHDYAALRSKYDALHSRVESLKQEKLALTVQLHELRERLREREERSGNGGAATTAASSSSCNGSGSEEVDDDDDKRNAAAGCLDLEPPESCVLGGATCATPADVSVESDQCDDQLDYDEGLFPESFCATPELWEPWPLVEWNAVA

SEQ ID NO: 4968 - protein, 127 aa, Rickettsia akari
WGPAHGGANEAVINMLKEIGSSENIPKYIAKAKDKSDPFRLMGFGHRVYKNYDPRASVLKETCKEVLKELGQLENNPLLQIAIELEAIALKDEYFIERKLYPNVDFYSGIIYKAMGIPSQMFTVLFA

SEQ ID NO: 4969 - protein, 170 aa, Triticum aestivum
MWTERRARRSGSMAGGGGGRARGAEGKRAAPQGQRAPAATAYNQAAADILVALRLELRRSTPADRMWTERRARRSSSMAGGGGGRARGAEGKRAAPQGQRAPAATAGYFTAELAVLFLCLTALLVFLPLVLPPLPPPPSLLLLVPVGLMAVLVALAFVPSDSRSIASSCH

SEQ ID NO: 4970 - protein, 273 aa, Zea mays
MARTPRTTILHLVLTLCILSAQNTPSLASSAIDEFLGCLSADIPSRLIQTPATPSYSALLLSTAWNLRYILPDTSKPIGIIAATEHAHVQTTVRCGRRHGVRVRVRSGGHDYEGLSYASVHLHNRNEPFAVLDLAALRAIHVDPARAEAWVESGATVGELYYAVGAASRSLGFPAGSCPTMGVGGHLSGGGFGSLARKYGLSADNVLDAVVVDADGRLMNRSTMGEDHFWALCGGGGESFRVVLSWKVRLVAVPETRHGVQHHPGQGTNLPSN

SEQ ID NO: 4971 - protein, 104 aa, Triticum aestivum
  misc_feature (81)..(81): Xaa can be any naturally occurring amino acid
MGPTVVAWGATSVDPFQGLKSTEGLHVRRRYNGARLGSVRNGGRVRCMQVWPIEGMKKFETLFYLPPFSTGALLKQVDYLXIRSKWGPCLEVSKGGFIFREHNA

SEQ ID NO: 4972 - protein, 213 aa, Malus x domestica
PIKAPILVEQGLFWDNEELISLLSKESEQNELQKPLQISPSLAGARREAVDWMLRVASHYSFSALSAVLAADYFDGFLSSLQLQVEKPWMTQLAAVACISLAAKVEETQVPLLLDFQVEDSKYVFEARTIKRMEILVLSTLQWKMNPVTPISFIDYITRRLGLKNHLCWEVLKRCELVLLSLISDSRFMSFLPSVVATAIMLHVVNNIEPCLL

SEQ ID NO: 4973 - protein, 174 aa, Glycine max
MSSHSHLSFAFGVLGNIASFVCFLAPLPTFYRVCKKKSTEGFQSIPYVAALFSAMLWIFYAYVKTGEMLLITINAFGCVIETIYLAVFITYCPKKARMSTLRMIVLLNFGGFCTIVLLTHLLAEGEGRVKLLGWICVVFATSVFAAPLSIIVSILLDHNLQLSYLFLIFHVPCY

SEQ ID NO: 4974 - protein, 220 aa, Shigella dysenteriae
LRQELDLYICLRPVRYYQGAPSPVKHPELTDMVIFRENSEDIYAGIEWKADSADAEKVIKFLREEMGVKKIRFPEHCGIGIKPCSEEGTKRLVRAAIEYAIANDRDSVTLVHKGNIMKFTEGAFKDWGYQLAREEFGGELIDGGPWLKVKNPNTGKEIVIKDVIADAFLQQILLRPAEYDVIACMNLNGDYISDALAAQVGGIGIAPGANIGDECALFEA

SEQ ID NO: 4975 - protein, 238 aa, Lactobacillus delbrueckii subsp. lactis
  misc_feature (24)..(24): Xaa can be any naturally occurring amino acid
  misc_feature (220)..(220): Xaa can be any naturally occurring amino acid
AGIFLTHGHADSIGALPYILRDGXPVFGSKLTIELAKIDVQRENKRRNNQLFNVIDADTEIDFKNASVSFFQTTHSVPDSLGIVIHAPQGQIVYTGDFKFDPSARPAYRTDMTRLAEIAENGVLALLPDSSNAEAVLPNASENEVGTYITNVFRNAKGRIIVAGKASNINRVQQVFNAAAATGRRVLLTGRDVAKIVHTAMKLGYLEVPDGLLMKAKELXDVPDEKTVILETGRMGNR

SEQ ID NO: 4976 - protein, 404 aa, Helicobacter hepaticus ATCC 51449
MDLQTLKKAYPKALPYHIGGKVGIQPRKRLRSIDELGLAYTPGVAVPCKQIEANPLSAYDYTSKSNLVAVISNGTAVLGLGDIGAMASKPVMEGKAILFKTFAGVDAFDIEINEKDVDKFVAVVKAISPTFGGINLEDIKAPECFEIERRLIEELDIPVMHDDQHGTAIISTAGIINALHLVNKKAKDIKVVVFGAGAAAVACAKMYKAFGVKNLVMFDSKGAISANRTDLNDLKKEFICQENYASYKDALNGADVMLGLSKGNLLSGDDIKGMNESPLIFALSNPTPEIMPDEVKKARPDAIVATGRSDFPNQINNVLGFPYIFKGALKVRASKINEEMKFAAAYAIANLAREPITEKLEKLLKKKMSFGKEYIIPSAFDERLDDVVSNAVADAAIKSGVARV

SEQ ID NO: 4977 - protein, 381 aa, Zea mays
LPCKPPSLVHCFKLLVLLALARLTMHVPDEDMLSPLGALRLDGHFSFHDVSAMARDFGNQCSFLPAAVLHPGSVSDIAATVRHVFSLGEGSPLTVAARGHGHSLMGQSQAAQGIVVRMESLRGARLQVHDGFVDAPGGELWINVLRETLKHGLAPKSWTDYLHLTVGGTLSNAGVSGQAFRHGPQVSNVNQLEIVTGRGDVVTCSPEDNSDLFYAALGGLGQFGIITRARIALEPAPEMGRWIRGLYSDFESFTEDQEMLMGAENSFGCVEGFVIINRTGVLNNWRASFKPQDPVEASHFQSDGRVLYCLELTKNFNSGDTDTMEQEVAVLLSRLRFIQSTLFHTDVTYLEFLDRVHTSELKLRAQGLWEVPHPWLNLLIP

SEQ ID NO: 4978 - protein, 220 aa, Shigella flexneri
ELDLYICLRPVRYYQGTPSPVKHPELTDMVIFRENSEDIYAGIEWKADSADAEKVIKFLREEMGVKKIRFPEHCGIGIKPCSEEGTKRLVRAAIEYAIANDRDSVTLVHKGNIMKFTEGAFKDWGYQLAREEFGGELIDGGPWLKVKNPNTGKEIVIKDVIADAFLQQILLRPAEYDVIACMNLNGDYISDALAAQVGGIGIAPGANIGDECALFEATHG

SEQ ID NO: 4979 - protein, 507 aa, Agrobacterium tumefaciens str. C58
METGMQTTAEAIKGKRLGLFIDGRFVEPRSGKFVDSYDPTTGEAWYQFAEGGADDVDLAISSAQRAFRDPSWRRMTQTARGKLVRRLADLVLEHAEDLALLETRDNGKLIKEMRAQMRAIPDSYLYFAGMADKLQGDTIPVNKLDQLNFNMREPLGVIGMVTPWNSPLMLLTGTLAPCLAIGNTVVIKPSEHATASTLALAELIVEAGFPAGVVNVVTGGGAVTGEALTRHNGIAKFVFTGSTATGRRIAANAAANLVPCQMELGGKSPHVVFSDVDIEKTVNGVVSGVFAAAGQTCVAGSRCFVEANIYDRFIEALVERTRNIKLGDPMDDATDIGPLALESQLSKLEGYVASGVREGSRIAIGGKRPQSEELSRGWYFEPTVMADATNDMSFMRHELFGPMVGVMPFSSEEEMISLANDTNYGLASGIWTQNIDRAMRFANQIDAGTVWINTYRSAAYMSANGGFKESGYGRRGGFDVMREFSRAKNVVIDYSGAMQDPFVIRLR

SEQ ID NO: 4980 - protein, 181 aa, Triticum aestivum
  misc_feature (88)..(88): Xaa can be any naturally occurring amino acid
  misc_feature (118)..(118): Xaa can be any naturally occurring amino acid
  misc_feature (129)..(129): Xaa can be any naturally occurring amino acid
  misc_feature (137)..(137): Xaa can be any naturally occurring amino acid
  misc_feature (166)..(166): Xaa can be any naturally occurring amino acid
MAPAVMASSATTVAPFQGLKSTAGLPVSRRSSGSLGRVSNGGRIRCMQVWPIEGIKKFETLSYLPPLSTEALLKQVDYLIRSKWVPCXLRFSKVGFRLPVSTTSSPRVITNGRYWTMXKLPYVRCTDAXTQVLNEVXEEVKKEYPDAYVRRNRASTTCAQVQCVSXFIAFRPPGCEESGKA

SEQ ID NO: 4981 - protein, 347 aa, Sulfolobus solfataricus
  misc_feature (1)..(1): Xaa can be any naturally occurring amino acid
  misc_feature (44)..(44): Xaa can be any naturally occurring amino acid
  misc_feature (138)..(138): Xaa can be any naturally occurring amino acid
  misc_feature (186)..(186): Xaa can be any naturally occurring amino acid
  misc_feature (269)..(269): Xaa can be any naturally occurring amino acid
  misc_feature (306)..(306): Xaa can be any naturally occurring amino acid
  misc_feature (317)..(317): Xaa can be any naturally occurring amino acid
  misc_feature (322)..(322): Xaa can be any naturally occurring amino acid
XRAVRLVEIGKPLSLQEIGVPKPKGPQVLIKVEAAGVCHSDVHXRQGRFGNLRIVEDLGVKLPVTLGHEIAGKIEEVGDEVVGYSKGDLVAVNPWQGEGNCYYCRIGEEHLCDSPRWLGINFDGAYAEYVIVPHYKYXYKLRRLNAVEAAPLTCSGITTYRAVRKASLDPTKTLLVVGAGGGLGTXAVQIAKAVSGATIIGVDVREEAVEAAKRAGADYVINASMQDPLAEIRRITESKGVDAVIDLNNSEKTLSVYPKALAKQGKYVXVGLFGADLHYHAPLITLSEIQFVGSLVGNQSDFLGIXRLAEAGKVKPXITKTXKLEEANEAIDNLENFKAIGRQVLIP

SEQ ID NO: 4982 - protein, 497 aa, Cladosporium fulvum
MSLSVQLETPSAGKYEQPTGLFINNEWVKPVSGKFFDVINPTDESVICQVAEADEKDVDIAVAAARKAFEGPWRQETPENRGKLLVKLAELFEKNLDLFASVKALDNGKAFNMAKVDIGMCAGCLRYYGGWADKIEGKVVDTTPDTFNYIKKEPIGVCGQIIPWNFPLLMWAWKIGPAVATGNTVVIKTAEQTPLGAYVAANLIKEAGFPPGVVNVISGFGKVAGAAIASHMDIDKVAFTGSTVTGRTILKAAAGSNLKKVTLELGGKSPNIVFDDADIDNAISWVNFGIFFNHGQRCCAGSRIYVQEGIYDKFLQRFKERAQKNVVGDPFAADTFQGPQVSQVQFDRIMGYIQAGRDAGATVEIGGNRKGDKGYFIEPTIFANVTEDMKIMQEEIFGPVCSISKFKTKEDAIKVGNATPYGLAAAVHTRNLNTAIEVSNALRAGTVWVNTYNTLHHQLPFGGFKESGIGRELGEDALANYTQTKTVSIRLGDALFG

SEQ ID NO: 4983 - protein, 486 aa, Vibrio vulnificus CMCP6
MEVTAHYIGGKPFVGDTGESFATLNPATGEVLAHIEQADERVLGHAIESAKLGFSVWSSMSAAERSRCLLKAAQLIRDHNDELAELEVRDTGKPIQEASVVDIATGADVIEYFAGLVNGLGGEQQSLGSNQFFYTRREPLGICAGIGAWNYPIQIAMWKAAPALAAGNAMIFKPSEETPLSALKLAELFTQAGVPDGVFNVVQGDYRVGQMLTAHPEIDKVSFTGESGTGKKVMADSAATLKPVTMELGGKSPLIIFDDADLDDAVSAAMVANFYTQGEVCTHGTRVYVQRAMYDAFVEQLKERTEKLIVGDPMNMETQIGSLISKSHLEKVLGAISSAKESGATLLTGGFQVTERGLEKGCFVAPTVFVDCRDEMPHVQNEIFGPVMSVLVFDDEDEVIARANNTQYGLAAGVFTQNLSKAHRVIHQLQAGICWINTWGNSPAEMPVGGYKLSGIGRENGQETLLHYTQTKSVFVELGAFDSPYA

SEQ ID NO: 4984 - protein, 382 aa, Bacillus anthracis str. A2012
MGEFSGKGENVMTVIRGLEGVVATTSSVSSIIDDTLTYAGYNIDDLAENATFEEVVYLLWHRKLPNEQELAKFNEIVSEYYKVPGEILAYLKQVDLKIAHPMSVLRTAISMLSLYDESAEIMDEKSNYLKAVKLQAQVGTLVAAYARIRKGLDVVEPRNDLSLAANFLYMLNDREPNEVEIEAFDKALVLHADHELNASTFTARVCVATLSDVYSGITAAIGALKGPLHGGANENVMKMLTEIGEEENVESYIHNALQNKVKIMGFGHRVYEQGDPRAKHLREMSKRLCVLLGEEKWYNMSIKIEDIVTKEKGLPPNVDFYSASVYHCLGIDHDLFTPIFAISRMSGWLAHILEQYENNRLIRPRADYNGPTHQVYVPIAQR

SEQ ID NO: 4985 - protein, 114 aa, Capsicum annuum
MKMFGKIACLLILCVVLIAPHAEAVTCGQIQVGVVNCLPYLQNRGPLGRCCGVIKDLLKLCKTPHERRKSCRCVKTAANTIKGIDFGKTAGLSGVCGVKIPSEISPSVDCSKVK

SEQ ID NO: 4986 - protein, 243 aa, Citrus sinensis
MGRGRVQLKRIENKINRQVTFSKRRAGFLKKAHEISVLCDAEVAVIIFSHKGKLFEYSTGSCMEKILERYERYAYAERQLIAPDPESQRNWPLECNNLKAKIDLLQKDQRHYLGEDLESLSLKDIQQLEQQLDTALKHIRSRKNQLMQESISELQKKEKSIEEQNNLLVKQIKEREKAAAQQAQWGNQIQNQVPNTLSFLLPQPPPCLRLGGAYQEQASEMRRNELNLTLEPVCSCSLGCFAG

SEQ ID NO: 4987 - protein, 379 aa, Candida albicans SC5314
MSGLGKLPGLASDAVLKQSIPVPEDFQEVKGIDYSQDNAYNMRAKDLIKSMATMGFQASSLSQACDIIDNMRSWRGKHKDTLEEHEQTGEFDDEGYQKTTIFMGYTSNLISSGLRDTLRYLVQHKMVSAIVASAGGVEEDLIKVLAPTYMGDFTLPGKGLRDQGMNRIGNLLVPNDNYCKFEEWIVPILDKCLEEQEEAMKKLGPKGLIAGSEAIWTPSKLIDRLGKEINDESSVLYWAHKNKIPIFCPALTDGSIGDMLFFHTFKASPQQLRLDIVADIRKINSMSMAASKAGMIILGGGLIKHHICNACLMRNGADYAVYINTGQEFDGSDAGARPDEAISWGKIKAEAKSVKVYADVSLVFPLIVAATFASEKPQN

SEQ ID NO: 4988 - protein, 386 aa, Listeria monocytogenes str. 4b F2365
MKHVFPTYKRFPIDLVNGTGTVVTDKNGKTYLDFTSGIAVCNLGHCPANVAEAVQQQLTNIWHTSNLYECALQDSVAELIADGKDRLVFFCNSGTEANEAALKLARKYTGKEKIITFEKSFHGRTFGSMSATAQAKIHQGFGGLVPGFTYVPYNDIEAFRAEIDEHTAAVMLEVIQGEGGVIPANAAFLLEVQLLCKKMGVLLIIDEVQTGLGRTGTLYGFEQIGLEPDIFTLAKGLGNGLPIGAMVGKANLSSAFGPGSHGSTFGGNKLALAAAKEILRTMKQAGFLEEVNAKADYFRYLLEVHLEALDNVSVIRGGGFLIGIELENTAEPVVTELRDKGLLILTAGANVLRILPPLTVSYAEIDQAIYLLKSVLENQLIGSEEG

SEQ ID NO: 4989 - protein, 261 aa, Solanum tuberosum
VENARSYSTYLKTRPASMEEAAINQLITLSKDTRAGGSAEGAHLHIVHLSDARTSLNLIKEAKQRGDSITVETCPHYLAFAAEDIPDGDTRFKCAPPIRDAANKEKLWDALLDGDIDMLSSDHSPSVPEMKLLDEGDFLKAWGGISSLQFVLPATWTHGRKYGITFEQLASWWSENPAKLAGLTTKGAIAVGNQADIVVWEPDMEFDLDNDYPVHIKHPSISAYMGSRLSGKVLATFVRGNLVYKEGNHASQACALPILHR

SEQ ID NO: 4990 - protein, 386 aa, Thermoplasma volcanium GSS1
MPETTEEISKGLEDVNIKWTRLTTIDGNKGILRYGGYSVEDIINNGAQAEEIQYLFLYGELPNAQELKIFKENVQKGYNIPDFVINSIRQLPRESDAVAMQMAAVASMAASEIKFKWNKDTDRDVAAQMIGSMSAITANVYRHILGMPAERPKPSDSYAESFLKAAFGRNVTKEEVDAINTALILYTDHEVPASTTAGLVAVSTLSDIYSGITAALAALKGPLHGGAAEAAIAQFDEIKEPSNVEKWFNDNIINGKKRLMGFGHRVYKTYDPRAKIFKGIAENLSKNNAEVKKIYDIATKLEDLGVKQFGSKGIYPNTDYFSGIVYMSVGFPLRNNIYTALFALSRVTGWEAHFIEYVEEQQRLIRPRAVYVGPAERKFVKLPDRK

SEQ ID NO: 4991 - protein, 101 aa, Rickettsia sp. 'midichlorii'
GSSENIPKYIAKAKDKNDPFRLMGFGHRVYKNYDPRAAVLKETCKEVLKELGQLENNPLLQIAIELEAIALKDEYFIERKLYPNVDFYSGIIYKAMGIPSQ

SEQ ID NO: 4992 - protein, 329 aa, Streptomyces avermitilis MA-4680
MKAAVIESVGKAVVAEVPDPTPGPREVVVEVAACGLCGTDLHILQGEFAPKLPIVPGHEFAGEVVGLGTQVTEVSVGDRVAVDPSLYCYECRYCRTGHNNLCERWAAIGVTTAGGAARYAVAPVANCVKLPEHVRTQDAALIEPLSCAVRGYDVLRSRLGAHVLVYGSGTMGLMMLELAKRTGAASVDVVDVNPARLTTARQLGVSGSAANADELDRPQGWDVVVDATGNAAAIQDGLGRVAKAGTFLQFGVADYATRVTIDPYRIYNQEITITGSMAVLHSFERAAELFAGGVLDPDVFISDRIPLARYPQALEQFASGVGRKIVVVP

SEQ ID NO: 4993 - protein, 497 aa, Bordetella pertussis Tohama I
MSTLPPLSHWESLAAGLTLRNQAFIDGRWHDGQAGPLAAINPATGQLLAEVTACSQADIDQAVAAARRAFESGVWSRMPRRERKQCMLRLAALIREHAEELALIETLNMGKPIGDTMAFDIPETAHTYAWYAETIDKQYDEIAPTDADALATITREPLGVVAAVVPWNYPLLMASWKVAPALAAGNSVILKPAEQSSLSALRLAELALQAGIPAGVLNVVPGAGPVAGRALGLHMDVDCLAFTGSTATGKRFMEYSGQSNLKQVWLECGGKSPHIIFDDCPDLDRAALAAAIGIFNNQGEVCIAGSRLYVQAGIYDTFVSKVEACARAMQPGNPLDPASPMGAMVDERQMARVLEYVESGRREGARLRMGGERVRADSGGYYIEPTIFECARPDLTIVREEIFGPVLAVTRFDGEDEVVAQANASAYGLGSGLWTADLSRAHRVSRRLRAGLVWVNCYFDGDVTVPFGGVKQSGFGRDKSLHALDKYTSLKTTWIRL

SEQ ID NO: 4994 - protein, 151 aa, Methanothermobacter thermautotrophicus str. Delta H
MNLKTHAFNDRGRIPSRYTCDGENISPPLSWDGVPGEAKSLALICDDPDAPSKVWTHWVIFNIPPDSTGLEENVPDAGRLPDGSVQGYNDSGTLGYRGPCPPSGVHRYFFRLYALDTVLDLEPGASKEDVLEAMEGHVLGEAKLIGLYRRG

SEQ ID NO: 4995 - protein, 434 aa, Triticum aestivum
  misc_feature (90)..(90): Xaa can be any naturally occurring amino acid
  misc_feature (421)..(421): Xaa can be any naturally occurring amino acid
GVDCLGKGEAFGKVHYAKNLESNRGVAIKILDKEKVLKVGLAEQIRREITTMRLVEHKSIVQLHEIMATRSKIYVVMEYMGGDLFYKDAXRVACSPRVLPSSSCRLISAVGFSHSRGVYHRDLKPENLLLDENENLKVSDFGLSALSESKRQDGLLHTTCGSPAYVAPEVISKGGYDGAKSDIWSCGVILFVLVAGYLPFQGQNLIEMYRKIEKGDFKCPGWVSQKLQKLLYKIMDPDPNKRISIQKIKESTWFRKGPGENLTAKERLPSENATTDAVPTLGVRRRKNSHEDGKPLAVTNLNAFEIISFSTGFDLSGLFVEKESKKEARFTSEQPASAIVSKLEAVAKTLNLRVRKKDNGVGWWQGCKGGRKGVLQFDSEIFEISPSYPRTVSLRSSGDSLEYQKLLEESIRPALKDICLXAWHGADGQQEPQG

SEQ ID NO: 4996 - protein, 110 aa, Rickettsia sp. 'midichlorii'
AVINMLKEIGSSENIPKYIAKAKDKNDPFRLMGFGHRVYKNYDPRAAVLKETCKEVLKELGQLENNPLLQIAIELEAIALKDEYFIERKLYPNVDFYSGIIYKAMGIPSQ

SEQ ID NO: 4997 - protein, 429 aa, Bordetella pertussis Tohama I
MGPRIITHGEGVYVFDDQGNRYLEGMAGLWSVAVGFGEQRLVEAAARQFQELPYYHTFTHKSHPSVIALAERLIGYTDGRMAQAFFTNSGSEANDTVVKLVWYYNNALGRRDKKKIIARQRGYHGVTVASASLTGLPGNHKDFDLPLPQIRHTACPHYYRYGLPGETEEDFATRMAGELEAMILREGPDTVAAFIGEPVMGAGGVIVPPRTYWQKIQAVCRKYDILVIADEVITGFGRLGQRFGSQVFDIEPDIMVLSKQITSSYQPLGAVLLNTRVADVVAEHSGRLGTFGHGYTASGHPVATAVALENLRLIDERGLIEHAAEMGALLHQELQALSSHPLVGEVRGVGLIAGVELVADKATRQPFDPLGKAGGYAYERAHDHGLIVRGIQDTVAFCPPLIITAEQVRDMVARFARTLDDVAAHVAQG

SEQ ID NO: 4998 - protein, 416 aa, Chlamydomonas reinhardtii
MASNGAAPDRWSNVKRVYTRQDVEKLRGSIKIEYTLARLGAERFWNLLHTEDYVPALGAMTGGQAVEMVAAGLKDIYLSGWQVAADANSASQTYPDQSLYPVDSVPRVVSRINNAFQRMDQMQHSEGRGDTYWFAPIVADAEAGFGGNLNAYELMKALIEAGASCVHFEDQLASAKKCGHLGGKVLVPTKEFVQKLTAARLAADVMDVPTLIIVRTDALGAYLLTSDADEYDKPFMTGERTAEGFYCVRGGIDAAIARGLAYAPYADLVWFETSEPSMEEAKKFAAAIHAQYPGKLLAYNCSPSFNWKKLSADEISKFQKTLGSLGYKFQFITLAGFHSLNYGMFSLARDYASRGMSAYAQLQEAEFASEKQGYRATTHQKFVGTGYFDLVSTVITQGTSSTNALKGSTEEEQFHH

SEQ ID NO: 4999 - protein, 368 aa, Exiguobacterium sp. 255-15
MGQDYQQWVDRLAQKKTGERQDGVEVVIKPVPDRTESGVLDPRVLEVMMQQQQDSSPVGPFSLEAARAGMGWINTDLTTTDITTEDIMIPSAEQPIPARIYRPRSTEPLPAVVYFHGGGFFGGTLEPVEHPCRLLAERANVVVISIDYRLAPEHPFPAGLNDCFTAVKWVYEQGEELGINREQLAVAGDSAGGNLATVCALLDREQQTEMIQYQVLLYPVVNLAALPTDDFNWRLDAYEMNENRELLEGIVTALEDSDGLLNRLYLQGTTDVQDPHVSPLFSDKLTGLPDALIITAEYDYLRLEGEAYGRKLARSGVKTKRIQYNGMDHAFIEKLGQYPQAEDCITEIANGLQNRFAVMKSDTNTIGG

SEQ ID NO: 5000 - protein, 335 aa, Schizosaccharomyces pombe
MQQTYKPNTSALKDGAPKATVDQKQLLPCKYRVGRVLGGGTYATVREAVHIETNKMYAAKIMNKKMMEKKQDFVKNEIAILKRVSYEHPNILHLVDFFETVNNLYLITELATGGALFDRICAKGSFYEADAAALMRTTTSAVKYLHDNGIVHRDLKPENLLYRSKDPNSDLLIADFGLSHFYEDSQYYMLMTACGTPEYMAPEVFRRTGYGKPVDMWAIGVITYFLLSGYTPFARPSQVEVIEAILANEYTFNDPCWSGISETAKDFIKKCLENDPSKRLTAADALKHPFLSENGPATSNLLPNVRENFNARKTFRTAYNAVRAFNTWKKLENKH

SEQ ID NO: 5001 - protein, 495 aa, Staphylococcus aureus subsp. aureus MSSA476
MAVNVRDYIAENYGLFINGEFVKGSSDETIEVTNPATGETLSHITRAKDKDVDHAVKVAQDAFESWSLTSKSERAQMLRDIGDKLMAQKDKIAMIETLNNGKPIRETTAIDIPFAARHFHYFASVIETEEGTVNDIDKDTMSIVRHEPIGVVGAVVAWNFPMLLAAWKIAPAIAAGNTIVIQPSSSTPLSLLEVAKIFQEVLPKGVVNILTGKGSESGNAIFNHDGVDKLSFTGSTDVGYQVAEAAAKHLVPATLELGGKSANIILDDANLDLAVEGIQLGILFNQGEVCSAGSRLLVHEKIYDQLVPRLQEAFSNIKVGDPQDEATQMGSQTGKDQLDKIQSYIDAAKESDAQILAGGHRLTENGLDKGFFFEPTLIAVPDNHHKLAQEEIFGPVLTVIKVKDDQEAIDIANDSEYGLAGGVFSQNITRALNIAKAVRTGRIWINTYNQVPEGAPFGGYKKSGIGRETYKGALSNYQQVKNIYIDTSNALKGLY

SEQ ID NO: 5002 - protein, 122 aa, Fusobacterium nucleatum subsp. vincentii ATCC 49256
MAFNKEQFIADLEAMTVLELKELVSALEEHFGVTAAAPVAVAAAGGATEAAEEKTEFDVVLKSAGGNKIAVIKEVRAITGLGLKEAKDLVDNGGVIKEAAPKDEANAIKEKLTAAGAEVEVK

SEQ ID NO: 5003 - protein, 224 aa, Oryza sativa (japonica cultivar-group)
MDVSAALSSDYSSGTPSPVAADADDGSSAYMTVSSAPPKRRAGRTKFKETRHPVFKGVRRRNPGRWVCEVREPHGKQRIWLGTFETAEMAARAHDVAALALRGRAACLNFADSPRRLRVPPIGASHDDIRRAAAEAAEAFRPPPDESNAATEVAAAASGATNSNAEQFASHPYYEVMDDGLDLGMQGYLDMAQGMLIDPPPMAGDPAVGSGEDDNDGEVQLWSY

SEQ ID NO: 5004 - protein, 285 aa, Lactobacillus johnsonii NCC 533
MKFNSVEDTYTLNNGVKIPIIGFGTWQTPDGDVAKHVVEAALNSGYRHIDTAAAYGNEESVGEGIKNSGINRHDLFITTKLWNADHGYKEAKAAIDKSLQNLGTDYLDLYLIHWPNPLALRDHWAEANAESWRAMEEAVKAGKIRAIGVSNFRKHHLEELLKTAEIKPAVNQIMLNPSDLQSDVVKVNEELGLLSEAYSPLGTGGLLGNEVVNEIANEVGKSPAQVLIRWSLEHGFLPLPKSVHDKYIAANIDVFDFELNDEQMSKLDSLHGVSDLATDPDTANF

SEQ ID NO: 5005 - protein, 411 aa, Streptococcus pyogenes
MNNKMFLNKEAGFLVHTKRKRRFAVTLVGVFFLLLACAGAIGFGQVAYAADEKTVPNFKSPDPDYPWYGYDSYRGIFARYHNLKVNLKGSKEYQAYCFNLTKYFPRPTYSTTNNFYKKIDGSGSAFKSYAANPRVLDENLDKLEKNILNVIYNGYKSNANGFMNGIEDLNAILVTQNAIWYYSDSAPLNDVNKMWEREVRNGEISESQVTLMREALKKLIDPNLEATAANKIPSGYRLNIFKSENEDYQNLLSAEYVPDDPPKPGDTSEHNPKTPELDGTPIPEDPKRPDESSEPALPPLMPELDGEEVPEVPSESLEPALPPLMPELDGEEVPEVPSESLEPALPPLMPELDGEEVPEVPSESLEPALPPLMPELDGEEVPEVPSESLEPALPPLMPELDGEEVPEKPSV

SEQ ID NO: 5006 - protein, 294 aa, Triticum aestivum
MSAPPPPASSDDDGKPADEEGVEIREVWANNLEAEFAVIRDVVDDYPYIAMDTEFPGIVCRPLGSFRSNDEYNYATLKANVDMLSLIQLGLTLSDENGALPARGTGGRPCAWQFNFRGFDPRSDPANADSIDLLRNSGIDFDRFTTEGADTGHFAELLMSSGVLLNAELQWVTFHSGYDFGYLLKLLTGRNLPDTMPGFFDLIRIYFPVLYDIKHLMKYCGSLHGGLSKLGELLGVQRVGICHQAGSDSLLTLQCFQKLKEAYFRGSTENYAGVLYGLISDGGENRPPAALLIE

SEQ ID NO: 5007 - protein, 207 aa, Shigella dysenteriae
QELDLYICLRPVRYYQGAPSPVKHPELTDMVIFRENSEDIYAGIEWKADSADAEKVIKFLREEMGVKKIRFPEHCGIGIKPCSEEGTKRLVRAAIEYAIANDRDSVTLVHKGNIMKFTEGAFKDWGYQLAREEFGGELIDGGPWLKVKNPNTGKEIVIKDVIADAFLQQILLRPAEYDVIACMNLNGDYISDALAAQVGGIGIAPGA

SEQ ID NO: 5008 - protein, 209 aa, Escherichia coli
YICLRPVRYYQGTPSPVKHPELTDMVIFRENSEDIYAGIEWKADSADAEKVIKFLREEMGVKKIRFPEHCGIGIKPCSEEGTKRLVRAAIEYAIANDRDSVTLVHKGNIMKFTEGAFKDWGYQLAREEFGGELIDGGPWLKVKNPNTGKEIVIKDVIADAFLQQILLRPAEYDVIACMNLNGDYISDALAAQVGGIGIAPGANIGDECA

SEQ ID NO: 5009 - protein, 219 aa, Escherichia coli
LDLYICLRPVRYYQGTPSPVKHPELTDMVIFRENSEDIYAGIEWKADSADAEKVIKFLREEMGVKKIRFPEHCGIGIKPCSEEGTKRLVRAAIEYAIANDRDSVTLVHKGNIMKFTEGAFKDWGYQLAREEFGGELIDGGPWLKVKNPNTGKEIVIKDVIADAFLQQILLRPAEYDVIACMNLNGDYISDALAAQVGGIGIAPGANIGDECALFEATHG

SEQ ID NO: 5010 - protein, 434 aa, Bacillus anthracis str. A2012
MFVVRPLGEIDISKNNLRRVDSLSTLREEALHMHKVHQGKLETVSKVKVENAKDLSLAYSPGVAEPCKEIYDDKSKVYEYTMKGNMVAVVTDGTAVLGLGNIGPEASLPVMEGKAVLFKSFAGVDAFPIALNTNDVDKIVETVKLMEPTFGGVNLEDIAAPNCFIIEERLKKETNIPIFHDDQHGTAIVTVAGLVNALKLVGKKMSDIKVVANGAGAAGIAIIKLLYRYGVRDIIMCDRKGAIYEGRPTGMNPVKDEVAKYTNKNRIEGSLADVVQGADVFIGVSAEGALTEEMVRTMNDDAIIFAMANPVPEIMPELAKAAGAAVVGTGRSDFANQVNNVLAFPGIFRGALDVHATQINEEMKMAAVQAIAELVAEDELNADYIIPAPFDARVAPQVAAYVAKAAMETGVARRQVDPNEVAEKTKQLALIGKE

SEQ ID NO: 5011 - protein, 294 aa, Listeria monocytogenes str. 4b F2365
MTKTLQDRMILPGNETIPYIGLGVFQVTEQEFIAGAVEKAIEVGYRLFDTAAVYNNEAIVGQAIASSAVSREELFISSKVWNGDLGFDETLFAFERTLRNLKLDYLDLYLIHWPVAGKYRDSWRAMERLHDEKLIKSIGVANFKQHHLSDLLVAANEKPVLNQVETHPLLPQNDLRKYLAEQNIAHAAWSPLAKGILMQNPVITEIAKKHQASVDQVILQWHLNRNTIIFPKSITSSRIEENSRLSYFQLDAIDMEKIDRLETGKRVGPDPDDLEYFLSSIERERAYLSGENAE

SEQ ID NO: 5012 - protein, 220 aa, Azoarcus sp. EbN1
MQNRMTMTRTDASVLSTNKVIRNTYMLLSLTLAFSALTAGLSMAMGAPRLGIIVTLAGYFGLLFATTKFRNSSLGIVFVFALTGFMGFTLGPIISSYLALPNGASIVMQAMAGTAAIFLGLSAYAVTSKKDFSFMGGFLMVGILVAFLAGLGAIFFEIPALSLTVSAAFVLLMSGLILYETSNIIHGGETNYIMATVSLFVSIFNLFTSLLHLLGFANSD

SEQ ID NO: 5013 - protein, 319 aa, Fragaria x ananassa
MAKVPSVTLSSCGDDIQTMPVIGMGTSSYPRADPETAKAAILEAIRAGYRHFDTAAAYGSEKDLGEAIAEALRLQLIKSRDELFITTKLWASFAEKDLVLPSIKASLSNLQVEYIDMYIIHWPFKLGKEVRTMPVERDLVQPLDIKSVWEAMEECKKLGLARGIGVSNFTSSMLEELLSFAEIPPAVNQLEMNPAWQLKKLRDFCKAKGIHVTAYSPLGAARTKWGDDRVLGSDIIEEIAQAKGKSTAQISLRWVYEQGVSIVTKSYNKERMRQNLDIFDFCLTEEELEKMSHLPQRKGVTFASILGPHDIVLEVDEEL

SEQ ID NO: 5014 - protein, 382 aa, Desulfovibrio desulfuricans G20
MRKTVYFIEGDGIGPEVWNAARPVIDKAVELAYGNGRSLEWKELLAGEKAYAETGTYLPQETLDTLAGAELAIKGPLGTPVGKGFRSLNVTMRQTLDLYACIRPIRYFEGIESPVKHPERVNMVVFRENTEDVYAGIEYKADTDEARKLIAFLRDELGANVDERCAVGIKPMSEKGSKRLVRRAMDFALAQGLPSVTLVHKGNIMKFTEGGFRQWGYELAHDEYAGRAVTEAQAAAGETGLVVKDRIADAMFQEVLIRPEQYSVVATSNLNGDYISDALAAQVGGLGLAPGVNMSDTLAFFEATHGTAPTIAGKDMANPGSLILCGGMLLEHLGWHEAATRIHTAMNTVIGNRTVTVDLASQMQGASTVGCRQFGELLGAAL

SEQ ID NO: 5015 - protein, 576 aa, Brassica napus
MAASFSVPSMIMEEEGRFEAEVAEVQTWWSSERFKLTRRPYTARDVVALRGHLKQGYASNEMAKKLWRTLKSHQANGTASRTFGALDPVQVTMMAKHLDTIYVSGWQCSSTHTSTNEPGPDLADYPYDTVPNKVEHLFFAQQYHDRKQREARMSMSREERAKTPFVDYLKPIIADGDTGFGGTTATVKLCKLFVERGAAGVHIEDQSSVTKKCGHMAGKVLVAVSEHINRLVAARLQFDVMGTETVLVARTDAVAATLIQSNIDSRDHQFILGVTNPSLRGKSLSSLLAEGMAVGNNGPALQAIEDQWLSSARLMTFSDAVVEALKRMNLSENEKSRRVNEWLNHARYENCLSNEQGRELAAKLGVTDLFWDWDLPRTREGFYRFQGSVTAAVVRGWAFAQIADLIWMETASPDLNECTQFAEGVKSKTPEVMLAYNLSPSFNWDASGMTDQQMMEFIPRIARLGYCWQFITLAGFHADALVVDTFAKDYARRGMLAYVERIQREERSNGVDTLAHQKWSGANYYDRYLKTVQGGISSTAAMGKGVTEEQFKETWTRPGAAGMGEGTSLVVAKSRM

SEQ ID NO: 5016 - protein, 113 aa, Brassica napus
  misc_feature (88)..(88): Xaa can be any naturally occurring amino acid
  misc_feature (101)..(101): Xaa can be any naturally occurring amino acid
MTANRSKSEKKDAEKQLRRYPYEVLGVLKNSTDQEIKSTYRKLSLKYHPDKTANDPVAADMFKEVTFSYNILSDPEKRCQYDTAGFEXAVEVEGQELEQWXLDLSSLGAVLPT

SEQ ID NO: 5017 - protein, 270 aa, Schizosaccharomyces pombe
MSTTSREDAVYLAKLAEQAERYEGMVENMKSVASTDQELTVEERNLLSVAYKNVIGARRASWRIVSSIEQKEESKGNTAQVELIKEYRQKIEQELDTICQDILTVLEKHLIPNAASAESKVFYYKMKGDYYRYLAEFAVGEKRQHSADQSLEGYKAASEIATAELAPTHPIRLGLALNFSVFYYEILNSPDRACYLAKQAFDEAISELDSLSEESYKDSTLIMQLLRDNLTLWTSDAEYSAAAAGGNTEGAQENAPSNAPEGEAEPKADA

SEQ ID NO: 5018 - protein, 483 aa, Pseudomonas aeruginosa PAO1
MQLKDAKLFRQQAYVDGAWVDADNGQTIKVNNPATGEIIGSVPKMGAAETRRAIEAADKALPAWRALTAKERANKLRRWFDLMIENQDDLARLMTIEQGKPLAEAKGEIAYAASFLEWFGEEAKRIYGDTIPGHQPDKRIIVIKQPIGVTAAITPWNFPSAMITRKAGPALAAGCTMVLKPASQTPYSALALAELAERAGIPKGVFSVVTGSAGEVGGELTSNPIVRKLTFTGSTEIGRQLMAECAQDIKKVSLELGGNAPFIVFDDADLDAAVEGALISKYRNNGQTCVCANRLYVQDGVYDAFVDKLKAAVAKLNIGNGLEAGVTTGPLIDAKAVAKVEEHIADAVSKGAKVVSGGKPHALGGTFFEPTILVDVPKNALVSKDETFGPLAPVFRFKDEAEVIAMSNDTEFGLASYFYARDLARVFRVAEQLEYGMVGINTGLISNEVAPFGGIKASGLGREGSKYGIEDYLEIKYLCLGGI

SEQ ID NO: 5019 - protein, 2229 aa, Gibberella zeae PH-1
MTTLLDALRQATQVDCDTLDANVQAIAFSEISRPLAGEPLLHHDALVKDAIEKARGALKEFQGSATFEEFVVQILTNPKLSYSTDGTMSDAHRIVNIFKALAPEFDTKRVCIKIPATWEGLQACRALEVEGIATLATTMFCMEQATLAADAQCTYIAPYVNELKVHFEAGYVDEHKAFDFCREAQTYYINHSCRTQVLAASLTSVDEVMQLAGIQHITISPNLLNGLASTKLSDWDGKLGDYFAQGPANKSWETRDYNALTKNESAWRMAFTRSGFGTSEGEFLFPVRARLMEKVTDISTSLAADVSDGWLQQTDPPEERVDLMIDPNSKRWTKVHRYFTKVLESDMAIEDVIRRSFTHHQYRMMAPTERTDVKEMQAANTKRYNALLAGRFKGIEDSLATRLTAMYFGLPAAPVDNPLEEIAMMLGLDEKEVPRYNFRPPLHFLTAHDRRNWGKETLKSEEATIDALPLPRAMEPTLSLRGGGDDDDLIGWTDDYTQEYETTALFTDGWTYLHGIYGRLPFVPRKWRSFSKVLRQLLQVKDYEYQDFSLLWYDRKLGKPKVIHDQLPLTKESPAMTFLDEHFADSTRSHKDCCALFIDNIHTDINKGPQHWEPIDGQLQSDTIKIGRSLGNAPNGPEDEVISYAYLAFPKTKVDTFKIGKYGSNQYNAHFCKTLNVLFGAPESSAHHHALFRLVDKKKNKTNWAVPIVYGAMGLPQWAWELLHPVNNPGADWMVECCWLNPGLEAVLLSNYYPKPNPYLITRNSRNGAERFNQAYRQICEMTTEAFDASVCRKIDSVFLIEGHKPKTAGELVIDGFQVRPRRDLKSWKLGIPGTPNDDTPRDLGKKLGESPNFYRTVHVNWRPGHCRLFPGWYSGGDFSVEMPRLSSTVVEFLEAMGELFKLVGPPNLNGTGPEDSCFLLTEAPSFDGLQVQDMDSPSYYIGVGATDDDWHDIRKSITSPFVSVSIVKKPKNTSWSTSISKHNLWGLRLDKEALRQNEMNGGGSRRDALQLYDLDGESVDILHGYPADPVPLEPIDPNNNVSVTTNGKPWTPTSRRRPDAFVPPRLLKIRSKSVGGAEGLHLPSTLVIGGASTPDGEPESDIGILATSRPKFRGFPPPPSEDEDDGDLAGGLAEDDHRRYSMYGDLLSDSGEEDGGGSRNKDADGDEAMEDTSLPSVPQADVIGGGEANDDDEDETPKLFGLQKIPEEKEPEDNPEDRPEQTVPPPSVTTSKPLFQASNTVGADDRAHTWATQPSIFTNEDQRAWPADAEIGLPITAAPVEKIHRLSGNVPMYSKAILTPTEQAELQHGFGDLRNILLKRTNMCPFQGCRFTWRLDQNEELNIHVFTAHAKRKCPFCDDALFGWWDKNQQIKHLGDKHPDEVKKMKVHGVQKGNISVPVTVNAPANLIGEAFAEEIRSWGPQYKLKAPPRLLTYPLLAWYDNFGTTAVKDPPKKCPIPSCSVPHLEHLSSHGVWTHFKNYHTDLEMDACPFCNLSFYVYGEKDKDGVRTVIPRSIDECIMHLDCHVYQLWDLLEPVVDQPTKVNMPSQGNKDFQTISAEKLESMRAEVVSKTVAAALARTGAATQSVADQSPPPQVSYGHVTDASQILRKCVYFEKCGAYVGSMTEKQYRRHVRVNHPKEISTLSSSSEDETDGEDQASTDDGSEDRGDDKPNDGDDGRDGAGKTAALKFGRLKPTSKPAQASTPSKPKEKAVLGKPPSPPDPDEMDISTDDNVVETESSRSEESAVMISEKTPTTKITTPQTPPPDGDSDTNEESGSSVSRGRRSVKALKSKRKAPTKRAEPDVDEDNTEDNGEKEIDDFDEDGEADGSGSKSSHTEGRGRSAKKAGKRRPRGDDDGDYEDEGDQDDDDFVMAGNNGRRYRRRAPSPDWIKVLGPEDPNFDPEDKMYCSKCLRKAPLRRAKSPNRSPIGRAGEIEAHTDKTKCCRIRNGLGSATGLPNRSGWIPANKLPGTLTSLKEDFLNRYPSYMRTMYPTSSRDHHASVWRSDPNNPENDAWFDVPWPPYEGLPPFPGDWIAPGLPWDDTPEGRQRRAMYIGNRVVDENYQYQSETDSDDDLKPDVNDIPDFQADLNPLKRPAEDEEETSDEPAPKKAKKSKTAATKTPKATGTKKTPAPKKAAAPSKTPAKTRSKAPSKAASKAPSKTPSKAASKTPSKAPSKTPSKAPSKAPSKASSKGPSKTPSRASSRKTTPSKTPSTPSTRPPSEAGDE

SEQ ID NO: 5020 - protein, 500 aa, Saccharomyces cerevisiae
MTKLHFDTAEPVKITLPNGLTYEQPTGLFINNKFMKAQDGKTYPVEDPSTENTVCEVSSATTEDVEYAIECADRAFHDTEWATQDPRERGRLLSKLADELESQIDLVSSIEALDNGKTLALARGDVTIAINCLRDAAAYADKVNGRTINTGDGYMNFTTLEPIGVCGQIIPWNFPIMMLAWKIAPALAMGNVCILKPAAVTPLNALYFASLCKKVGIPAGVVNIVPGPGRTVGAALTNDPRIRKLAFTGSTEVGKSVAVDSSESNLKKITLELGGKSAHLVFDDANIKKTLPNLVNGIFKNAGQICSSGSRIYVQEGIYDELLAAFKAYLETEIKVGNPFDKANFQGAITNRQQFDTIMNYIDIGKKEGAKILTGGEKVGDKGYFIRPTVFYDVNEDMRIVKEEIFGPVVTVAKFKTLEEGVEMANSSEFGLGSGIETESLSTGLKVAKMLKAGTVWINTYNDFDSRVPFGGVKQSGYGREMGEEVYHAYTEVKAVRIKL

SEQ ID NO: 5021 - protein, 323 aa, Triticum aestivum
MSSALDQLKATGTTVVSDSGDFASIGKYKPQDATTNPSLILAASKKEEYAKLIDVAIDYAKQKGGSVDQQVDDALDRLLVEFGKEILKIIPGKVSTEVDARYSFDTEASVNKALHLIELYGEQGISKDRILIKIAATWEGIKAAEILQRDHGINTNLTLMFSLVQAIGAAEAGAYLISPFVGRILDWFKASTKKEYTKEEDPGVLSVKQIFNYYKKFGYNTIVMGASFRNTGEITELAGCDYLTISPNLLEDLLNSSDSVPKKLDASQASSLDIEKKSYIKDEALFRFDFNEDQMAVEKLREGISKFAPVAVTLKGILKEKLS

SEQ ID NO: 5022 - protein, 481 aa, Nostoc punctiforme PCC 73102
MSDLILFWHRRDLRISDNTGLAAAKRRSPKVVGVFCLDPHILERDDVAPVRVTYMIGCLQKLQERYAQVGSQLLILHADPVQAIPALAEAINAKAVFWNWDVEPYSQERDRTIINALKEKGIEFLNQNWDQILNSPDEIRTGGNSPYTVYTPFWKNWITKPKANPVETLQNVEGLTEAEQEIAKLSGSLTLPSAKDLGFIWDEQLIISPGEAAAQERLEEFTNKAITEYQEQRNFPAVDGTSQLSAALKFGVIGIRTVWQATIEALENSRSEETAVNIRTWQQELAWREFYQHAMYNFPELADGAFRDTFKNFPWETNEEHFQAWCEGRTGYPIVDAAMRQMNESGWMHNRCRMIVASFLTKDLLINPQLGEKYFMKHLIDGDLSANNGGWQWSASSGMDPKPVRIFNPASQTQKFDPEGEYIRQWVSELRSVDTEYLVTGKIPPLERHAVGYPDPIVDHKIQQNQFKLRYQQQKNTSGGE

SEQ ID NO: 5023 - protein, 404 aa, Magnaporthe grisea 70-15
MVLNKVDLLPTSVVASWIRVLSKEYPTAAFRSSITNPFGKGSLLGLLRQFSGLLSNRKQVSVGIIGYPNTGKSSLINALRGKKVATVAPIPGETKVWQYITLTKRMYLIDCPGIVPPSNDASPQDLLLRGAVRTEKVENPEQYIPAVLAKTKLRHMERTYDLSGWKDHIHFLELLARKGGRLLKAGEPDVDGVARMVLNDFLRGKIPWFTPPPALEGDAEGVDGREGRLGEMPLKRKRDDAESVADTSMGAPSPTSDDSEDDEVSGDDEFEGFGSDSAPDATPSESEKASVAEQYIQLEASSEDDSDDDAAEDGGVAITGVGGGDDDAEPPKSLSSRNSKPSRQQRKGLHKLVKARVVSTVTFAVPLSDEGMFWPSNPMENPSSGSAIIIHSCGSLLNNAEKGT

SEQ ID NO: 5024 - protein, 359 aa, Fragaria x ananassa
MAIEQEHRKKASGWAARDSSGVLSPFNFYRRETGEKDVTFKVLYCGICHSDLHMVKNEWGFSTYPLVPGHEIVGEVTEVGSKVQKFKVGDRVGVGCIVGSCRSCENCTDHLENYCPKQILTYGAKYYDGSTTYGGYSDIMVADEHFIVRIPDNLPLDGAAPLLCAGITTYSPLRYFGLDKPGMHVGVVGLGGLGHVAVKFAKAMGVKVTVISTSPKKEEEALKHLGADSFLVSRDQDQMQAAIGTMDGIIDTVSAQHPLLPLIGLLNSHGKLVMVGAPEKPLELPVFPLLMGRKMVAGSGIGGMKETQEMIDFAARHNITADIEVIPIDYLNTAMERLVKADVRYRFVIDIGNTLKVRS

SEQ ID NO: 5025 - protein, 327 aa, Chlamydomonas reinhardtii
MQSARVSRTARHTRPSCRPQRAVAVRVSAKVNVEQLKALKAELYNYINSRGCNPISVRLGWHDSGTYDKNIAEFPARGGANGSIRFKPEIDHGANKGLAIALAILNPIKKKYPDVSYADLFQMASATAIEASGGPKIPMRYGRKDAKGPEECSPDGRLPGAAHPFADGSGSPAEHLRRVFYRMGLNDQDIVVLSGGHTLGRARPERSGFGAEKTKYTDVGPGTSTASPSGATDRPVTPKPVGQQGTSWTVNWLEFDNSYFKEIKAKRDSDLLVLPTDACIFEDDQFRPYAEKYAADQAAFFADYCVSHQKLSELGVEWEEGAPVTLD

SEQ ID NO: 5026 - protein, 109 aa, Zea mays
YVTTGVEGSIPVLIKSVSSPMVASARHFQGNWIDTAEEIDDLFLGDAEVWRRPSFGTAGPLGGDHPLVTKEGHHVLDVIFTTPIQDLGQVAEKLDKVDGVVDHGIICSN

SEQ ID NO: 5027 - protein, 581 aa, Glycine max
MCGILAVLGCSDDSRAKRVRVLELSRRLKHRGPDWSGLHQHGDCFLAHQRLAIVDPASGDQPLFNEDKSVIVTVNGEIYNHEELRKQLPNHNFRTGSDCDVIAHLYEEHGEDFVDMLDGIFSFVLLDTRDNSFIVARDAIGVTSLYIGWGLDGSVWISSEMKGLNDDCEHFECFPPGHLYSSKERGFRRWYNPPWFSEAIPSAPYDPLVLRHAFEQAVIKRLMTDVPFGVLLSGGLDSSLVASITSRYLANTKAAEQWGSKLHSFCVGLEGSPDLKAAKEVADYLGTVHHEFTFTVQDGIDAIEDVIYHIETYDVTTIRASTPMFLMSRKIKSLGVKWVISGEGSDEIFGGYLYFHKAPNKEEFHRETCRKIKALHQYDCLRANKSTFAWGLEARVPFLDKAFINAAMSIDPEWKMIKRDEGRIEKWILRRAFDDEEHPYLPKHILYRQKEQFSDGVGYSWIDGLKAHAAKHVTEKMMLNAGNIYPHNTPKTKEAYYYRMIFERFFPQNSARLTVPGGASVACSTAKAVEWDAAWSNNLDPSGRAALGVHISAYENQNNKGVEIEKIIPMDAAPLGVAIQG

SEQ ID NO: 5028 - protein, 323 aa, Pirellula sp. 1
MTLHPQAQTFVALLRELQPPRWEDLGVAKARRGFSALVDNFGAGPAMASVEDQVVEEQNCDGQVSRIPVRIYRPDDVSELAPVVMFFHGGGWVLGDVESHDTTCRRLAAASRAAVVSVEYRRSPESPFPGPVHDCFVATKAVAKNGISWGLDASRLAVMGDSAGGNLAAAVALLAKDDPDVAVKYAVLVYPVVSPAFDSESYREFESGFGLTKRTMQWFWGNYFGRAGEDFFGVDRVSDADPLADLMKADFSDFPPAHVLVAGYDVLRDEGLALADKIEASGGDVTRENASDMLHGFIHFAGQFETGVTAMQSLGNRIANQLS

SEQ ID NO: 5029 - protein, 110 aa, Zea mays
AVDKAQPNPRLCFLLRAALHLHWLLLVTSKNNKALQMSVQDANMSSDTDMSKVFEDRTFVSSILNSFPGVDPNDPSVKDLLASLHSQKEEEKKEDKSDKTEDEKNCFKLE

SEQ ID NO: 5030 - protein, 145 aa, Glycine max
VAEKYPEITYEEVIIDNCCMTLVKNPGTFDVLVMPNLYGDIISDLCAGLIGGLGLTPSCNIGEGGICLAEAVHGSAPDISGKNLANPTALMLSAVMMLRHLQFNDQADRIHNAILQTIAEGKYRTADLGGKSSTSDYTKAVCDHI

SEQ ID NO: 5031 - protein, 176 aa, Triticum aestivum
  misc_feature (164)..(164): Xaa can be any naturally occurring amino acid
MAPTVMASSATSVVPYQGLKSTAGLPVSRRSNGASLGSVSNGGRIRCMQVWPIEGIKKLETLSYLPPLSTEALLKQVEYLIRSKWVPCLEFSKVGFIFREHNTSPGYYDGRYWTMWKLPMYGCTDSTQVINEVEEVMKEYPDAYVRIIGFDNMRQVQCVSFIAXFKPPGCEESGKA

SEQ ID NO: 5032 - protein, 213 aa, Escherichia coli
YICLRPVRYYQGTPSPVKHPELTDMVIFRENSEDIYAGIEWKADSADAEKVIKFLREEMGVKKIRFPEHCGIGIKPCSEEGTKRLVRAAIEYAIANDRDSVTLVHKGNIMKFTEGAFKYWGYQLAREEFGGELIDGGPWLKVKKPNTGKEIVIKDVIADAFLQQILLRPAEYDVIACMNLNGDYISDALAAQVGGIGIAPGANIGDECALFEA

SEQ ID NO: 5033 - protein, 493 aa, Streptococcus pyogenes
MNNKMFLNKEAGFLAHTKRKRRFAVTLVGVFFMLLVCAGAIGFGQVAYAADEKTVPNRINSNPEFPWYGYDSYSGRLLRYHNLKVNLNGSKEYQAYCFNLKRFEPKKEESSSPNWYKKLDGSTETFKKYAENPRFSGEELRRHILKVLYNGYPNSNEIMKGIDPLNAILVTQNAIWYYSDSAPINDINNFFTSEANDLNIPPQQLTLMREALRKLISSDENLVKQVPSNFKLSIFESSDKSYQNLLSAEYVPDDPPKPGDTSEHNPKTPELDGTPIPEDPKRPDESSEPALPPLMPELDGEEVPEVPSESLEPALPPLMPELDGEEVPEVPSESLEPALPPLMPELDGEEVPEVPNESLEPALPPLMPELDGQEVPEVPSESLEPALPPLMPELDGEEIPEVPSESLEPALPPLMPELDGQEVPEKPSVDLPIEVPRYEFNNKDQSPLAGESGETEYITEVYGNQQNPVDIDKKLPNETGFSGNMVETEDTKE

SEQ ID NO: 5034 - protein, 207 aa, Escherichia coli
DLYICLRPVRYYQGTPSPVKHPELTDMVIFRENSEDIYAGIEWKADSADAEKVIKFLREEMGVKKIRFPEHCGIGIKPCSEEGTKRLVRAAIEYAIANDRDSVTLVHKGNIMKFTEGAFKDWGYQLAREEFGGELIDGGPWLKVKNPNTGKEIVIKDVIADAFLQQILLRPAEYDVIACMNLNGDYISDALAAQVGGIGIAPGANIG

SEQ ID NO: 5035 - protein, 390 aa, Streptococcus pyogenes
YAADEKTVPNRINSNPEFPWYGYDSYSGRLLRYHNLKVNLNGSKEYQAYCFNLKRFEPKKEESSSPNWYKKLDGSTETFKKYAENPRFSGEELRRHILKVLYNGYPNSNEIMKGIDPLNAILVTQNAIWYYSDSAPINDINNFFTSEANDLNIPPQQLTLMREALRKLISSDENLVKQVPSNFKLSIFESSDKSYQNLLSAEYVPDDPPKPGDTSEHNPKTPELDGTPIPEDPKRPDESSEPALPPLMPELDGEEVPEVPSESLEPALPPLMPELDGEEVPEVPSESLEPALPPLMPELDGEEVPEVPNESLEPALPPLMPELDGQEVPEVPSESLEPALPPLMPELDGEEIPEVPSESLEPALPPLMPELDGQEVPEKPSVDLPIEVPR

SEQ ID NO: 5036 - protein, 319 aa, Candida albicans SC5314
MSNLTSSIQLTRQSTYKLNNGSHIPVIGFGTYLLDASQAADLTYQALKDGYRHIDTALAYHNEKEVSQGIKRFLKDHPEVQRSDIWFTTKIDTQSLGYEETKKAVERIKNDVKDNIEYVDLILIHSPLASKARRLGTYQYLQELVLNPNDAPLIVKSIGVSNYGVDHLEELFNWEGYLIKPVLNQLELHPWLPRLELREYLYKHEILAEAYSPLTQGYKLDDPELLAISKESGLTPAEILLKWSFLQGFIVLVKSDKPTRIQQNLDILPQGKKDDDELQEGVNLGVVSLNPDIIEKLNKPESHVVLTWGGKDPTLFKDA

SEQ ID NO: 5037 - protein, 144 aa, Triticum aestivum
  misc_feature (90)..(90): Xaa can be any naturally occurring amino acid
  misc_feature (114)..(114): Xaa can be any naturally occurring amino acid
  misc_feature (127)..(127): Xaa can be any naturally occurring amino acid
MAPTVMASSATSVAPFQGLKSTAGLPVSRRSNGASLGSVSNGGRIRCMQVWPIEGIKKFETLSYLPPLSTEALLKQVDYLIRSKWVPCLXVQQVGFIFREHNASPGYYEGRYWXMWKLPKFGVTDAXQVINKVEEARRIPDRFR

SEQ ID NO: 5038 - protein, 201 aa, Glycine max
  misc_feature (49)..(49): Xaa can be any naturally occurring amino acid
ILEANKKCDVTVYTKIFLKFPYQFWPSDPGNEFFIYAHDQRGYYTFWQXMENAYPGSDILVVTLTNGESKRVEAQSDEDTLREAMEVLKDMFGPNIPDATDILVPRWWNNRFQRGSYSNYPVISNLQVVRDVKAPVGRIFFTGEHTSERFSGYVHGAYLAGINSSKELLEEMRKDNKRKNKSQSRVLEPLSALTECNIPRQ

SEQ ID NO: 5039 - protein, 458 aa, Pseudomonas fluorescens
MTTTSSSLADKDMRHQLHPYTNARAHEELGPLVIDRGDGVFVIDENGKPYIEAMAGLWSAALGFSNKRLVAAAEKQMSTLPFYHLFGHKAHAPSIELAEKLINMAPVPMSKVFFTNSGSEANDTVIKLVWYLNNAQGKPARKKIISRIGGYHGITLASASLTGLLANQRGFDVPLPGFLHVGCPHHYRHALPHETEEQFADRLAAELDALIVKEGPETIAAFVGEPLMGPGGVIVPPRTYWEKIQRVCRKHDILVVADEVICGFGRTGKDVRQPDFGIEPDIMILSKQLSSSYQPISAILINDRVYQGIADQTKSFGALGHGFTGGGHPVAAAVRLENLKIIDEENLVVHAAHMGELLRRGLQGFSDHPLVGEVRGAGLIAAVELVADRATKAPLDAPGTLGRFLAGRAQEHGMITRNLGDAIAFCPPLIINEDEDEVQSIVDRFGMALDDTSKWVNG

SEQ ID NO: 5040 - protein, 218 aa, Escherichia coli
ELDLYICLRPVRYYQGTPSPVKHPELTDMVIFRENSEDIYAGIEWKADSADAEKVIKFLREEMGVKKIRFPEHCGIGIKPCSEEGTKRLVRAAIEYAIANDRDSVTLVHKGNIMKFTEGAFKDWGYQLAREEFGGELIDGGPWLKVKNPNTGKEIVIKDVIADAFLQQILLRPAEYDVIACMNLNGDYISDALAAQVGGIGIAPGANIGDECALFEAT

SEQ ID NO: 5041 - protein, 135 aa, Brassica napus
  misc_feature (127)..(127): Xaa can be any naturally occurring amino acid
NIIAGSLTYYTRKHLPGLKRRRGGPEASGRFSSSGNVLSEEEQKHLLEEIQDLLSMQKGLVPTKVFVDMLRVAKILKASPTCIANLEKRIGMQLDQAGVEDLVMPSFTHTMETLYDVDSVQRIFDHXLGTDQIMT

SEQ ID NO: 5042 - protein, 332 aa, Gibberella zeae PH-1
MSNQPPYPLHESVVGRIDPEYAAFYNKHIIDKQQVHLQPIEASRASGVLIPGSGPLQPVASTVDYKVERRESQGPDVSVRCFTPNGEKPEAGWPVCIYYHGGGWVLGTIETENVIASHLCARGKCVVVSVDYRLAPENPFPAAVHDSWEAVLWVIGEGKDILGLDTSKLATGGSSAGANLAAVMCQRAADLGSPQFSLQLLSVPVMDNTADISNNESWKENQNSPALPAPKMLWYRNHYLPNKEDWSHPEASPLFWKGDFSKLPPACFVVGELDVLRTEGEQFAKKLVDAGVKAEVNMMKGQPHPFIAMDAVLEAGSRAITLFCDALYKTIK

SEQ ID NO: 5043 - protein, 297 aa, Candida albicans SC5314
MAQELTHPAIKDGWFAEISDTMWPGQAMSLKVEKVLHVEKSKYQDVLVFKSTTYGNVLVLDNCIQVTERDEFSYQEMITHLALNSHPNPKKALVIGGGDGGVLREILKHESIEEAWLCDIDETVIEVSKKYLPNMAKSYDDPRTRVHIGDGFKFLEEYKNQFDVIITDSSDPEGPAESLFQKPYFQLLKDALTEKGVITTQAENMWIHMDIISKLKKDCNEIFPVAEYAYTMIPTYPSGSIGFMVCSKDPNANVSKPIRFDWSDEFVAKNLKYYNKKIHEAAFVLPTWADQVLNKKD

SEQ ID NO: 5044 - protein, 324 aa, Glycine max
TRLIDCVSFCHNKGVFHRDLKLENVLVDAKGNIKITDFNLSALPQHFREDGLLHTTCGSPNYVAPEILANKGYDGATSDIWSCGVILYVILTGYLPFDDRNLAVLYQKIFKGEVQIPRWLSPGSQNIIKRMLDANPKTRITMAMIKEFGSSKEGYTPANPEDEEESVYIDDEDFSIHDVSHEADQGCPRSPTLINAFQLISMSSSLDLSGLFEQEDVSERKIRFTSIHSPKDLVERIEDIVTEMGFRVQKKNGMLKVIQEIKVQKCPGSFSVEAEVFEISPSLYVVELSKSCGDASLYRQLCKKLSNDLGVHTRQQLGSSEVMA

SEQ ID NO: 5045 - protein, 413 aa, Dechloromonas aromatica RCB
MTSHIKVPQGGSKIVPGQAIPDNPIIPFIEGDGIGIDITPVMIKVIDAAVEKAYGGKKKIHWMEVYAGEKSTRLYGSDEWLPKETFDALKEYSVSIKGPMTTPVGGGIRSLNVALRQELDLYQCVRPVRYFKGVPSPLKHPELTNMVIFRENTEDIYAGIEWACGSEGVKKVVKFLQEEMGVKKIRFPETSGIGIKPISIEGTSRLVRAAIKYAIDNDRKSVTIVHKGNIMKFTEGLFRDACYKLAQDEFGAELIDGGPWCRIKNPKNGREIIIKDSIADAFLQQILLRPAEYDVIATTNLNGDYISDALAAQVGGIGIAPGANISDRYACFEATHGTAPKYAGLDKVNPGSLILSAEMMLRHLGWGDAANLVLKAMEAAIGDKQVTYDFARQMEGANELSCSEFGDAMIARM

SEQ ID NO: 5046 - protein, 387 aa, Ustilago maydis 521
MPGKVAPNNSLATEPAERNVSFVLQEIEKVSFEERPIVAPKPGQVQVNIRQTGLCASDCHYLHHGRIGDFVVRKPMVLGHESSGIVTAVGEGVTTHKVGDRVALEPGVPCRSCQVCLNGMYNQCAHLEFAATPPYDGTLCTYYNIQSSFAHHVPDHMSLEEASLMEPLSVAVYSAGMRGQVKAMENVLVFGAGPIGLLNAAVCKAYSAKRVVVVDVVESKLEFAKEWCATSTFKPSLPQEGETKAETAARNAQHLISSLGDDVAAREGFDLVLECTGAEPCINMGIQALRPQGRFVQVGMGRSEVEFPITRVCVKEINVTGSFRYGAGTYKTSINLVSTGAIDVTKMVTHRFLFKDAVKAFETTTKGVGEDGKTAIKVQISQGEGKQ

SEQ ID NO: 5047 - protein, 165 aa, Pseudomonas putida KT2440
MAPGQAPCRFRQIGRLSANRQFSIRPRACFSLESWRRVTALCLHGSQQFVTWASSRDLLQPVRRLLLPATQPSNLSLTKKCESNCHQNLSFIGNKTMAERQKGTVKWFNDEKGYGFITPESGPDLFVHFRAIEGNGFKSLKEGQQVTFEAVQGQKGMQADKVQPV

SEQ ID NO: 5048 - protein, 343 aa, Triticum aestivum
  misc_feature (142)..(142): Xaa can be any naturally occurring amino acid
  misc_feature (156)..(156): Xaa can be any naturally occurring amino acid
  misc_feature (174)..(174): Xaa can be any naturally occurring amino acid
  misc_feature (271)..(271): Xaa can be any naturally occurring amino acid
MASGIASMSSSLAVLLLGVLLLSRGGVGNAARHLAEAEYPPVPPNVPAPLPKPDVPPPLPAPEVLPKPGLPVLPPPLAKPNVTTYPAAAEVLPKPGLPPLPTPEEQPKPELAPLPAPDVLPAPPLPAPDVLPKPELPTPDEXPRPELPPLPKPERXPPTVPEVPKPDVEPKSGXPPVPKGELPPKTVPPPLPTGEIPPKPVPPPFPTGELPPKPEPELLPKTDEPPKPELPPLPTDDLPSRPDVELPPKPELPPLPTDDLPSKPAQPPRRXPPKPNHPPPPPPTPPRKGDYPLEPYVQLSEPPCMPNIRASFPAPPLAGVPGPSMARVPASPRIRDLFVLRTC

SEQ ID NO: 5049 - protein, 128 aa, Triticum aestivum
MGARGHWTWTEGVEKRICALQTHRPKVGRIEAMASRLLAAASSSSSSSSPLARLISSRRMAGAADHHGSTKVNMWQEPLNPGNWKEEHFVLTSLAMWGAIIYGGLKVFGGKKEVKTEAGSAPAAAPAH

SEQ ID NO: 5050 - protein, 473 aa, Zea mays
  misc_feature (427)..(427): Xaa can be any naturally occurring amino acid
MDERRTILMDRYEIGRQLGQGNFAKVYFARNLTDGQSVAIKMIDKDKITRVGLIVQIKREISIMRLVKHPNVLQLFEVMASKSKIYFVLEYAKGGELFNKVSKAKLSEDAARRYFHQLVNAVDYCHSRGVYHRDLKPENLLLDENENLRVSDFGLSALSESRRHDGLLHTTCGTPAYVAPEVLGRRGYDGTKADIWSCGVILFVLVAGYLPFHDPNLIEMYRKISRAEYRCPRSFSGELKDLLFRMLDPDPSTRISISRIKRSTWYRKPIEANAAKIKHGTARDTTVRDGEAATASSSIECSNRAEEDQGSSSLPNLNAFDIISLSTGFDLSNLFEERHGRREERFTTRQPVGAVFGRLKELAEAVEAEKFQKEREAGSLNLACAEGKGLKGVPWKLDAEVFELAPSFLLVELKKASRDTIEYQRLXVREEVRPALKDMVWAWQSDRHQQQQQREQSVQGEQQQPLSSLPPQQ

SEQ ID NO: 5051 - protein, 313 aa, Brassica napus
  misc_feature (82)..(82): Xaa can be any naturally occurring amino acid
GVLPYTTKNVEDDYFLGQILGQGQFGTTFLCTHKKTAQKLACKSIPKRKLLCQEDYDDVLREIQIMHHLSEFPNVVRIRTRXEDTSSVHIVMELCEGGELFDRIVKRGHYSEREAAKLIKTIVGVVEACHSLGVMHRDLKPENFLFASCDEDASLKSTDFGLSVFCKPGATFSELVGSAYYVAPEVLHKHYSRECDVWSAGVILYILLCGFPPFWDESEFGIFRKILQGKIDFETRPWPSISESAKDLIVKMLEKDPKKRLTAHQVLCHPWIGDDKGAPDKPLDCAVLSRLKNFSAMDKLKKMAFRVIAERLS

SEQ ID NO: 5052 - protein, 2100 aa, Zea mays
  misc_feature (1712)..(1712): Xaa can be any naturally occurring amino acid
  misc_feature (1721)..(1721): Xaa can be any naturally occurring amino acid
  misc_feature (2059)..(2059): Xaa can be any naturally occurring amino acid
  misc_feature (2068)..(2068): Xaa can be any naturally occurring amino acid
MTRVIHDSGDDMQKEALDLVSSDVNFPKGHFPDYRIGPNNQIIDPEETHEAVPLKEIVAKETAQLLEQHKRLSVRDLKEKFEKGLSGASKLSEEAKRREAASLDRQVLLKKLRDVLDTLKGRVAGRNRDDAEEAISLVEALAVQLTQREGELIYEKAEVKKLANFLKQATEDARKVAEEERALALAEIEKARAAIEKVEKAWRVHDFASSSREKAEIEELRKEVREARRIKMLHQPSKVMDMEFELQALRTLISEKTQLCNQLKKELAMIKRLEDDSSGLFELEGSNTLGSQLCIIPRVDGASNITNCPIQWYRVISGGTRELISGATKFMYAPEPFDVGRLLQAEIVLNADKIIVQTDGPVDNVLSEPTLAVSRAVMWGRTYMRARDARRAEARAFKVGANSNSPKEGSSKESGNSSTKEAMGDSNDFKAFAEALKSLQACVVANAQAIASLTADRTSASGHKIGYDEHHGDRPPRFQKLDFPRYDGKTDPLIFINRCESYFHQQRIMEEEKVWMASYNLEHGAHMWYIQVQTDEGTPSWRRFKELLNLRYDPPLRAAPLFELADCRRTGSVADYRDLFQALLPRAGPLDEAQWVQLFTGGLRPPLSLDVQRYTRGHNRVCTRIFYINDVELDTADESATGDDHDTETPMFSLDAVAGVFVGNTVQLQVVVGAATFVALIDTGSTHIFIGEAAARRSGLTIEPRPRLTTTVANGERVACPGVLRQAPVDMGSMVFGVDLFVMPLAGSRTGRGASASTPRALNALTVKDAFPIPIVDELLDELHGARLFTKLDLRSGYHQVQMRQEDVHKTAFCTHDGLYEFLVMPFGLCNAPATFQALMNDVLRTYLRRFVLVFFDDILIYNTSWADHLRHLRVVLNTLRQHRLFVKRSKCSFGVDFVAYLGHVISAAGVAMDPAKVQAIHDWPQPRSARAVRGFLGLAGYYRKFVHNYGAIAAPLTTLLKKEGFVWPDEATAAFSALKGAVTTTPVLTLPDFTKSFVVECDASTYGFRVVLIQEAHPIAFFNRPVAPRHRSLAAYERELIGLVLAVRHWWSYLWGRRFIVKTDHYNLKYLLDQRLATISQHHWVGKLLGFDFSVEYKSGATNTDFVRACPTCQRYKSEHLHPAGLLTPLPIPTVVWADIGLNFIEALPRVNVKSVILSVVDRFSKYCHFIALGHPYTAESSDGQTEAANRVIIMYLRCFTGDRTRQWLRWLPWAEYVYNTAYQSSLRETPFRVVYGRDPPSIRSYEPGETRVDAVARDMEEREAFLADVRHRPEQAHAVQKRHYDKQHRPVTYAVGDWALLRLRQRAPSSLPQQTMGKLKPRFLGPYRVIELINNVVVRLELPPHARIHDVFHVGTLKFVLVQWRGEPTTSATWEDLDKFRATYPDFQLEDELDLEGGRDVMWGRTYMRARNARRAEARAFKVGANSSSPKEGSSKESGSSSTKEVSSKEESGSSSTKEAAGLERYVDSLMKRTDIEFNVVVTQMNGKDYSSNSVHVFHIGKLRIKLRKGWSTKARESYSTTMKLCGSRGGGNAAARAVFWHPRKGSSYTLAFETDRDRNAAIMIARKFASNCNHFDSLCHFDTPNGWDLHKDMVVKYKRGCFGSGSAVAAHAGGEEESRAARLQSFFASVLSGLFGQAEAEDEDEDEEMPTRNHNAAAAAAPQHHHHNRGGAPALGKSKAVPGRADAMNRRAPLGDIGNLVSVRPAEGXLSCRSRSIXPITRSFGAQLVKNVQANAAIKNAAILPARHAPRQERKAPAKQPPPEDVIVLSSDSEQSRTQLESSASSVRSRKKVINTLSSVLSARSKAACGITDKRRQVAVIEDIDKLDVNNELAVVEYIEDIYTFYKIAQHDRRPCDYIDTQVEINPKMRAILAGWIIEVHHKFELMPETLYLTMYIIDQYLSLQPVLRRELQLVGVSAMLIACKYEEIWAPEVNDFILISDSAYSREQILSMEKGILNSLEWNLTVPTVYMFLVRFLKAAALGNKVEKEMENMVFFFAELALMQYGLVTRLPSLVAASVVYAARLTLKRAPLWTDTLKHHTGFRESETELIECTXCWSAHTRPXADSKLRSVYKKYSSEQFGGVALRPPAAAVEIK

SEQ ID NO: 5053 - protein, 388 aa, Burkholderia sacchari
MSETDNTTQAAGAIKPKKSVALSGVCAGNTALCTVGRTGNDLHYRGYDILDLATACEFEEVAYLLVHGKLPNIAELAAYKTKLKALRGLPANVKAALEWVPASAHPMDVMRTGVSVLGTVLPEKDDHNLPGARDIADRLMASLGSMLLYWYHNSHNGKRIEVETDDDSIGGHFLHLLHGREPSKSWVDAMHVSLNLYAEHEFNASTFTGRVIAGTGSDMYSAITGAIGALRGPKHGGANEVAFEIQSRYDTPDQAESDIRRRVEAKAVVIGFGHPVYTISDPRNKVIKEVAKKLSKEQSNLKLFDIAERLESTMWEIKKMFPNLDWFSAVSYHMMGVPTAMFTPLFVISRTAGWSAHIIEQRIDNKIIRPSANYTGPENLKFTLIGKR

SEQ ID NO: 5054 - protein, 483 aa, Rickettsia prowazekii str. Madrid E
MAAFTPITIAYGDGIGPEIMEAVLYILRKAEARISLETIEVGEKLYKKHYTSGISEESWDVIQRTGIILKAPITTPQSGGYKSLNVTIRKTLQLFANIRPVVSFYPFTRTLHPNLNLTIIRENEEDLYSGVEYRQTHNMYESMKLISHTGCKKIIRYAFEYAIKNNRKKVTCLTKDNIMKFSDGIFHRVFNEIAKEYPQINNEHYIIDIGTAKLATKPEIFDIIVTSNLYGDIISDVAAEISGSVGLAGSANIGQHYAMFEAVHGSAPDIAGKGIANPSGLLNAAIMMLVHIGQGDIASLIENAWKKTIEDGVHTFDIYNEHSSSKKVCTKEFAVEVIKRLGQLPITLPKAAYPLIVKKQESNIDYKIDTREVKKLVGTDIFINMHVFSAHDIADKINKLDIGNFELKTISSKGLKLWPHDSRFEIISDHWCCRFMNKDGTEIKHLDITMLLQSLSKANIDFIKVENLFEFDGVAWYSLAQGE

SEQ ID NO: 5055 - protein, 176 aa, Zea mays
MAAASSATSVHDFTVKDSSGKDVDLSVYRGKVLLIVNVASQCGLTNSNYTQQAQLYEKYKNQGLFLIHCSCFEILAFPCNQFGGQEPGTNEEIAQFACTRFKADYPIFDKVDVNGNNAAPIYKFLKSSKGGLFGDSIKWNFSKFLVDKEGRVVDRYAPTTSPLSIEKDIKKLLGSS

SEQ ID NO: 5056 - protein, 225 aa, Brassica napus var. napus
QHQLIALLSNHHPVQKPPTPTYSPPIKPPPVQKPPTPTYSPPVKPPPVKPPTPIYSPPVMPPPVQQPPTPSYSPPVKPPPVQKPPTPTYSPPVKPPPVQKPPTPTYSPPIKPPPVQKPPTPTYSPPIKPPPVQKPPTPTYSPPVKPPPVQKPPTPTYSPPIKPPPVKPPTPIYSPPVKPPPVQKPPTPTYSPPIKPPPVKPPTPTYSPPVKPPPVQKPPTPTYSP

SEQ ID NO: 5057 - protein, 305 aa, Corynebacterium glutamicum ATCC 13032
MSVVGTGLFFGSPEEERDKLMQSLMDQKNKLSKSEGIPLVTLNDGKTIPQLGFGVFKVDPDEAERVVTEALEVGYRHIDTAAIYGNEEGVGRAIAKSGIPREELFITTKLWNDRHLDVEAAFEESLQKLGLDYVDLYLVHWPAPKNDNYVAAWKGLEKLGDRARSIGVCNFLPEHLEKLLAEATTVPAINQIELHPALQQRDAVEASLAAGITVESWGPLGQGRFDLGAEEPIAAAAKNHGKTPAQVVIRWHLQNGFVVFPKTVTKSRMVENIDVFDFELSDEEMAAITALERNDRGGSHPNDLN

SEQ ID NO: 5058 - protein, 400 aa, Streptococcus pyogenes
VFFMLLVCAGAIGFGQVAYAADEKTVPNRINSNPEFPWYGYDSYSGRLLRYHNLKVNLNGSKEYQAYCFNLKRFEPKKEESSSPNWYKKLDGSTETFKKYAENPRFSGEELRRHILKVLYNGYPNSNEIMKGIDPLNAILVTQNAIWYYSDSAPINDINNFFTSEANDLNIPPQQLTLMREALRKLISSDENLVKQVPSNFKLSIFESSDKSYQNLLSAEYVPDDPPKPGDTSEHNPKTPELDGTPIPEDPKRPDESSEPALPPLMPELDGEEVPEVPSESLEPALPPLMPELDGEEVPEVPSESLEPALPPLMPELDGEEVPEVPNESLEPALPPLMPELDGQEVPEVPSESLEPALPPLMPELDGEEIPEVPSESLEPALPPLMPELDGQEVPEKPSV

SEQ ID NO: 5059 - protein, 192 aa, Glycine max
AISDIGVGIENKIILHFKNVFWPNVEFLGVVAETSYGCSYFLNLHKATGRPVLVYMPAGQLAKDIEKMSDEAAASFAFMQLKKILPDTSSPIQYLVSRWGTDINTLGSYSYDAVGKPHDLYERLRVPVDNLFFAGEATSMLYTGSVHGAYSTGMMAAEDCRMRVLERYGELDLVPPVMGEDASVIPLQISRL

SEQ ID NO: 5060 - protein, 218 aa, Escherichia coli
QELDLYICLRPVRYYQGTPSPVKHPELTDMVIFRENSEDIYAGIEWKADSADAEKVIKFLREEMGVKKIRFPEHCGIGIKPCSEEGTKRLVRAAIEYAIANDRDSVTLVHKGNIMKFTEGAFKDWGYQLAREEFGGEPIDGGPWLKVKNPNTGKEIVIKDVIADAFLQQILLRPAEYDVIACMNLNGDYISDALAAQVGGIGIAPGANIGDECALFEA

SEQ ID NO: 5061 - protein, 404 aa, Blastocladiella emersonii
APAPASPSSPSTAAGAGSASSTASSTTTAAASGNLSIPSPLVAGSTTSSSISHAQKMATAAHTNSDYSPSPAATPSAPLDAVAERRRRKTTLADLELRQTLGTGSFGRVHLVRLRSTGKYYAMKVLKKAEVVKHKQVEHTLNEKGILEQIDHPFLVALHSSFQDSANLYMVMEYVTGGELFTYLRRSQRFSNNVAKFYAAEVVLAFEYLHSKDIIYRDLKPENLLLDAQGHVKITDFGFAKHVPDITWTLCGTPDYLAPEIIQSRGYGRAVDWYALGVLIFEMLAGYPPFYDEDHVRMYEKILQGKVKWPSHFDPAAKDLLKRLLTTDLTKRYGNLKGGSKDIKMHKWFAGLDWTKLFNKQIPPPYTPPNRGDGDTSNFDAYPEETEPYGKVQPDPYAQLFKDF

SEQ ID NO: 5062 - protein, 217 aa, Escherichia coli
DLYICLRPVRYYQGTPSPVKHPELTDMVIFRENSEDIYAGIEWKADSADAEKVIKFLREEMGVKKIRFPEHCGIGIKPCSEEGTKRLVRAAIEYAIANDRDSVTLVHKGNIMKFTEGAFKDWGYQLAREEFGGELIDGGPWLKVKNPNTGKEIVIKDVIADAFLQQILLRPAEYDVIACMNLNGDYISDALAAQVGGIGIAPGANIGDECALFEATH

SEQ ID NO: 5063 - protein, 335 aa, Schizosaccharomyces pombe
MQQTYKPNTSALKDGAPKATVDQKQLLPCKYRVGRVLGGGTYATVREAVHIETNKMYAAKIMNKKMMEKKQDFVKNEIAILKRVSYEHPNILHLVDFFETVNNLYLITELATGGELFDRICAKGSFYEADAAALMRTTTSAVKYLHDNGIVHRDLKPENLLYRSKDPNSDLLIADFGLSHFYEDSQYYMLMTACGTPEYMAPEVFRRTGYGKPVDMWAIGVITYFLLSGYTPFARPSQVEVIEAILANEYTFNDPCWSGISETAKDFIKKCLENDPSKRLTAADALKHPFLSEKRPATSNLLPNVRENFNARKTFRTAYNAVRAFNTWKKLENKH

SEQ ID NO: 5064 - protein, 364 aa, Mycobacterium avium subsp. paratuberculosis str. k10
MTEADSAQALDEPLGDHVLELQIAEVIAETDDARSLVFAVPDDDGDPDIPPERLRYAPGQFLTLRVPSERTGSVARCYSLCSSPFTDDALTVTVKRTADGYASNWLCDNARPGMRIHVLAPSGNFVPKTLGDDFLLMAAGSGITPIMSIAKSALSEGSGQVTLLYANRDERSVIFADALRELSAKYPDRLTVLHWLESLQGLPSVTALAQLAAPYTDRPVYICGPGAFMDSAREALETLKVPAAQIHIEVFKSLDSDPFAAVKIEDTAEGDEPPATAVVELDGETHTVSWPRNAKLLDVLLAKGLDAPFSCREGHCGACACTLRKGQVSMEVNDVLEQQDLDEGLILACQSHPESDSVEVTYDE

SEQ ID NO: 5065 - protein, 447 aa, Aspergillus nidulans FGSC A4
MPHSVLYTKIDTRPPEVIHSRGNYLHTSDGRTIFDASGGAAVACLGHNEPQVKQAIMAQLDKVAYIYSPFFTVPAAEEIATFLTESTGGAMSKVFIVSSGTEAIEAALKMTRQYFTELSKPQLQRTKFIARRQSYHGNTLGSLAAGGHKARRAIFEPILAASTSHVSPCYPYREMKKGESNEEYVSRLAEELENEFQRVGPDTVCAFIAETMSGTTLGCIPAVPGYLKAMKQVCDRHGALFVLDEVMSGMGRTGTLHAWQQEGVVPDLQTVAKGLGAGYAPVGALLVGNRVADVLSKGTGSFTHSQTYQGHPIACAAACAVQKIIQKENLLDNVRRQGEYLGRLLNERLGGHRNVGDVRGRGLFWALEFVRDKETKEPFPAEAGIAQKVHLTGLQKEHSISVIPGAGVADGRNGDIIQIAPAYNVSKEDIELIVERVEGVVHAAFGA

SEQ ID NO: 5066 - protein, 214 aa, Escherichia coli
LYICLRPVRYYQGTPSPVKHPELTDMVIFRENSEDIYAGIEWKADSADAEKVIKFLREEMGVKKIRFPEHCGIGIKPCSEEGTKRLVRAAIEYAIANDRDSVTLVHKGNIMKFTEGAFKDWGYQLAREEFGGEPIDGGPWLKVKNPNTGKEIVIKDVIADAFLQQILLRPAEYDVIACMNLNGDYISDALAAQVGGIGIAPGANIGDECALFEA

SEQ ID NO: 5067 - protein, 313 aa, Shewanella oneidensis MR-1
MAIQWYPGHMHKARKEIEEAMPQVDLVIEVLDARIPYSSENPMVSKLRGDKPCIKLLNKSDLADPEVTAQWIEYLEREQGVKATAITTLQPGMLKMLPDLCRKLVPSRDKTEKDIRTMIMGIPNVGKSTIINTLAGRVIAKTGNEPAVTKTQQRINLRNGIVLSDTPGILWPKVDNEASSYRLAVTGAIKDTAMEYEDVALFAAGYFLKAYPKEICERYNISELPKDDMALLEEIGRKRGALRPGGRIDLHKASELLLHEYRSGKIGLLSLETPAMAEIEKAEVERILAEKAAEKAAKLEAEKLKRSGKRHND

SEQ ID NO: 5068 - protein, 158 aa, Brassica napus
  misc_feature (12)..(12): Xaa can be any naturally occurring amino acid
  misc_feature (14)..(16): Xaa can be any naturally occurring amino acid
  misc_feature (19)..(19): Xaa can be any naturally occurring amino acid
  misc_feature (21)..(22): Xaa can be any naturally occurring amino acid
  misc_feature (26)..(26): Xaa can be any naturally occurring amino acid
  misc_feature (32)..(32): Xaa can be any naturally occurring amino acid
  misc_feature (35)..(35): Xaa can be any naturally occurring amino acid
  misc_feature (50)..(50): Xaa can be any naturally occurring amino acid
  misc_feature (54)..(55): Xaa can be any naturally occurring amino acid
  misc_feature (57)..(57): Xaa can be any naturally occurring amino acid
  misc_feature (60)..(62): Xaa can be any naturally occurring amino acid
  misc_feature (65)..(65): Xaa can be any naturally occurring amino acid
  misc_feature (92)..(92): Xaa can be any naturally occurring amino acid
  misc_feature (94)..(94): Xaa can be any naturally occurring amino acid
  misc_feature (100)..(100): Xaa can be any naturally occurring amino acid
  misc_feature (105)..(105): Xaa can be any naturally occurring amino acid
  misc_feature (114)..(115): Xaa can be any naturally occurring amino acid
  misc_feature (118)..(118): Xaa can be any naturally occurring amino acid
  misc_feature (121)..(121): Xaa can be any naturally occurring amino acid
  misc_feature (126)..(126): Xaa can be any naturally occurring amino acid
  misc_feature (137)..(140): Xaa can be any naturally occurring amino acid
  misc_feature (144)..(144): Xaa can be any naturally occurring amino acid
  misc_feature (149)..(149): Xaa can be any naturally occurring amino acid
MVSSMLSSAAVXTXXXQDXMXXPFTXLKSSAXFPXTRKANNDITSIASPXGRVXXMXVGXXXGKXKFETLSYLPDLTEVELYKEVDYLLRNXWXPCDEFXLQNGXVYREHGSTXXYYXGRXYWTMXKLPLVACADSXXXXNESXECKTXYPNAFIKII

SEQ ID NO: 5069 - protein, 207 aa, Escherichia coli
RYYQGTPSPVKHPELTDMVIFRENSEDIYAGIEWKADSADAEKVIKFLREEMGVKKIRFPEHCGIGIKPCSEEGTKRLVRAAIEYAIANDRDSVTLVHKGNIMKFTEGAFKDWGYQLAREEFGGELIDGGPWLKVKNPNTGKEIVIKDVIADAFLQQILLRPAEYDVIACMNLNGDYISDALAAQVGGIGIAPGANIGDECALFEAT

SEQ ID NO: 5070 - protein, 244 aa, Eucalyptus globulus
MGRGRLQLKRIENKINRQITFSKRRAGLLKKAHEISVLCDAEVALIVFSAKGKLFEYSTDSCMERILERYERYSYAEHQVLASETESIGSWTLEHAKLKARLEVLHRNYRHFMGEDLDSLSLKDLQNLEQQLESALKHIRSRKNQLMHESISVLQKKDRALQEQNNLLTKKIKEKERALAQQAQWEQQDHALDSPVVLPHYLPSLDINGSYQARHNGHDDGENLTQPRAGTLLPPWISASQLRL

SEQ ID NO: 5071 - protein, 499 aa, Leuconostoc mesenteroides subsp. mesenteroides ATCC 8293
  misc_feature (342)..(475): Xaa can be any naturally occurring amino acid
MKAAVWHGVKDVRVEDVELKPTKSNEVVVRVAYAGICGSDLHEYLEGPVFIPVDQPDELTGGQAPLTMGHEFSGVIEKVGPDVANFKVGDHVSINPTVTKGISSDDLDVYDGYSFIGLSTDGGFTSYVNVPEDNLYHLPEEFSLKLAATIEPTAVAVQAIKEADLRFGEKVVIFGAGPIGVLVAAAAKAAGATKIVAVDLSEIRLRKALEMGATDVINPSQVPDTVAAIKNIIPGGADASFEVAGVQPTFEQAIDATRPRGSVVIVSIFAKPISFNPMQLMNAGVKLTTTIAYSKETFQQTVALVSSGQINVEPVITDTISLDSIVSDGFESLTSDKSQAKXXXXXXXXXXXXXXXXXXXXXXXXXXXXXXXXXXXXXXXXXXXXXXXXXXXXXXXXXXXXXXXXXXXXXXXXXXXXXXXXXXXXXXXXXXXXXXXXXXXXXXXXXXXXXXXXXXXXXXXXXXXXXXXXXXXXXXLEHKAIISWHNGFYRCFITDCFCW

SEQ ID NO: 5072 - protein, 502 aa, Ustilago maydis 521
MRNLFVALPFLSGLAVAVAFLFNWSAALDRRAPVYLQRRFVNSTELDACKAIAAAKVKVVYPLDLTYYSLIEHYMTTSTQTSTCVAVPASPAEISSTIKVIGSRRIRYAVRGAGHASNQGFSSTSGVHISMNNFKQVILSDDKNTVDVGPANVWDDVYKGLEGTGVAVVGGRVSGVGVGGFITGGGGYSYKTNQYGLTGDTLVSADLVLPDGTITSASESQNADLFWAIRGGGNKFGIIHNFKLKTVPQGQVWGGLRTYTADQVDAVVNATLDFSENSKDPKASLLPTFNFLLGQPGVIALALYDAPTPPADAFRQFTAEDAPRTFTNDWKTRSILDLVKSAPSDLNSGQRGAFHTVSLQKYSKSLLDLIVSESKFYGTQGILHSATLISYDVEPFLPYSQYAKDGAWPHSTNALPLNLYFAWTNPAEDNFWRNAIKASAAKISAQARSEGQNLDDLYLYPNYAIAETPSSELYGPNLGRLSTLKKKYDPQGVTDLTTYFSF

SEQ ID NO: 5073 - protein, 122 aa, Oenothera elata subsp. hookeri
MIQPQTRLNVADNSGARELMCIRIIGASNRRYAHIGDIIVAVIKEALPSTSLERSEVVRAVIVRTCKELKCDDGIIIRYDDNAAVVIDQEGNPKGTRVFGAIAHELRELSFTKIVSLAPEVL

SEQ ID NO: 5074 - protein, 364 aa, Zea mays
MGSTAGDVAAVVDEEACMYAMQLASSSILPMTLKNAIELGLLEVLQKEAGGGKAALAPEEVVARMPAAPGDPAAAAAMVDRMLRLLASYDVVRCQMEDRDGRYERRYSAAPVCKWLTPNEDGVSMAALALMNQDKVLMESWYYLKDAVLDGGIPFNKAYGMTAFEYHGTDARFNRVFNEGMKNHSVIITKKLLDFYTGFEGVSTLVDVGGGVGATLHAITSRHPHISGVNFDLPHVISEAPPFPGVRHVGGDMFASVPAGDAILMKWILHDWSDAHCATLLKNCYDALPENGKVIVVECVLPVNTEATPKAQGVFHVDMIMLAHNPGGKERYEREFRELAKGAGFSGFKATYIYANAWAIEFIK

SEQ ID NO: 5075 - protein, 332 aa, Neurospora crassa
MSGIGASSYAPRSPDLSSLYSSAGPTHQHLQTHAEVLQYLPPRSQPDNSFSTNHYSQPQQSERPHRIPFTNNHATGVWNAQQQASQRDLHHLQNQHQYKYNQQQPQQPLQQQAYPQLFSHTQPQEHQQQQRLTRSQAQRPLQPLPSHTSNPNPPPAPEQSNIQAASSVAAQTTNTMPPKRAVAQAAQQPQPSPIQPSLVKTKFPTARIKRIMQADEEVGKVAQQTPIAVGKALELFMVQLVTKSADIARERNSKRVSAQMLKQVVESDDQWDFLREITSKIENDDKEKPAASASGRGRTKAESESEEEAQPEKKGRGGAGRGGGRGRKKSTA

SEQ ID NO: 5076 - protein, 295 aa, Zea mays
MAGLSLEHPWAFTFGLLGNVISFMTFLAPIPTFYRIYKSKSTEGFQSVPYVVALFSAMLWIFYALIKSNETFLITINAAGCVIETVYVVMYFVYATKKGRMFTAKIMLLLNVGAFGSILLLTLLLFKGDKRVVMLGWICVGFSVSVFVAPLSIMRRVIQTKSVEYMPFSLSLSLTLSAVVWFLYGLLIKDKYVALPNILGFTFGVVQMVLYVVYMNKTPLPVADGKAAGKLPSAADEHVVVNVTKLSPGRLPPVTQMAAVPTKSCATEAAAPATLPSRDVVDVLVNRHSPAVHVA

SEQ ID NO: 5077 - protein, 390 aa, Methanosarcina acetivorans C2A
MHRRLGGVLEVESKVRLRTIHDLSVAYTPGVAEPCRKIKENPSLVYLYTIKKNTVAVVTDGSAVLGLGNIGPCAALPVMEGKAIIFKEFAGIDAFPICLNTQDTEEVIKAVKYLAPAFGGINLEDISAPRCFEIESRLREELDIPVIHDDQHGAAIVVFAGLLNALKIVKKELGELKILITGLGAAGVAIFRFLVRAGADPAKILTCDSQGIVYEGREKDMNPIKAEIATLTNPGKLKGGLKEAFPGTDLFIGVSVGGIVTEEMISSMANDAIVMAMANPTPEIMPDAAKRAGARIVATGRSDFPNQLNNCLSFPGVFKGALGTCARKITPEMEMAAAHALANVVSVGELSEDYIIPEPLDKHVVPAVAKAVANASLESCAARRSLEDEL

SEQ ID NO: 5078 - protein, 503 aa, Tropaeolum majus
MSGTKATSVSVPLPDFKQSVNLKYVKLGYHYSITHAMYLFLTPLLLIMSAQISTFSIQDFHHLYNHLILHNLSSLILCIALLLFVLTLYFLTRPTPVYLLNFSCYKPDAIHKCDRRRFMDTIRGMGTYTEENIEFQRKVLERSGIGESSYLPPTVFKIPPRVYDAEERAEAEMLMFGAVDGLFEKISVKPNQIGVLVVNCGLFNPIPSLSSMIVNRYKMRGNVFSYNLGGMGCSAGVISIDLAKDLLQVRPNSYALVVSLECISKNLYLGEQRSMLVSNCLFRMGGAAILLSNKMSDRWRSKYRLVHTVRTHKGTEDNCFSCVTRKEDSDGKIGISLSKNLMAVAGDALKTNITTLGPLVLPMSEQLLFFATLVGKKVFKMKLQPYIPDFKLAFEHFCIHAGGRAVLDELEKNLKLSSWHMEPSRMSLYRFGNTSSSSLWYELAYSEAKGRIKKGDRVWQIAFGSGFKCNSAVWKALRNVNPAEEKNPWMDEIHLFPVEVPLN

SEQ ID NO: 5079 - protein, 396 aa, Oceanobacillus iheyensis HTE831
MVYKNLKDEAIELHYKHKGKLEITGKMEINTEDDLSLVYTPGVADVCKQIADDPNKINTLTSRGNMVGIVTDGTAVLGLGNIGPKAAMPVMEGKALLFKKFANIDGFPICLDTTDVDEIVNIVKAMGPTFAGINLEDIAAPRCFEIEKRLKEELDIPVFHDDQHGTAIVVLAALTNALKVVNKQNRPIKIVINGAGAAGIAIAKLLYHAGLTNITLVSLEGVVAKGEDWLNPMQVEMAEVTNKDNVRGTLKDAITEADVFIGVSGPGALKKEHIQTMAKDPIIFALANPIPEIYPEEALEAGAAVVATGRSDYPNQVNNLLAFPGIFRGAIDAGARDITTEMKVAAAYGIADVLSDEEISKDKVIPNALDERAGERVAQAVMSSAIQQKKETSSVS

SEQ ID NO: 5080 - protein, 145 aa, Magnetococcus sp. MC-1
MSTLMSYDPFHRVRTLQNELNRLFDPGWDDGNSQMAKLSMGVDIREDENQIVIKADLPGMSQEAIQVNVEHNTLTISGERTFGDEVNRDRYHRVERAYGRFSRSFQLPNTTDTANIKASYVNGVLEVALPKREESKPRAIQIEVQ

SEQ ID NO: 5081 - protein, 467 aa, Listeria monocytogenes EGD-e
MLYSEDDKRKQESYRIPLFGSEEESTSIPKYVLKKEPMEPRIAYQLVKDQLMDEGNARQNLATFCQTYMEKEAEILMAETLEKNAIDKSEYPQTAELENRCVNILADLWNAPKDMSYLGTSTVGSSEACMLGGLAMKFRWRNNAEKRGLDIQAKRPNLIISSGYQVCWEKFCVYWDVDMRVVPMDKNHLSLDVDKVFDLVDEYTIGVVGILGITYTGKFDDIQLLDEKVEAYNETNEHQLVIHIDGASGAMFTPFVNPELPWDFRLKNVVSINTSGHKYGLVYPGVGWILWKDKEYLPKELIFEVSYLGGSMPTMAINFSRSASQIIGQYYNFLRYGFEGYREIHEKTKKTAIYLAKTVEKSGYFEIINDGANLPIVCYKMKEGLDVEWTLYDLADQLLMKGWQVPAYPLPADLSDTIIQRFVCRADLGYNVAEEFAADFADAIHNLEHARVLYHDKERNDSYGFTH

SEQ ID NO: 5082 - protein, 395 aa, Zea mays
LGPSRPASSSLPAKRGGLLLGRYELGRLLGHGTFAKVYHARHADDTGETVAIKVLDKEKALRNGLVPHIKREIAILRRVRHPNIVRLFEVMATRPKIYFVMEFVRGGELFARVAKGRLKEDTARRYFQQLISAVGFCHARGVFHRDLKPENLLVDERGDLKVSDFGLSAVADQFHPDGLLHTFCGTPSYVAPEVLARRGYDGAKADIWSCGVILFVLMAGYLPFHDQNLMAMYRKIYRGEFRCPRWFSRDLSCLMNQLLDTNPETRITVAQIIESRWFKKGFRPVRFYVEDDQVHSLADSEAEALEELGPSDSEPSPPPPPPPPPPPPQKEDDGDDSGWESDSSVASCPATLSSEERRRPVGSLPRPVSLNAFDIISFSRGFNLSGLFEERGNEV

SEQ ID NO: 5083 - protein, 358 aa, Mycobacterium tuberculosis H37Rv
MTEAIGDEPLGDHVLELQIAEVVDETDEARSLVFAVPDGSDDPEIPPRRLRYAPGQFLTLRVPSERTGSVARCYSLCSSPYTDDALAVTVKRTADGYASNWLCDHAQVGMRIHVLAPSGNFVPTTLDADFLLLAAGSGITPIMSICKSALAEGGGQVTLLYANRDDRSVIFGDALRELAAKYPDRLTVLHWLESLQGLPSASALAKLVAPYTDRPVFICGPGPFMQAARDALAALKVPAQQVHIEVFKSLESDPFAAVKVDDSGDEAPATAVVELDGQTHTVSWPRTAKLLDVLLAAGLDAPFSCREGHCGACACTLRAGKVNMGVNDVLEQQDLDEGLILACQSRPESDSVEVTYDE

SEQ ID NO: 5084 - protein, 506 aa, Pseudomonas aeruginosa UCBPP-PA14
MRYAHPGSEGAIVSFKARYGNYIGGEFVPPVKGQYFTNTSPVNGQPIAEFPRSTAEDIDKALDAAHAAADAWGRTSVQERSNILLKIADRIEQNLELLAVTETWDNGKAVRETLNADIPLAADHFRYFAGCIRAQEGSAAEINDSTVAYHIHEPLGVVGQIIPWNFPLLMAAWKLAPALAAGNCVVLKPAEQTPLGICVLLELIGDLLPPGVLNVVQGFGREAGEALATSKRIAKIAFTGSTPVGSHILKCAAENIIPSTVELGGKSPNIYFEDIMQAEPAFIEKAAEGLVLAFFNQGEVCTCPSRALVQESIYPAFMEEVLKKVRAIKRGDPLDTETMVGAQASQQQYEKILSYLDIAQQEGAEVLTGGSVEKLEGNLASGYYIQPTLLKGHNKMRVFQEEIFGPVVGVTTFKDEAEALAIANDTEYGLGAGLWTRDINRAYRMGRGIKAGRVWTNCYHLYPAHAAFGGYKKSGVGRETHKMMLDHYQQTKNLLVSYDINPLGFF

SEQ ID NO: 5085 - protein, 1124 aa, Gibberella zeae PH-1
MVAPSAMLSGAEAMQMQMQAAPPRQRAQRQTSSCLECRRRKQKCSQGQPCTNCYRRFPTPECVYEVKSSRRASPLFPRPQLPTIADIQDGPYSHLNPAIIQSALYSIEGQSTSSASSPSGSYSPTASSSTSLSTQSTRSLWRPYQTLASPDGDTDKTIARSLQIIKKESIKSFKRSYLDEGMNKIESDDPMELGYSIAGSMTQLNYLPMRPTKLNKDLVRIHGQPDPTNEFMSVWVPCTMQDPLLLHIVLFTSACFLTETGDMPKKLRQIYQSHVYWMLNKQIGDANGWKNDTLMLAVVQMIADSWYWGETDHLMAHLKGLKRMVRMRGGLNQLGLRGYLAKMILIHDIAMALAHEIKPSMYGHPEFPFFDSRRTPIKTVYNTPLLCHWQSFRESSNSLQLHPSTAEILDTVRSLFSAVISLPRDASPDQTQIVRITATGFYDKIDGFPEQIPSFRGFRNSSRSSSVESPDQSPRSSRTDKSSSPLNLPDIMYIVVRKIALVYCKAISTRSPISTACSEQDIMLIWRAIWESGLPTWKSVLGIFAWVMIPLCTNCHKIKFGRLIKTLTVSTMMSLGMDDWHLFLDISKTAFRIQRWLTEGDDASGTKQLMGGQAVVDQYDGFAMDNACPRYELPEYDEPFHKDEFNYLFGTMCNFDRLREDIAHGAVLLPEDEGYEETLQRWSSACMKRANTETLQAAVVMPSNSKEVSLAVKFAVSNQIPMTVCGGGHSSSGASSSEGMVIDLRKMRKVKVDTEAMTVEFEGGCLWEDVDNALERHGLATVGGVVNHTGVGGLTLGGGHGYLTPRHGLTIDNLLEADVVLADGTIVEASEDKDANLFWAIRGAGAQFGVVTRFLSRAHQQVKVWSGTLAYLPDKLPDLLRFANELHERPNTEGHCLALGIGFGPNGTTRIVSAIPLFHGPESDAKRYFAGLLQLESVADNTEMITTAKTNTLLNLAMDHGIRRLTGSGNVVMPLNIEAMLQTAQIFWEFCDVHGGMGKSVMAIEFFPTDKIREIAQDATAYANRGDYYDVLTLFGWEDPDHDGEVREFNRSICRKVRETNGYQADSGGHWSKGPVGVYINVEAGGISPNDAWGANLPRLRELKKKYDPQNVFNKWHSIAEDAS

SEQ ID NO: 5086 - protein, 147 aa, Brassica napus
DVQERAFARAEIESARAAVHRVGEALREHEQMSRASGKQDMEDLLKEVQEATRIKVLHQPSKVMAMEYELRARRKQLAETSRHFRQLRQKLAMCRESEECISLLDDIDGNEALSSCLRVRPCSDEAPESLKCTIQWYRSSSDDSKNE

SEQ ID NO: 5087 - protein, 92 aa, Glycine max
MERRRVMEHLKTYPAFPGWYADVSWPGEAHIYKMEKILFHGKSEFQELLVFESDTSRHGKIAIPDGYIQLTENDEFAYQEMLIHLALCSIPN

SEQ ID NO: 5088 - protein, 195 aa, Amylomyces rouxii
MAEIRRKLVIVGDGACGKTCLLIVFSKGTFPEFYVPTVFENYVADVEVDGKHVELALWDTAGQEDYDRLRPLSYPDSHVILICFAVDSPDSLENVQEKWISEVLHFCQGLPIVLVGCKKDLRNDPGTIEELRRNSQKPVSSEEGASIAQRISAYKYLECSAKTGEGVREVFEHATRAALMVSKKKKSKSGVCNLL

SEQ ID NO: 5089 - protein, 506 aa, Haloarcula marismortui ATCC 43049
MTSHSEIDTLRIKARHAELAESLLPSGPLKHFVDGEWITGRGDDTFQSIDPTTGESLVGVYEGTKEEVNRAVDAAWEAYEQRWSETTPAERQQLLLTMADRLEARAEDFALIEVLDNGKPITEAREDIELAVDHFRYFAGAARNIEGKTVPHKELHIQTRREPYGVVGQVVPWNFPLLLATWKLAPALAAGNTVVLKPAEQTPISLLTYMREIADVLPDGVVNVVTGFGPETGAPLVSHERVPKVAFTGSTEVGQGVMKAAANTISDITLELGGKSPLIVAPDADPAEAADIAVDAMFFNGGECCSAGTRLFIHESIADEFVDAFLDAVGKLQMGDPLEESTDIGPQVSRAEVEKTLHYIGLARDSDASILRGGGTVEEGILAEGCFVEPTVIADVGADSTVATQEIFGPVEIMLEWDGYDEMVARANNVDYGLAAGVVTDDLSFAHRIAEDIMAGNIWVNTFNRLPAGQPFGGYKQSGIGREGAMETLREYTQTKSITMNLGDGQ

SEQ ID NO: 5090 - protein, 310 aa, Brassica rapa subsp. pekinensis
MMKRLSSSDSVGGLISLCPTTSTDQPSPRRYGREFQSMLEGYEEEEEEAVTEERGQTGLAEKKRRLSINQVKALEKNFELENKLEPERKVKLALELGLQPRQVAVWFQNRRARWKTKQLEKDYGVLKTQYDSLRHNFDSLRRDNESLLQEIGKLKAKLNGEEEVEKMMKMENNAVTMECDVSVKEEEVSLPEELTDPPSSPPQALEHSDSFNYRSFTDLRDLLSLKAAASSVAAAGSSDSSDSRAVLNEESSSNVTAGPVTVPQGGFLQFVKMEQTEDHDDFLSGEEACGFFSEEQPPSLHWYSTVDQWN

SEQ ID NO: 5091 - protein, 473 aa, Anabaena variabilis ATCC 29413
MYNKITPPTTGEKITFKNGEPVVPDNPIIPFIRGDGTGIDIWPATEKVLDAAVAKAYQGKRKISWFKIYAGDEACDLYGTYQYLPEDTLTAIREYGVAIKGPLTTPVGGGIRSLNVALRQIFDLYACVRPCRYYAGTPSPHKNPEKLDVIVYRENTEDIYLGIEWKQGSEIGDRLISILNKELIPATPEHGKKQIPLDAGIGIKPISKTGSQRLVRRAIKHALTLPKHKQQVTLVHKGNIMKYTEGAFRDWGYELATSEFRQETVTERESWILSNKEKNPNISLEDNARQIDPGFDALTPEKKAQIVKEVETVLNSIWETHGNGKWKEKVLVNDRIADSIFQQIQTRPDEYSILATMNLNGDYLSDAAAAIVGGLGMGPGANIGDSCAVFEATHGTAPKHAGLDRINPGSVILSGVMMLEYLGWQEAADLIKKGLSDAIANSQVTYDLARLLEPPVEPLKCSEFADAIIKHFG

SEQ ID NO: 5092 - protein, 204 aa, Escherichia coli
CLRPVRYYQGTPSPVKHPELTDMVIFRENSEDIYAGIEWKADSADAEKVIKFLREEMGVKKIRFPEHCGIGIKPCSEEGTKRLVRAAIEYAIANDRDSVTLVHKGNIMKFTEGAFKDWGYQLAREEFGGELIDGGPWLKVKNPNTGKEIVIKDVIADAFLQQILLRPAEYDVIACMNLNGDYISDALAAQVGGIGIAPGANIGD

SEQ ID NO: 5093 - protein, 221 aa, Shigella flexneri
RQELDLYICLRPVRYYQGTPSPVKHPELTDMVIFRENSEDIYAGIEWKADSADAEKVIKFLREEMGVKKIRFPEHCGIGIKPCSEEGTKRLVRAAIEYAIANDRDSVTLVHKGNIMKFTEGAFKDWGYQLAREEFGGELIDGGPWLKVKNPNTGKEIVIKDVIADAFLQQILLRPAEYDVIACMNLNGDYISDALAAQVGGIGIAPGANIGDECALFEATH

SEQ ID NO: 5094 - protein, 160 aa, Brassica napus
MEEDRVLSSVHSTVFKESESLEGKCDKIEGYDFNQGVNYPKLLRSMLTTGFQASNLGEAIDVVNQMLEWRLSDETIAPEDCSEEEKDPAYRESVKCKIFLGFTSNLVSSGVRDTIRYLVQHHMVDVIVTTTGGVEEDLIKCLAPTFTGDFSLPGAYLRSR

SEQ ID NO: 5095 - protein, 316 aa, Helicobacter hepaticus ATCC 51449
MAGGAAIDECGECLPMKSLQICKQSDSVLLGAVGGPKWDNEPSHNRPEKALLTLRKELGLFANIRPATLLPQLSKASPLKDEILNRGIDFIIVRELIGGVYFGEHKLEEINGEKVASDAMTYSASQIESIAKVAFNIARNRKKEIVCVDKANVLSSSRLWREVVDKVAQNYKDVHLSYMYVDNAAMQICRAPSQFDVILTENMFGDILSDEASIITGTIGVIPSASLSNGTLGMYEPIHGSAPDIAGQDKANPIGTILSAAMMLELSFGLTKESEVIQKAVQNALDKGYRTGDMMSEGMQLVGCEQMGDVILESVI

SEQ ID NO: 5096 - protein, 220 aa, Shigella flexneri
RQELDLYICLRPVRYYQGTPSPVKHPELTDMVIFRENSEDIYAGIEWKADSADAEKVIKFLREEMGVKKIRFPEHCGIGIKPCSEEGTKRLVRAAIEYAIANDRDSVTLVHKGNIMKFTEGAFKDWGYQLAREEFGGELIDGGPWLKVKNPNTGKEIVIKDVIADAFLQQILLRPAEYDVIACMNLNGDYISDALAAQVGGIGIAPGANIGDECALFEAT

SEQ ID NO: 5097 - protein, 482 aa, Pseudomonas fluorescens
MLDVPLLIGGQSRPARDGRTLERRNPVTGAVVSRVAAATLDDADAAVAAAQAAFPAWAALAPNERRSRLLKAAEQLQARSGEFIAAAGETGAMANWYGFNVRLAANMLREAASMTTQINGEVIPSDVPGSFAMALRQPCGVVLGIAPWNAPVILATRAIAMPLACGNTVVLKASELSPAVHRLIGQVLQDAGLGDGVVNVISNAPVDAAAIVERLIANPAVRRVNFTGSTHVGRIVGELAARHLKPALLELGGKAPLLVLDDADLDAAVAAAAFGAYFNQGQICMSTERLIVDAKVADAFVAKLAAKVATLRAGDPSAADSVLGSLVDVSAGTRIKALIDDALSKGARLVVGGQLDGSILQPTLLDGVTESMRLYREESFGPVAVLLRGSGDEELLRLANDSEFGLSAAIFSRDTGRALALAQRVESGICHINGPTVHDEAQMPFGGVKSSGYGSFGGKASIEHFTQLRWVTLQHGPRHYPI

SEQ ID NO: 5098 - protein, 220 aa, Shigella flexneri
QELDLYICLRPVRYYQGTPSPVKHPELTDMVIFRENSEDIYAGIEWKADSADAEKVIKFLREEMGVKKIRFPEHCGIGIKPCSEEGTKRLVRAAIEYAIANDRDSVTLVHKGNIMKFTEGAFKDWGYQLAREEFGGELIDGGPWLKVKNPNTGKEIVIKDVIADAFLQQILLRPAEYDVIACMNLNGDYISDALAAQVGGIGIAPGANIGDECALFEATH

SEQ ID NO: 5099 - protein, 189 aa, Leptospira interrogans serovar Lai str. 56601
MKEGASFMYSKYFIWFMTLGIFLPLAGIFAKGSFYDFKVKDIKGNEVSLSKYKGKVVMVVNVASKCGYTYQYEHLEKVYKKYKDQGFAVVGFPANNFGGQEPGTDQEIETFCRIQKGASFDMMSKISVKGKDIHPLYSYLIQNSPNPGEVEWNFEKILISKNGTIEARYRSSVEPDSSAVTQKIETLLK

SEQ ID NO: 5100 - protein, 564 aa, Triticum aestivum
  misc_feature (102)..(102): Xaa can be any naturally occurring amino acid
  misc_feature (257)..(257): Xaa can be any naturally occurring amino acid
  misc_feature (369)..(369): Xaa can be any naturally occurring amino acid
MASFARQEHQFLAELGLAPRNPGSFACGAWGGSGPVVTTTNPSNNEVIAEVVEASMDDYEKGMSACFDAAKTWMAVPAPKRGEIVRQIGDALRAKLHHLGRXLSLEMGKILPEGIGEVQEIIDMCDYAVGLSRQLNGSIIPSERPNHMMMEVWNPLGVVGVITAFNFPCAVLGWNACIALVCGNCVVWKGAPTTPLITIAMTKIVASVFEKNNLPSAIFTAFCGGAEIGQAIALDTRIPLVSFTGSTKVGQMVPPSXPHSPPSTIPSLRTAKQPEPEPAFQNQPARHGELREAGAPVPRRARPRAAQPGLLRLRRLGRLRPRRHHHKAIILLGHADGRRGVRSLLFAAVGTAGQRCTTWGSRPLHESMXQTFLDQLVEVYKQACIGHPMEKGTLLGPLHTTASKESFLKGIQNIRSQGGKILLGGSAIESEGNFVQPTIVEISPAAPVVREELFGPVLYAMKFQTLKEAIEINNSVPQGLSSSIFTRKPDAIFKWIGPHGSDCGIVNVNIPTNGAEIGGAFGGEKATGGGREAGSDSWKQYMRRATCTINYGSELPLAQGINFG

SEQ ID NO: 5101 - protein, 1661 aa, Bacillus halodurans C-125
MKTLKHISYKLRIFALIALLISQTLLTSLSLPFQAVANSEKSGLTNVEITDANGQTIDADQFPDRFVSIDSILQIILSWSVDESVAQGAEYSLNIPSALVVSSHGGVLTTTDSQEVGTYEVKDNGEVTLQVNEKGNGTLIVEAAFNKDEVHGKSEVPLTFHLDDETRTITVPFTVEEKTEEAVEPASESETEATIEQHKEDEEEEMVALTTQSTEASGSEITENILTSVQLKDEEGNLIHANENPDLRPALGSAVEVIYNWKLRNNHGYTAGSTFTFQLPDAFRFYNNIENEPLVFTQANTTVGSFNVTTDGTVTMTFNESIEQLSNIRGNLHLWTEFREDLQGDRLQVIHFEAKDEVIASIPVEFENATGHSIDKRGVVDQTFNATEIKWTVDFNKQLQPIEQAILKDPIQTGQALRAGSIKVYELNVQLDGSVVQGAEVDPSSYTIEQVDGNDFQIVFGSIDSAYRVEFITDITNRNATYYMNRATLTGENIDDLSADAGVWTHRGTPLSKASTGYDPATQTITWEIKYNYDGKLIRQADAVLTDLFTNSHILLDDSMKVYRVTINEHGNEVSTEEVSNYSVNGTSDEDHNGFVLQFTEDVQDSYKIIYQTTAAERGFEDATIENTVTTGDHEAKTSRTVHQQTFNKWRGQIDYAKKTVAWEYFFNEERQELTNVIISDVFANGGLTLIEDSFTITSFPSTDEEVTLENGNDYRVVTNETGFTIEFMAPITEPHHVRYETTFDFDARDDKNKAFLENGATLQWQTSSGNTMKKEGKSEFHPDTFTRNNGFKNGLYNATSKEITWNIGVNYNLHTLEHAIVEDFVREGQRLLMDSIEVYEMGLLGWWDGVSQGSKLEEGTDYVIEAVEDGEGHPGFQVRFLNTIDSAYWITFKTSLEDTLIKSNYPNRATLKSDNAEDFNVDASVSVRHGGEFVTKSGAQNGRLIDWSLNINFSQSSISNAKIVDEPSVNQILLEDTFRLYATNVQPNGTMTKGDELERDKDYTLDIRTDGEGNQHFELQFTEDIDTGYILEYQSFINARNGDVVTNNVKLEGDQLTTEEVTESSGAVSVRLSGGAGTGSGETGSLEVTKVDADTGEVLQGATFTLYDSEGEFAIRTLETGEDGKATFVNLLYGDYLLKEDSAPEGYLVGINDTQRVTIDTVLHEVTVENEKSDINRVSAVGAVQLQKVDEETGESLQGALFALQQKVDDEFVTIAEMETDEEGIVFAGSLEPGDYQFVELNAPVGYKLDETPVVFTVEEDRTETIELQKENHLIPGSVQLVKVDADDAANTLEGAEFTLLDGEGNVVQEGLTTDENGQVVVTDLKPGEYQFVETKAPAGYELEATPIGFTIERNQQEVATVAVENHLIPGSVQLVKVDADDAAITLEGAEFSLLDGEGNVVQEGLTTDATGQVVVTDLKPGEYQFVETKAPAGYELDATPIGFTIERNQQEVATVAVENHLIPGSVQLIKVDREDSAVTLEGAEFSLLDEEGNVLREGIRTGENGQLMVIDLKPGDYQFIETKAPTGYELDDTPIAFTIEKGTDEVLTLVFENKLTPEVPESPENPENPENPENPEIPEDLETPESPENPETPESPKHSEDSEVPNSDKNPEKSSDSNNRIDRLPQTGEEFLTFLLILGLLLMTAGGVLLLKRRNVAEC

SEQ ID NO: 5102 - protein, 366 aa, Glycine max
  misc_feature (40)..(40): Xaa can be any naturally occurring amino acid
HAFGIPGSASVSRSNRKPLPSSSSSSSVATEAEQKEILEXLVSNLPLEKSSKAATATRFLFGLLRTTNILNASEACRDALEKKIGLQLEEATLDDLLVPSYSYLNETLYDVDCVERILSQFLEGLEARTAAETTEDAAATRSPALMLVGKLIDGYLSEIASDANLKPEKFYNFAISLPDEARLFDDGLYRAVDVYLKAHPWVSEEEREKICGLLDCQKLTLEACSHAAQNERLPLRAVVRVLFFEQLQLRRAIAEKLGAAEEPSRHSAAMAEEEEVEDDNNTWQVTVRENQVLRLDMDSMRTRVHELERECSSMKRAIEKMDKMGPRGGGPWRASLALGRKFGCKFKTQVCDSHEPATREGRPPRR

SEQ ID NO: 5103 - protein, 507 aa, Bordetella bronchiseptica RB50
MPGRGCVPRFFSSDSIDMTISPLQLLNDPSLLRTDALVDGRWIAASRRFAVHDPATGRKLADVANLDAAHAREAIAAAQAAWPAWRARTVKERSAILRKWFDLLLANQDDLARLLTAEQGKPFGEARGEIAYAASFVEWFAEEAKRINGETLPAFDNNRRLLVLRESIGVCAAITPWNFPLAMITRKVAPALAAGCPVIVKPAEHTPLTALAAAQLAVRAGVPAGVLGVLPADGANSIAIGKELCANDAVRHLSFTGSTEVGRILMAQSAATVKKLSLELGGNAPFIVFDDADLDSAVEGAMQSKYRNAGQTCVCANRIYVQDGVYDAFVEKLADAVRALKVGPGFDEGVTQGPLIEPEAVDKIERHIEDAVSKGGRVVAGGRRLGGLFFEPTVLVDATSQMLCAREETFGPLAPVFRFHADEDAIAAANATEFGLASYLYSRDVGRIFRAAEALESGMVGVNVGILATEHVPFGGVKQSGLGREGGRHGIDDYVEIKYMCVGDILK

SEQ ID NO: 5104 - protein, 294 aa, Helianthus tuberosus
MEQYEKVEKIGEGTYGVVYKARDKVTNETIALKKIRLEQEDEGVPSTAIREISLLKEMQHGNIVRLQDVVHSDKRLYLVFEYLDLDLKKHMDSCPEFSKDPRLVKTFLYQILRGIAYCHSHRVLHRDLKPQNLLIDRRTNALKLADFGLARAFGIPVRTFTHEVVTLWYRAPEILLGSRHYSTPVDVWSVGCIFAEMVNQRPLFPGDSEIDELFKIFRIMGTPNEETWPGVTSLPDFKSAFPKWSSKDLATVVPNLEKAGLDLLCKMLWLDPSKRITARTALEHEYFKDIGFVP

SEQ ID NO: 5105 - protein, 315 aa, Glycine max
MAATTLVSEVTLPSSSGQRKMPLMGLGTAPEATSAVTTKDAVLEAIKQGYRHFDAASAYGVEQSVGEAIAEALKQGLIASRDQLFITTKLWVTDNHAHTILPALQKSLRTLQLEYIDLFLIHWPIATKPGKVVYPIEVSEIVEFDMKGVWGSMEECQRLGLTKAIGVSNFSIKKLEKLLSFATIPPAVNQVEVNLGWQQQKLRDFCKEKGITVTAFSPLRKGASRGANFVLDNDVIKELADAHGKTAAQICLRWLYEQGLTFVVKSYDKERMKQNLGIFDWSLTEDDYKKISEIHQERLIKGPTKPLLDDLWDEE

SEQ ID NO: 5106 - protein, 284 aa, Glycine max
MKGEYLEQQQQHPKSETTPPSMFSKLQPQHHPFPHHPFQLSAEEENRVGAATTPSTVQKANSSGGDGATIEVVRRPRGRPPGSKNKPKPPVIITRDPEPAMSPYILEVSGGNDVVEAIAQFSRRKNMGICVLTGSGTVANVTLRQPSTTPGSTVTFHGRFDILSVSATFLPQQSGASPAVPNGFAISLAGPQGQIVGGLVAGGLMAAGTVFVIAASFNNPAYHRLPPEEEGASAGDGHSPQVSGGGDSGHGQAESCGMSMYSCHLPSDVIWAPTARPQPPPPPY

SEQ ID NO: 5107 - protein, 317 aa, Magnetospirillum magnetotacticum MS-1
  misc_feature (291)..(291): Xaa can be any naturally occurring amino acid
  misc_feature (296)..(296): Xaa can be any naturally occurring amino acid
MLETGFFSLGTPGRLDADLEFILAKVAELKLPKLYELGPVGARTEFALRLSRSNPPAPHGVEAEDITIAGIPARRYQPQGGPKAKAMLLYFHGGGFVVGDLETHDPHCRALAAESGSVVVALHYRLGPEHPYPAAIQDGIAALKWAAAEYAGWTLGVAGDSAGGTLSAVVALHARDLNIPLALQMLIYPAVDQKGDFPSRTRLADGYLLTQGDIEWFTQQYFVGHEGPVLEPDASPLRAASHGGLAPALVLTCGFDPLVDEGDAYAQALIGAGVPVRHVRLEGSIHGCLGXWPGLXVALGQASLGGGLRGLAVRSSP

SEQ ID NO: 5108 - protein, 268 aa, Chromobacterium violaceum ATCC 12472
MVSPGPAIAWVNDDLVHGGGYPVPVRIYHPEPGAALPVLVFLHGGGHMAGGVSVYDGIHRRLAAASRHIVVAAEYRLSPENPYPAGLDDALCVARHVWDTLDGRGLAYRRRLSLAGDSAGGALCASVSGLAGRDPSLDIARQALIYPCVDYTLDQPSVAENGEGFFLTRARTDWYFDNYFQHGEDRRQASPLHWEAHGQMPATLLITAGHDILRDQGQQYARKLQAAGAEVALLHLEDQVHAFLNMEALVPEVCELAYRRIGAFLNAG

SEQ ID NO: 5109 - protein, 456 aa, Pseudomonas aeruginosa PAO1
MNSQITNAKTREWQALSRDHHLPPFTDYKQLNEKGARIITKAEGVYIWDSEGNKILDAMAGLWCVNVGYGREELVQAATRQMRELPFYNLFFQTAHPPVVELAKAIADVAPEGMNHVFFTGSGSEANDTVLRMVRHYWATKGQPQKKVVIGRWNGYHGSTVAGVSLGGMKALHEQGDFPIPGIVHIAQPYWYGEGGDMSPDEFGVWAAEQLEKKILEVGEENVAAFIAEPIQGAGGVIVPPDTYWPKIREILAKYDILFIADEVICGFGRTGEWFGSQYYGNAPDLMPIAKGLTSGYIPMGGVVVRDEIVEVLNQGGEFYHGFTYSGHPVAAAVALENIRILREEKIIEKVKAETAPYLQKRWQELADHPLVGEARGVGMVAALELVKNKKTRERFTDKGVGMLCREHCFRNGLIMRAVGDTMIISPPLVIDPSQIDELITLARKCLDQTAAAVLA

SEQ ID NO: 5110 - protein, 333 aa, Saccharomyces cerevisiae
MSEPSEKKQKVATSSLEQLKKAGTHVVADSGDFEAISKYEPQDSTTNPSLILAASKLEKYARFIDAAVEYGRKHGKTDHEKIENAMDKILVEFGTQILKVVPGRVSTEVDARLSFDKKATVKKALHIIKLYKDAGVPKERVLIKIASTWEGIQAARELEVKHGIHCNMTLLFSFTQAVACAEANVTLISPFVGRIMDFYKALSGKDYTAETDPGVLSVKKIYSYYKRHGYATEVMAASFRNLDELKALAGIDNMTLPLNLLEQLYESTDPIENKLNSESAKEEGVEKVSSINDEPHFRYVLNEDQMATEKLSDGIRKFSADIEALYKLVEEKM

SEQ ID NO: 5111 - protein, 381 aa, Gibberella zeae PH-1
MLAIRALRTPASRQALRTAAPRAAIFYNRCYSTSGDRVAKYNGTKDAKGNFLVSLIEGDGIGPEIAQSVKDIFAAAKTPIAWEPVDVTPIIKDGKTAIPDAAIDNIKKNKIALKGPLATPIGKGHVSLNLTLRRTFNLFANLRPCRSVAGYETPYDNVNTVLIRENTEGEYSGIEHVVVDGVVQSIKLITREASERVLRFAFQHAESIGRKKVRVVHKATIMKLSDGLFLKVAQEVAKDFPGIEFDAELLDNSCLKMVTDPTPYNDKVLVMPNLYGDILSDMCAGLIGGLGLTPSGNIGDECSIFEAVHGSAPDIAGKNLANPTALLLSSIMMLRHMGLNEHATRIEKAIFDTLAEGKALTGDLGGKAKTNEYAAAIISRL

SEQ ID NO: 5112 - protein, 91 aa, Brassica napus
MYYQLTKSSYMDSLKILEADIEHANGLAAEIPMGKSGVRLQMKLVCSNLAPFFIFLLQWMDFSCLLPRYFDFFHILIYKVRSDGRRNLSRY

SEQ ID NO: 5113 - protein, 502 aa, Rhizobium sp. NGR234
MDESVRNYLDQYGVSDATRRFLAKPQKMFIDGAWSDSSNGATFDIFEPSTGGLITRAPSGTPEDLDRAVRAARRQFDGGAWRRLKPLERERLLHSLADLIEAHSDELAEIEAIDMGKSVTFAREIDIRGTVDTFRYFAGWASKLHGRTVEPSLPGNYLAYTRKEPLGVVAAIVPWNFPLQTLAWKLAAALAVGCTAIVKPAELTSLSTLRFAELVQEAGIPDGVVNIVTGKGSIIGAAMSTHPGINKVTFTGSTPVGQEVGRTAVGNLKHVTLELGGKSPVLVLDDADLQSAAVAVANGVFFNSGQVCDAGTRVYVQGSVHDAFLDELVSVTSALKIAPGLDRDCYIGPLVSAQQKKVVSGYIEAGRREGAELIHGGASLHRQGHFIEPAIFSHCKPQMSIVREEIFGPVLVTSPFDDLDDAVSLANDTPFGLAAAIYSNDLSRVHTLIPRLHAGSIYVNAHSTIDPAMPFGGFKASGFGKDLGPEQLDYLMETKAVWITLP

SEQ ID NO: 5114 - protein, 175 aa, Triticum aestivum
MGPTLMASSATSVAPFQGLKSTAGLPVSRRSNGASLGSVSNGGRIRCMQVWPIEGMGGWGSLSYLPPLTHKTLLKQVDYLIRSKWVPCLEFSKVGFIFREHNAFPGYYDGRYWTMWKLPMFGCPDPTQVINEVEEVKKEYPDAYVRIIGFDNMRQVQCVSFIAFKPPGCEESGKA

SEQ ID NO: 5115 - protein, 274 aa, Lactobacillus johnsonii NCC 533
MEYFNLNDGNRIPKIGFGTYKLNGSRGVFAIQAALKNGYRLLDSAVNYENEGAVGRAIKNSGINRDDIFITSKLPGRHHKYQEAIEQIQESLYAANLDYYDLYLIHWPNPKENHYLEAWQAMLDAQRFGLIRSVGVSNFEPSHIEHLYRETGVMPAINQVELHPYWSSKTIREYDNKHNIITEAWSPLQRAGEAFQEKEIIDLAQKYHKSPAQIILRWETQLNVVPIPKASSYEHQISNLDIFDFKLTPEEVQKLINLDKISARRFDPNEHEEF

SEQ ID NO: 5116 - protein, 346 aa, Magnaporthe grisea
MSSTTEERQVWQPLHPQVRPRLDPQYVEVHDKLLQYAPPTHTQPWSAAMRQPSQASVKTGLDVVPVLTEEVQLERFTILVLTPVTNADDEPRPESGWPVFVWFHGGGFVLGDHSSELDLLTRICATARCVVCSVGYRLAPEHPYPAAIEDGTDGVRWILSDAQDGGATRFSIDRNRWAIGGVSAGALLSTVTLISLGEAGDLDSGEMARPLRQVLVVPVVDNTAMPGSGFWSINPHAISPSAERMLWYRRLWLGDADPRVWSVSVNHASDKQLAYMPPTFTAIGGEDLLAPEGLAFVDQLRGAGVDVETMMLPGCPHAILAFAGCVDKAKDLFDMCVDRISKSFGN

SEQ ID NO: 5117 - protein, 494 aa, Arabidopsis thaliana
MVLTKTATNDESVCTMFGSRYVRTTLPKYEIGENSIPKDAAYQIIKDELMLDGNPRLNLASFVTTWMEPECDKLIMDSINKNYVDMDEYPVTTELQNRCVNIIARLFNAPLEESETAVGVGTVGSSEAIMLAGLAFKRKWQNKRKAEGKPYDKPNIVTGANVQVCWEKFARYFEVELKEVNLSEGYYVMDPDKAAEMVDENTICVAAILGSTLNGEFEDVKRLNDLLVKKNEETGWNTPIHVDAASGGFIAPFIYPELEWDFRLPLVKSINVSGHKYGLVYAGIGWVVWRAAEDLPEELIFHINYLGADQPTFTLNFSKGSSQIIAQYYQLIRLGFEGYKNVMENCIENMVVLKEGIEKTERFNIVSKDQGVPVVAFSLKDHSFHNEFEISEMLRRFGWIVPAYTMPADVQHITVLRVVIREDFSRTLAERLVADISKVLHELDTLPSKISKKMGIEGIAENVKEKKMEKEILMEVIVGWRKFVKERKKMNGVC

SEQ ID NO: 5118 - protein, 664 aa, Zea mays
MSPSNPLPPPGETRVGCSLPSPVTPQAMGGGPARHVAMRALRARFLSRQREGGPAAASTWWWCASGSAKGDMESTLKGIRGSDAPCVLDLDDAATVAGGVEDTYGEDRATEEQLVTPWTVSVASGYNLLRDPRYNKGLAFTERERETHYLRGLLPPAIVSQELQERKIMNNIRQYQLPLQRYMALMDLQEGNERLFYKLLIDNVEELLPIVYTPTVGEACQKYGSIFSRPQGLYISLKEKGKILEVLKNWPERSIQVIVVTDGERILGLGDLGCQGMGIPVGKLSLYTALGGVRPSACLPITLDVGTNNEELLNDEFYIGLRQRRATGQEYTDFLQEFMSAVKQNYGEKVLIQFEDFANHNAFDLLARYGTTHLVFNDDIQGTASVVLAGLIAAQTLLGGSLADHTYLFLGAGEAGTGIAELIALEISRQTKAPIEECRKKIWLVDSKGLIVSTRKESLQHFKKPWAHEHKPLSNLLDAVNAIKPTVLIGTSGKGQTFTKDVVEAISSFNERPIILALSNPTSQSECTAEQAYTWSKGQAVFATGSPFDPVEYNGKIHVPGQANNAYIFPGFGLGVVMSGAIRVHDDMLLAASEALAQQVTEENFEKGLIYPPFSNIRKISAHIAASVAAKAYELGLASRRPRPKDLVKYAESCMYSPIYRNYR

SEQ ID NO: 5119 - protein, 568 aa, Zea mays
GRDLTKFACDDLTIGFFFPPPPPPPPSSGYTLLRDPRHNKGLAFSEAERDAHYLRGLLPPALASQELQEKKLMHNLRQYERPLHRYIAMMDLQERNERLFYKLLIDNVEELLPVVYTPTVGEACQKYGSIYRRPQGLYISLKDKGKILEVLKNWPERSIQVIVVTDGERILGLGDLGCQGMGIPVGKLSLYTALGGVRPSACLPITIDVGTNNEALLNDDFYIGLRQRRATGEEYHELVEEFMAAVKQNYGEKVLTQFEDFANHNAFDLLEKYRESHLVFNDDIQGTASVVLAGLLAALKVVGGTLADHTYLFLGAGEAGTGIAELIALEMSKHTGSPIEECRPKIWLMDSRGLIVASRKESLQAFKKPWAHEHGAVETLLEAVRSLKPTVLIGTSGKGGTFTKDVVEAMASQNERPVVFALSNPTSHSECTAEQAYTWTEGRAVFASGSPFPAVELDGRALVPGQSNNAYIFPGFGLGVVISGAIRVRDDMLLAASEALAEQVTEAHYAKGLIFPPFTNIRAISARIAAKVAAKAYELGLASRLPRPDDLVKYAESCMYTPTYRSYR

SEQ ID NO: 5120 - protein, 174 aa, Candida albicans SC5314
MSAIIRQAIRPALRSVSSKRIAVTALRYNSTAAEPAKAPVDAKITTIVDQISTLTLLETSQLINELKERLNISDISLPVGGAQAAPVAQAAPAEEEVKEEVEEKTIFSIKLESFDAKSKPKIIKEVKGMLGLSLVESKKFVESAPKVLKENVAKEDAEKIKATLEGLGAKVSLE

SEQ ID NO: 5121 - protein, 119 aa, Brassica rapa
MTFASKIITCLLVLTIYIAAPTESHITCGTVTSTMTQCISYLTNGGPLPSSCCVAVKSLNQMAQTTPDRRQVCECLKSAGKEIKGLNIDLVAALPTTCGVSLSYPIGFNTNCDSISIAV

SEQ ID NO: 5122 - protein, 444 aa, Candida albicans SC5314
MVNLLKKLHITKSHQSNQSNSDSNSLNSNTSMDNHQQQQQLQHQQYQQQFQQPQQQLYPGEQIVHPAAAQTGQNTTNVTAVSSSNITQSATSSLHSQQLQHVDVSKSAAEEAIRRSLLPERSTVSKGKYSLTDFSIMRTLGTGSFGRVHLVRSVHNGRYYAIKVLKKHQVVKMKQVEHTNDERRMLKLVEHPFLIRMWGTFQDSKNLFMVMDYIEGGELFSLLRKSQRFPNPVAKFYAAEVTLALEYLHSHDIIYRDLKPENILLDRNGHIKITDFGFAKEVSTVTWTLCGTPDYIAPEVITTKPYNKSVDWWSLGVLIFEMLAGYTPFYDSTPMKTYEKILAGKIHYPSFFQPDVIDLLTKLITADLTRRLGNLINGPADIRNHPWFSEVVWEKLLAKDIETPYEPPITAGVGDSSLFDHYPEEQLDYGSQGEDPYASYFLDF

SEQ ID NO: 5123 - protein, 497 aa, Emericella nidulans
MSDLFTTIETPVIKYEQPLGLFINNEFVKGVEGKTFQVINPSNEKVITSVHEATEKDVDVAVAAARAAFEGPWRQVTPSERGILINKLADLMERDIDTLAAIESLDNGKAFTMAKVDLANSIGCLRYYAGWADKIHGQTIDTNPETLTYTRHEPVGVCGQIIPWNFPLLMWSWKIGPAVAAGNTVVLKTAQQTPLSALYAAKLIKEAPFPAGVINVISGFGRTAGAAISSHMDIDKVAFTGSTLVGPTILQAAAKSNLKKVTLELGGKSPNIVFDDADIDNAISWANFGIFFNHGQCCCAGSRILVQEGIYDKFVARFKERAQKNKVGNPFEQDTFQGPQVSQLQFDRIMEYINHGKKAGATVATGGDRHGNEGYFIQPTVFTDVTSDMKIAQEEIFGPVVTIQKFKDVAEAIKIGNSTDYGLAAAVHTKNVNTAIRVSNALKAGTVWINNYNMISYQAPFGGFKQSGLGRELGSYALENYTQIKTVHYRLGDALFA

SEQ ID NO: 5124 - protein, 297 aa, Zea mays
  misc_feature (50)..(50): Xaa can be any naturally occurring amino acid
  misc_feature (77)..(77): Xaa can be any naturally occurring amino acid
  misc_feature (124)..(124): Xaa can be any naturally occurring amino acid
MPVPPEPLPKPELPVPPQPMPPPVRPVPPQPLPRPPPCPLLPWPSRCCSXSGDIGGAARQLQELPKPDLPPLPKPVXPPRPDLPPLPKPEEQPPLPKPELPVPPQPLPIPPQPLPKPELPVPPXPSPVPPQPELPVPPQPMPKPELPVPPQPLPKPDMPVPPESLPKPELPVPPQPLPKPELPVPPEPLPKPELPVPPQPLLKPELPVPPEPLAKPELPMPPQPLPKPELPVPPEPLPKPELPVPPEPLPKPELPVPPEPLPKPELPPPVLPGELPPKPELVPLPPKAEIMPPLPKP

SEQ ID NO: 5125 - protein, 429 aa, Aeropyrum pernix K1
MHCSLAGWTVCVDFLYTGDKMLEDACAVISGERVERVHTGGFRGQPDLDLRGRSSLALPGVIDMHVHLRGLKLSYKEDEVSGTAAAASGCVTLVADMPNTQPPLRTPEALREKLASLEAGAKVDYTVYAGVPRSYGEAVEMASMGIAGFKIYPEDLVNLDSIKNVLEAAEEAGILVVLHPESHDMFAGPDYGWLRRVARPCHAEAASVELLHDAARECGCKPRVHITHASCPATVVESKKRGFTVDVTPHHLFLSEEEVAGPTHSWGKVNPPLRGVGERSLLTQLTIEGLVDAIASDHAPHSTWEKWMHPAIAPPGFPWLEWWPGFTAARLMRAVGLERFYSMVSQTPSTILGVGDRCLWDGCPATISVLQLERTRVYHKGYTKALYTPVLGMESFDCAATVIRGKIAYTAWEGVRGGATGVLATRVVH

SEQ ID NO: 5126 - protein, 116 aa, Ricinus communis
MKNIFFSVFFLLSFLLCLANVSEAAVPCSTVDMKAAACVGFATGKDSKPSSACCTGLQQLAQTVKSVDDKKAICRCLKASSKSLGIKDQFLSKIPAACNIKVGFPVSTATNCETIH

SEQ ID NO: 5127 - protein, 116 aa, Ricinus communis
MKNAVFSVLLLLSFLFCLANTNEAAVPCSTVDMKAAACVGFATGKDSKPSQACCTGLQQLAQTVKTVDDKKAICRCLKASSKSLGIKDQFLSKIPAACNIKVGFPVSTNTNCETIH

SEQ ID NO: 5128 - protein, 424 aa, Zea mays
MERYKLIRKIGDGTCGNVFMASNVETNEIVAVKKMKRKFCHWEECISLREVKALQKLFHPNIVKLKEVTMENHELFFIFEHMECNLYDVIRERQVAFPERDIRNFMVQILQGLAYMHNNGYFHRDLKPENLLVTNGIIKIADFGLAREISSNPPYTDYVSTRWYRAPEVLLQSSVYTPAIDMWAVGAILAELFTLSPLFPGESETDQLYKICTVLGTPDCTIWPEGMNLPRSCSFKFFQNPPRNLWELIPNASSEAIDLIQQLCSWDPRRRPTAEQALQHPFFNVCNWVPRPVHDAYHTKTNGPKAEPRLELNLWDFSTEPDDCVLDLTLSLKPSFSGTDLGKHVPRRTEEEILLYPGFENTPVKSGFWPLVPSDRPVGDVPAIPSWQQAYMVDSQGAFSGSPFLQSNLLENRSLAPIRQVNFF

SEQ ID NO: 5129 - protein, 316 aa, Streptomyces coelicolor A3(2)
MSDIVLEPAAQDFADATAKPPLLYELGVEGARKLLDDVQSGPVEKPDVDEKWITVPVEVGDVRVRIVKPAGTTGVLPVVLYVHGGGWILGNAGTHDRLVRELAVGAEAAVVFVEYDRSPEAKYPVAIEQAYATAQWVTTKGAEEGLDGSRMVVAGDSVGGNMSAALTHMAKRRGDVTFLHQSLYYPVTDAGQDTESYRLFAHGPHLTAKAMEWFWNAYAPDPAERDQITASPLRATPEDLQGLPPAFVVVDENDVLRDEGEAYARKLIQAGVPTTSVRYNASLHDFMMLNPVRGTQASTAAIEQAIHVLRSALGTD

SEQ ID NO: 5130 - protein, 326 aa, Oceanobacillus iheyensis HTE831
MNGLYLSSPGVIEFRELASRSKLSDDEVRIRLIYGGICGSDISVFKGKLPHANYPVVPGHELIGTVIETGKSAADFAGKRVAIMPNSFCGKCEYCKVGKTNICTEKQSLGINRDGGFAEEFVISAKYVLSLPDQLTNEKAVLIEPLAVIVHAMKKVVITEETKVAIIGCGNEGMLAIAVAEYLGAQVTAIDVKQNKLNKVSHSYHNVSTCQSADAEELFDVVIEAAGTSESFEQGIQLLKPGGAFVAIGMPPHANLPVVEIVRKEVTIYGSIIYNFPEDFNTSIEFLLQEDFQVEPVISKILSVNEYEKAYTYAVSGDYGKIILKF

SEQ ID NO: 5131 - protein, 322 aa, Xanthomonas campestris pv. phaseoli
MTASPSKLAQLRELSVVVADTGDYDAIKRLQPVDCTTNPTLVKKALDLPVYADLIERELAWGREHGGDDRTATVNEVADRLTIGVGVKLAGLVPGRVSTEVDADLAHDTQATIAKARKFIAMYAERGVSKDKILIKIAATWEGIEAARQLQKEGIDCNLTLIFNRSQALACAEAGVFLISPFVGRILDYYVGKGQTPASIDEDPGVVFVRTVYNEFKQRGYSTVVMGASFRSTAQIEALASCDRLTISPDLLEKLDAEHGELPRKLSPAKADNAQFTPIDSDSFASGLAADPMATEKLAGGIDTFAKDLHALRKTIADKLAG

SEQ ID NO: 5132 - protein, 297 aa, Triticum aestivum
  misc_feature (153)..(153): Xaa can be any naturally occurring amino acid
MKTLLILTILAMATTIATANMQVDPSSRVQWPQEQPSPQSQQPFSQQPQQIFPQPQQTFPHQPQQAFPQPQQTFPHRPQQQFPQPQQPQQPFPQPQQPQLPFPQQPQQPFPQPQQPQQPFPQSQQPQQAFPQPQQQFPQPQQPQQSFPQQQQXMIQSFLQQQMNPCKNFLLQQCNPVSLVSSLVSIILPRSDCQLMQQQCCQQLAQIPQQLQCAAIHNVAHSIIMQQEQQRGVQILRPLFQLAQGLGIIQPQQPAQLEGIRSLVLKTLPTMCNVYVPPDCSTINVPYASIDAVIGGQ

SEQ ID NO: 5133 - protein, 270 aa, Pyrus caucasica
AHYKSEADVGEAFAEAFKTGLIKREELFITTKIWNSDHGHVVEACKNSLEKLQLDYLDLYLVHYPMPTRHNAIGKTASLLGEDKVLDIDVTISLQQTWEGMEKTVTLGLVRSIGLSNYDLFLTRDCLAYSKIKPAVSQFETHPYFQRDSLVKFCIKHGVLPTAHTPLGGAAANKDMFGSVSPLDDPILNDVAKKYGKSVAQICLRWGIQRKTAVIPKSSKIQRLKENLVVLEFQLSDEDMQLIYSIDRKYRTSLPSKTWGLRRVCKGEFV

SEQ ID NO: 5134 - protein, 324 aa, Magnaporthe grisea
MSNSLDQLKSSGTTVVCDSGDFATIGKYKPQDATTNPSLILAASKKAEYAKLIDDAIAYAKKQGGSVDDQVDASLDRLLVEFGKEILKIIPGKVSTEVDARFSFDTKASVDKALHIIKLYEAEGISKDRVLIKIASTWEGIKAAEILQRDHGINCNLTLMFSLVQAIAAAEADAFLISPFVGRILDWYKAAHKKEYKKEEDPGVESVKNIFNYYKKFGYKTIVMGASFRNTGEITELAGCDYLTISPNLLEELLNSSEAVPKKLDAQGAAALDIQKKTYISDEPLFRFDFNEDQMAVEKLREGISKFAADADTLKGILKEKIQA

SEQ ID NO: 5135 - protein, 213 aa, Triticum aestivum
  misc_feature (203)..(203): Xaa can be any naturally occurring amino acid
YPVKCNQDRYVVEDIVEFGAPFGFGLEAGSKPELLLTMSCLVARGSPDALLVCNGYKDLEYVSLALIARTMGLNTVIVLEQEEELDIVVEASRRLNIRPVVGMRAKLRTKHAGHFGATSGEKGKFGLNAAQILSVVSKLKALAMLDCLQLLHFHIGSQIPTTALLADGVGEAAQIYCELARLGAAMRVIDVGGGLGIDYDGTXSAQTDMSVAY

SEQ ID NO: 5136 - protein, 462 aa, Zea mays
  misc_feature (136)..(136): Xaa can be any naturally occurring amino acid
  misc_feature (185)..(185): Xaa can be any naturally occurring amino acid
MARSRQEGEAGGEERKLVLGKYELGRLLGQGTFAKVYYARDLSAAAGTGSTSVAIKVIDKARLRRMEGMVEQLRREISIMRMVRHPNVVGIREVLASRSRVFVVMEYARGGELFAKVARGRLTEDHARRYFQQLVXAVGFCHRRGVAHRDLKPENLLLDEDGRLKVTDFGLAALPEQLRHDGLLXHTQCGTPAYVAPEVLRKRGYDGARADLWSCGVVLYVLLCGFLPFQHDNCAKMYQRIFKAEYQVPPWVSGDARRLIARLLVVDPAKRASIPEVMCTPWFRKGFVPPVLSVSPPMTPKKRLDGDDGGGGALFDSSSNSGATSPRSCNAFQLISSMSSGLDLSGLFENEHKAATVFTARAPAATVVEKLESAARALGFETTRGKGWKVRMEAKAGGTNGRLAVTAEVLEVAVDVAVVEFAHDAGDALDFNKFCAVDVRPGLAEIVWAWQGDSPAAVVGTA

SEQ ID NO: 5137 - protein, 203 aa, Pichia angusta
MNNEYDYLFKLLLIGDSGVGKSCLLLRFAEDTYTQDYISTIGVDFKIRTIELDGKTIKLQIWDTAGQERFRTITSSYYRGAHGIIIVYDVTDQESFNNVNQWLQEIDRYATSGVMKLLVGNKCDLTDKKVVDYAVAKEFADSRGIKFLETSASQSTNVEQAFIVMSKQIKSQMANSQPASNTAGKPSVNLSGTSVINQQGGCC

SEQ ID NO: 5138 - protein, 1563 aa, Lactobacillus johnsonii NCC 533
MTVPTNQTNNLNEETNQNESTVSITGAKTNDSLIAGVTQGAINVHINNHATTPLTINHGEQVNVSINDKNNLLSFNVNPTKTSEFDMNRTDTAANKEFTFTYTGSDDGILSGFDATFPFNADTTATTQYYEKYGTYPDLTLPVTVTLPNKQSFTQNLPIKINPYEDKVINEEILHGFIIGPKVIWTPGEDGNPGANGVYTEYGANYTGPEPSAKADIPVAQQKDARLMQYAIDWNYGSSTNPSLKPLLNVLAHIKFSSGQRILPSTIKVFKIPSNIKVVASDGQRISINDYYSKISTLSEDTNFENFLRNSISNDGREIVIDQKGNFTVNGEDYSKNGPYFIQLDTQLDINKIPDWINTPSSGPSISTPTTNENDWNPSGSGSTANTFTQTYTNFKLDPTVDRIIKIRFIDENTNQEIPNSAKNIITATNSSVPNPTMDIIKDLEERHYVLDQEATEGKNGSHSENLTNYNIATQNFKLDSLNNSYNSEEINVKNTSPKYYVYLYHETKPQSQTSSVTETINYVCANGTKKGELAALPYTHTVTYTRNGIEDLVTNYIDWNSWMPDSTFNAVNSPIASDSAYSLIDPLVVPAIETNISENGEITTQNSIPLSYTVNYYAPEKATLHFYDDTDKQDLTAYLLQNNQTAVINDIYDKADNNSTKQAISFAGVDKVIDFLNSKHYVFSGVSGIGSTSSSDYSKISYGNFDDDETQDQNFVLHFKHETEPISDTKEVTETIHYLYEDNSQAANDVKHSVTFTKTGTKDLVTGKENSKWSAVQTFPEVVSPVISGYTPTQSKIAPISVDHTSNDIDKTVIYTANKQQATLRFYDDSSKKFIDFAKDLIVTGSSSSPILFTIPKSYDFSNYNFVAVNKGDNPTQTTDSLSGTTLNDVTYGKFDTDNTTNQYFIAHFTHKISPVNENKSISEKAILYAENGPRKDNIFKTLNLGNINFIRTGQKDLVNQQITWDAWNVENKAQNISISEIIFNVYKLNSQNISQPSSTLKKFELNGHEISPIEFDKKQDQALIITLPNNFEFLIKVPYVLTENITVIYKDDTTNEILERQVLSGQPDTSSQYSTKNTITKYLAKNYLLVSDPTNQQTLSFDNTEDPDDQTYVVHFKHQFEEINNSKSIKETINYIYDNGTEAAPSYTNSIQFVQSGEVDLVTNIRKIKDWTPSISSFSAVKSPIINGYTTDHKQIDQQFITPNSKDLVFNVVYTAEPVKPTKPVQPIKPMQPTKPVQPTKPVQPTKPVEPTKPVQPTKPVQPTKPVEPTKPVQPTKPVEPTKPVQPTKPVQPTKPIEPTKPVKPTKPVEPTKPVKPTKPVKPTKPVEPIKPVKPTKPVQPTKPVEPIKPVKPTKPVQPTKPVEPIKPVKPTKPVQPTKPVKPTKPVEPTKPVQPIKPVQPTKPVQPTKPVEPTKPVEPTKPVRPTKPVEPTKPVKPTKPVEPTKPVQPTKPIEPTKPVEPTKPVQTTKPVEPTKPVQPTKLTISTSLHKSSDKLTQLTHQSYQNSKVSRQNTNNISVQKKKILPQTGTKTTDIGILGLALATAASLLGLISDKVNRKKHN

SEQ ID NO: 5139 - protein, 475 aa, Prochloron didemni
MSKLILFWHRRDLRISDNMGLAAARKQSSKIVGLFCLDPNILNSNEVAPARVTYMLGCLQELKESYSKIGSQLLIVRGEPIEAIPQLAVALQVTGVFWHKDGEPYARERDGKVEQELLKQGIAVTNYWDQLLHPPEDILTQSGKPYTVYTPFWKNWSQKPKLEVAEKLDRIQGLTAEEIKIAQETGVVSLPTGKDLGYYWDGELILTPGETAAREQLEEFSERAIAQYQEQRNFPAVEGTSLLSPALRFGVIGIRTVWQATLEATKNSYSEEVRANIETWQKELAWREFYQHALYHFPQLTVEPYRQQFKDFPWDNNPEHFQAWCEGKTGYPMVDAAMRQLNETGWMHNRCRMIVASFLTKDLIINWQWGEQYFMQKLCDGDLASNNGGWQWSASCGMDPKPLRIFNPASQAKKFDPEGEYIRQWLPELSSIDTEYLVRGKIPDDERERCDYPQPIVDHNLRQREFKRRYKELSP

SEQ ID NO: 5140 - protein, 495 aa, Neurospora crassa
MEVELTAPNGKKWMQPLGLFINNEFVKSANEQKLISINPTTEEEICSVYAATAEDVDAAVSAARKAFRHESWKSLSGTERGALMRKLADLVAENAEILATIECLDNGKPYQTALNENVPEVINVLRYYAGYADKNFGQVIDVGPAKFAYTVKEPLGVCGQIIPWNYPLDMAAWKLGPALCCGNTVVLKLAEQTPLSVLYLAKLIKEAGFPPGVINIINGHGREAGAALVQHPQVDKIAFTGSTTTGKEIMKMASYTMKNITLETGGKSPLIVFEDADLELAATWSHIGIMSNQGQICTATSRILVHEKIYDEFVEKFKAKVQEVSVLGDPFEESTFHGPQVTKAQYERVLGYINVGKEEGATVMMGGEPAPQNGKGFFVAPTVFTNVKPTMKIFREEIFGPCVAITTFKTEEEALTLANDSMYGLGAALFTKDLTRAHRVAREIEAGMVWVNSSNDSDFRIPFGGVKQSGIGRELGEAGLAPYCNVKSIHVNLAA

SEQ ID NO: 5141 - protein, 267 aa, Bordetella pertussis Tohama I
MTIPSFGVGTFRLTGQTVIDSVRNAIDLGYRAVDTAQIYGNETEVGQTIAESGVARSELFVTTKIWTDNYARAKLLPSLRASLEKLRTDYVDLTLIHWPAPGNGVALPEHMEALAEAKALGLTRRIGISNFNIALTRQAIAAVGQGEIATNQIELSPYLQSARLTAFLREQGIAVTSYMTLAYGKVLKDPVLARIADKHRSTVAQVALAWALQQGYAVIPSSTKRENLASNLLARGLALDADDMARIAALERNGREVDPEGLAPAWD

SEQ ID NO: 5142 - protein, 324 aa, Magnaporthe grisea 70-15
MASPTMKLNNGLDMPQVGFGLWKVENSVCADVVYNAIKAGYRLFDGACDYGNEVECGQGVKRAIDEGLVKREELFIVSKLWNTFHDGERVEPIVKKQLADWGIEYFDLYLIHFPVALEYVDPSVRYPPGWHYDDAGTEIRPSKASIQETWTAMEKLVDAGLSKAIGVSNFQAQLLYDMLRYARIRPATLQIEHHPYLVQQRLIEACKTEGIVVTAYSSFGPASFKEFNMEHAEALTPLLEEPTIVKLAEKYGKDPGQVLLRWATQRGLAVIPKSSREKTMKSNFEAVGWDMEDSDIKTISALDKGIRFNQPANYFSTDKLWIFG

SEQ ID NO: 5143 - protein, 322 aa, Schizosaccharomyces pombe
MSSLEQLKATGTVVVSDTGDFESIAKYKPQDATTNPSLILAASKKPQYAALVDAAVDYAKAKGGSINSQIEIAFDRLLIEFGTKILAIVPGRVSTEVDARYSFDTQTTIEKARHLIKLYEAEGIGRERVLIKIASTYEGIQAAKQLEEEGIHCNLTLLFSFVQAVACAEANVTLISPFVGRILDFYKAKNNRDYTAQEDPGVVSVSNIFNYYKKFGYKTIVMGASFRNVGEIKELAGVDFLTISPALLEQLNNSTDAVPKKLDASKASSLNLEKVSYLTDEPKFRFDFNNDEMAVVKLSTGIAAFAKDADTLRTILKAKLEA

SEQ ID NO: 5144 - protein, 430 aa, Bifidobacterium longum NCC2705
MATAQLDVDSNKFNLPVVKASAGPDGIVVSKLRNDGWVTLDPGFLTTAQCESKITYIDGKHSILRYCGYPIEQLCENSDFLEVAWLLRHGELPSRAEYEQFCADINHKTMVGEDFRTFMGSFPRSAHPMSVLASAINALATFYPDTTDISDNDQLDEAAKIIMAKARTIVSYIFRRRRDEPMLYPDYARGYVDDFLRMCFAVPYEPFESDPLYVHALGRLLIIHADHEQNCSTSVVRIAGSAHANLYSAVAAGVNALSGPLHGGANEAVLRQLKAIRDSGKSVAEFVRDAKENGQKISGLGHRVYKSYDPRAAIARKYLEKIMEREDTQKLPSDERALFAVATELEDIALNDEYFVSRNLYPNVDFYTGLIYRAIGFDPAMFTTLFALGRIPGWIAQYREMLADPNTKIGRPRQVYTGPVERDFVPMDER

SEQ ID NO: 5145 - protein, 246 aa, Zea mays
  misc_feature (238)..(238): Xaa can be any naturally occurring amino acid
MGLGQPWPLLNSSHEKVLRHKHAGMHVGSKTNVYIVLEYVTGGELFDTIANHGRMREGEARSYFQQLINAVDYCHSRGVYHRDLKPENLLLDSYGNLKVSDFGLSALSQQIKDDGLLHTTCGTPNYVAPEVLEDQGYDGAMADLWSCGVILFVLLAGYLPFEDSNLMTLYKKISNAEYTFPPWKLSLPRGVLTRILDPNPMTENSCDFRITIPEILEDEWVKKGYKRPEFVEEYDTPXDDVDAVFN

SEQ ID NO: 5146 - protein, 136 aa, Vibrio parahaemolyticus RIMD 2210633
MALFKYIFITVFALALYSPASNGSEIKQNVDLFEFQSVEVQQRATSLAKTLRCPQCQNQNLIESNAPAAKDLRLKVYTMVNEGSSDQQVKDYLVERYGNIVLYQPPFNYSTALLWIFPIIFLIFFALFSIRLIKRN

SEQ ID NO: 5147 - protein, 698 aa, Glycine max
  misc_feature (251)..(251): Xaa can be any naturally occurring amino acid
  misc_feature (626)..(626): Xaa can be any naturally occurring amino acid
  misc_feature (636)..(636): Xaa can be any naturally occurring amino acid
  misc_feature (648)..(648): Xaa can be any naturally occurring amino acid
MPVLACCVDAAAPPGYAFAGDISFPAPIAFTGVPPATADDTNNSNNHWSPSLSAALYNVDGWGGPYFAVNTAGNISVRPHGSDTLSHQEIDLLKIVKKASDPKSLGGLGLQLPLIVRFPDVLKNRLDSLQSAFDYAIQSGGYESHYQGVYPVKCNQDRFVVEDIVKFGSSFRFGLEAGSKPELLLAMSCLCKGNPDALLICNGFKDAEYISLALVANKLALNTVIVLEQEEEVDLIVELSKKLCIKPVIGXRAKLRTKHSGHFGGTSGEKGKFGLTTAQILRVVKKLAHAGMLDCLQLLHFHIGSQIPSTALLADGVGEAAQIYCELVRLGANMRVIDIGGGLGIDYDGSKSCDSDISVEYGLEEYAAAVVHAVQCVCDRRSVKHPVICSESGRAIVSHHSVLIFEAVGTSSTNGGGAPPALSAHYLAEELSEDYGYLSELAFRGDYETCLVYTEEMKERCVEQFKQGTVCMEQLAAVEGLCELVRKAVGAAESVRRYHVNLSIFTSVPDAWGIDQVFPIIPIHRLEEKPSVRGILSDLTCDSDGKIDKFINGESSLALHEMEGGSYYLGMFLGGAYEEALGGVHNLFGGPSVIRVSQSDGPHSFAVTRAVPGPSCGDVLRVMQHXPELMFETLKXHRAQEYVSHDNXAAVLAAGLARTFDRMPYLLPLSSFVADDVAAAAAVPAGEDDEEQWSYICA

SEQ ID NO: 5148 - protein, 416 aa, Escherichia coli
MESKVVVPAQGKKITLQNGKLNVPENPIIPYIEGDGIGVDVTPAMLKVVDAAVEKAYKGERKISWMEIYTGEKSTQVYGQDVWLPAETLDLIREYRVAIKGPLTTPVGGGIRSLNVALRQELDLYICLRPVRYYQGTPSPVKHPELTDMVIFRENSEDIYAGIEWKADSADAEKVIKFLREEMGVKKIRFPEHCGIGIKPCSEEGTKRLVRAAIEYAIANDRDSVTLVHKGNIMKFTEGAFKDWGYQLAREEFGGELIDGGPWLKVKNPNTGKEIVIKDVIADAFLQQILLRPAEYDVIACMNLNGDYISDALAAQVGGIGIAPGANIGDECALFEATHGTAPAYAGQDKVNPGSIILSAEMMLRHMGWTEAADLIVKGMEGAINAKTVTYDFERLMDGAKLLKCSEFGDAIIENM

SEQ ID NO: 5149 - protein, 165 aa, Zea mays
  misc_feature (101)..(101): Xaa can be any naturally occurring amino acid
MDGRMFGLETPLMVALQHLLDVPDGDAGAGGDKASGAAAGGGPTRTYVRDARAMAATPADVKELPGAYAFVVDMPGLGTGDIKVQVEDERVLVISGERRRXEREDAKYLRMERRMGKFMRKFVLPDNADMDKISAVCRDGVLTVTVEKLPPPEPKKPKTIEVKVA

SEQ ID NO: 5150 - protein, 498 aa, Acinetobacter sp. SE19
MGGIPHIPFCLTSVICQGCLIMNYPNIPLYINGEFLDHTNRDVKEVFNPVNHECIGLMACASQADLDYALESSQQAFLRWKKTSPITRSEILRTFAKLAREKAAEIGRNITLDQGKPLKEAIAEVTVCAEHAEWHAEECRRIYGRVIPPRNPNVQQLVVREPLGVCLAFSPWNFPFNQAIRKISAAIAAGCTIIVKGSGDTPSAVYAIAQLFHEAGLPNGVLNVIWGDSNFISDYMIKSPIIQKISFTGSTPVGKKLASQASLYMKPCTMELGGHAPVIVCDDADIDAAVEHLVGYKFRNAGQVCVSPTRFYVQEGIYKEFSEKVVLRAKQIKVGCGLDASSDMGPLAQARRMHAMQQIVEDAVHKGSKLLLGGNKISDKGNFFEPTVLGDLCNDTQFMNDEPFGPIIGLIPFDTIDHVLEEANRLPFGLASYAFTTSSKNAHQISYGLEAGMVSINHMGLALAETPFGGIKDSGFGSEGGIETFDGYLRTKFITQLN

SEQ ID NO: 5151 - protein, 506 aa, Oryza sativa (japonica cultivar-group)
MVALASLSSLSPCGLARRRSASSAASISCCAAPPPPSAKGSQESRTPRRRVRKTEGATKSLEDSVKRKMEQFYEGLDGPPLRVLPIGGLGEIGMNCMLVGNYDRYILIDAGVMFPDFDEFGVQKIIPDTTFIKKWSHKIEAVIITHGHEDHIGALPWVIPALDSSTPIFASSFTMELIKRRLKEFGIFLSSRLKVFRVRKRFQAGPFEVEPLRVTHSIPDCCGLVLRCADGIIFHTGDWKIDESPVDGKIFDRQALEELSKEGVTLMMSDSTNVLSPGRSISESVVAGSLLRHISEAKGRVITTQFASNIHRIGSIKAAADLTGRKLVFVGMSLRTYLDAAFRDGKSPIDPSTLVHLIESRFLLKVKVEDMDAYAPNDLLVVTTGSQAEPRAALNLASFGGSHALKLSKEDVLLYSAKVIPGNESRVMKMLNRLTELGPKIVMGKDAGLHTSGHAYHDELEEVLQIVKPQHFLPVHGELLFLKEHELLGRSTGIRHTTVSTLLAMV

SEQ ID NO: 5152 - protein, 232 aa, Zea mays
  misc_feature (157)..(157): Xaa can be any naturally occurring amino acid
  misc_feature (196)..(196): Xaa can be any naturally occurring amino acid
  misc_feature (207)..(207): Xaa can be any naturally occurring amino acid
MNSLYDVSCFAAGLAGNVFALALFLSPVPTFKRVLKAKSTEQFDGLPYLLSLLNCCICLWYGLPWVSDGGRALVATVNCTGALFQLAYISLFIFYADSRTTRLKVAGLLVLVVFAFALIAHASIAFFDQPLRQLFVGSVSMASLVSMFASPLAVMGXVVVRTECVEFMPFYLSLSTFLMSASFAVYGLLLRDFFIXSRMGSESSWEXCSWCCTRTTAGDGKQRLVSTVACLI

SEQ ID NO: 5153 - protein, 501 aa, Azoarcus sp. EbN1
MDVTPLLARLGVAMDELECGELPVRSPIDAAVIARLAPHSCAHAGVALDRAQQAFFAWRDVPPPRRGDMVRQYGNLLRRHKADLGELVSIEAGKIRQEGLGEVQEMIDICDFAVGLSRQLHGLTIASERPGHRMMEQWHPAGVVGVVSAFNFPVAVWAWNAALAWVCGDSVVWKPSPRTPLTALACAALFDSLRSEFDELPPGLLEVLVGGNELASLLADDRRVAVLSATGSTAMGKALAPRVAARLGRSILELGGNNAAIICPTADLALAERAILFAAAGTAGQRCTSLRRLIVHESIADALLERLRAAWGRITVGNPLDPATLVGPLIEAAAGAKMDRALAEARAAGGTVWGGEAIRVPGCEGACYRRPALVEMPGQTALVKEETFAPILYVLRYRTLDEAIALHNDVPQGLASSIFTRDLTESERFLSATGSDCGIANVNIGPSGAEIGGAFGGEKDTGGGRESGSDAWKAYMRRATCTINYSGALPLAQGIHFGLDA

SEQ ID NO: 5154 - protein, 382 aa, Phanerochaete chrysosporium
MAFASSLLALVALAAVTSAAPATTQATCPDGTKVNNAACCAFIPLAQDLQETIFQNDCGEDAHEVIRLTFHDAIAISQSKGPSAGGGADGSMLLFPTIEPNFSANNGIDDSVNNLIPFMQKHDTISAGDIVQFAGAVALTNCPGAPQLEFLAGRPNKTIPAIDGLIPEPQDSVTSILERFKDAGNFSPFEVVSLLASHSVARADKVDETIDAAPFDTTPFVFDTQIFLEVLLKGVGFPGTANNTGEVASPLPLTSGSDTGELRLQSDFALARDERTACIWQGFVNEQALMAASFKAAMAKLAVLGHDRNTLVDCSDVVPAPKPAVNKPASFPATTGPQDLELSCNTKPFPSLSVDAGAQQTLIPHCSDGDMTCQSVQFNGPA

SEQ ID NO: 5155 - protein, 360 aa, Pseudomonas aeruginosa
MSKQILVLPGDGIGPEIMAEAVKVLELANDRFQLGFELAEDVIGGAAIDKHGVPLADQTLQRARQADAVLLGAVGGPKWDRIERDIRPERGLLKFRSQLGLFANLRPAILYPQLAAASSLKPEVVAGLDILIVRELTGGIYFGQPREQRVLENGERQAYDTLPYSESEIRRIARVGFDMARVRNNRLCSVDKANVLASSQLWREVVEEVAKDYPDVELSHMYVDNAAMQLVRAPKQFDVMVTDNMFGDILSDEASMLTGSIGMLPSASLDANNKGMYEPCHGSAPDIAGQGIANPLATILSVSMMLRYSFSQATAADAIEQAVSKVLDQGLRTGDIWSEGCRKVGTREMGDAVVAALKNL

SEQ ID NO: 5156 - protein, 112 aa, Bartonella sp. Rf1570yn
ANEACLKMLQEIGSIKRIPEFIARAKDKNDPFRLMGFGHRVYKNYDPRAKIMQKTCHEVLKELNIQDDPLLDIAIELEKIALNDEYFIEKKLYPNVDFYSGITLKALGFPTE

SEQ ID NO: 5157 - protein, 329 aa, Zea mays
  misc_feature (222)..(222): Xaa can be any naturally occurring amino acid
QDGRGGRQLRGDGLLHTACGTPAYVAPEVLLKTGYDGAKADIWSCGVILFVLLAGYLPFNDTNLILVYRKITQSNYKCPPWFSVEARKLLARLLDPNPRTRITISKVTANPWFQKGLCPLTTDKPLDLWETSEVLGKEKACRCRHHQRDDADADADADDEENTRKRKRSKVTVSSPPTVAVRPSSMNAFDIISRSSGLDLSKMFDEEHRSEARFSSRESTPXVRPRVRPRVRTRNLDIKLNKRGRVEMEGGQYCRRGTLVIEAEIFEVAPSVRVVEMRKIGGDSPEFREFYRQELKPSLGDIVWSWQGSDSPPTPLLPPAPRQATNQRP

SEQ ID NO: 5158 - protein, 509 aa, Glycine max
MASNDSDSQMKIVHGDAGYILEDVPHFADYIPNLPTYPNPLRSNPAYSVVKQYFVHMDDTVPQKVVVHKDSPRGVHFRRAGPRQKVYFKSDEVHACIVTCGGLCPGLNTVIREIVCGLSYMYGVNKVLGIDGGYRGFYSKNTITLTPKVVNDIHKRGGTILGTSRGGHDTGKIVDSIQDRGINQVYIIGGDGTQRGATVIYEEVRRRGLKVAIAGIPKTIDNDIPVIDKSFGFDTAVEEAQRAINAAHVEAESIENGIGVVKLMGRYSGFIAMYATLASRDVDCCLIPESPFYLEGKGGLFEFIQKRLKENGHMVIVIAEGAGQDLLTESMQAMDQKDASGNKLLQDVGLWISHKIKDHFARKDKIPINLKYIDPTYMIRAIQSNASDNVYCTLLAQSAVHGAMAGYTGFTVGLVNGRHTYIPFNRINERQNKVVITDRMWARLLSSTNQPSFLSPKDLEEAKKAEQPPTELLEGNNCNDVGDAGKEEQPPKDEQESGNHADNGIKTEN

SEQ ID NO: 5159 - protein, 58 aa, Glycine max
MAGDGAATCIDILLAIILPPLGVFLKYGCQSVEFWICLVLTLFGYIPGIIYAVYAITK

SEQ ID NO: 5160 - protein, 506 aa, Pseudomonas syringae pv. tomato str. DC3000
MRYAHPGTEGAIVNFKERYGNYIGGEFVAPVKGQYFTNTSPVNGKPIAEFPRSTAEDIDKALDAAHAAAAAWGSTSVQARSLVLLKIADRIEANLEVLAITETWDNGKAIRETLNADIPLAADHFRYFAGVLRAQEGSAAEIDGNTVAYHIHEPLGVVGQIIPWNFPILMAAWKLAPALAAGNCIVLKPAEQTPLGISVLIELIGDLLPAGVLNIVQGYGREAGEALASSKRIAKIAFTGSTPVGSHIMKLAADNIIPSTVELGGKSPNIFFEDIMSAEPEFIDKAAEGLVLAFFNQGEVCTCPSRALVQESIYPQFMEAVLRKVEKIKRGDPLDTDTMVGAQASEQQFDKILSYLEIAKGEGAELLTGGKVEKLEGDLSTGYYIQPTLLKGNNKMRVFQEEIFGPVVSVTTFKDEAQAVAIANDTEFGLGAGLWTRDINRAYRVGRAIKAGRVWTNCYHLYPAHAAFGGYKKSGVGRETHKIALEHYQQTKNLLVSYDTNPLGFF

SEQ ID NO: 5161 - protein, 304 aa, Azoarcus sp. EbN1
MSIQWFPGHMTSARKKAAETMALTDVVIEVLDARIPEASSNPMIHELRRHRQRVCLKVLNKADLADPVATRAWLDFFNSQEGVKAVALSCKKPGDVARVPGLCQGLAPHRNDGTKLLRIMIMGIPNVGKSTLMNALLKRRVAKVGDEPAVTKSQQTFDLGSHMTITDTPGLMWPKIAHDSDGFMLAASHAIGRNAVIDEEVATFLGDLLLERYPALLAARYGIAPERLEALDGVGVIETIAARRGCRLKGGAPDLEKASQIFLNDYRSGVLGRISLETPESRRKMLSAATSAASRAAEAIGPDA

SEQ ID NO: 5162 - protein, 279 aa, Candida albicans SC5314
MVLEATMIAIDNSEYMRNGDFLTSRYEAQLTATEFIFQNKINSNPENTVGLLAYGGSGPQVLSTLTTDFGKILAGVHETKIQGENNFSSGIQVAALALKHRQNKVQQQRIIIFVGSPIKESEKELEKLAKKMKKNNVAVDIINFGEEGVNTAKLERFQSTINNHDNSHLVTISPGPRLLYEVVASSPILVEDGGFGAGVSGGDMDFFGGAGGAGDIIDPNMDPDLAMALRLSLEEEKARQEREAADRAKAEASTDLEKIDESKEDNNDKDKDVNMEDAK

SEQ ID NO: 5163 - protein, 322 aa, Glycine max
MAGKKIPDVLLNSGHKMPVIGMGTSVENRPSNETLASIYVEAIEVGYRHFDTAAVYGTEEAIGLAVAKAIDKGLIKSRDEVFITSKPWNTDAHRDLIVPALKTTLKKLGTEYVDLYLIHWPVRLRHDLENPTVFTKEDVLPFDIEGTWKAMEECYKLGIAKSIGICNYGIKKLTKLLEIATIPPAVNQVEMNPSWQQGKLREFCKQKGIHVSAWSALGAYKIFWGSGAVMENPILQDIAKAKGKTIAQVALRWVYQQGSSAMAKSTNSERMKQNLDIFDFVLSEEDLERISQVPQRRQYTGDIWLSENGSCKTLEELWDGDV

SEQ ID NO: 5164 - protein, 338 aa, Leavenworthia uniflora
  misc_feature (170)..(170): Xaa can be any naturally occurring amino acid
TGQIIRSKAAVAWEAGKPLVMEEVEVAPPQKHEVRIKILFTSLSHTDVYFWEAKGQTPLFPRIFGHEAGGIVESVGEEVTDLQPGDHVLPIFTGECGDCPHCHSEESNMCDLLRINTERVGMIHDGESRFSINGKPIHHFLGTSTFSEYTVVHSGQVAKINPEAPLDKVXIVSCGLSTGLGATLNVAKPKKGQSVAVFGLGPVGLGAAEGARIAGASRIIGVDLNSNRFEQAKKFGVTEFVNPKEHDKPVQQVIAEMTNGGVDRSVECTGSVQAMIQAFECVHDGWGVAVLVGVPSKDDAFKTHPMNFLNERTLKGTFFGNYKPKTDIPGVVEKYMNK

SEQ ID NO: 5165 - protein, 171 aa, Oryza sativa (indica cultivar-group)
MEHKETGCQQPKGPILCINNCGFFGSAATMNMCSKCHKEMIMKQEQAKLAASSIDSIVNGGDSGKEPIIAGHAEVAVAQVEVKTLVAQPAEIAGPSEGVTVNPKGREGPNRCSTCRKRVGLTGFNCRCGNLYCAMHRYSDKHDCQFDYRTAARDAIAKANPVVKAEKLDKI

SEQ ID NO: 5166 - protein, 389 aa, Escherichia coli
TLQNGKLNVPENPIIPYIEGDGIGVDVTPAMLKVVDAAVEKAYKGERKISWMEIYTGEKSTQVYGQDVWLPAETLDLIREYRVAIKGPLTTPVGGGIRSLNVALRQELDLYICLRPVRYYQGTPSPVKHPELTDMVIFRGNSEDIYAGIEWKADSADAEKVIKFCREEMGVKKIRFPEHCGIGIKPCSEEGTKRLVRATIEYAIANDRDSVTLVHKGNIMKFTEGAFKDWGYQLAREEFGGELIDGGPWLKVKNPNTGKEIVIKDVIADAFLQQILLRPAEYDVIACMNLNGDYISDALAAQVGGIGIAPGANIGDECALFEATHGTAPKYAGQDKVNPGSIILSAEMMLRHMGWTEAADLIVKGMEGAINAKTVTYDFERLMEGAKLL

SEQ ID NO: 5167 - protein, 316 aa, Brassica napus
  misc_feature (16)..(16): Xaa can be any naturally occurring amino acid
  misc_feature (20)..(21): Xaa can be any naturally occurring amino acid
  misc_feature (23)..(23): Xaa can be any naturally occurring amino acid
  misc_feature (31)..(31): Xaa can be any naturally occurring amino acid
  misc_feature (53)..(53): Xaa can be any naturally occurring amino acid
  misc_feature (57)..(57): Xaa can be any naturally occurring amino acid
IGEGGFGQVFKGWLDXKTLXXSXPVVGIPVXVKKSNPDSAQGLHEWQCEVKFXGKFXHPNLVKLLGYCWEENQFLLVYEYLPKGSLENHLFSKGEALTWDTRLKIAIEAAQGLNFLHNSEKSVIYRDFKASNILLDSNFNAKLSDFGLAKLGPINGFSHVTTRVMGTQGYAAPEYMATGHLYVRSDVYGFGVVLLEILTGLRALDPNRPPLQLNLVEWAKPGLTQKKKIQKMMDPRLEHKYPISAVIRTAALILRCVEEDPKNRPPMDEVLRELEIVRTMRDEPKEEKRKRSGGGPDNNRINRYGSPHVRGTGRTR

SEQ ID NO: 5168 - protein, 218 aa, Brassica napus
NDGSHIVHVPSGANALSDVLLSTPVFTGDEGASGYVSAAAAAAAAGGDFDFGVDPNIDPELALALRVSMEEERARQEAAAKKAADEAGQKDKDGDTASASQETVARTTEKNAEPMDEDNALLDQAIAMSVGDVNMSEAADEDQDLALALQMSMSGEESGEATGAGNLLGDQAFISSVLSSLPGVDPNDPAVQALLGSLPDESKRNEEESNSKGEDEKK

SEQ ID NO: 5169 - protein, 388 aa, Escherichia coli
TLQNGKLNVPENPIIPYIEGDGIGVDVTPAMLKVVDAAVEKAYKGERKISWMEIYTGEKSTQVYGQDVWLPAETLDLIREYRVAIKGPLTTPVGGGIRSLNVALRQELDLYICLRPVRYYQGTPSPVKHPELTDMVIFRGNSEDIYAGIEWKADSADAKKVIKFLREEMGVKKIRFPEHCGIGIKPCSEEGTKRLVRAAIEYAIANDRDSVTLVHKGNIMKFTEGAFKDWGYQLAREEFGGELIDGGRWLKVKNPNTGKEIVIKDVIADAFLQQILLRPAEYDVIACMNLNGDYISDALAAQVGGIGIAPGANIGDECALFEATHGTAPKYAGQDKVNPGSIILSAEMMLRHMGWTEAADLIVKGMEGAINAKTVTYDFERLMEGAKL

SEQ ID NO: 5170 - protein, 509 aa, Bordetella bronchiseptica RB50
MDLSDLKKLGLDVAYPFKEQYENYIGGQWVPPVGAEYFDNLSPITGQPFCRVPRSGAADIELALDAAHRARAAWARTSPAERANILLRIADRIEGQLPMLAVAESIDNGKPLRETTAADLPLAIDHFRYFAGCIRAQEGAISEIDANTVAYHFHEPIGVVGQIIPWNFPLLMAAWKLAPALAAGCVVVLKPAEQTPASILVLAELIGDLLPPGVLNVVNGYGKEAGQALATSKRIAKIAFTGSTPVGKHILHAAADNLIPATVELGGKSPNIFFDDVMDHDDEFLDKALEGLAMFALNQGEVCTCPSRILIQESIYERFIEKAIARVQSIKTGHPLDAGTMVGAQVSQVQMDKILSYIDIGRQEGAQCLTGGARNDMLPGGLDQGFYVQPTMLLGKNSMRIFQEEIFGPVAAVATFKDEEEAIAMANDTFYGLGAGVWSRDGARAYRVGRGIEAGRVWTNCYHLYPAHAAFGGYKQSGIGRETHKAALSNYQQTKCLLVSYSAKALGFF

SEQ ID NO: 5171 - protein, 162 aa, Crocosphaera watsonii WH 8501
MSHNNSIGNYLIQRLLELGVNHVFGVPGDFVLGFNKLLENSDLEFINTCDEQGAGFAADAYARLRGLGVVCVTYCVGGLKIANTTAQCFAEKSPVVVISGSPGINERIKNPLLHHKVKEFDTQYKGFQEITVAATVLDNPDTAQVNRTIIHDYTSSFPQFGD

SEQ ID NO: 5172 - protein, 304 aa, Escherichia coli
TLQNGKLNVPENPIIPYIEGDGIGVDVTPAMLKVVDAAVEKAYKGERKISWMEIYTGEKSTQVYGQDVWLPAETLDLIREYRVAIKGPLTTPVGGGIRSLNVALRQELDLYICLRPVRYYQGTPSPVKHPELTDMVIFRENSEDIYAGIEWKADSADAEKVIKFLREEMGVKKIRFPEHCGIGIKPCSEEGTKRLVRAAIGYPIANDRDSVHLVHKGNIMKFTEGAFKDWGYQLAPEEFGGELIDGGPWLKVKNPNTGKKIVIKNVIADAFLQQILVRPAELNVIACLNLNGDFISDPLATQVG

SEQ ID NO: 5173 - protein, 389 aa, Escherichia coli
TLQNGKLNVPENPIIPYIEGDGIGVDVTPAMLKVVDAAVEKAYKGERKISWMEIYTGEKSTQVYGQDVWLPAETLDLIREYRVAIKGPLTTPVGGGIRSLNVALRQELDLYICLRPVRYYQGTPSPVKHPGLTDMVIFRGNSEDIYAGIEWKADSADAEKVIKFLREKMGVKKIRFPEHCGIGIKPCSKEGTKRLVRAAIEYAIANDRDSVTLVHKGNIMKFTEGAFKDWGYQLAREEFGGEPIDGGPWLKVKNPNTGKEIVIKDVIADAFLQQILLRPAEYDVIACMNLNGDYISDALAAQVGGIGIAPGANIGDECALFEATHGTAPKYAGQDKVNPGSIILSAEMMLRHMGWTEAADLIVKGMEGAINAKTVTYDFERLMEGAKLL

SEQ ID NO: 5174 - protein, 247 aa, Gloeobacter violaceus PCC 7421
MTLITPDTSLTVEEAVEQLRGEDLSQRYYAAWYLGYLEDPRAVEALVAALADESDRTEMGGYPLRRKAAESLGRIGEARAVPSLVEILGCEDYYVREAAAWSLARIGDALAVEPLVALLGQGGSQPYEAIIEALGDLRVHRAVPLIQPFLQERSERIRYAAARSLFQLTGEVALIDILLGGLASADSHIRRAALFDLADTGYLPAAVKIVHADVTATLKLLALKQLADVQTTDAAAADVLPFIDSIL

SEQ ID NO: 5175 - protein, 175 aa, Bradyrhizobium japonicum USDA 110
MANETKLPVTKKTNEPAFGGETWRPFEALRKEVDRLFEDFGTDDFWRRPFRSLAGFERNLAQKLVSTPAVDVTESDKAYEITAELPGMDEKDIEVNVANDGLTIKGEKKFEREEKQKDYYVSERRYGSFERHFGLPKDVEADKIEASFRNGVLKVTLPKTAEAQKPAKKIEVKAA

SEQ ID NO: 5176 - protein, 361 aa, Bacillus megaterium
MTIQWFPGHMAKARRQVTEKLKLIDIVYELVDARIPQSSRNPMIDEIIVNKPRIVLLNKVDKADPRVTQQWLDYYKEQGIYALAIDAQAGKGMKQIVSSSKELLQEKFDRMRAKGVKKPRAIRAMIVGIPNVGKSTLINRLASKKIAKTGDRPGVTQAQQWIKVGNELELLDTPGILWPKFEDETVGYKLATTGAIKDTILNMQDVAVYALRFLTSHYPEQLKQRYNLNEIPEDIVELFDAIGSRRGCLMGGGMVDYDKTAELVLREIRTDKIGTFTFDDQLFRFIYELANRENMYIEPSAAAGLQGPLHLMETGSSYIQAQALENDMSKATHLVWSTGGSMVPAEVMNSYYKQGKNLMNG

SEQ ID NO: 5177 - protein, 462 aa, Zea mays
  misc_feature (293)..(293): Xaa can be any naturally occurring amino acid
  misc_feature (396)..(396): Xaa can be any naturally occurring amino acid
MDGRRTILMGRYEIGKQLGQGTFAKVFYARNLTTGLAVAIKMINKDKVMKVGLMEQIKREISIMRLVKHPNILQLYEVMASKSKIYFVLEYAKGGELFNKIAKGGKLSEDAARKYFQQLVSAVDFCHSRGVYHRDLKPENLLLDENENLKVSDFGLSALAESKRQDGLLHTTCGTPAYVAPEVLSRKGYDGAKSDVWSCGVILFVLVAGYLPFHDTNLIEMYRKISRAEFRCPRFFSTELKDLLHKILVPDPSTRISISRIKRSAWYRKPVEAHAKKNEAETSENTCTGEGTXSVSTECSTSEGNQGPLSLPNLNAFDIICLSTGFNLSGFFEDKYGRREERFTTRQPVTTVFTKLKELAKRLKLRVKKKENGTLKLAAPKEGKKGMLELDAEIFXELLVLCSLVELKKTNGDTLEYQKLVKEEIRPALKDIVWVWQDDQHQEQAEQLPQPEQLQTPIAPEE

SEQ ID NO: 5178 - protein, 487 aa, Brucella melitensis 16M
MLALKDPSLLKSQCLVNGRWIDAADGTTIKVTNPADGSVIGTVPSLSVATIKEAIDASAKALSGWAAKTAKERAGILRKWFDLIIANADDIALIMTSEQGKPLAEARGEVLYAASFIEWFAEEAKRVYGDTIPAPQNGQRLTVIRQPVGVTAAITPWNFPAAMITRKAAPALAAGCTMIVRPADLTPLTALALGILAEKAGIPAGVLQIVTGKAREIGAELTSNDTVRKLSFTGSTEVGRLLMAQCAPTIKRISLELGGNAPFIVFDDADLDAAVDGAMVSKYRNAGQTCVCANRIYVQRGVYDKFAEKLAAKVKELKVGNGTEPGVVIGPMIEEKAITKVKAHIEDAVSKGAKLITGGKELGGLFFEPGILTGVTSDMLVAKEETFGPLAPLFAFDTEEEVIAQANDTIFGLAAYFYTENFSRAIRVSEALEYGMVGHNTGLISNEVAPFGGVKQSGLGREGSKYGIEEYLETKYICSAYKRGAKK

SEQ ID NO: 5179 - protein, 535 aa, Zea mays
MAVVYYLLLAGLIACSHALAAGTLALGEDRGRPWPAFLAALALDGKLRTDSNATAAASTDFGNITSALPAAVLYPSSTGDLVALLSAANSTPGWPYTIAFRGRGHSLMGQAFAPGGVVVNMASLGDAAAAAPPRVNVSADGRYVDAGGEQVWIDVLRASLARGVAPRSWTDYLYLTVGGTLSNAGISGQAFRHGPQISNVLEMDVITGHGEMVTCSKQLNADLFDAVLGGLGQFGVITRARIAVEPAPARARWVRLVYTDFAAFSADQERLTAPRPGGGGASFGPMSYVEGSVFVNQSLATDLANTGFFTDADVARIVALAGERNATTVYSIEATLNYDNATAAAAVDQELASVLGTLSYVEGFAFQRDVSYTAFLDRVHGEEVALNKLGLWRVPHPWLNMFVPRSRIADFDRGVFKGILQGTDIVGPLIVYPLNKSMWDDGMSAATPSEDVFYAVSLLFSSVAPNDLARLQEQNRRILRFCDLAGIQYKTYLARHTDRSDWVRHFGAAEWNRFVEMKNKYDPKRLLSPGQDIFN

SEQ ID NO: 5180 - protein, 322 aa, Malus x domestica
ILPFKLPAIGPNDVRIRIKAVGICGSDIHYLKTMKCGDFQVKDPMVIGHECAGIVDKVGSEVKHLVPGDRVAVEPGISCAHCQQCKGGRYNLCPDMKFFATPPVHGSLANQIVHPADLCFKLPENVSLEEGAMCEPLSVGVHACRRANVGPETTVLIVGAGPIGLVSVLAARAFGAPRIVIVDMDDRRLAMAKSLGADGTVKVSTKMEDLDDEVAKIKEAMGSEVDVTFDCVGFNKTMSTGLNATRPGGKVCLVGMGHGVMTVPLTPAAAREVDVVGVFRYKNTWPLCLEFLRSGKIDVKPLITHRFGFTEKEVEEALEPVL

SEQ ID NO: 5181 - protein, 364 aa, Mycoplasma penetrans HF-2
MKSINLPTSMKALVFVEKNKIQIVNKPIPTVGPNDALIKVTTTTICGTDIHIVKGEYPVKPGLTIGHEAVGILAAVGDEVTGFELGERVLAGAITPSGYTAACQSGQSSQDGIGTKYGYKPTAGWKFGNIMDGCQAEYVLVKNAMANLARVPNALTDEQVLMCPDIMSTGFSGPENANIKLGDYVGVIAQGPIGLCATTGAKLMGASIIIAIDGNDRRLEIAKELGATHTINFRNVDVVQEVNRITDGRMLDSAIECLGSQSTFEQGFRLLRAGGTLSSLGVYSSDIKLPLDALAAGLGDHKISFALCPGGSERMRRLMSLIENKRVDLRSLVTHTLPFDRIAEGYNIFANQKDGVLKVAIKVS

SEQ ID NO: 5182 - protein, 100 aa, Triticum aestivum
  misc_feature (91)..(91): Xaa can be any naturally occurring amino acid
MAPTVMASSATSVAPFQGLKSTAGLPISRRSSSAGLSSVSNGGRIRCMQVWPIEGIKKFETLSYLPPLSTEALLKQVDYLIRSKWVPCLEXFTRLGFVFR

SEQ ID NO: 5183 - protein, 362 aa, Geobacter sulfurreducens PCA
MAQVFKVAVLPGDGIGPEVMAEALRVLDAVEAKYDVKFERTHANVGGAGIDIEGKALPETTVNICKAADAILFGSVGGPKWESLPPDEQPERGALLPLRKIFGLYANLRPAIIFPSLTGASSLKEEVIAGGFNVLVIRELTGGIYFAQPKGIEGEGRDRVGFDTMRYSVPEIERITHVAFQAARKRGKKVCSIDKANVLSSSVLWREVVTGIAKEYPDVELSHMYVDNAAMQLVRWPKQFDVILCENMFGDILSDEAAMLTGSLGMLPSASLAEGTFGMYEPSGGSAPDIAGQGIANPIAQILSMGMMLKFSFGMVDAADAIDNAVATVLDQGFRTRDIYQQKDGEKLVNTKEMGDAIIAAL

SEQ ID NO: 5184 - protein, 286 aa, Salmonella enterica subsp. enterica serovar Typhi Ty2
MAENTMWHETLHDQFGQYFAVDNVLYHEKTDHQDLIIFENAAFGRVMALDGVVQTTERDEFIYHEMMTHVPLLAHGHAKHVLIIGGGDGAMLREVTRHKNVETITMVEIDAGVVSFCRQYLPNHNAGSYDDPRFTLVIDDGVNFVNQTHQTFDVIISDCTDPIGPGESLFTSAFYEGCKRCLNPGGIFVAQNGVCFLQQDEALDSHRKLSHYFSDVGFYQAAIPTYYGGIMTFAWATDNDALRHLSSEIIQARFHAAGLKCRYYNSAIHAAAFALPQYLHDALSAQ

SEQ ID NO: 5185 - protein, 490 aa, Escherichia coli
MDDQLKQSALDFHEFPVPGKIQVSPTKPLATQRDLALAYSPGVAAPCLEIEKDPLKAYKYTARGNLVAVISNGTAVLGLGNIGALAGKPVMEGKGVLFKKFAGIDVFDIEVDELDPDKFIEVVAALEPTFGGINLEDIKAPECFYIEQKLRERMNIPVFHDDQHGTAIISTAAILNGLRVVEKNISDVRMVVSGAGAAAIACMNLLVALGLQKHNIVVCDSKGVIYQGREPNMAETKAAYAVVDDGKRTLDDVIEGADIFLGCSGPKVLTQEMVKKMARAPMILALANPEPEILPPLAKEVRPDAIICTGRSDYPNQVNNVLCFPFIFRGALDVGATAINEEMKLAAVRAIAELAHAEQSEVVASAYGDQDLSFGPEYIIPKPFDPRLIVKIAPAVAKAAMESGVATRPIADFDVYIDKLTEFVYKTNLFMKPIFSQARKAPKRVVLPEGEEARVLHATQELVTLGLAKPILIGRPNVIEMRIQKLGLQI

SEQ ID NO: 5186 - protein, 170 aa, Zea mays
MAPTVMMASSATAVAPFQGLKSAASLPVARRSTRSLGNVSNGGRIRCMQVWPAYGNKKFETLSYLPPLSTDDLLKQVDYLLRNGWIPCLEFSKLGFVYRENSTSPCYYDGRYWTMWKLPMFGCNDATQVYKELQEAIKSYPDAFHRVIGFDNIKQTQCVSFIAYKPPGSD

SEQ ID NO: 5187 - protein, 487 aa, Agrobacterium tumefaciens str. C58
MTLSFDPDSLTLPIGHFIGGRLIPAQNGIDMHRPSDGVEYAGCPRANAALVDEAVQTAKAALKSSNWGGVRPRERTKILQRWADLIEQEAETLAKIEALSSTRPVGQLIAGDIAVTAEQIRFFAEFADKEGGDLVPTDDASLGMIMTEPYGVVGAITPWNFPVSMAGWKLGPALAAGNAVVLKPSEMTPFSSIFMAELAIKAGLPAGLINVVLGDGPVTGNAITGHPEISKVSFTGSTAAGAAIMANVARTGIKPMTLELGGKSPQLVFADADIEKAAAAIAGNILSNAGQACVAGSRIIVEESAADALSAAIIARMKTVKPGPTWDEATQYSPIISEVQRQRIDGIVQAAVAHGGECLTGGAIMDGPGYFYQPTLIANVDQTSPAVTEEIFGPVLTLQTFRTEEEALALADHPTYGLAAGLFSRDVSRVLRLSRAIQAGTIWVNRYGRSRDHILPTGGYKRSGIGKDLGRDAYLANRKSKSVLIGL

SEQ ID NO: 5188 - protein, 171 aa, Zea mays
  misc_feature (159)..(159): Xaa can be any naturally occurring amino acid
MAGIGRNMVAPLLVLNLIMYIIVIGFASWNLNHFINGQTNYPGVAGNGATFYFLVFAILAGVVGAASKLAGVHHVRAWRHDSLATNAASSLIAWAITALAFGLACKEIHIGGHRGWRLRVLEAFVIILAFTQLLYVLMLHTGLFGGSGGYRDHDYGVGXGAAGEPKGVTRV

SEQ ID NO: 5189 - protein, 431 aa, Bifidobacterium longum NCC2705
MATEHEEKLGTEDSKWLGEYSQVHMNVFGTPLRVMDHGQGAHIWDVDGNEYLDFLAGIAVNSLGYAHPKWVKAVADQAAKVAHISNYFASEPQIELASKLVKLAGAPEGSKVYFGNSGAEGNEAALKLAKLYGRTLPGALPSIGGKPARILAMTHGFHGRTMGALSATWKPGIRKPYDPLVPNIEFVRAGDKVALHDAFAQTGLGRYGKGPVAAVILELIQGEAGVQPLGADYVKFVRELCDINHALLIIDEVQTGIGRTGKWFAFQRDDLSGGVTPDMVTFAKGVAGGFPMGGMIAFGEKLAALFTPGSHGSTFAGNPLGAAAGLATLDVIEDENLVANAEARGEQLRDGIMATGNPLFVSVRGRGLLDAVELKHPCSHAVMNYCLEHGLIVNAVAPNALRFAPPLIVTAQDVDQALAILKDVPTDLPDD

SEQ ID NO: 5190 - protein, 208 aa, Brassica napus
  misc_feature (159)..(159): Xaa can be any naturally occurring amino acid
  misc_feature (175)..(175): Xaa can be any naturally occurring amino acid
MIDSMEKMIRSSCVSLLFCLVFLLFSSLYGSLHLVEAGKIEITDDLDDVEDNEEDDSWKQWGSKAATPEFDPPPDFSDMGFDQIQEEMAKRTFAPVVGFVKLRLGVHRTKDMVVEIAMRWMKVLRTGGLGVRFMAVDRSTVMFNMQNGMEVTELREFVXSQEEAYEVKIGKQEFXRPGDPPLDDVFEKLQANDDDGDTSKNDVTKDEL

SEQ ID NO: 5191 - protein, 479 aa, Mesorhizobium sp. BNC1
MTTLHQNLIDGAWVGGEGKENINPSNIKDVVGIYAQASAEETKQAIAAAKAAFPAWSRSGILERHAILRKTADEILARKDELGELLSREEGKTLPEGIGEVTRAGQIFDFFAGAVLRLAGEVLPSVRPGIGVEITREPIGVIGIITPWNFPIAIPSWKIAPALAYGNTVVVKPADLVPGSTWAIVDILVRAGLPKGVLNLVMGKGSVVGQTMLESRDVTAITFTGSVGTGKRVAAASVELGRKFQLEMGGKNPTVVLDDADLKVAVESVTQSAFFSTGQRCTASSRVIVTEGIHDRFVEALAERIRGLKVGNALEPGIDIGPVVDANQLKQDTDYIEIGKQEGAKLVAGGERVQKETEGYFLQPALFTEATNSMRISREEIFGPVASVIRVKDYEEALATSNDTEFGLSAGIVTTSLKYATHFKRNAEAGMVMVNVPTAGVDFHVPFGGRKGSSYGPREQGTYAAEFFTVVKTAYTAAG

SEQ ID NO: 5192 - protein, 394 aa, Vibrio vulnificus YJ016
MLSENTINIVKSTAPLLAETGPKLTAHFYQRMFEHNPELKDIFNMSNQRNGDQREALFNAICAYASNIDNLPALLGAVEKIAHKHSSFLITADQYQIVGSHLLATIDELFSPGQAVLDAWAEAYGVLANVFIQREEQIYQANQSQTGGWRGLREFELVEKQYESAHICSFVFKPVDGGSVVSFKPGQYLGIYINDEQFENQEIRQYSLSSSVRPDCYRISVKREEGGRVSNYLHDHLDVGSKVKLAAPAGDFFLDAAPTAPVVLISAGVGLTPTLSMLESLTEHQAPVTWIHATENGQQHAFKQHVKQLVETHPHFNSLVWYNQPNSDDKIGDDFQFSGWVNLHEIETVLKQADVQVYFCGPVGFMQFIAKQLLEMGVPEQQFHYECFGPHKVV

SEQ ID NO: 5193 - protein, 389 aa, Escherichia coli
TLQNGKLNVPENPIIPYIEGDGIGVDVTPAMLKVVDAAVEKAYKGERKISWMEIYTGEKSTQVYGQDVWLPAETLDLIREYRVAIKGPLTTPVGGGIRSLNVALRQELDLYICLRPVRYYQGTPSPVKHPGLTDMVIFRENSEDIYAGIEWEADSADAEKVIKFLREKMGVKKIRFPEHCGIGIKPCSKEGTKRLVRAAIEYAIANDRDSVTLVHKGNIMKFTEGAFKDWGYQLAREEFGGELIDGGPWLKVKNPNTGKEIVIKDVIADAFLQQILLRPAEYDVIACMNLNGDYISDALAAQVGGIGIAPGANIGDECALFEATHGTAPKYAGQDKVNPGSIILSAEMMLRHMGWTEAADLIVKGMEGAINAKTVTYDFERLMEGAKLV

SEQ ID NO: 5194 - protein, 290 aa, Triticum aestivum
  misc_feature (236)..(236): Xaa can be any naturally occurring amino acid
  misc_feature (267)..(267): Xaa can be any naturally occurring amino acid
MKTLLIVTILAMATTIATANMQVDPGYQVQWPQQQPFPQPQQPFCQQPQQTIPQPHQTFHHQPQQTYPHQPQQQFPQTQQPQQPFPQPQQTFPQQPQLPFPQQPQQPFPQPQQPQQQFPQSQQPQQPFPQPQQQFLQPQQPQQSFPQQQQPLIQLSLQQQMNPCKNFLLQQCNPVSLVSSLISMILPRSDCQVMQQQCCQQLAQIPQQLQCAAIHSVVHSIIMQQEQRQGVQIRRXLVQLVQGQGIIQPQQPAQLGGDQGHWYLRTXSTMCNVYVLPMVTINAPFASWCQ

SEQ ID NO: 5195 - protein, 322 aa, Exiguobacterium sp. 255-15
MSLKRIAILTSGGDAPGMNAAVRAVTRKAIFHGLEVFGVYNGYQGLINGDLVQLNLGSVGDIIQRGGTFLRSARCPEFRTEEGRAKAVVNLKKFEIDALVVVGGDGSYRGAQKLTGLGFPTIGLPGTIDNDIPGTDYTIGFDTALNTALEAIDKIRDTASSHERTYVIEVMGRDAGDIALYAGLAGGAESILVPERPEDLKEVLNRIQSGVNRGKKHSIVIVAEGAGRAQDVGDEIAKETGLDTRVTVLGHVQRGGAPTAADRVLASRMGAYAIDILLEGKQGRVVGVRGGKMVDLDIDEALDENKHELDLEILELSKQLSI

SEQ ID NO: 5196 - protein, 179 aa, Zea mays
  misc_feature (5)..(5): Xaa can be any naturally occurring amino acid
TPSVXYDPLALRKAFEKAVVKRLMTDVPFGVLLSGGLDSSLVATVAVRHLARTEAARRWGTKLHSFCVGLEGSPDLKAAREVAEYLGTLHHEFHFTVQDGIDAIEDVIYHTETYDVTTIRASTPMFLMSRKIKSLGVKMVISGEGSDELFGGYLYFHKAPNKEELHRETCRKVCVSFFH

SEQ ID NO: 5197 - protein, 498 aa, Nostoc sp. PCC 7120
MKTPLNCQNYINGQWLNAATETTLNSHNPADKSEIVATFPRSQADDVDRAVAAARQAYGSWRKVPAPARAEYIFRVGELLLQHKEELAQLISREMGKPLTEARGDVQEGVDCAFYSAGEGRRLFGQTTPSEMPNKFAMTMRMPIGVCALITPWNFPVAIPCWKAMPALVCGNTVILKPAEDTPACATKLIEIFAAAGLPPGVINLVHGVGEEVGKALVEHPNIDLVSFTGSSATGAYVGETCGRTHKRVCLEMGGKNAQVVMEDADLELALDGALWGAFGTTGQRCTATSRLILHRDIKEKFTTMLRERTSQLRLGAGTEPETDIGPIINNRQLQRVHEYMNIAREEGAKILIGGEIATEGQLQQGYFFQPTILDNVTPQMRVAREEIFGPVVALIEVSTFEEAIAILNDTKYGLSSSVYTRDINRAFVAMRDIEAGITYINGPTIGAEVHLPFGGVKQTGNGHREAGTTALDVFTEWKSVYVDFSGSLQRAQIDNRS

SEQ ID NO: 5198 - protein, 387 aa, Propionibacterium freudenreichii subsp. shermanii
MPPTTTSSSSWPSRRSSPAPSPWCCSGTSRSTRPTNPLTRQSPTPASWRHEAGMAEKLNVPGLWSAEMGQVIAKQNELAGDAFATDVTPAQMRENYDTERAFWNEGGPQMARTTDREVATAYGAVSVRQYRPAGPAPQDTLPVIVFIHGGGWVVGNPTTHDRITRILADSTKACVVSVDYTLSPEAKYPQALNECVAVVRALVDAPDEWGIDADDISLAGDSGGASLAFGVALHLRDEEKLADRLRCMLLYYGIYGLTDSASRRLGGPWDGLGDDDLQYYYNAYFGSPEDVSSPWFNVVGADLGHGVPPCYMAAAALDPLRDDSRTLAAQLGLAGVTNQYEEFAGVIHGFAHHTRMLSAARRLLAHSAQFFTDQGPDQRPDADPARP

SEQ ID NO: 5199 - protein, 457 aa, uncultured marine proteobacterium ANT8C10
MEFNSHEELVAASTKAAQKWRLVPAPQRGEFIRQFGNELRNQKTELAKVITKEARKIVSEAEGEVQEAIDMCDFATGLSRQLYGLTMPSERPDHRLQELWQPIGVVGCITAFNFPMAVFAWNFCLASVCGNSIIWKPSPHSNGCSDALKKAWDEVAGEHKDLVLLLKGGNEEASALCKDTNIPLISATGSTQMGKELAPIVSARLGRTLLELGGNNAAIICPTADLDLTVKGITFSACGTTGQRCTSLRRAFVHEDIYEEFMQKLHAYYATLKIGNPSDSSNQIGPLISERSYNDMQRVLESISNKDVTVHGGQRLEVGDPEEFYVMPAIVEVSQIEDEMLNETFAPILYVKKFTDLTNAIEMQNNVKQGLSSSIFTNDMRESELFLSSEGSDCGIANVNIGTSGAEIGGAFGGEKDTGGGRESGSDAWKAYMRRVTATINYGEDLPLAQGVEFDES

SEQ ID NO: 5200 - protein, 203 aa, Thalictrum thalictroides
KRRNGLLKKAYELSVLCEAEVALIVFSSRGRLYEYSNNSVKKTIERYKKASTDSPNSGSVSEANVQFYQQEASKLRNQIASLQNHNRNLLGESLSNLNIRELKQIEKKIEGGISKIRAKKNELLFAEIEYMQKREIDLQTDNKYLRAMIAANERAPEHMNLMPANEYHVMSSAPFDSRNFMPANLLDHNNNYCRSDQTTLQLG

SEQ ID NO: 5201 - protein, 347 aa, Streptococcus agalactiae NEM316
MFVKKGLFVFLLLCILSMWLMIFGVAFYYFGSLHQSLTSRIIYQFVLTVLLTTTAWFMGAYFLAFEGHFKTVFQFQEADGKQIVNCLFQLCFALYAVVMLIGSIIDRVQTKRLLLAVVSWLFLVYTPLAYLIWNSEGVFAKMGVLDFSGGMVVHLSAGLSSYILAHVIGKSEHQHNKVKNDSLFLGMILITFGWFGFNMGPVGEWNSQAIMILLNTIFAIIGGGLAWTLAAKWNGEEEKTGSLLNGIIVGLVTSTAGVGYLLTWQLLAVTFFASLFTYFVTDYVAKAFAIDDVVSSFGMNGIGGLLGSLGVGLFKLSHMPVQLLALATTILLSIIMTYIISKAIFRK

SEQ ID NO: 5202 - protein, 104 aa, Shigella dysenteriae
TLQNGKLNVPENPIIPYIEGDGIGVDVTPAMLKVVDAAVEKAYKGERKISWMEIYTGEKSTQVYGQDVWLPAETLDLIREYRVAIKGPLTTPVGGGIRSLNVAL

SEQ ID NO: 5203 - protein, 248 aa, Zea mays
  misc_feature (200)..(200): Xaa can be any naturally occurring amino acid
MGSMAAEMTAVEEEACIYAMQLSSTAVLPLTLKNAIELGMLEVLMGAGGKMLSPSEVAARLPPTTTNPDAPAMVDRMLHLLASYKVVSCEVEEGTHARRYGPTPVCKWFTPNQDGISMAPLLLLTNDKVPMESLYHLKDAVLDGGLPFHKAHGMTMYEYTKTDARLNHVFNEAMKSYTTIVTGKLVELYTGFHDVATLVXDVGGGVGATIRAVTSKYPHIKGINFDLPHVIAEAPQSPGVEHVAGDMF

SEQ ID NO: 5204 - protein, 188 aa, Triticum aestivum
  misc_feature (115)..(115): Xaa can be any naturally occurring amino acid
  misc_feature (123)..(123): Xaa can be any naturally occurring amino acid
  misc_feature (139)..(139): Xaa can be any naturally occurring amino acid
  misc_feature (165)..(165): Xaa can be any naturally occurring amino acid
  misc_feature (184)..(184): Xaa can be any naturally occurring amino acid
RIRGRVDLGTVHHELHFTVQEGIDALEEVIYHIETYDVTTIRASTPMFLMSRKIKSLGVKMVLSGEGSDEIFGGYLYFHKAPNKKEFHEETCRKIKALHLYDCLRANKATSAWGXEARVPFLXDKNFIKCSNGTWVPEXKMIRRDLGRFEKWALPNAFDDDEKPXLPKHSFTGKKTFNHGVGYXWVDG

SEQ ID NO: 5205 - protein, 319 aa, Glycine max
MSRALEHDYIGLAENPSMDGSSDKLSSEDGKTSSLNLKETELRLGLPGCESPERKSGSALCLFGKELQNNNNVCSVVSPLKAGAKRGFSDVTEGSQGAALFSPRGANVGKPIIGLDTQTNTQQQANTTIKEVGAVLPQSTKPVQEKNDQVAATNGHASAPAAKAQVVGWPPIRSFRKNTMASNLTKNNDDDEGKSGFGCLYVKVSMDGAPYLRKVDLKTYNNYMELSSALEKMFSCFTIGQCNSPGLPGKDGLSESSLRDLLHGSEYVLTYEDKDGDWMLVGDVPWEMFTDSCRRLRIMKGSEAIGLAPRAMEKSRSQN

SEQ ID NO: 5206 - protein, 74 aa, Triticum aestivum
MAFVPICVQCGTRSNPCRCKVVGPTLGFVALVVAGVVEWPLGAAVYLFRHRKGRRIMGHPARVVYPRVTGAIPI

SEQ ID NO: 5207 - protein, 149 aa, Triticum aestivum
  misc_feature (32)..(32): Xaa can be any naturally occurring amino acid
  misc_feature (50)..(50): Xaa can be any naturally occurring amino acid
SRRGYYGVCQELEAQYPDAQVLLVTVTNEESXRIEQQSDNQTKAEIMEVXRSMFPDEDAPDATDILVPRWWSDRFYMGTFSNWPIGVNRYEYDQLRAPVGRVYFTGEHTNEHYNGHVHGAYLSGIDSADILINCAQKSMCKYHVQGKYD

SEQ ID NO: 5208 - protein, 347 aa, Agrobacterium tumefaciens str. C58
MKTHRIALIPGDGIGQSVTDAAWQVLNAVAKTSGFVLEGTEFPWSCAFYKETGAMMPKDGIETLRGFDAIMLGAVGWPAEVPDSVSLHGLLLPIRKAFVQYANIRPHRLLSGVQGPLKADGFDILCIRENTEGEYSGAGGRVHQGTEDEVAVETSIFTRKGVERILRFGFEQAQKRRGKLASITKSNAQKYSMVFWDEVTHKLAAEYPDVEVSSYHIDAMAARMVMAPESLDVVVASNLFGDILTDLGAAIQGGLGFAASANINPDRSAPSMFEPVHGSAPDIAHLGIANPIAAIWSGAMMFEHLGEKDAAAKIMAALETATGRGIGTVPGKDKTDTITAAVLAALA

SEQ ID NO: 5209 - protein, 299 aa, Mycoplasma penetrans HF-2
MITTVWNFRRINMNKNNNTNISKFNLSSGTNHNPPLLTLNDGYQIPIIGLGTTSLHNQTCKNAIKAALEIGIRLFDTASLYGNEKEVGETIRESNINRNEIFVITKLYPGAQFANPEKAIEEALNKLNTDYIDMMLLHHPGENDVKAYKAIEKYIEKGKIKSVGLSNWYIKEINSFLPQINIKPSLIQNEIHIYYQEKEVVPYMHNLNIAMQAWYPFGGRGHTFSVLNNPTIVSIAKDHNKTSAQIISRWLLQRGIITIVGSSNPIHIKENISVFDFELSNQEMELIASLDKNEKHDWY

SEQ ID NO: 5210 - protein, 486 aa, Agrobacterium tumefaciens str. C58
MMQGLKDKELFRQTGLIGGAWKAAASGKVVDVIDPATQAVIGTVPDMGGAETRAAIEAANAAFGPWKKKTHAERAALLEKWFALMIENIDDLRLILTIEQGKPLDEAKGEIRYGASFVKWFAEEARRIGGGTIPSPTPDRRIVVLKEPVGVCGIITPWNFPNAMITRKVAPALATGCTVVIKPSEFTPYSALALGVLAERAGIPAGVINIVTGMPTEIGNEIMANETVRKISFTGSTRVGSLLMRGAADSVKRLSLELGGNAPFIVFDDADLDLAIEGAIVSKFRNGGQTCVCANRILVQSSVYDAFAKKLADRVDAMRVGPGTEAGVSIGPMINKPAIAKIRAHIDDAVAKGATIITRPRDLPEGPQYTAPVVLTGATTAMQLASEETFGPVAPLFRFETEEEALAIANGTPFGLAAYFYTESLKRAWRVGEALEFGMVGLNTGAISTEVAPFGGVKQSGLGREGAQVGIEEYLETKTFHIGGLA

SEQ ID NO: 5211 - protein, 321 aa, Malus x domestica
ILPFKLPAIGLNDVQIRIKAVGICGSDVHYLKNMKLADFEVKEPMVIGHECAGIVEKVGSDVKHLVSGDRVAVEPGISCSRCQQCKGGRYNLCPDMKFFATPPVHGSLANQIVHPADLCFKLPENVSLEEGAMCEPLSVGVHACRRANVGPETTVLIVGAGPIGLVSVLAARAFGAPRIVIVDMDDKRLAVAKSLGADGTVKVSAKMEDLDDEVAKIKETMGAEVDVTFDCVGFNKTMSTGLNATRPGGKVCLVGMGHSMMTVPLTPAAAREVDVVGVFRYKNTWPLCLEFLRSGKIDVKPLITHRFGFTEKEVEEASLEF

SEQ ID NO: 5212 - protein, 317 aa, Ralstonia solanacearum GMI1000
MQVILRDKADAAQDIATFELAAPDGGALPPFTAGAHIDVRVAGFVRQYSLCNSPAETHRYRIGVLRDAQSRGGSVAMHALAVGATLEISAPKNHFALVPGARHSILLAGGIGVTPLLAMAEQLAADGASFALHYAARAPERMAFRDRLAAAHLAPHARCYFDNAPAAERLDLAAVLSRPDEGTHLYACGPAGFIEAALAQAHALGWPEANLHREYFGAAPQTPAAGETGDAGAFRIRLAQRGETVEVGAGETAILALRRCGVDWPTSCEQGVCGTCLTRVLEGEPVHQDQYLTDEERASGCFLPCVSRAKGLLVLDM

SEQ ID NO: 5213 - protein, 310 aa, Thermoplasma acidophilum
MDRKELLSRPVRDLSITADTRLGDLMDQFSSIGGFTAAKIHEAYEIIKDMFSEDNTTFLSFPADIISTGLRGLINEVVKRKLVDVIITTSGTLDHDIARTYRNYYCGSFSYSDIELRDLGINRLGNVLVPDESYGEIIEEKVMESLEKLYAKKKEWATVDLIHEVGLDINSESSIIYNAAKNNIPVFVPGITDGSFGSQLWSFYEQHHDFKINLLEDEHRLSDIIFDAKKTGAIMIGGGISKHHTIWWNQFRDGLDYAVYVTTAQEYDGSLSGAKLEEAISWKKVRPDARYVNVYGDATVIMPVLLAPFL

SEQ ID NO: 5214 - protein, 457 aa, Agrobacterium tumefaciens str. C58
MLSNSLIELDRAHLVHPVSSFRGHEKLGVRVLKSASGATVTDMTGHQLIDGFAGLWCVNAGYGHDSIVEAAAKQMRELPYATAYFDIGSEPAIRLASELADRAPGDLNHVYFTLGGSDAVDSTIRFIRYYWHAKGQPQRDQFISIEQGYHGSTTAGSGLTALPAFHAGFGVPYDWQHKIPSHYAYRNPAGSDPAAIIASSLQILKDKIEAIGPDRVAAFYAEPIQGSGGVLVPPPGWIKAMRELCSSYGILFVADEVITGFGRTGPLFACADEDIVPDFITAAKGLTSGYVPMGAVFMADHVYDTIADFAGEAAIGHGYTYSAHPVSAAVGLEVLKLYEGGLLENGRRAGQRLMAGLEGLRNHPLVGDVRGRGMLAAIELVTDKDKKTPLPAAAAPARKVFDRAWENGLIVRAFANGILGYAPPLCCTDGEIDAIVERTLKTLDQTLEDPAVRAAMA

SEQ ID NO: 5215 - protein, 474 aa, Escherichia coli O157:H7 EDL933
MQHKLLINGELVSGEGEKQPVYNPATGDVLLEIAEASAEQVDAAVRAADAAFAEWGQTTPKVRAECLLKLADVIEENGQVFAELESRNCGKPLHSAFNDEIPAIVDVFRFFAGAARCLNGLAAGEYLEGHTSMIRRDPLGVVASIAPWNYPLMMAAWKLAPALAAGNCVVLKPSEITPLTALKLAELAKDIFPAGVINVLFGRGKTVGDPLTGHPKVRMVSLTGSIATGEHIISHTAPSIKRTHMELGGKAPVIVFDDADIEAVVEGVRTFGYYNAGQDCTVACRIYAQKGIYDTLVEKLGAAVATLKSGAPDDESTELGPLSSLAHLERVSKAVEEAKATGHIKVITGGEKRKGNGYYYAPTLLAGALQDDAIVQKEVFGPVVSVTLFDNEEQVVNWANDSQYGLASSVWTKDVGRAHRVSARLQYGCTWVNTHFMLVSEMPHGGQKLSGYGKDMSLYGLEDYTVVRHVMVKH

SEQ ID NO: 5216 - protein, 484 aa, Ralstonia solanacearum GMI1000
MFESQLLIGGKQRAAAGGATCERPNPATGDVASRAAAASLADADAAVQAAHAAFPAWAAMLPGERRRLLLKAADVMERRADDFIARGVAEAGGVPGWYGFNAALAAGMLREAAAMTTQVGGEVIPSDVPGSLAMGLRQPCGVVLGIAPWNAPLILGTRAIAMPLACGNTVVLKASEICPALHSLIGAVFEEAGFPAGVVNVITNAPADAPAIVERLIAHPAVRRVNFTGSTRVGRLIAEQAARHLKPVLLELGGKNPLVILDDADLDAAVQAAAFGAFFNQGQICMSTERIIVDRAIADRFVERLTDKAGALRAGRPGQDGAVLGGMVDASAAQRIRHLVDDAVGKGARLRTGALRIDGNIVQPAVVDGVTPAMALYGEESFGPVVAVLRAADDEDAIRLANDSEYGLSAAVFSRDIARAMQVARRIESGICHINGPTVHDEAQMPFGGVKASGYGRFGGKAAIDAFTELRWITVQAGARHYPI

SEQ ID NO: 5217 - protein, 398 aa, Puccinia triticina
MCGTSSAMDPVFQSINPSLYDPQRVLDSEEFEILTDMNKVKAYSDDNKNIACCYNDKQQLNMVKKPMPEVHPGQVLVRVRATGICGSDIHFWKHSRVGEKMVVKHECGAGHESAGEVIALGEGVTDLEVGDRVAIETGIPCSKPTCEMCRTGQYNACPEIMFWFTSPYHGLMTRYHAHPSCWLHKLPPNVSYEEGSLLEPLAVALAGIERAGVRLGDPVLICGAGPIGLVTLLACHAAGACPIAITDLSEGRLDCAKRLVPSVSTFKISLGESETDVAGQIQAAMGCKPRVAMECTGFESSIATAIFSVKFGGKVFVIGVGKDKQTLPFMHMAENEIDLQFQFRYANQYPKAIRLVSTGLIDVKPLITHRFVLEKAIEAFNTAADPKSGSMKVQVVDY

SEQ ID NO: 5218 - protein, 416 aa, Candidatus Rickettsia principis
DSEFAELKIRGKIFKLPILKASIGEDVIDISRVSVEADCFTYDPGFMSTASCQSTITYIGGDKGILRHRGYDIKDLAEKSDFLEVAYLLIYGELPSSEQYNNFTKQVAHHSLVHERLHYLFQTFCNSSHPMAMMLAAVGSLSAFYPDLLNFKDADYELTAIRMIAKIPTIATMSYKYSIGQPFIYPDNSLDFTENFLHMMFAMPCTKFKVNPIIKNALNKIFILHADHEQNASTSTVRIAGSSGANPFACISTGIASLWGPAHGGANEAVINMLKEIGSSEYIPKYIAKAKDKNDPFRLMGFGHRVYKNYDPRAAVLKETCKEVLKELGQLDNNPLLQIAIELEAIALKDEYFIERKLYPNVDFYSGIIYNAMGIPTQMFTVLFAIARTVGWMAQWKEMHEDPEQKISRPRQLYTG

SEQ ID NO: 5219 - protein, 1533 aa, Aspergillus nidulans FGSC A4
MDGQRQQPYVPAPPPSASQPSQAHIMPLPPPPPRYPPAQPQNVMPPPPPGPPPGSAYGTSKLTNPQLQSQSTLGWSNWGGRGIPQYLPPPPPPPMTHANQSSFARPSAVQNNNATSATYVPQPGTFGPGVGIPPFDVPSHSYDAPNTMVASERPRPPPNAPYGHGTSNASAYQLDGTIPSTPLTHTAPFSHETSHDVPSSAVPTGSPFKSVPQSASQANDLTKSSSHRHNNSNTTVGGMSASEAAVQWPLDRVLLWLAKNGFSHEWQETFKTLEIEGADFLELGHGQNGRPNLGKMHTVVYPQLAKECEANGTAFDLTRERDEGKRMRKLIRLIHDDAGPDNGGTFNKQHDFDDGHGSVPDEGPEFSPNINNVAQAPGSPSLNATNVSNSPNLKAPKYSHKPRSFTTPGSISHDSTTAELAMTEGSSTMLPRSDFSRNVLGTIGIDHQRKSPSMSSDNGVFAIPPHRPHEGSPKSGSPAAQHATLYAAPVSSATDLNAKYDARFGHNRVNSGERRYYETLKHDGSRPSPQTTQTAGDNASSYPKDHRMGFLNFFKKKSARNSDPNNPSPDDNTPDSPIYSKYHFNSSDVSVNERPLSASLSDYERMMMVRTKPAHRGKRFIFATMDGWNYRLIDTTDIDSVEKLRASICQNLGIYDWPDAQIFLTEPGQLEHDEPLNDTFLTLCQRSKSDSIGSLKLFVKTPHNVAGLGVSMPDRSAVSPTSAIPRKPLDGEAASRLSPLKPSSPQQLKPPASRLPLRDIQNSAAGTSPVDGEPDGSLQDQERKPQKSYRPTPAPLPRPDAYSETGYRRKEVINFDKPRISPYEDKKSEVLVPFRKPPSAPQESNTLSKVNSLRKKDGDRPRPHRSNQPPGIKEMMADMGMMSSLIGKPSSPNSGNTTATEDAHSSIDSAVDKSSQSTPPLTNTSYSPTTTATTTTTTTTASSSLSRSASQKRKSVGPEFDFEETQVSFQRSPALEEDSDDDSDDGLFAIPLANTKNSVKPGSPDTQARPRKPSLTVDTEAKPRTGLSVSFKSPSATRETFASSGGDASNSTAPYFIASNSPEEEKTPIRRNSLRNSFATGDVWASRPPVEGVIDQLDDFFPDIDLDAPYLDEQGTSPPSSPASKVAIDNELNRKDKQENSHHGMQPPPAPEDNTLGSSEPTMTSHGQGIVARRNVSRSGGGLTRMKSIREVAKGANQATRQRSVAASSGNKRSGDVHRRKSTKMFGAKIMQISPRRGSQLSQLDPIPQNSISSSSKPQRQPTFRIIRGQLIGKGTYGRVYLGMNADNGEVLAVKQVEINPRLAGQDTDKIKEMVAALDQEIDTMQHLEHPNIVQYLGCERGELSISIYLEYISGGSIGSCLRKHGKFEESVVKSLTRQTLEGLSYLHNQGILHRDLKADNILLDLDGTCKISDFGISKKSNDIYGNDSSNSMQGSVFWMAPEVIQSQGQGYSAKVDIWSLGCVVLEMFAGRRPWSKEEAIGAIFKLGSLSQAPPIPDDVSMNVTPAALAFMWDCFTVSNPSYSSFLRARSEV

SEQ ID NO: 5220 - protein, 416 aa, Candidatus Rickettsia principis
DSEFAELKIRGKIFKLPILKASIGEDVIDISRVSVEADCFTYDPGFMSTASCQSTITYIGGDKGILRHRGYDIKDLAEKSDFLEVAYLLIYGELPSSEQYNNFTKQVAHHSLVHERLHYLFQTFCNSSHPMAMMLAAVGSLSAFYPDLLNFKDADYELTAIRMIAKIPTIATMSYKYSIGQPFIYPDNSLDFTENFLHMMFAMPCTKYKVNPIIKNALNKIFILHADHEQNASTSTVRIAGSSGANPFACISTGIASLWGPAHGGANEAVINMLKEIGSSEYIPKYIAKAKDKNDPFRLMGFGHRVYKNYDPRAAVLKETCKEVLKELGQLDNNPLLQIAIELEAIALKDEYFIERKLYPNVDFYSGIIYNAMGIPTQMFTVLFAIARTVGWMAQWKEMHEDPEQKISRPRQLYTG

SEQ ID NO: 5221 - protein, 817 aa, Zea mays
  misc_feature (214)..(214): Xaa can be any naturally occurring amino acid
  misc_feature (218)..(218): Xaa can be any naturally occurring amino acid
  misc_feature (566)..(566): Xaa can be any naturally occurring amino acid
  misc_feature (655)..(655): Xaa can be any naturally occurring amino acid
  misc_feature (667)..(667): Xaa can be any naturally occurring amino acid
  misc_feature (676)..(676): Xaa can be any naturally occurring amino acid
MAQILLHGTLHATIFEAESLSNPHRATGGAPKFIRKLVEGIEDTVGVGKGATKIYATVDLEKARVGRTRMISNEPVNPRWYESFHIYCAHMAADVIFTVKIDNPIGASLIGRAYLPVQDLLGGEEIDKWLEICDEKREPVGDSKIHVKLQYFDVGKDRNWARGVRSTKYPGVPYTFFSQRQGCKVTLYQDAHVPDNFVPRIQLADGINYEPHRXCWEXIFDAISKAQHLIYFTGWSVYTEFSLVRDTNRPKPGGDVTLGELLKRKASEGVRVLMLVWDDRTSVGLLKKDGLMATHDEETANYFHGTDVNCVLCPRNPDDSGSFVQDLQISTMFTHHQKIVVVDHEMPNQGSQQRRIVSFIGGIDLCDGRYDTQYHSLFRTLDTVHHDDFHQPNFEGGSIKKGGPREPWHDIHSRLEGPIAWDVLYNFEQRWRKQGGKDLLVRLRDLSDIIIPPSPVMFPEDRETWNVQLFRSIDGGAAFGFPETPEEAARAGLVSGKDQIIDRSIQDAYVNAIRRAKNFIYIENQYFLGSSYGWKPEGIKPEEIGALHLIPKELSLKIVSKIEAGXRFTVYVVVPMWPEGVPESASVQAILDWRRRKIEMMYNDLAQALRASGMEAQAVPYLTFFCLRGREPKHPEESVPQAPAKADRDFTRAQXEARWFMIDVHTXKMMIVDDEXYIITGSGNIEPRPPWTVPGTPEIAMGAYQPYHLATRQPARGQIHGFRMPLWYEPLGMLEDVFQGPESVECVQKVNEVAEKYWDLYSSDDLEQDLPGHLLSYPIGVTADGSVTELPGMENFPDTRARVLGNKSDYLPPILTT

SEQ ID NO: 5222 - protein, 489 aa, Saccharomyces cerevisiae
MELLKLLCLILFLTLSYVAFAIIVPPLNFPKNIPTIPFYVVFLPVIFPIDQTELYDLYIRESMEKYGAVKFFFGSRWNILVSRSEYLAQIFKDEDTFAKSGNQKKIPYSALAAYTGDNVISAYGAVWRNYRNAVTNGLQHFDDAPIFKNAKILCTLIKNRLLEGQTSIPMGPLSQRMALDNISQVALGFDFGALTHEKNAFHEHLIRIKKQIFHPFFLTFPFLDVLPIPSRKKAFKDVVSFRELLVKRVQDELVNNYKFEQTTFAASDLIRAHNNEIIDYKQLTDNIVIILVAGHENPQLLFNSSLYLLAKYSNEWQEKLRKEVNGITDPKGLADLPLLNAFLFEVVRMYPPLSTIINRCTTKTCKLGAEIVIPKGVYVGYNNFGTSHDPKTWGTTADDFKPERWGSDIETIRKNWRMAKNRCAVTGFHGGRRACLGEKLALTEMRISLAEMLKQFRWSLDPEWEEKLTPAGPLCPLNLKLKFNENIME

SEQ ID NO: 5223 - protein, 232 aa, Aspergillus nidulans FGSC A4
MSSSEYDQELDSLLVGPIPVGVNKFIFEADPPDLRRIPTSEILGVTVILLTCSYDGREFVRVGYYVNNEYDSEELTADPPAKPIIERIRRNILAEKPRVTRFAIKWDTEESAPAEYPPDQPEADGLDDDGAAYGQEEAELEAALLKELQEAEKNESTKGEDHDMEGADNGEEDISDAESEDIEDESDDDEDEVDEEEGNDADEDVEMGDDSEPKDDNANPAAHHSQQEVMVH

SEQ ID NO: 5224 - protein, 163 aa, Candida albicans SC5314
MSDFYEFAPNDIKGTPYSFKKLQGKVVLIVNVASKCGFTPQYKGLQDLKQKFADQPVEILGFPCNQFGHQEPGTNEEIEKYCREYFGVTFPVLSKVETNGKNAEPVYKFLKSQKPGLLGLHRIMWNFEKFLIDQDGNVVARFSSFTKPETIGLRIEEMLKHQA

SEQ ID NO: 5225 - protein, 259 aa, Zea mays
  misc_feature (76)..(76): Xaa can be any naturally occurring amino acid
GTPVTLRTSTGYQYNCNTGLEIGGEANLTAAIQVAQFALKNRQNKQLRQRIIVFVGSPVIDEKNWLEVIGKNLKKXNVALDVVNFGESDNEKPEKLEALVAAVNSGGNSHIIHIPAGRDLSDALFSSPIILSEDRGSDSAAAARGASGFEFDVDPNVDPELALVLLISMEEERLRQEAAAKKAREESSKTENEGQSSTSNGDIVMADAEPEPNSYTEDKGLHCKVCFIAIQLMQSVSFVLDVQQLLEITHKKGLLRPPQ

SEQ ID NO: 5226 - protein, 203 aa, Thalictrum thalictroides
KRRNGLLKKAYELSVLCEAEVALVVFSNRGRLYEYANNSVRKTIDRYKKTCGEGSSTLTVSEANLLFYQQESSKMKQQIEILQNSNRHLMGEALSRLSIKELKQLESRLEKGLSRIRSKKNETLLAEIEYMQKREIELHNDNIYLREQITANERAQQHMNSLPGNVYEAITSAPHSSRDFFQVNLRDSKPNQYCSDATVLQLC

SEQ ID NO: 5227 - protein, 389 aa, Shigella sonnei
  misc_feature (180)..(244): Xaa can be any naturally occurring amino acid
TLQNGKLNVPENPIIPYIEGDGIGVDVTPAMLKVVDAAVEKAYKGERKISWMEIYTGEKSTQVYGQDVWLPAETLDLIREYRVAIKGPLTTPVGGGIRSLNVALRQELDLYICLRPVRYYQGTPSPVKHPELTDMVIFRENSEDIYAGIEWKADSADAEKAIKFLREEMGVKKIRFPEHXXXXXXXXXXXXXXXXXXXXXXXXXXXXXXXXXXXXXXXXXXXXXXXXXXXXXXXXXXXXXXXXXDGGPWMKVKNPITGKEMVIKDVIADAFLQQILLRPAEYDVIACMNLNGDYISDALAAQVGGIGIAPGANIGDECALFEATHGTAPKYAGQDKVNPGSIILSAEMMLRHMGWTEAADLIVKGMEGAINAKTVTYDFERLMEGAKLR

SEQ ID NO: 5228 - protein, 415 aa, Fusarium oxysporum
MALTAAQVAIVKSTAPILKEHGKTITTTFYRNMLGAHPELKNYFSLRNQQTGAQQAALANSVLAYATYIDDLGKLSHAVERIAHKHVSLFIKPEHYPIVGTHLIGAIGEVLGSALTTEIKDAWVAAYGQLADIFIQREGQMYEAAGEWNSWRKFKIVKKEAENDSVTSFYLEPTDGKPLPKFLPGQYVSVQIPIPELDGLLQSRQFSLSEAPGTNHYRISVKLQGPTEEPAVEDLAAGKIAGLLSTRLHNRYNVGDEVELSPPAGEFSLDPADTSAAKKPLVLLSAGVGATPLVSILDSVLQSPTASRPITWIHGARYSGSTCFVPHVLDSAKKHENITAKIFLEDVKEGDQYDFKGEIDLAKLQKEQLLQLDNADAEYYICGPEDWMVNVRAFLEENGVPRERQHLELFKTGDI

SEQ ID NO: 5229 - protein, 349 aa, Glycine max
VSYGVEFEGAGASKESKVNGDGGRDVNLGDSNYSFGEAEALSDEMEEESRYVAEILRIRDVLLNPEDESEAVLFDSLRRLQMMELTEDCLKATEIGKAVNPLRKHGSKDIRQLPIILFCGWKEMVDEWVKATTTKSITGSEEGTPDSVNPSVVDDDEEEGLPSPPLDEGAFFVTQAGSMELSQFFDGMDDDGNPRPTGPFSKNHENGRKPAFDSHSQQQAKENKAAVMPVRPNKPVTADSGPGRPPKSNVQRKSNMEPKMQQKMENNSITRRPPTAQLDKSKRSDDDAVQVKLEATKRKLQESYQQAEKAKRQRTIQVMEINDLPKQGLHRNTHFKPGYHSRHWANGRR

SEQ ID NO: 5230 - protein, 426 aa, Listeria monocytogenes EGD-e
MYVLKNGQVLNASGKLESKDVLIQNGKVNLIADSIEVTSGEEFDATGKLITPGFIDVHVHLREPGGEHKETILTGTKAAARGGYTTICSMPNTKPVPDSKEVMESIQAKIKETAKVRVLPYASITTSLGTDELVDFEALKEAGAFAFTDDGVGVQLAGTMYEAMKRAAALDMAIVAHCEDNSLIYGGVVHDGIFAEKEGLKGIPNIAESVQIARDVLLAEAAGCHYHVCHISTKESVRVVRDAKRAGIRVTAEVSPHHLILDEEAIPGNDGNWKMNPPLRSKEDRAALLEGLLDGTIDFIATDHAPHAAEEKNVPMEQAAFGIVGLETAFPLLYTHFVKTNEWTLKQLIDWMTVKPAECFKLPYGKLEEGSVADIVVLDLEKEANIDPDTFYSKGKNTPFVGETCIGWPVATFAEGTLVYNEGEIK

SEQ ID NO: 5231 - protein, 312 aa, Medicago sativa
MGSVEIPTKVLTNTSSQLKMPVVGMGSAPDFTCKKDTKDAIIEAIKQGYRHFDTAAAYGSEQALGEALKEAIELGLVTRDDLFVTSKLWVTENHPHLVIPALQKSLKTLQLDYLDLYLIHWPLSSQPGKFSFPIDVADLLPFDVKGVWESMEESLKLGLTKAIGVSNFSVKKLENLLSVATVLPAVNQVEMNLAWQQKKLREFCNAHGIVLTAFSPVRKGASRGPNEVMENDMLKEIADAHGKSVAQISLRWLYEQGVTFVPKSYDKERMNQNLRIFDWSLTKEDHEKIAQIKQNRLIPGPTKPGLNDLYDD

SEQ ID NO: 5232 - protein, 312 aa, Medicago sativa
MGSVEIPTKVLTNTSSQLKMPVVGMGSAPDFTCKKDTKDAIIEAIKQGYRHFDTAAAYGSEQALGEALKEAIELGLVTREELFVTSKLWVTENHPHLVIPALQKSLKTLQLDYLDLYLIHWPLSSQPGKFSFPIDVADLLPFDVKGVWESMEESLKLGLTKAIGVSNFSVKKLENLLSVATVLPAVNQVEMNLAWQQKKLREFCNANGIVLTAFSPLRKGASRGPNEVMENDMLKEIADAHGKSVAQISLRWLYEQGVTFVPKSYDKERMNQNLCIFDWSLTKEDHEKIDQIKQNRLIPGPTKPGLNDLYDD

SEQ ID NO: 5233 - protein, 492 aa, Ralstonia solanacearum GMI1000
MNAPQAMRFLDDAQWDGLLFQGRWVPPLRRRTADVMEPATGRKLTRVGLADAQDVDAAVEAAAAAQPAWVAMPPRERANVFRRAAMLFEQHFDELALAIARETGAALFKGEHEVREAITLCHVAAGMPLEAQGQVLASPAGRLSYARRAPFGVVGVISPFNFPLFLTLRSVAPALAAGNAVVIKPDLRTPVSGGYVIARVFAEAGLPAGLLHVLPGGAEAGEALVVHPRVPMIAFTGSPGVGRRIGELAGRHLKKVSLELGGANALIILDDADLDLAVSNAAWGAWLHQGQICMAANRILVHASLADALTARLVEKAEHLPVGDGASGQVALGPLIDQKQLQRVHAIVQDSVAAGARLLAGGSYEQLFYRPTVLAGVRPGMRVFDEEVFGPVANIIVFRDDDEAVALANDSQGGLAAGVISASVGRAMALGQRLRVGMVHINDQTVNDDCVNPFGGPGIAGNGTSMGGPADWEEYTQWRWVTVKESAPRYPF

SEQ ID NO: 5234 - protein, 289 aa, Mycoplasma penetrans HF-2
MKTSNVKLITLNNGNKIPSIGFGVFQIPKEETADCVKKAISIGYRLIDTAQAYHNEKETGLGIKLSGVKREEIFLTTKVWVSNYERCYESVIESLKRLDTSYLDLILLHQPFGNYYKAYQDLERLYKENKVRNIGVSNFWDNRIIDLCFFNQIKPMVNQIEINPFHQRIEDRFYNDKYKVVSQAWAPFAEGKNGLFTNPTLVEIGKKYNKTPAQVILRWLVQSNVVALCKTVNESRMKENFDIFDFELSKQDLDKIVALNKQHSEFRYHHSAEGAEFYGEISNQIKIGD

SEQ ID NO: 5235 - protein, 386 aa, Tetragenococcus halophilus
MATKRDYYEVLGVDKGASDDEIKKAYRKLSKKYHPDVNQEADAEEKFKKFQKPMNTLSDPQKRAAYDQYGHAGADANFGGGGAGGFGGFGGGFSDAGGFGGFEDIFESFFGGGRSADPNAPRQGDDLQYSINLTFEEAVFGKDTEVSYKRNEVCHTCGGNGAKPGTQPETCHKCKGSGTINAERQTPLGRVMTRQTCDVCHGTGKEIKEVCETCHGTGHEKKTHSVNVSVPAGVEDGQQMRLANQGEAGTNGGPYGDLYVVLYCSHETCNIFDRDGSEIYYELPINFVQAALGDEVDVPTVHGNVKLKIPAGTQTSTKFRLRGKGAPRLRGNSTGDQQVTVKIITPKNLNEEQREALRNFAELTGQSTEEQQSEGFFDKMKDAFKK

SEQ ID NO: 5236 - protein, 492 aa, Corynebacterium efficiens YS-314
MGAAGVPARFILDSVSMSLSTASPTIVWFRDDLRIRDNAALAWAADRGPVIGLFIDEDQPRALGGAARWWRDRSLTLLVDALATHGVPLLRRSGDPVVLLTEVVRETGAAAVTWNRRYHGPLRERDAEIKTQLREQGLEVHSHAGFLLTEPWEVTSGAGTGYKVYTPFSKAAFPLADESAARLGDPMPAQLTGPDTPVADTGGIDAPDPFWAAEMATHCRPGEQAALDRLGDFLDRMRERGGYADGRDEMARAVTSGLSPHLRFGEISVHRVWEEITAAADAGDIDATDAQVFRKELLWRDFAWHRLYALPDMATTNVREQFNRFGWAWDEHEAARLVDGRHPLSPTSSDEFHVALAAWRAGRTGIPLVDAGMRELWATGSMHNRSRMVVASFLTKNLQIHWRHGEEWFWETLVDADPASNAFNWQWAAGSGDDASPYFRIFNPETQARKFDPDETYIRRWIPEYGTPEYPAPIVDLKESRREALDAYEAVK

SEQ ID NO: 5237 - protein, 126 aa, Desulfitobacterium hafniense DCB-2
MPLHSAVHRAEKLERDYQARGFEVLGFPCDQFGHQEPGDEAEIKEFCSLTYDVTFPMYAKVDVNGDKAHPLWKWLKDEKGGFLGIDAIKWNFTKFLIGRDGRVLKRYAPTDKPESIAADIEKALAA

SEQ ID NO: 5238 - protein, 487 aa, Pisum sativum
MLAQKQAEEAIVSSSFNETDQQESVLGKEEEQEQDHSFSVKNFLWHGGSVWDAWFSCASNQVAQVLLTLPYSFSQLGMLSGILLQIFYGILGSWTAYLISVLYVEYRTRKEKENVNFKNHVIQWFEVLDGLLGPFWKALGLAFNCTFLLFGSVIQLIACASNIYYINDNLDKRTWTYIFGACCATTVFIPSFHNYRIWSFLGLGMTTYTAWYLTIAAIVHGQAENVTHSGPKKLVLYFTGATNILYTFGGHAVTVEIMHAMWKPQKFKYIYLLATLYVFTLTIPSASAVYWAFGDELLNHSNAFSLLPKNGFRDGAVVLMLIHQFITFGFACTPLYFVWEKVIGMHDTRSICLRALARLPVVIPIWFLAIIFPFFGPINSAVGALLVSFTVYIIPSAAHMLTYRKASARQNAAEKPPFFMPSWTAMYILNAFIVVWVFVVGFGFGGWASMTNFIRQIDTFGLFAKCYQCKPPPPLMVAAPPPHALHH

SEQ ID NO: 5239 - protein, 293 aa, Triticum aestivum
DDIAALETWDNGKPYEQAAHIEVPMLARLMRYYAGWTDKIHGLIVPADGPHHVQVLHEPIGVVGQIIPWNFPLLMYGWKVGPALACGNTIVLKTAEQTPLSALYVSKLLHEAGLPEGVLNIVSGFGPTAGAALASHMDVDKIAFTGSTDTAKVILELSARSNLKPVTLELGGKSPFIVMDDADIDQAVELAHFALFFNQGQCCCAGSRTFVHERVYDEFVEKSKARALKRVVGDPFRKGVEQGPQIDDEQFKKILRYIKSGVDSGATLVTGGDKLGDKGYYIQPTIFSDVQVS

SEQ ID NO: 5240 - protein, 310 aa, Ralstonia solanacearum GMI1000
MLDIQMQSLLQGMQQAGVPDMADLPPPAARQVYSRIMAAAAEPVRAVSIAERTIAGPGGDLALRIYAPQRPDPRRGVALYLHGGGFVVGTPRDYDSVASALCERSGCVVVQVDYRLAPEHPFPAAVEDAWAAACWVAAHARELGAQPRIAVVGDSAGGNLAAVLARLARDCEGPAIVQQTLIYPMVAARPETTASYLRYGTGYTLTTRLTHYFHDLYLNGRPAEGDPRLVPLSAPDASGLPPALVMVAGYDVLRDEGIQYAHRLAQAGTPVTLVEYSGMVHGFIGMAGALEAARQALAQVADAVGRALAG

SEQ ID NO: 5241 - protein, 448 aa, Chromobacterium violaceum ATCC 12472
MSNQAWLERSFAAVWHPCTQMKRHERLPIVPIASADGVWLTDFDGKRYLDGVSSWWVNLFGHGHPRIKQAVRKQLDSLEHVMLAGFTHRPVVELSERLAALSGLGHAFYGSDGASATEIALKMSFHYWKNVGRPQKTRFVSLENSYHGETVGALAVTDVPLFSSTYAELLKPGLRAPSPDARQAVPGERAADVALRAARSLENLLAKHGGEIAAVIVEPLVQGAAGMAMHDPIYLTELRRLCDQYQVHLIADEIAVGFGRTGSFFAYQQAGITPDFLCLSKGITGGFLPLSCVLTRDEIYQAFYHDDVARGFLHSHSYTGNALACAAALAVLDIFDDEDVLEANRVKAEGFTRQMRPLAERPEIRHFRQRGMIWAFDVDTARSDFALAYFSAMLNRGCLLRPIGKSVYFMPPYTLKSEEMDWLASASVDALDEVLAGESVGGDPTALP

SEQ ID NO: 5242 - protein, 180 aa, Triticum aestivum
  misc_feature (142)..(142): Xaa can be any naturally occurring amino acid
MAPTVMASSATSVAPFQGLKSTAGLPVSRRSNGASLGSVSNGGRIRCMQVWPIEGIKKFETLSYLPPLSTEALLKQVDYLIRSKWVPCLEFSKVGFIFREHNASPGYYDGRYWTMWKLPMFGCTDATQVINKWRSQEGVPDXYVRIIGFTTSPSECVSSCLKQRAARSARLNTHTAHIMH

SEQ ID NO: 5243 - protein, 161 aa, Candida albicans SC5314
MSQFYELAPKDAKGEPYPFEQLKGKVVLIVNVASKCGFTPQYKGLEELNKKFADQPVQILGFPCNQFGHQEPGSNEEIGSFCSLNYGVTFPVLDKIEVNGDNTDPVYKYLKSQKSGVLGLTRIKWNFEKFLIDQNGKVIERFSSLTSPESIGTKIEELLKK

SEQ ID NO: 5244 - protein, 229 aa, Candida albicans SC5314
MVKSNVESAWETMEDTFSEIQNKFHQIYKPIDTGKPDEDDETTKKESLDITDDSTLSVSPITQLLYLARSKFYDLTPLDNSKSPFPFKNLRGKVVLIVNVASRCGFSFQYNGLEQLNKRFANDDFVLLGVPCNQFLWQEPGTNDQIVTKCKKKYDVSFQILDKINVNGEQADPVYKFLKAQKEGLWGTNRVKWNFEKFLIDKNGRVVERYSTFTRPVAITPRIEQLLES

SEQ ID NO: 5245 - protein, 228 aa, Zea mays
  misc_feature (50)..(50): Xaa can be any naturally occurring amino acid
  misc_feature (121)..(121): Xaa can be any naturally occurring amino acid
MVEVVPIYTAGSKYPSSTCSPEDNSDLFYAALGGLGQFGIITRARIALEXDFESFTEDQEMLIMAENSFDYIEGFVIINRTGILNNWRASFKPQDPVQASHFQSDGRVLYCLELTKNFNSXTLEFLDRVHTSELKLRAQSLWEVPHPWLNLLIPRSSIRRFATEVFGRILVGFLSSAPSLSGHGSIAHAMSFGARWETFERRKHRYDPLAILAPGQRIFPKASLPLSL

SEQ ID NO: 5246 - protein, 133 aa, Zea mays
  misc_feature (42)..(42): Xaa can be any naturally occurring amino acid
  misc_feature (45)..(45): Xaa can be any naturally occurring amino acid
  misc_feature (69)..(69): Xaa can be any naturally occurring amino acid
  misc_feature (118)..(118): Xaa can be any naturally occurring amino acid
APSRARRHGRRPMKIMGQVKEDVSLAESSMTNIVKEMLPTDXEDXKDSTDLLGECCVEVINLLWSESNXDVCSRDDKKTIAPEHVIRALQDLGFKEYGEEVYAAYKQHKLETLGSPKXTKFTGIEMTEEKAVA

SEQ ID NO: 5247 - protein, 1306 aa, Schizosaccharomyces pombe
MSYTNHSPANLTRNSSFNHQHYSTTLRSPPSMRGRGIDVNSSHYPHISRPRTSSDSQKMYTRAPVDYYYIQENPYFNNIDQDSISDKSLPSTNQSLHHSEEDTESDNDFSESIHPEFDIDVFYKVSNILYDESDLQDPEKRERLEWHSMLSSVLKGDVMQTEKRRLRLTEPDGHSGTYISEVWLGLQAWLHGRLNADQAEVIRKSREGVEPVLREVIDFQIQDEETTKPPLEQVTEILEKVEQCKQFYISSREMEENVPLSASKEFNYKLNALISWSNVMESIQVETLVLQKWVGNDEFDLTMRTPQFNYDGVENTSSFVERIFRQSGLQRTFEQRTLTTLNRIIHQAKQTISENAQAFEEMKLPTYEDKLLPLVRFPIKLLEEALRLSPAYAKKIKGPNFLIVDSMLDDFKIALSVAVRIKREYIKIASPSPGWSLPTNVDEDYDNVLLDSLKFYFKLLTLKLSSGNKNLYFKEIDFLENEWAFLNEHIYWINGGDIHMAGQFSYLSNSLLLNVHRYVESHLNGPTERTAASLTNWYSTLLKNTQIRFRKILRFSETLNSRFENASDFVISEGHLPDLVNRLSTTGHFLAYTANLERDGVFVIADHTLSENPEALKALLFSKDISNLETIQQNCSYVLILCPVHPIVWKGRIEKVDVPDFSVDLKTNRVRIIASNKREHLQAAKSVFQSISGDLVTLAVECRSSITRVYKEFIRLSKLCMRISSTVVDCVSAVREACSGVNCHDLIYHVFSFAAEFGQRILRFLSFDSYWQTKLKRKITSLAVEWISFICDECDLMDRKTFRWGVGALEFLMLMIRGNNILLIDDAMFLKIREKVGKSMAFLLTHFDVLGAKSKVAAKLQRESTEVSSSPRLTSFGDVEEEALSIQLLQKETMLRIDELEIERNNTLLERLAIGHVLDDSVFRNRDFIKLASSFSNITIRWQQGHFVRSGMFGDVYTGVNMETGDLLAVKEIKLQDSRTFRSTVDQIHNEMTVLERLNHPNVVTYYGVEVHREKVYIFMEFCQGGSLADLLAHGRIEDENVLKVYVVQLLEGLAYIHSQHILHRDIKPANILLDHRGMIKYSDFGSALYVSPPTDPEVRYEDIQPELQHLAGTPMYMAPEIILGTKKGDFGAMDIWSLGCVILEMMTGSTPWSEMDNEWAIMYHVAAMHTPSIPQNEKISSLARDFIEQCFERDPEQRPRAVDLLTHPWITDFRKKTIITMPPATITKKTSLSHTITEEKTAQLLAGRHDDSKAETDSLAASYKEESALPVASNVGLRQPNELRIDSINLPPAIVTPDTINYSVD

SEQ ID NO: 5248 - protein, 388 aa, Synechococcus sp. WH 8103
TTAFHSPTSRRRKTLQEANLLEGPLMLIKSIRGFSSNRAMTWLACAPLALMGLGIFTLSAKAEELPDLNAAFLANNLWLLVATILVIFMNAGFAMVEAGMCRQKNAVNILAKNLFVFALAVTAYWFVGYSFMYGDAAIDGWLYFGGLFFDPTVTAETISDAGLVPTVDFLFQAAFAGTAATIVSGLVAERIKFGEFVVFALILTAFIYPVAGSWEWNGGWLNSVGNAEFIDFAGSSIVHSVGAWAGLVGAALLGPRIGKYVGGKVQAIPGHNMSIATLGALILWIGWYGFNPGSQLAMDQWVPYVAVTTTLGAAGGAIGATVISTITSKKPDLTMIINGILAGLVSVTAGCGNLTLTGSWVAGLVGGIIVVFSVSALDSAGIDDPVGA

SEQ ID NO: 5249 - protein, 241 aa, Glycine max
MATYSWSTEIFSFLVLTLLSTSSHTMVAGARNLLESTLSKPEVPTLPKPHELPPLPEIPELPKFESPKIPALPKPELPKVPVGPRLEKPKVPELPKVSEIPKVPKLPKAPEMFKVSELPKLELPKVAEISKILELSKPELPKIPKLPKIHELSKVPELSNPELSKVSDSSRIGSRPKVPELSKPELPKVPELPKVRELPKPEFSKVPELPKVHELPKPEIPKILEFPKVPQFPKAFSTSNP

SEQ ID NO: 5250 - protein, 164 aa, Thermococcus kodakaraensis
MRKMVWRRDRYWDPFDIMREIQEEIDAIFRDFMRGPRLWSYREPGERIEVSETWREPFADIFDRGDRFVITVELPGVRKEDIKLRVTEDTVYIEAQMRREKELEQEGAIRIERYYSGYRRVIRLPEEVIPEKAKARYNNGVLEIEIPKKKPTKPEKEGVEVKIE

SEQ ID NO: 5251 - protein, 416 aa, Arabidopsis thaliana
MGLFGTKKIGKYEIGRTIGEGNFAKVKLGYDTTNGTYVAVKIIDKALVIQKGLESQVKREIRTMKLLNHPNIVQIHEVIGTKTKICIVMEYVSGGQLSDRLGRQKMKESDARKLFQQLIDAVDYCHNRGVYHRDLKPQNLLLDSKGNLKVSDFGLSAVPKSGDMLSTACGSPCYIAPELIMNKGYSGAAVDVWSCGVILFELLAGYPPFDDHTLPVLYKKILRADYTFPPGFTGEQKRLIFNILDPNPLSRITLAEIIIKDSWFKIGYTPVYHQLSDSIKDNVAEINAATASSNFINAFQIIAMSSDLDLSGLFEENDDKRYKTRIGSKNTAQETIKKIEAAATYVSLSVERIKHFKVKIQPKEIRSRSSYDLLSAEVIEVTPTNCVIEISKSAGELRLYMEFCQSLSSLLTAEVS

SEQ ID NO: 5252 - protein, 148 aa, Brassica napus
  misc_feature (97)..(97): Xaa can be any naturally occurring amino acid
  misc_feature (130)..(130): Xaa can be any naturally occurring amino acid
MSAGVSHGEEAIVSSGNDNEGEQITGNHTGKTDEYDPSSGSALSNFLWHGGSVWDAWFSCASNQVAQVLLTLPYSFSQLGMLSGIVLQIFYGLLGSXDCYLISVLYVEYRARKEKEGKSFKNHVIQWFEXVLDGLLGSYWKAIGLAFN

SEQ ID NO: 5253 - protein, 467 aa, Methylococcus capsulatus str. Bath
MAVSEEFLRELEKLFPPGSRHTDPAECWAYGYDNSKRQALPDAVVFPRSHEDVVALVRLCNRHRIPLTARGRGTGTTGATVPVAGGVVASLERMSRIIEISPDNRFAVVEPGVTNQALQDAVRPDGFFWPPDPTSAEFCSIGGNLAYNSAGPRAVKYGTPRENTLGLRAVTGAGEELRCGVYTTKGVVGYDLTRLIIGSEGTLAIITEATLKLTPLPSAKRTLRAIYVDVASAARAIARIMAQPVIPCALEFIDGNAIALVRRYAAVDLPEDAAALLMIEVDGSPESLDAAVESLRAAATLEGLVEFRAARTAGEVEALWSIRKALSPSLRKVAPKKLNEDVVVPVTELPALIAGLDELSRRHAIPIVNFGHAGNGNIHVNLLFDPDRADENERAHACLHEMFTLVLKLRGTLSGEHGVGIEKRDYVGEELDRTSLALMHAIKRQFDPNGILNPGKSIPAEDPSPPA

SEQ ID NO: 5254 - protein, 346 aa, Klebsiella oxytoca
MQSVVIHAEGTVRVEERPIPTLQTENDVLVKVVSSGLCGSDIPRTFAKGAHYYPITLGHEFSGYVESYGSAVTDLQPGDGVACVPLLPCLICPDWLKGFYSQWAKYEFVGSRGDGAFTEYIVVNRKNVFVCADRMPIDDGALIEPMTVGLHAFHLAQAAKENVIIIGAGTMGLLALQCARELGAKSITAIDINPQRLALAKTLGATYVFNSKEMSSKEIQTALEEIQFDQLVLETAGTPQTVALGIEVAGPRAQLALVGTLHHDLTLLSATFGQILRKELTIVGSWMNYSGPWPGEEWQTAVRLLTEKRIQLVPLIAHIGNAESFAREVQALNGAPMQGKILLKLS

SEQ ID NO: 5255 - protein, 352 aa, Neurospora crassa
MSSAQRGGARKISFNVSEQYDIQDVVGEGAYGVVCSAVHKPSGQKVAIKKITPFDHSMFCLRTLREMKLLRYFNHENIISILDIQKPRSYETFNEVYLIQELMETDMHRVIRTQELSDDHCQYFIYQTLRALKAMHSANVLHRDLKPSNLLLNANCDLKVCDFGLARSAASQEDNSGFMTEYVATRWYRAPEIMLTFKEYTKAIDVWSVGCILAEMLSGKPLFPGKDYHHQLTLILDVLGTPTMEDYYGIKSRRAREYIRSLPFKKKVPFRTLFPNTSELALDLLEKLLAFNPVKRITVEEALKHPYLEPYHDPDDEPTAPPIPEEFFDFDKHKDNLSKEQLKQLIYQEIMR

SEQ ID NO: 5256 - protein, 428 aa, Oceanobacillus iheyensis HTE831
MKNERVENLTKEWQDDIRWVGIERPYKAEDVIRLRGSIDITHTLATRGASKLWKLINEEDYVNALGALTGNQAVQQVKAGLKAIYLSGWQVAADANMAGEMYPDQSLYPANSVPQVVRRINQALQRSDQIHFSEGENDIDWFAPIVADAEAGFGGQLNVFELMKSMIEAGAAAVHFEDQLSSEKKCGHLGGKVLLPTQNAVRNLIAARFAADVMGTPTIIIARTDANAADMITSDVDEYDHLFITGERTVEGFYKTKAGIDQAIARGLAYAPYADLIWCETSEPNLEEARIFAEAIHEKFPNKLLAYNCSPSFNWKKKLSDQEIAEFQKELGKLGYKFQFVTLAGFHALNHSMFDLAKKYKSHGMAAYSELQQAEFSSEKDGYTATRHQREVGTGYFDEVAQVISGGKASTAALIGSTETEQFTSFYK

SEQ ID NO: 5257 - protein, 261 aa, Emericella nidulans
MGHEDAVYLAKLAEQAERYEEMVENMKVVAASDVELTVEERNLLSVAYKNVIGARRASWRIVTSIEQKEESKGNKSQVALIKEYRQKIEGELAKICQDILDVLDQHLIKSAQSGESKVFYHKMKGDYHRYLAEFAVGDNRKAAADASLEAYKSATEVAQTDLAPTHPIRLGLALNFSVFYYEILNSPDQACHLAKLAFDDAIAELDTLSEESYKDSTLIMQLLRDNLTLWTSSEAEPAAENAPAEKKEEAPAAEGEEKPAE

SEQ ID NO: 5258 - protein, 149 aa, Triticum aestivum
  misc_feature (84)..(84): Xaa can be any naturally occurring amino acid
MAPTVMASSATSVAPFQGLKSTAGLPVSRRSNGASLGSVSNGGRIRCMQVWPIEGIKKFETLSYLPPLSTEALLKQVDYLIRSXKWVPLPRSSSKVGVHLPVEHNAIPPGVLRIGPGTGTMWESCLCFGMQPDAQRQVINKWREGQRKE

SEQ ID NO: 5259 - protein, 193 aa, Zea mays
MSAVNITNVAVLDNPTAFINPFQFEISYECLVPLDDDLEWKLIYVGSAEDENYDQQLESVLVGPVNVGTYRFVLQADPPDPSKIREEDIIGVTVLLLTCSYMGQEFMRVGYYVNNDYGDEQLREEPPAKVLIDRVQRNILADKPRVTKFPINFHPEPSTGTGRQQQQQEPQTASPEKHAGSGEGNGSKPEADQ

SEQ ID NO: 5260 - protein, 348 aa, Pseudomonas putida
MLAIRKTKAGPGGLSVDDVAAPKEAHSTDVLVKVEAAGICGTDLLIYKWGEFAKRMKLPTILGHEVSGVIEQVGSDVKGLRPGMRVSLESHLPCGTCYTCRRGWAHVCPKTRYPGVDFDGGFASFVVVPESVCWPVPCGIPPLQAAMMEPFGLAVHASLEGSGVSGLNVLVSGCGPIGLMNIAAAKALGASKVIAPDIHPLRLTAAAKMGADECINATEESVYKTVRSLLGERGVDVAIDYSGQAAALKELIQSITHGGELRLMGVPSHDILLNLEEWLFKGLIVRGLHGRRLYERWERSTSLLVTGRVDLSSLVSHRLPLSAAEDAFEMALNGQSLKILFEPNGSCI

SEQ ID NO: 5261 - protein, 355 aa, Sulfolobus acidocaldarius
MTFTNEELILPASVDLHVHVRGAQLSYKETVATATSEAVYGGVGVIVDMPNTVPYINTPERIKERLREFQLYSRTDYGIYSGVSKEVEEIDKLPIAGYKIYPEDLEKEETRYVLEKSKKLKILHPEMPFVSKIERSLRRSYWMETAAINLVKGNMHITHITNFETLQLAKSMGFTTDITAHHLVVDGERDCISKVNPPIRDYVTRLKLFLKGLFEVDCIASDHAPHSKEEKRMNFDLCPPGIAGVSFSTPYIYSLMFKGLISIDRAVSLLSGNPSRILNIPTGKIKEGYRANFTVIKRENWRYTTKFSKVTETPMDGFSLDAKVTNVIVEGKLAFDGENVYPIRGVNIFDSSSRS

SEQ ID NO: 5262 - protein, 161 aa, Triticum aestivum
  misc_feature (105)..(105): Xaa can be any naturally occurring amino acid
  misc_feature (123)..(123): Xaa can be any naturally occurring amino acid
  misc_feature (145)..(145): Xaa can be any naturally occurring amino acid
  misc_feature (152)..(152): Xaa can be any naturally occurring amino acid
MAPTVMASSATSVAPFQGLKSTAGLPVSRRSNGASLGSVSNGGRIRCMQVWPIEGIKKFETLSYLPPLSTEALLKQVDYLIRSKWVPCLEFSKVGFIFREHNASXPGYYDGRYWTMWKLPMFXGCTDATQVINEVEEVKKGVPLXRTFRLLXSKTCARVQC

SEQ ID NO: 5263 - protein, 197 aa, Triticum aestivum
  misc_feature (92)..(92): Xaa can be any naturally occurring amino acid
  misc_feature (108)..(108): Xaa can be any naturally occurring amino acid
  misc_feature (114)..(114): Xaa can be any naturally occurring amino acid
MAPTVMASSATSVAPFQGLKSTAGLPVSRRSNGASLGSVSNGGRIRCMQVWPIEGIKKFETLSYLPPLSTEALLKQVDYLIRSKWVPCLEFXSKVGFIFREHNASPGXYYDGRXYWDNVELPMFGCTDATQVINEVEESRRIPDAYVRISDRQHAQVQCVTHRQRARIRKAKHSHGQYKCNAVCTRALVLSLLLLSR

SEQ ID NO: 5264 - protein, 346 aa, Corynebacterium glutamicum ATCC 13032
MEDMRIATLTSGGDCPGLNAVIRGIVRTASNEFGSTVVGYQDGWEGLLGDRRVQLYDDEDIDRILLRGGTILGTGRLHPDKFKAGIDQIKANLEDAGIDALIPIGGEGTLKGAKWLSDNGIPVVGVPKTIDNDVNGTDFTFGFDTAVAVATDAVDRLHTTAESHNRVMIVEVMGRHVGWIALHAGMAGGAHYTVIPEVPFDIAEICKAMERRFQMGEKYGIIVVAEGALPREGTMELREGHIDQFGHKTFTGIGQQIADEIHVRLGHDVRTTVLGHIQRGGTPTAFDRVLATRYGVRAARACHEGSFDKVVALKGESIEMITFEEAVGTLKEVPFERWVTAQAMFG

SEQ ID NO: 5265 - protein, 211 aa, Dimocarpus longan
AWHSAGTFDLHSKTGGPFGTIRHPDELAHEANNGLDIAVRLLEPIKEQFPILSYADFYQLAGVVAVEITGGPEIPFHPGRPDKSDPPPEGRLPAATEGSDHLRDVFGHMGLSDKDIVALSGGHTLGRCHEERSGFEGPWTSNPLIFDNSYFKELLSGEKEGLIQLPSDKALLEDSVFRPLVERYAADEDAFFADYAESHLKLSELGFADAD

SEQ ID NO: 5266 - protein, 131 aa, Brassica napus
MASVSPLAKYKLVFLGDQSVGKTSIITRFMYDKFDTTYQATIGIDFLSKTMYLEDRTVRLQLWDTAGQERFRSLIPSYIRDSSVAVVVYDVSNRLSFLNTSKWIEEVRTERAGDVIIVLVGNKTDLVDKRQ

SEQ ID NO: 5267 - protein, 312 aa, Chlamydomonas reinhardtii
MADLAVLRTAKQALDEGLLNPEDYDFIKKAFLRAQQIKAGLDAGFIKEEDFVQARDSFLHSLDFALVGGSSQPAYVQTPSIPDAPAMPPPAPVALRAAAAAPQRNSTPSRDTAPAAPVPVAAAAAAAPAAAAVPRISPAPPGAGTVPIPTDLPTSARGARSSSVVSNKTSMSGISVSDQCVAIFNHIKTKSAYKWVTFKVNDAGNEVVVDQLGAADSSYEQFINILPENNCRHGVYDYAYLNADTNQTVNKLVFVHWASDTATTKNKMMYASTKDFLKSYLDGLGAELQATDTKELAESEMRERVHQAITRK

SEQ ID NO: 5268 - protein, 401 aa, Arabidopsis thaliana
MASNKRCFSDESLSKRWRFLWTLVPRLNYDLRLHDNTCPRFSQFVDRSLLLHKAPTLESLNIKIGSICFTAEKDVGVWVRIGVDRFVRELSVSYCSGEEPIRLPKCLFTCSTLAVLKLENITLEDASCYVCFQSLKTLHLLDVKYLDDQSLPRIISSCSSLEDLVVQRCPGDNVKVVTVTAPSLKTLSLHKSSQAFEGDDDGFLIDTPKLKRVDIEDYWGGFCYIENMPEVVEANVDVIYKNTEKLLGSITSVKRLALCLITSDAAYPAGTIFSQLVHLELCTCAPRWWDLLTRLIEDSPKLRVLKLRQKHIRRAPSPRASWKQPALPKCLLFHLETFKWELYEGSQKQKEVATFILKHAIRLKTAIISPKPTSTLLEKHEMLKDLSSSPRGSSTCELLFD

SEQ ID NO: 5269 - protein, 188 aa, Triticum aestivum
  misc_feature (8)..(8): Xaa can be any naturally occurring amino acid
MEMYRRIXRGDVKYPQWFSSDLRRFMSKLLDPNPNTRITIEKLVEHPWFKKGYKPAVMLAQPHGSNSLKDVQVAFSTADNEGGSKVEQPAGSSVKPSSLNAFDIISHSKGFDLSGLFAVDQEQKASNSRFMTQKPASAIVSKLEQIAETESFMVKKQDGLVKLQGSKEGRKGQLAIDAEIFEVTPAFY

SEQ ID NO: 5270 - protein, 77 aa, Glycine max
MGFWTLLEGFLLFANALAILNEDRFLARRGWTLAEMTGPQRNSLKGQVIGLIYACQFLRLPLILFNVITIIVKLFSG

SEQ ID NO: 5271 - protein, 142 aa, Bradyrhizobium japonicum USDA 110
MTPEQITLIQQSFAKVAPISETAAVLFYDRLFEVAPSVRAMFPEDMTEQRKKLMGMLAAVVGGLSNLDSILPAASALAKRHVAYGAKAEHYPVVGATLLWTLEKGLGEAWTPELATAWTDAYGVLSGYMISEAYGAQAQAAE

SEQ ID NO: 5272 - protein, 215 aa, Triticum aestivum
  misc_feature (120)..(120): Xaa can be any naturally occurring amino acid
  misc_feature (178)..(178): Xaa can be any naturally occurring amino acid
  misc_feature (184)..(184): Xaa can be any naturally occurring amino acid
  misc_feature (195)..(195): Xaa can be any naturally occurring amino acid
  misc_feature (204)..(204): Xaa can be any naturally occurring amino acid
MKTLLILTILAMAITIGTANIQVDPSGQVQWLQQQLVPQLQQPLSQQPQQTFPQPQQTFPQPQQTFPHQPQQQVPQPQQPQQPFLQPQQPFPQQPQQPFPQTQQPQQPFPQQPQQPFPQXTQQPQQPFSQQPQQPFPQTQQPQQPFSQLQQPQQPFSQPNNNWRQPNNATIIPQQQRXIIQPSXHKQLNHARNSXAQCKPCVIXVSLGNIWHKAM

SEQ ID NO: 5273 - protein, 475 aa, Mesorhizobium sp. BNC1
MSYALTINGKAVQTSTTFDVINPATGEVAAACPEGTVAELNAAVAAAKSAFPAWSSRPDSNRREALGKIADLIEAHREELAALITAEQGKPQVGPGAPFEVSGCVAWTRVTQALDFEPQILIDNDHERVELIREPVGVVASITPWNWPLMIAIWHIMPALRVGCTVVIKPSPYTPLSTLRLVELINEAGILPAGVLNAVTGDKEVGDRISEHPDIDKIAFTGSTATGRRIMERAGPTLKRLTLELGGNDAGIILPGTDMSPRMEDLFWGSFINAGQTCSCLKRLYVHESDYESVCAALSGFVGGIKVGNGAEPDTLIGPLSNKMQFDKIVAMVEDARAKGARILAGGEKPSGRGYNYPLTIIADATMDMRVVAEEQFGPVLPVIRYRDVEEAVAEANSLELGLGASVWGDDPEEAAKVARKLIAGTRWVNRHGVLNPTVPMGGVKQSGIGVEFGIEGLQEFTTVQVLSIAKRVAG

SEQ ID NO: 5274 - protein, 507 aa, Synechocystis sp. PCC 6803
MSNSILSKLNVGERSPVNRTHSSRTEAEKSSLFRFVRRKINSPWLACVPLTALIVAIWNAAAIAQDTEIVNITVETVNENVATLQGTLNAIWILIAAILVIFMNAGFGMLETGLCRQKNAVNILTKNLIVFALATIAYWAIGFSLMFGSSGNPFVGFGGFFLSGDHTNYGLSPFPEGLPVAVFFLFQVAFSATAATIVSGAVAERIKFNEFLIFSVLLVGIAYPITGHWVWDAGGWLYTMGFMDFAGSTVVHSVGGWAALAGAFLLGPRLGKFVDGRPGAIPGHNMGFAMLGCLILWIGWFGFNPGSQLAADQACAYIAVTTNLAASAGGLTATFTSWLKDGKPDLTMVINGVLAGLVGITAGCAGVSYWGSVIIGGIAGILVVYSVAFFDKIKIDDPVGAISVHLVNGVWGTLAVGFFNMEKGLFYGGGINQLIIQIVGILAIGAFTAIFSFVVWAILKQTMGIRVSGEEEMIGLDIGEHGMEAYTGFVKETDSFGSAVSGATVPE

SEQ ID NO: 5275 - protein, 126 aa, Brassica napus
FVMEYCKGGELFKKVAKGNLRNKVAWKYFHQLINAVDFCHSRQVYHRDIKPENLLLDDNENLKVSDFGLSALADCKRQDGLLHTTCGTPAYVAPEVINRKGYDGTKADIWSCGVVLFVPLAGYLPF

SEQ ID NO: 5276 - protein, 177 aa, Oryza sativa (japonica cultivar-group)
MEFGGTQMLGVSILRLFSMCQHFVITVTRTKYKEPTKALIYWPNLSNPGGNPAWMMLLLLMENILFDMIVLAGMGLWTLLEGFLLLANALAILNEDRFLGPRGWSMSEVSGNGQTKSLKGQIVGLIYATQFLRMPLIALNVLIIVVKLGLSDIQIFSLQVPFLMEILPTMVMPYVRP

SEQ ID NO: 5277 - protein, 162 aa, Saccharomyces cerevisiae
MTTSFYDLECKDKKGESFKFDQLKGKVVLIVNVASKCGFTPQYKELEELYKKYQDKGFVILGFPCNQFGKQEPGSDEQITEFCQLNYGVTFPIMKKIDVNGSNADSVYNYLKSQKAGLLGFKGIKWNFEKFLVDSNGKVVQRFSSLTKPSSLDQEIQSLLSK

SEQ ID NO: 5278 - protein, 402 aa, Bacillus cereus G9241
MLSAKTIEIVKSTVPLLQEKGVEITTRFYEILFSEHPELLNIFNHTNQKKGRQQQALANAVYAAATYIDNLEAIIPVVKQIGHKHRSLGIKAEHYPIVGTCLLRAIKEVAGAPDEVLNAWGEAYGVIADAFISIEAEMYEEAAHKEGGWKDFRNFVVVKKVKESDVITSFYLKPEDGGKVSSFIPGQYVTVQINIEGETYTHNRQYSLSDAPGKEYYRISVKKEKGVDTPDGKVSNYLHDHVKEGDTLPVSAPAGDFVLNMDSTLPVVLISGGVGITPMMSMLNTLIEQNSKRNVCFVHAAINSNTHAMKEHVEAVDNEYEQVKSYTCYSAPTEKDLEMKNFDKEGFVEREWLQTIIPTTEAEFYFCGPVAFMKQINAAITDLGVKQEHIHYEFFGPAASLQ

SEQ ID NO: 5279 - protein, 379 aa, Haloferax volcanii
MSGELKRGLEGVLVAESKLSFIDGDAGQLVYCGYDIEDLARDASYEEVLYLLWHGALPTGEELDAFSDELAAHRDLDDGVLDVARELAEQDESPMAALRTLVSAMSAYDESADFEDVTDREVNLEKAKRITAKMPSVLAAYARFRRGDDYVEPDESLNHAANFLYMLNGEEPNEVLAETFDMALVLHADHGLNASTFSAMVTSSTLSDLYSAVTSAIGTLSGSLHGGANANVMRMLKDVDDSDMDPTEWVKDALDRGERVAGFVHRVYNVKDPRAKILGAKSEALGEAAGDMKWYEMSVAIEEYIGEEKGLAPNVDFYSASTYYQMGIPIDLYTPIFAVSRAGGWIAHVLEQYEDNRLIRPRARYTGEKDLDFTPVDER

SEQ ID NO: 5280 - protein, 457 aa, uncultured marine proteobacterium ANT32C12
MEFNSHEELVAASTKAAQKWRLVPAPQRGEFIRQFGNELRNQKTELAKVITKEARKIVSEAEGEVQEAIDMCDFATGLSRQLYGLTMPSERPDHRLQELWQPIGVVGCITAFNFPMAVFAWNFCLASVCGNSIIWKPSPHSNGCADALKKAWDEVAGEHKDLVLLLKGGNEEASALCKDTNIPLISATGSTQMGKELAPIVSARLGRTLLELGGNNAAIICPTADLDLTVKGITFSACGTTGQRCTSLRRAFVHEDIYEEFMQKLHAYYATLKIGNPSDSSNQIGPLISERSYNDMQRVLESISNKDVTVHGGQRLEVGDPEEFYVMPAIVEVSQIEDEMLNETFAPILYVKKFTDLTNAIEMQNNVKQGLSSSIFTNDMRESELFLSSEGSDCGIANVNIGTSGAEIGGAFGGEKDTGGGRESGSDAWKAYMRRVTATINYGEDLPLAQGVEFDES

SEQ ID NO: 5281 - protein, 92 aa, Zea mays
MHPRSAATVRLCLVCLALLLLTRDVRSRNLVGAVVQKERHKQSHGGHGGATPEPPVEEGSDAGAKRGQLQRDLTRWEEIHTDYIYTQDVKHP

SEQ ID NO: 5282 - protein, 352 aa, Hordeum vulgare
MANEEALMFALQLASSVVLPMTLRTCIELGLLETLVGAGGKTLTPEEVAAKLPSKAESNPDAASMVDRLLRVLATYKVVSRLVDECADGSLSRRYGAEPVCKWLTPNEDGVSMAPFCLLAQNKLFMEAWCHMKDAVLEGGSAFTKAFRASWFDYAGTDDHFNHLFNEAMKDHSVIITKKPLELYTGFDGIDTLVDLAGGVGAVIHAITKKYPSIKGINFDLPHVISDAQPYPGVEHVGGDMFEMVPSGDAIPMKWILPCFSDDECAVLLKNCYDALPAHGKVINVECILPVNPDATNNAQGLICVDASLLAYSPGGKERNLRDFEKLAKAAGFTGVKASYIFANFWAMEYTK

SEQ ID NO: 5283 - protein, 383 aa, Corynebacterium efficiens YS-314
MTTPTISKQKAKFNALTVSEVRRLTDDAVEISFEVPEELQADYDYIPGQYVALRTQLDGAEVRRSYSICDIPRPGTIRVAVKKNLGGLFSTWANEELKAGDTLEVMNPQGGFTSKTHVTSLNDAETIAQEAGNNHLVAVAAGSGITPIMAIAQTVLAENPKATFEIVYANKGGADVMFAEEIGDLKDKYPQRFAVHHVLSREQRVNPLFSGRIDDEKLNLLLDQVLRTDEVKEWFLCGPFELVQLCRDELEGRGVDSANVRFELFTTGKPGDGPGQGNTGRPVIADPEGDNITISFTLDGLSGTIESPSSARESVLNAALRARPDVPFACAGGVCGTCRAKVIEGEYEMEENYALEPDEVEAGYVLTCQTRPKGDTLVVDYDA

SEQ ID NO: 5284 - protein, 501 aa, Arabidopsis thaliana
MENGKCNGATTVKLPEIKFTKLFINGQFIDAASGKTFETIDPRNGEVIATIAEGDKEDVDLAVNAARYAFDHGPWPRMTGFERAKLINKFADLIEENIEELAKLDAVDGGKLFQLGKYADIPATAGHFRYNAGAADKIHGETLKMTRQSLFGYTLKEPIGVVGNIIPWNFPSIMFATKVAPAMAAGCTMVVKPAEQTSLSALFYAHLSKEAGIPDGVLNIVTGFGSTAGAAIASHMDVDKVSFTGSTDVGRKIMQAAAASNLKKVSLELGGKSPLLIFNDADIDKAADLALLGCFYNKGEICVASSRVFVQEGIYDKVVEKLVEKAKDWTVGDPFDSTARQGPQVDKRQFEKILSYIEHGKNEGATLLTGGKAIGDKGYFIQPTIFADVTEDMKIYQDEIFGPVMSLMKFKTVEEGIKCANNTKYGLAAGILSQDIDLINTVSRSIKAGIIWVNCYFGFDLDCPYGGYKMSGNCRESGMDALDNYLQTKSVVMPLHNSPWM

SEQ ID NO: 5285 - protein, 180 aa, Nicotiana tabacum
MASSVLSSAAVATRTNVAQANMVAPFTGLKSAASFPVSRKQNLDITSIASNGGRVQCMQVWPPYGKKKYETLSYLPDLSEEQLLSEIEYLLKNGWVPCLEFETERGFVYRENNKSPGYYDGRYWTMWKLPMFGCTDATQVLAEVGEAKKAYPEAWIRIIGFDNVRQVQCISFIAYKPEGY

SEQ ID NO: 5286 - protein, 160 aa, Xylella fastidiosa 9a5c
MNVVRYTPWPGQAALQNEIKQVFDRFFEHNGDTDESAVVTAQWVPRVDIKEEPNQFVLYADLPGIDPADIEVQMDKGILSIKGERKTESSSQTEHFSRIERRYGSFHRRFALPDSADADGITASGSHGVLSIFIPKRAATTPRRIQVGNAVSNDVALQSM

SEQ ID NO: 5287 - protein, 123 aa, Brassica napus
VCVWCFVISGDVLSGNDNGGSVHLGVLQEWFGSHWWNTRIFSLLFIYAFVLLPLVLCRRVERLAFSSAISFLLAVLFVVISSVLAISALMEGQTKNPRLFPDLTNGGSFWNLFTASPVIVTAF

SEQ ID NO: 5288 - protein, 168 aa, Brassica napus
MATVNFISHLASPASVYLLFLLSTTAAAINVTTVLSSFPNLSSFSNLLVSSGIASELSGRNSLTLLAVPNSHFSSASVDFTRRLSPPKLADLLRFNVLLQFLSDSDLRRISPSGSAVTTLYEASGHVFAGSGSVNVTRDPASGSVTIGSPSSSKSVTVLKLLETKPPT

SEQ ID NO: 5289 - protein, 307 aa, Schizosaccharomyces pombe
MIDLDNIIERLYEKQLIAESVIAYLCSLAKEVLMQESNVVRLSTPITVVGDIHGQFDDLLEIFRIGGPCPYTNYLFLGDYVDRGYYSIETITLLICLKLRYPKRITLLRGNHESRGITQTYGFYSECLRKYGNANVWKYFTDIFDFLTLSATIDDTIFCVHGGLSPSIQHIDQILVLDRFREFPHEGPMADLVWSDPDPSVQEFSLSPRGAGFSFGEVIVTKFLEYNNMKHILRAHQLCSEGYQILFEKKLSTVWSAPNYCYRCANLASILQIDTDQSRFFNVFDAAPNQETPFVEPAAKVTAEYFL

SEQ ID NO: 5290 - protein, 410 aa, Blumeria graminis
MSDMQGRKVFKVFNQDFVVDERYNVTKELGQGAYGIVCAATNISTQEGVAIKKVTNVFSKKILAKRALREIKLLQHFRGHRNITCLYDMDIPRPENFNETYLYEELMECDLAAIIRSGQPLTDAHFQSFIYQILCGLKYVHSANVLHRDLKPGNLLVNADCELKICDFGLARGFSVDPEENAGYMTEYVATRWYRAPEIMLSFQSYTKAIDVWSVGCILAELLGGRPFFKGRDYVDQLNQILHVLGTPNEETLARIGSPRAQEYVRNLPFMAKRPFAQIFPNANPDALDLLNRMLAFDPASRISVEEALEHPFLQIWHDVSDEPCCPTTFNFDFEVTDDVGEMRKMILDEVARFRHHVRVQPGMQSPSNDPSVPTLQTSVAWGSEDPRPQENNDQEITGLERDLTVGLDR

SEQ ID NO: 5291 - protein, 161 aa, Triticum aestivum
  misc_feature (123)..(123): Xaa can be any naturally occurring amino acid
  misc_feature (129)..(129): Xaa can be any naturally occurring amino acid
MSDTDEHHFESKADSGASKTYPQQAGAIRKGGHIVIKARPCKVVEVSTSKTGKHGHAKCHFVAIDIFNGKKLEDIVPSSHNCDVPHVDRQDYQLIDITDDGYVSLLTESGHTKDDLKLPTDDXLLGQIXTGFADGKDLILSVMSRMGEEQICAVKEIGGGK

SEQ ID NO: 5292 - protein, 310 aa, Zygosaccharomyces rouxii
MVTLQNSTSTLKLNTGQTIPQVGLGTWRSKENEGYKAVIEALKAGYRHIDGAAVYGNEGEVGKAIQDSGVPRNEIFLTTKLWCTQQRNPQEALDQSLQRLGLDYVDLYLIHWPVPLRTENIKDGNLFQFAEKPDGSKDVDLEWNFIKTWELMQKLLESGKTKAIGVSNFSVNNLKDLLAAPTTKVTPAVNQVELHPLLPQEDLIKFGKENGIVIEAYSPLGGENAPILSDPTVQEIAKANGVEAGHVVISWAVQKGLVTLPKSVTPSRIVGNLKVLTLSDSDVAKVDGLLKAKGERRTCYQDFSPFPIFQ

SEQ ID NO: 5293 - protein, 149 aa, Glycine max
REQAQEFTDIKFREAYLDTVCLNMVQDPGHYDVLVMPNLYGDILSDLCAGLIGGLGVTPSGNIGEGAAVFESVHGTAPDIAGQDKANPTALLLSGVMMLRYMGLESYANKIEKACFDAISHGDHKTRDLGGTGTCSSFTADICARIKSM

SEQ ID NO: 5294 - protein, 311 aa, Zea mays
IRLELKISDFGLSALPEQLRYDGLLHTQCGTPAYVAPEVLRKKGYDGSKADIWSCGVVLYVLLAGFLPFQHENLMTMYNKVLRAEFEFPPWFSPDSKRLISKILVADPSKRTAISAIARVSWFRKGFSSLSAPDLCQLEKQEDAVTVTVTEEENNSKVPKFFNAFEFISSMSSGFDLSGLFESKRKTATVFTSKCSAAAIVAKIAAAARGLSFRVAEVKDFKIRLQGAAEGRKGRLAVTAEVFEVAPEVAVVEFSKSAGDTLEYAKFCEEDVRPALKDIVWTWQGDATCAANVPACHGEECHKQVVVVSTI

SEQ ID NO: 5295 - protein, 503 aa, Bradyrhizobium japonicum USDA 110
MAGSIAGAFVQGCLPKRPHHAPKKRLTMVNRMQFYIDGAWVDPAVKKSTAVVNPATEEAMYEVALGSKADVDKAVAAAKRAFATFSQTSREERVALLTKIIEIYKGRLKEIGAAVSDEMGAPLPMAEKLQAGAGLGHLMTTLDVLKNYHFEEPVGTAMVLREPIGVVGMITPWNWPLNQIACKVAPALAAGCTMILKPSEFTPTSALIFAEILHEAGVPKGVFNLVNGLGPEVGAAMSEHPDIDMISFTGSTRAGIDVAKRAAPTVKRVSQELGGKSPNVILEGADLTKAVTGGVMHMFNNSGQSCNAPSRMIVPLSKMKEVAAIAKAVADKTKAGDPRAEGTTIGPVVNRGQWDKIQGLIKKGIDEGATLVAGGPGLPEGVNKGFYVRPTIFADVTPDMTIAREEIFGPVLTIIGAKNEADAVQIANDTPYGLAGYVSADTVESAKRVARQIRAGNVNLQGVPNDRTAPFGGYKQSGNGREWGKYGLEDFLEVKAVAGFNAA

SEQ ID NO: 5296 - protein, 92 aa, Triticum aestivum
MGLCSCCCRCLEIMCAILLPPLGVCLRHGCCSMEFWISVLLTILGYLPGVLYAAYVICSVDPDRVRRRGAYVICSVDPDRVRRHDDDYIYVA

SEQ ID NO: 5297 - protein, 433 aa, Leptospira interrogans serovar Copenhageni str. Fiocruz L1-130
MIWYPFTLQFEPDSPLKIERAKGEFLYDELGNSYIDGISSWWVSIHGHNHPKIVQAVKNQLEKLDHVLLAGFTHDPAEKLAAELLKITDGLFQKVLYSDNGSTAVEIMIKLAYQYFQNIGEVDRKIFIKWNSSYHGDTIGTMSVGGNSVFNRVFQGLMFPTKEFQTPNCNFCPMGKKPESCKVECIDPIEEFFQKSPKAVAGIVIEPLILGSGGMIFYKEEVLQRLETISKKYGSLLLLDEVFTGFGRTGSVFAYQRAKIRPDFIALAKGLSAGVSAVAVTLTTDRIHSAFVTADPEKGFYHGHTMTGNPIACSAALASLKIFFEENRLEQILRLESKLNVGLKKIAKEFPKAVKNCRVLGAVGVLELEVGKASGYHYPGNKILKKKFLEKGVLLRPLGNVIYLTPPYNIENSSLEKIFSAIRETLSEISFGN

SEQ ID NO: 5298 - protein, 112 aa, Brassica napus
MKPPQSASLDRRRDDFRRGGSDIFEIIDHAIMVAATDCPIKFKSRRDKIAELLFSCRVTLCTGCHRELSLPGEDEAVDGGEDDVGGVGSKESKANSSRGDNNQIVGSYSYDD

SEQ ID NO: 5299 - protein, 352 aa, Glycine max
MARRSLPLLKHLLSRRIPARSGDHVTLIPGDGIGPMVTGAVEQVMEAMHAPVYFEKFEVHGNMKAVPPEVLDSIRKNKVCLKGGLVTPMGGGVSSLNVQLRKELDLYASLVNCFNLPGLPTRHDNVDIVVIRENTEGEYSGLEHEVVPGVVESLKVITKFCSERIAKYAFEYAYLNNRKKVTAVHKANIMKLADGLFLESCREVATKYPGIKYNEIIVDNCCMQLVSKPEQFDVMVTPNLYGNLVANTAAGIAGGTGVMPGGNVGAEHAVFEQGASAGNVGSDKIREQKKANPVALLLSSAMMLRHLQFPAFADRLETAVEKVILEGKCRTKDLGGTSTTQEVVDAVIDALD

SEQ ID NO: 5300 - protein, 124 aa, Cucumis sativus
GRGQFGTTFLCTDKPTGFNYACKTIPKRKLLCKEEYEDVWREIQIMHHLSEHPNIVRIKGTYEDPGLCYLVMELCEGGELFDRIVQKGQYSEREAAKLIGVIVSVLESCHSLGVMHRDLKPENF

SEQ ID NO: 5301 - protein, 280 aa, Streptococcus agalactiae NEM316
METYTLSNTLNIPKIGFGTWQLTEGEEAYKAVTHALKVGYTHIDTAQIYGNEHSVGRAIRDSGLARESIFLTTKIWNDKHDYHLAKASIDESLQKLGVDYIDLLLIHWPNPKALRENDAWKAGNAGTWKAMEEAYKEGKVKAIGVSNFMKHHLEALFETAEIKPMVNQIILAPGCAQEDLVRFCKGNDILLEAYSPFGTGAIFENESIKAIAEKYGKSVAQVALRWSLDNGFLPLPKSATPKNIEANLDIFDFQLNEDDITTLIQLDSGIKPKDPDNVSF

SEQ ID NO: 5302 - protein, 606 aa, Zea mays
MCGILAVLGCADEAKGSSKRSRVLELSRRLKHRGPDWSGLRQVGDCYLSHQRLAIIDPASGDQPLYNEDQSVVVAVNGEIYNHLDLRSRLAGAGHSFRTGSDCEVIAHLYEEHGEEFVDMLDGVFSFVLLDTRHGDRAGSSFFMAARDAIGVTPLYIGWGVDGSVWISSEMKALHDECEHFEIFPPGHLYSSNTGGFSRWYNPPWYDDDDDEEAVVTPSVPYDPLALRKAFEKAVVKRLMTDVPFGVLLSGGLDSSLVATVAVRHLARTEAARRWGTKLHSFCVGLEGSPDLKAAREVAEYLGTLHHEFHFTVQDGIDAIEDVIYHTETYDVTTIRASTPMFLMSRKIKSLGVKMVISGEGSDELFGGYLYFHKAPNKEELHRETCRKVKALHQYDCLRANKATSAWGLEARVPFLDKEFINAAMSIDPEWKMVQPDLGRIEKWVLRKAFDDEEQPFLPKHILYRQKEQFSDGVGYSWIDGLKAHATSNVTDKMLSNAKFIFPHNTPTTKEAYYYRMVFERFFPQKSAILTVPGGPSVACSTAKAIEWDAQWSGNLDPSGRAALGVHLAAYEHQHDPEHVPAAIAAGSGKKPRTIRVAPPGVAIEG

SEQ ID NO: 5303 - protein, 425 aa, Serratia marcescens
MSVTASDLAFDQRHIWHPYTSMSRPLPCYPIESASGVELQLADGRSLVDGMSSWWAAIHGYNHPRLNQAASQQLEKMSHVMFGGITHPAAISLCRRLVEMTPEALQCVFLADSGSVAVEVSLKMALQYWQARGERRQRILTLRHGYHGDTFGAMSVCDPDNSMHSLYQGYLAPHLFATAPQCRFDEEWREEDIAPFAALLEQHAGEVAAVILEPVVQGAGGMRIYHPTYLKRVRDVVRVAIKLLLIADEIATGFGRTGKLFACEHAQVVPDILCLGKALTGGYMTLSATLTTRHVAETISNGAAGCFMHGPTFMGNPLACAVADASLALLAENRWQAQVSAIETQLKRELLPLGRCRRWPHVRVLGAIGVVEMREPVDVAELQRGFVERGVWIRPFGKLIYLMPPYIIEAEQLSRLTAAVADAAR

SEQ ID NO: 5304 - protein, 405 aa, Geobacter metallireducens GS-15
MLDILVENGAVKELGKGVKAPSGTETIDASGLIVTPGLIDMHVHLRDPGHEYKEDIVSGTKAAAAGGFTSVACMPNTKPVNDNKAVTSYIIAKAKAEGSVNVFPVGSITQGSKGELLSEMGELKESGCVAVSDDGHPVTNSELMRRALEYAKGMGIMVISHAEDLSLVGAGVMNEGFVSTELGLKGIPWAAEDAATARDVYLAEFTDSPLHIAHVSTKGSLRIIRNAKARGVKVTCETAPHYFSLTDDAVRGYDTNAKMNPPLRTADDVTAVKEALKDGTIDAIATDHAPHHIDEKDLEFNEALNGIVGLETSLTLSLRLVEEGVLTLPVLVDKMACNPAKILGIDRGTLKPGSVADITVIDPKATWTVDADKLASKSKNSPFLGWEVKGAAAFTIVGGKVVYKR

SEQ ID NO: 5305 - protein, 422 aa, Pseudomonas aeruginosa PAO1
MSDLKTAALEYHAQPRPGKLSVELTKPTATARDLSLAYSPGVAEPVREIARDAELAYQYTGKGNLVAVISDGTAILGLGNLGPLASKPVMEGKGVLFKRFAGIDVFDIEVDAESPQAFIDTVKRISITFGGINLEDIKAPECFEIERALIEQCDIPVFHDDQHGTAIVTAAGMLNALELAGKKLEEAKIVCLGAGAAAISCMKLLVSMGAKVENIYMIDRKGVIHAGRDDLNQYKSVFATETDKRTLADALEGADVFVGLSGANLLEPEDLKRMAPNPIVFACSNPDPEIKPELAHATRNDVIMATGRSDYPNQVNNVLGFPFIFRGALDVRATRINEEMKIAAALALRDLAKQPVPEDVCAAYGVDKLEFGREYIIPKPMDKRLITVVSDAVAKAAIETGVATLPYPKNYPLKSVDDVFNG

SEQ ID NO: 5306 - protein, 453 aa, Glycine max
MEHFNNDDLEYVVDEYYDVPDFAVEDTSSDIVPELTSDVDSDFEDEFPTSNAKTDTTASEARNGKDIQGIPWERLNYSRDKYRETRLKQYKNYQNFSRSRHDLRKECLEVQKGETFYDFFFNTRLVKSTIVHFQLRPNIMLRNLLWATSKHDVYFMQNYSVMHWSALLRRGKEVLNVAKPIIPTLKRPGFLAQPVSRVQISTMTVKENLMVAGGFQGELICKNLKHPGVLFCGKITTDDNAITNAVDVYSNPAGSLRVITANNDFQVRVFDAENFASLGCFKYDWSVNNTSVSPDGKLLAVLGDSTECLIADANTGKITGSLKGHLDYSFSSAWHPDGQILATGNQDKTCRLWDIRNLSQSMAVLKGRMGAIRALRFTSDGRFLAMAEPADFVHIFDSHSGYEQGQEIDLFGEIAGISFSPDTEALFVGIADRTYGSLLEFNRKRHYNYLDSF

SEQ ID NO: 5307 - protein, 444 aa, Zea mays
  misc_feature (134)..(134): Xaa can be any naturally occurring amino acid
  misc_feature (185)..(185): Xaa can be any naturally occurring amino acid
  misc_feature (215)..(215): Xaa can be any naturally occurring amino acid
  misc_feature (279)..(279): Xaa can be any naturally occurring amino acid
  misc_feature (348)..(348): Xaa can be any naturally occurring amino acid
  misc_feature (413)..(413): Xaa can be any naturally occurring amino acid
MSTTKVKRRVGKYELGRTIGEGTFAKVRFARDTVTGEAVAIKILDKEKVLKHKMVEQIKREISTMKLIKHPNVVRIYEVMGSKTKIYIVLEFATGGELFDTIVNHGRMREDEARRYFQQLINAVDYCHSRGCVXTRDLKPENLLLDSYGNLKVSDFGLSALSQQIKDDGLLHTTCGTPNYVAPAXSLEDQGYDGAMADLWSCGVILFVLLAGYLXPFEESNLMTLYKKISNAEFTFPPWTSFPAKRLLTRILDPNPMTRITIPEILEDEWFKKGYKRPXFDEQYDTTLDDVDAVFNDSEEHHVTEKKEEEPVALNAFELISMSAGLNLGNLFDSEQEFKRETRFTSKXPPKKFVRKIEEAAKPLGFDVQKKNYKLRLEKVKAGRKGNLNVATEILQVAPSLHMVEVRKAKGDXTLEFHKFYKNLSKTLKDVVWKSDDLQTQHAS

SEQ ID NO: 5308 - protein, 164 aa, Mycoplasma penetrans HF-2
MFKMSDFYKFKVNKINGKEIELSEYKNKVVLVVNVASKCGFVKQYENLENMYQKYKDQGLVILGFPCNQFFFQEPKTNQEILSFCTTKYNVTFDMFEKINVNGKEANPLYTWLKEQMPWTARAKNVKWNFEKFLLDKNGNVKYRFESKKIPEEFEQEVVNLINE

SEQ ID NO: 5309 - protein, 479 aa, Escherichia coli O157:H7 EDL933
MSVPVQHPMYIDGQFVTWRGDAWIDVVNPATEAVISRIPDGQAEDARKAIDAAERAQPEWEALPAIERASWLRKISAGIRERASEISALIVEEGGKIQQLAEVEVAFTADYIDYMAEWARRYEGEIIQSDRPGENILLFKRALGVTTGILPWNFPFFLIARKMAPALLTGNTIVIKPSEFTPNNAIAFAKIVDEIGLPRGVFNLVLGRGETVGQELAGNPKVAMVSMTGSVSAGEKIMATAAKNITKVCLELGGKAPAIVMDDADLELAVKAIVDSRVINSGQVCNCAERVYVQKGIYDQFVNRLGEAMQAVQFGNPAERNDIAMGPLINAAALERVEQKVARAVEEGARVALGGKAVEGKGYYYPPTLLLDVRQEMSIMHEETFGPVLPVVAFDTLEDAISMANDSDYGLTSSIYTQNLNVAMKAIKGLKFGETYINRENFEAMQGFHAGWRKSGIGGADGKHGLHEYLQTQVVYLQS

SEQ ID NO: 5310 - protein, 508 aa, Zea mays
  misc_feature (376)..(376): Xaa can be any naturally occurring amino acid
MASNGCNGNGNGKAAPAGVVVPEIKFTKLFINGEFVDAASGKTFDTRDPRTGDVLAHVAEADKADVDLAVKSARDAFEHGKWPRMSGYERGRIMSKLADLVEQHTEELAALDGADAGKLLLLGKIIDIPAATQMLRYYAGAADKIHGDVLRVSGRYQGYTLKEPIGVVGVIIPWNFPTMMFFLKVSPALAAGCTVVVKPAEQTPLSALYYAHLAKMAGVPDGVINVVPGFGPTAGAALASHMDVDSVAFTGSTEVGRLIMESAARSNLKTVSLELGGKSPLIIFDDADVDMAVNLSRLAVFFNKGEVCVAGSRVYVQEGIYDEFVKKAVQAARSWKVGDPFDVTSNMGPQVDKDQFERVLKYIEHGKSEGATLLTXGGKPAADKGYYIEPTIFVDVTEDMKIAQEEIFGPVMSLMKFKTVDEVIEKANCTRYGLAAGIVTKSLDVANRVSRSVRAGTVWVNCYFAFDPDAPFGGYKMSGFGRDQGLAAMDKYLQVKSVITALPDSPWY

SEQ ID NO: 5311 - protein, 455 aa, Oryza sativa (japonica cultivar-group)
MLAVSPAMCPDIEDRAAVAGDAGMEVVGMSSDDMDQFDFSVDDIDFGDFFLRLEDGDVLPDLEVDPAEIFTDFEAIATSGGEGVQDQEVPTVELLAPADDVGVLDPCGDVVVGEENAAFAGAGEEKGGCNQDDDAGEANVDDGAAAVEAKSSSPSSTTSSSQEAESRHKSSSKSSHGKKKAKVDWTPELHRRFVQAVEQLGIDKAVPSRILEIMGIDSLTRHNIASHLQKYRSHRKHMIAREAEAASWTQRRQIYAAGGGAVAKRPESNAWTVPTIGFPPPPPPPPSPAPIQHFARPLHVWGHPTMDPSRVPVWPPRHLVPRGPAPPWVPPPPPSDPAFWHHPYMRGPAHVPTQGTPCMAMPMPAARFPAPPVPGVVPCPMYRPLTPPALASKNQQDAQLQLQVQPSSESIDAAIGDVLSKPWLPLPLGLKPPSVDSVMGELQRQGVANVPPACG

SEQ ID NO: 5312 - protein, 413 aa, Nicotiana tabacum
MPEKPLFGKYELGKLLGCGASAKVYHAREINNGQSVAIKMINKNNKDNIPNENIEREISILRQLRHPYIVKLYEVLATKSKIYFVMEYVKGGELFTKIADHGRFSEDLSRKYFQQLISALNYCHSRGIYHRDLKPENILIDENGDLKISDFGLSATTDQIQKFDGLLHTVCGSPAYVAPEILTIKGYDGAKTDIWSCGIILYVMIAGYLPFYDQNLMLMYKKIYKGEFKCPKWMSPDVIRILSRLLDTNPATRITIDEIIKDPWFRKGLKFIKFAGEEEDKYSLSSNCLNAFDLISFSQGLDISGLFKSNNPANDLERTVVEQSPESVIERVEEMAKKENFRLRKKKEWGIEMKVQNGKLTMSVDIYRLTERFVIVEVKREAGNGDLYTDLWRNKLKAVILGQQIAEIQDSGS

SEQ ID NO: 5313 - protein, 326 aa, Bacteroides thetaiotaomicron VPI-5482
MGTVKCIGILTSGGDAPGMNAAIRAVTRAAIYNGLQVKGIYRGYKGLVTGEIKEFKSQNVSNIIQLGGTILKTARCKEFTTPEGRQLAYDNMKREGIDALVIIGGDGSLTGARIFAQEFDVPCIGLPGTIDNDLYGTDTTIGYDTALNTILDAVDKIRDTATSHERLFFVEVMGRDAGFLALNGAIASGAEAAIIPEFSTEVDQLEEFIKNGFRKSKNSSIVLVAESELTGGAMHYAERVKNEYPQYDVRVTILGHLQRGGSPTAHDRILASRLGAAAIDAIMEDQRNVMIGIEHDEIVYVPFSKAIKNDKPVKRDLVNVLKELSI

SEQ ID NO: 5314 - protein, 422 aa, Oryza sativa (japonica cultivar-group)
MLAVSPAMCPDIEDRAAVAGDAGMEVVGMSSDDMDQFDFSVDDIDFGDFFLRLEDGDVLPDLEVDPAEIFTDFEAIATSGGEGVQDQEVPTVELLAPADDVGVLDPCGDGAAAVEAKSSSPSSTTSSSQEAESRHKSSSKSSHGKKKAKVDWTPELHRRFVQAVEQLGIDKAVPSRILEIMGIDSLTRHNIASHLQKYRSHRKHMIAREAEAASWTQRRQIYAAGGGAVAKRPESNAWTVPTIGFPPPPPPPPSPAPIQHFARPLHVWGHPTMDPSRVPVWPPRHLVPRGPAPPWVPPPPPSDPAFWHHPYMRGPAHVPTQGTPCMAMPMPAARFPAPPVPGVVPCPMYRPLTPPALASKNQQDAQLQLQVQPSSESIDAAIGDVLSKPWLPLPLGLKPPSVDSVMGELQRQGVANVPPACG

SEQ ID NO: 5315 - protein, 324 aa, Candida tropicalis
MSTTPTIPTIKLNSGYEMPLVGFGCWKVTNATAADQIYNAIKTGYRLFDGAEDYGNEKEVGEGINRAIKEGLVKREELFITSKLWNNFHDPKNVETALNKTLSDLNLDYVDLFLIHFPIAFKFVPIEEKYPPGFYCGDGDNFHYEDVPLLDTWKALEKLVEAGKIKSIGISNFTGALIYDLIRGATIKPAVLQIEHHPYLQQPKLIEYVQKAGIAITGYSSFGPQSFLELESKRALNTPTLFEHETIKLIADKHGKSPAQVLLRWATQRNIAVIPKSNNPERLAQNLSVVDFDLTKDDLDNIAKLDIGLRFNDPWDWDNIPIFV

SEQ ID NO: 5316 - protein, 214 aa, Zea mays
MAAVEVCVKAAAGKPDTLGDCPFSQRVLLTLEEKKVPYEVKLVDLGNKPEWFLEINPEGKVPVLKGDDGKCIADSDVITQVIEEKFPTPSLVTPPEYASVGSKIFPAFVKFLKSKDASDGSEKALLDELQALDEHLKAHGPYINGDNVSAADLSLAPKLFHLQVALEHFKGWKIPENLTNVHAYTKALFTRESFVKTKPSEEHVIAGWAPKVNA

SEQ ID NO: 5317 - protein, 147 aa, Lactococcus lactis subsp. lactis Il1403
MNGETVSMSDFKGKVVIVVNTASKCGFTPQFEGLEKLYENYKDQGLEILGFPCNQFVNQDAGENSEINEFCQLNYGVTFPMFQKIKVNGKEAHPLYQFLKKEAKGALSGTIKWNFTKFLIDREGNVIERFAPKTEPKEMEEEIQKLL

SEQ ID NO: 5318 - protein, 296 aa, Zea mays
MAVATESRGSEDRASAHANQEKRWVLSDFEVGKPLGRGKFGHVYLAREKRSSEIVALKVLFKSQLKQSQVEHQLRREVEIQSHLRHPNILRLYGYFYDQTRVYLILEYAAKGELYKELTRCKHFSERRTATYVASLARALIYLHGKHVIHRDIKPENLLVGVQGEIKIADFGWSVHTFNRRRTMCGTLDYLPPEMVEKAEHDYHVDIWSLGVLCYEFLYGVPPFEAKEHSETYRRIVKVDLKFPLKPFVSPAAKDLISQMLVKSSAQRLPLHKVLEHPWIVQNADPSGVYREGRSV

SEQ ID NO: 5319 - protein, 219 aa, Zea mays
  misc_feature (69)..(69): Xaa can be any naturally occurring amino acid
  misc_feature (202)..(202): Xaa can be any naturally occurring amino acid
APAFCELSLPLTKEKAAFSPSDPAMQRHVASGRPSGTDGSDFSYRMVVESRNQSTAHTAKATLPTPLSXPRNFAGYQRVAEGRSRLARLILVQALHLVAGGLLLLLSLSKGAAVNKFAVLSMAAGFLAIVVGELGRMRTMSVLLRLYTSLSSIAVAFSVTCIIRSELFLKVMKQNTEAITSYEMLDAVRVALGILLQMVVIXATTTRLLQNMSPPKRAS

SEQ ID NO: 5320 - protein, 171 aa, Brassica napus
STHASGWNRSRYGRKATIREFYGVILPSLERLHINFSDSPGDNTLWYPNPKAITYDIEGNRFITNSVDSEREEECGICLEPCTKMVLPNCCHAMCIKCYRNWNMKSESCPFCRGNIKRVNSEDLWVLTCDEDVVDPETVTKEDLFRFYLHINSLPKDYPEAVFLGYNEYLI

SEQ ID NO: 5321 - protein, 322 aa, Vibrio vulnificus YJ016
MSMIKKIGVLTSGGDAPGMNAAIRGVVRTALGAGLEVYGIYDGYLGLYEGRIKQLDRSSVSDVINRGGTFLGSARFPEFKEVAVREKAIENLKAHGIDALVVIGGDGSYMGAKKLTEMGYPCIGLPGTIDNDIAGTDYTIGYLTALNTVIESIDRLRDTSSSHQRISIVEIMGRHCGDLTLMSAIAGGCEYIITPETGLDKEKLIGNIQDGISKGKKHAIIALTELMMDANELAKEIEAGTGRETRATVLGHIQRGGRPTAFDRVLASRMGNYAVHLLMEGHGGRCVGIVKEQLVHHDIIDAIENMKRPVRNDLFKVAEELF

SEQ ID NO: 5322 - protein, 1533 aa, Magnaporthe grisea 70-15
MYPGSSQSRPYQVPPPPPMSPPLSQMHQQMSFVPPPPPPLNRYQTTPNLGASAPPPPPPGPPPASALNPQAPWNGAWGGVPAPRQAYDNRSGMYAQAPIQQYNPQAHAATAPGLNIPPPPLQTDAPMSDTYNPGQDPMFDGFMPDLSFDLEQETMGSSQTWQTTSSSSTNTASVNDNVQSNAPTEERTRRNNSASITGTQSSSNVPGIPSDITASWSLDKVIAWLQMNSFSRDWQETFKSLNIHGAQFLELGSGHFGRGNFGMMHQQVYPKLAKVCTASGTGWDQPREREEGKRMRRLIRGLVHARAVPDSARVPSSHGRQGSINSRGNDKGTHDGSDSPNTPIMKTPSSQSRSTTIPTFPDGSSFSNHRGVLKNIDIDRHSSPKLNGDSPAASPNPVMASSTPKSSTLSVSPHSSRFGNNVRNSTDSVKAIYGSGIPADAQKMMSNSNLDELINGRGARQSPSDLGDNSAGTDSPVSARDTKLPFRQRMQAKDIDGNLSSPNGEGSLSPQMYRNGLGLDDYLRFKKPGGSIYLMATADGWNYRVVDVTDVETVLDLRSEISRGLGIPDEDGVEFYLTELGKSDHSQPLDDNQLMNHNKSRADAEGTLKLFVKPPPMSQQSTWSAGDTGQRHRFGTSSSMSRQQNTLKDDQSEEARLRAQREYKAEIDRKGREYLAIRKAKLESNNNGLSSSTEGIGIVGKPVDFDTPRHSPYEDKNTDRMFPTRNAPAPPVAPSATLNRVNSLMTGQRRVQGSMDGYPSQRVPPGVGTTTSPKEMSEDRRRQPMSGSQPMGGITSALVDMGRNLGGVALPNRGVSANNVPSKPSPPYRVATAPVSGRDFVSPDNRAAFPRSQTAGDLSPISQMPANFAAYQEPNPSPRGFGAAPVSSAAHKRAPSGPDIDFTEPEVSFDRPAPSTAQNEAQSDDDSGDDSDDGLFVIPIAARKASMKKAKSRASVTFDASDSGDGKRPALTVNTARDRKSVSFNSPQSARTGDDDDDSGRQRRTPKSDMWDSEDGKLGRRKSFKMDVWANRPPAEALINNLEDFFPGMDVDQPVLEEGDQEQNIDGSPVAPSPIAEVDETQSPGHLQINATPLNSLPPSRVQSMYNESDTLGSDESTLKALERPPSFQSLAQRSVRRSGGLGRMKSIREKARGAHEAHKRYTQTSMAAPQGLSRSGGTPATETQPTQNNSSALLRRKSTKMFNANIVQIRPNRDSMLVPDIPQDSISSSSRGAPKHPTTFRWFKGQLIGKGTYGRVYLGMNATTGEFLAVKEVEVNPRAAAGDKKRMKELVAALDQEIETMQHLDHVNIVQYLGCERKETSISIFLEYISGGSIGSCLRKNGKFEESVVQSLTRQTLSGLAYLHREGILHRDLKADNILLDVDGTAKISDFGISKKTDNIYGNDKSNSMQGSVFWMAPEVIRSQGEGYSAKVDIWSLGCVVLEMFAGRRPWAKEEAVGAIYKIANGEIPPIPEDVQDTISPIAVAFMMDCFTVDSHDRPTANKLLSQHPFCELDPNYNFLDSELYAKIRGTY

SEQ ID NO: 5323 - protein, 133 aa, Kandelia candel
DPLDGFFSSAVANVPFNSANEAAAFANARFDWKETPEAHVFKADLPGLKKEEVKVEVEEGRILQISGERRKEQEEKNDKWHRLERSSGKFLRRFRLPENAKMYQVKASMENGVLTITVPKEEEKKPEVEAIEI

SEQ ID NO: 5324 - protein, 334 aa, Saccharomyces kluyveri
MAPHVNKKQKLSNSLEQLKATGTVVVSDTGDFESIAKYTPQDATTNPSLILAAAKKENYAKLIDTAVEYGKKQGKTLEDKVDQAVDMLLVEFGKAILNIVPGRVSTEVDARLSFDKDATVAKALHIIKLYEDAGISRERVLIKIASTWEGIQAAKELEEKHGIHVNLTLLFSFSQAVAAAEAKVTLISPFVGRILDWYKASTGKDYTAETDPGVKSVRKIFNYYKKYGYDTIVMGASFRNVGEIKALAGVDFLTISPGLLDELMSSEDPVPQVLDAEAAKSEDLAKVSFISDEAKFRFELNEDAMATEKLSEGIRKFSADIVTLFELIEKKIKA

SEQ ID NO: 5325 - protein, 336 aa, Candida parapsilosis
MSIPSSQYGFVFNKQSGLNLRNDLPVHKPKAGQLLLKVDAVGLCHSDLHVIYEGLDCGDNYVMGHEIAGTVAAVGDDVINYKVGDRVACVGPNGCGGCKYCRGAIDNVCKNAFGDWFGLGYDGGYQQYLLVTRPRNLSRIPDNVSADVAAASTDAVLTPYHAIKMAQVSPTSNILLIGAGGLGGNAIQVAKAFGAKVTVLDKKKEARDQAKKLGADAVYETLPESISPGSFSACFDFVSVQATFDVCQKYVEPKGVIMPVGLGAPNLSFNLGDLALREIRILGSFWGTTNDLDDVLKLVSEGKVKPVVRSAKLKELPEYIEKLRNNAYEGRVVFNP

SEQ ID NO: 5326 - protein, 163 aa, Chlamydomonas sp. W80
MASPFYALAATDIAGKEFPFAQLQGKVVLVVNVASQCGFTPQYKGLQELYDKYKDEGLVIIGFPCDQFGHQEPGQESEIASFCQKNFGVTFPMMAKIEVNGDNTHPVYQFLKSEKKQLFMERIKWNFEKFLINKQGEVVERFSSAGDPMRNIAPAVAKLLAEA

SEQ ID NO: 5327 - protein, 248 aa, Rosa hybrid cultivar
MAYENKPNTVLDADAQRRLGRGKIEIKRIENTTNRQVTFCKRRNGLLKKAYELSVLCDAEVALIVFSNRGRLYEYSNNSVRETIERYKKACADSSNNGSVSEATTQYYQQEAAKLRAQITTLQNSNRGYMAEGLSNMSIKELKGVETKLEKAISRIRSKKNELLFAEIEYMQKRELDLHNNNQLLRAKIADNERHQQSINAIAGGHGSYEIMQPTQPFHEARNYFQVNALEPNIHQYSRHDQISLQLV

SEQ ID NO: 5328 - protein, 445 aa, Glycine max
EKATGQEYACKYIAKRKLVTDDDVEDVRREIQIMHHLAGHPNVISIKGAYEDAMAVHVVMELCAGGELFDRIIQRGHYTERQAAELTRTIVGVVEACHSLGVMHRDLKPENFLFINQHEDSLLKTIDFGLSVFFKPGDIFNDVVGSPYYVAPEVLRKRYGPEADVWSAGVILYILLSGVPPFWAENEQGIFEQVLRGDLDFSSDPWPSISESAKDLVRKMLVRDPRRRLTAHQVLCHPWIQVDGVAPDKPLDSAVLSRLKQFSAMNKLKKMALIIIAESLSEEEIAGLKEMFKMIDADNSGQITFEELKAGLKRVGANLKESEIYDLMQAADVDNSGTIDYGEFLAATLHRNKIEREDNLFAAFSYFDKDGSGYITQEELQQACDEFGIKDVRLEEIIKEIDEDNDGRIDYNEFVAMMQKGNLPAVGKKGLENSFSIKFREALKL

SEQ ID NO: 5329 - protein, 283 aa, Clostridium acetobutylicum ATCC 824
MMIESINWFPGHMAKTTREIRENLKLVDAVIEIRDARIVYSSSNPDINSICKDKPRIILLNKFDLAEKSITDNWVKALSSESIRAIPVNALEGRGLNSIKPALNELLKPKLDNMAAKGIQNYIIRVMVVGIPNVGKSSFINKMAKNKVAKVGNKPGVTKSKQWIKTNIGIELMDTPGVLWPKFQDQKVGLNLAFTGAIKDEIMDIEELALKLVQFLQKNYPEKLMERYKLEDINEDPLINMNNIAAKRGALLKGGEIDYNRVSIIIVDEFRSGKIGKISLERP

SEQ ID NO: 5330 - protein, 120 aa, Glycine max
  misc_feature (37)..(37): Xaa can be any naturally occurring amino acid
  misc_feature (63)..(63): Xaa can be any naturally occurring amino acid
  misc_feature (97)..(97): Xaa can be any naturally occurring amino acid
AISMIFTPAATTVNRAGAGMVAPFTGLKSMDGFPTKXTNNDITSIASNGGRVQCVHVWPSVGXKKSETLYYLPYLDDAQLAKEVEYLLTKGWIPCLXLQWEHGYLYRDHNRSPRYYRWTL

SEQ ID NO: 5331 - protein, 176 aa, Glycine max
MAIKSETYKSLELGAPSKSHASGTPLVLLNLSSNWERSILKNEKLLLTTRKKNDPVTIFHGSKAPNLSVTHYMERILKYSHCSPSCFVIAQIYMDRFFQKKGGYLTSFNAHRLLITSVMVAVKFLDDKYYSNAYYAKVGGVSTEEMNRMELEFLFNLEFRLFVTTELFLKYCEKLG

SEQ ID NO: 5332 - protein, 150 aa, Brassica napus
  misc_feature (65)..(65): Xaa can be any naturally occurring amino acid
DLSLIPGAASKSAKKQNRDNTNTELWFEDLAQLSLPIFRTVILSMRSEDLSSDVIESCLISYAKXHIPGILRSNRKPSSSSSTAASENEQREILETITSNLPLDKSSISATTRFLFGLLRTAIILNASETCRDLLERKIGSQLERASLDD

SEQ ID NO: 5333 - protein, 259 aa, Echinochloa crus-galli var. formosensis
AGPIFNDYSSVGYSFLLKKDKAIIVQPERVIVGNGPAFGCVMMKEFLSELAKRLKKNTTAYENYKRIFVPEGSPLESEPNEPLRVNVLFKHIQKMLTGDSAVIAETGDSWFNCQKLKLPEGCGYEFQMQYGSIGWSVGALLGYAQGANDKRVIACIGDGSFQVTAQDVSTMLRCAQNSIIFLINNGGYTIEVEIHDGPYNVIKNWNYTGLVDAIHNGEGKCWTSKVKCEEELTAAIETALGEKKDCLCFIEVIVHKDDT

SEQ ID NO: 5334 - protein, 208 aa, Oryza sativa (japonica cultivar-group)
MSSSVLLFLVALLLSCSTMGNAARRLEVEYPAAHPAVPELPKPELPPHPVVPELPKHEEPPPHPHPAVPELPKPELPPPHPAVPELPKHEEPPHPVVPELPKPEVPHPAVPELPKHEEPPHPVVPELPKHEEPPHPVVPELPKPEVPHPAVPELPKHEEPPHPVVPELPKPEVPHPVVPELPKPEVPHPTVPEHEQPPKPESHYPEKP

SEQ ID NO: 5335 - protein, 294 aa, Fremyella diplosiphon
MYRHLSEGIEDHREQEQKVENAANIQDDNQLTVEQAIANLQGEDLGLRVYAAWWLGRFRVDAPEAIDVLIQALEDEDDRTNVGGYPLRRNAARALGKLGEKRAVPALIKALECSDFYVREAAAQSLEMLGDSSSIPRLIELLNDQVPGTLPAPEPPQLTQPFDAIIEALGTLGASDAIPIIQEFLEHTVPRIQYAAARAMYQLTSESTAGYNQYGDRLVQALAQDDLQLRRAVLSDLGAIGYLPAAEAIADTLAENSLKLISLKGLLEKQFQPTKPEDLSPGAIKVMQLMDALL

SEQ ID NO: 5336 - protein, 316 aa, Vibrio vulnificus YJ016
MSNKLEQLRKLTTVVADTGEIDAIKKYQPEDATTNPSLILKAAQIAEYAPLIDASIEYAKTQSDDKAQQIQDTCDMLAVNIGKEILKTIPGRISTEVDARLSYDMEGSVAKARQLVKMYNDAGITNDRILIKLASTWEGIRAAEILEKEGINCNLTLLFSFAQARACAEAGVFLISPFVGRIMDWYKAKEGRDFEAQEDPGVLSVTKIYNYYKEYGYKTVVMGASFRNIGEILELAGCDRLTIAPALLAELEAAEGEVVEKLVDSKGAAERPAPMTHAEFLWEHNQDPMAVEKLAEGIRNFAVDQGKLEAMIAAKL

SEQ ID NO: 5337 - protein, 600 aa, Glycine max
MWKVVRFAAARSRRFSTAIPGPCKVHKRGTDILHDPWFNKDTGFPLTERDRLGLRGLLPPRVISFEHQYDRFMNSHSALEKNTQGQSDRFVSLSKWRILNRLHDRNETLYYRVLIDNIKEFAPIIYTPTVGLVCQNYSGLFRRPRGMYFSAKDKGEMMSMIYNWPAHEVDMIVLTDGSRILGLGDLGVQGIGIPIGKLDVYVAAAGINPQRILPVMLDVGTNNQKLLEDRLYLGLRQPRLEGEEYLSIVDEFMEAVHARWPKAIVQFEDFQMKWAFETLKRYQKKFCMFNDDIQGTAGVALAGLLGTVRAQGRPLTDFVKQKIVVVGAGSAGLGVLSMAVQAVARMSGCSELAAKSQFYLIDKDGLVTTERNSLDPAAAPFAKNPRDLEGLSEGASIIEVVKKVKPHVLLGLSGVGGVFNAEVLKAMRESVSTKPAIFAMSNPTMNAECTAIEAFSHAGENIVFASGSPFENVDLGNGEVGHVNQANNMYLFPGIGLGTLLSGARHITDGMLRAAAECLASYMTEDDVRKGILYPSIDCIRDVTAEVGAAVVCAAVAEKQAEGHGDVGFKELENMSKEETVEYVRGNMWYPEYCPLVHEK

SEQ ID NO: 5338 - protein, 155 aa, Glycine max
  misc_feature (29)..(29): Xaa can be any naturally occurring amino acid
  misc_feature (57)..(57): Xaa can be any naturally occurring amino acid
FTSPFHISYVECATLLDRIFSYSVSVPSXSVAATTHVPHLIHHAEITLTSLNVHRLXIPSIMLAAKFIDDAFYNNAYYAKVGGVSTSELNRFEMSFLFGIDFRLQVGVDTFGGYCRQLEKEAAEVVQIERPMQACRIKESWSNKDDPTCASTIAR

SEQ ID NO: 5339 - protein, 505 aa, Zea mays
MASPAMVPLRQLFVDGEWRPPAQGRRLPVVNPTTEAHIGEIPAGTAEDVDAAVAAARAALKRNRGRDWARAPGAVRAKYLRAIAAKVIERKPELAKLEALDCGKPYDEAAWDMDDVAGCFEYFADQAEALDKRQNSPVSLPMETFKCHLRREPIGVVGLITPWNYPLLMATWKIAPALAAGCTAVLKPSELASVTCLELADICKEVGLPSGVLNIVTGLGPDAGAPLSAHPDVDKVAFTGSFETGKKIMASAAPMVKPVTLELGGKSPIVVFDDVDIDKAVEWTLFGCFWTNGQICSATSRLLIHTKIAKKFNERMVAWAKNIKVSDPLEEGCRLGPVVSEGQYEKIKKFISNAKSQGATILTGGVRPAHLEKGFFIEPTIITDITTSMEIWREEVFGPVLCVKEFSTEDEAIELANDTQYGLAGAVISGDRERCQRLSEEIDAGCIWVNCSQPCFCQAPWGGNKRSGFGRELGEGGIDNYLSVKQVTEYISDEPWGWYQSPSKL

SEQ ID NO: 5340 - protein, 447 aa, Bacteroides thetaiotaomicron VPI-5482
MKKEYLIYKLSEEMKEATRIDNELFPKFDVKRGLRNEDGTGVLVGLTKIGNVVGYERIPGGGLKPIPGKLFYRGYDVEDISHAIIKEKRFGFEEVAYLLLSGRLPDKEELASFRELINDNMALEQKTKMNIIELEGNNIMNILSRSVLEMYRFDPDADDTSRDNLMRQSIDLISKFPTIIAYAYNMLRHATFGRSLHIRHPQEKLSIAENFLYMLKKDYTELDARTLDLLLILQAEHGGGNNSTFTVRVTSSTGTDTYSAIAAGIGSLKGPLHGGANIQVADMFHHLQENIKDWKSVDEIDTYFTRMLNKEVYNKTGLIYGIGHAVYTISDPRALLLKELARDLAREKGKEEEFAFLELLEERAIATFGRVKNNGKTVSSNIDFYSGFVYEMIGLPQEIFTPLFAMARIVGWCAHRNEELNFEGKRIIRPAYKNVLDDLAYIPIKKR

SEQ ID NO: 5341 - protein, 396 aa, Bacteroides thetaiotaomicron VPI-5482
MNKITMQKDGTLSVPDVPVVPYITGDGVGAEVTPSMQSVVNAAVQKAYGGKRRIEWKEVLAGERAFNETGSWLPDETMKAFQEYLIGIKGPLTTPVGGGIRSLNVALRQTLDLYVCLRPVRWYQGVHSPVKAPEKVNMCVFRENTEDIYAGIEWEAGTPEAEKFYQFLKNEMGVTKVRFPETSSFGVKPVSREGTERLVRAACQYALDHHLPSVTLVHKGNIMKFTEGGFKKWGYELAQREFGDALADGRLVIKDCIADAFLQNTLLIPEEYSVIATLNLNGDYVSDQLAAMVGGIGIAPGANINYKTGHAIFEATHGTAPNIAGKDVVNPCSIILSAVMMLEYLGWKEAAALIEKALEQSFLDARATHDLARFMPGGTSLSTTAFTREIVERIEK

SEQ ID NO: 5342 - protein, 488 aa, Zea mays
  misc_feature (47)..(47): Xaa can be any naturally occurring amino acid
MAPPQTIPRRGLFIGGAWREPCLGRRLPVVNPATEATIGDIPAGTAXRHWSRAPGAVRANFLRAIAAKIKDRKSELALLETLDSGKPLDEASGDMDDVAACFEYYADLAEALDGKQQSPISLPMENFKSYVLKEPIGVVGLITPWNYPLLMATWKVAPALAAGCTTILKPSELASVSCLELGAICMEIGLPPGVLNIITGLGPEAGAPLSSHSHVDKVAFTGSTETGKRIMISAAQMVKPVSLELGGKSPLIVFDDIGDIDKAVEWTMFGIFANAGQVCSATSRLLLHEKIAKKFLDRLVAWAKNIKVSDPLEEGCRLGSVISEGQYEKIKKFISTARSEGATILYGGGRPQHLRRGFFLEPTIITDVSTSMQIWQEEVFGPVICVKEFRTESEAVELANDTHYGLAGAVISNDQERCERISKALHSGIIWINCSQPCFVQAPWGGNKRSGFGRELGEWGLDNYLTVKQVTKYCSDEPWGWYQPPSKL

SEQ ID NO: 5343 - protein, 368 aa, Triticum aestivum
MALASPVDYAGIITSSQRQLSSVMPRCNGLQCTIGYGNKSRATGHLVVRAMSMDRPKLDFSNPNWKNQFQEDFDRRFSLPHLTDIIDVESRPAPFSLKSRTPLENVDGSLEESWNGYVNDDDRALLKVIKFASPTSAGAECIDPDCSWVEQWVHRAGPRKQIYFEPQCVKAGIVTCGGLCPGLNDVIRQIVLTLEKYGVKNIVGIQHGFRGFFEDHLAEVPLNRHVVQNINLAGGGASISDIVDSIQARRLDMLFVLGGNGTHAGADAIHGECRKRKLKVSIIGVPKTIDNDILLMDKTFGFDTAVEAAQRAINSAYIEAHSAFHGIGLVKLMGRSSGFITMHASLSSGQVDICLIPEVPFTLDGPNG

SEQ ID NO: 5344 - protein, 159 aa, Zea mays
LANAAAFPMVLKAALELGVFDTLYAEASRSDSFLSPSEIASKLPTTPRNPEAPVLLDRMLRLLASYSVVKCGKVSEGKGERVYRAEPICRFFLKDNIQDIGSLASQVIVNFDSVFLNTWAQLKDVVLEGGDAFGRAHGGMKLFDYMGTDERFSKLFNQT

SEQ ID NO: 5345 - protein, 156 aa, Neurospora crassa
MGKITKFGDEGEEVTMKETPTSHQPEAQDDVSMADAGEEGEEGDEEYEEGEGTKVRLLPGSTPTAASFEFLDENHTLGNALRYVIMKNPDVEFCAYAIPHPSEAKMNVRIQTYEGTTAVEALRKGLRDIQDLCDVVSDKFLEARKDFTDKKAAASA

SEQ ID NO: 5346 - protein, 54 aa, Brassica napus
FGAQATMICIDNSEWMRNGDYSPSRLQAQTEAVNLLCVAKTQSNPENTVGILTM

SEQ ID NO: 5347 - protein, 340 aa, Bacillus cereus ATCC 10987
MKAAVWYGERDIRIEERETKELQPNDVKVKVAWAGICGSDLHAYLHPGSVPINMNTVMGHEFSGEIAEVGSHVTKFKKGDRVCIYPMMLKDPSNAEIERFITLDAVGAQIDGGFAEYVILPQKTIFKIPDHLPLELAAMVEPAAVSFQSIKDSNVREGDTVVVYGAGPIGLFAVLGAKAAGASNIIVIDLFDSRLDKATEMGATHVFNAKEVNPVEEIRKLFPGGADVAIEAAGVESTFNQAIQSTKVRGTMMVISFHTQDIQFNVPASLIFSGAKLMGSVGYSNETYNEVIELFANGRLPAQSIITSKIDIDNIAEQGFEALIHDKSQAKILVKLSGAH

SEQ ID NO: 5348 - protein, 179 aa, Fritillaria agrestis
MASSATMLSSVATAACVAPAQASMVAPFVGLKSASAFPVTQKTVTGLSTLPSNGGRVQCMKVWPIVGLKKFETLSYLPTLSVESLLKQIEYLIRNGWVPCLEFSLEGFVSRDNNKSPGYYDGRYWTMWKLPMFGCTDAAQVVKEAAECKKEYPAAFIRVIGFDNVRQVQCVSFIVEKPE

SEQ ID NO: 5349 - protein, 444 aa, Triticum aestivum
  misc_feature (308)..(308): Xaa can be any naturally occurring amino acid
VLESRDRIGGRVHTDYSFGCPIDMGASWLHGVSNENSLAPLISHLGLRLYHTSGDNSVLYDHDLESCSLFDKNGLAVPMETAAKVGVIFEKILKETVKLRDEQEHDMPLEQAISMVLERHPDLKLEGLDDRILQWCVCRLEAWFAADADEISLKNWDQEHVLTGGHGLMVDGYFPVIQALAQGLDIRLNQRVKKIARQQKGVTVTIEDGTQYSADACIITVPLGVLKANIIKFEPELPSWKSSAIADLGVGIENKVAMHFDKAFWPNVQVLGMVGPTPKTCGYFLNLHKATGHPVLVFMAASPARRFXAQDVEKLSDKEAVELVMCHLRKMIPDATEPSQYLVSRWGSDPNSLGSYSCDLVGKPSDVCERFSAPVESVLYFAGEAASAEHSGAVHGAYSSGMDAAEECRRRLLMRKGVPDLVQVGAAACEEMADVVAPLQICRT

SEQ ID NO: 5350 - protein, 297 aa, Thermoanaerobacter tengcongensis MB4
MILKLEVGVGLKNLNGKWGLDSSKEFYWEPDVEGGYRVYKVKSVIIEHQSLYQKIDIVELETWGKSLFLDGSLQSTESDEFIYHELLVHPAMRVHPSPKRVLICGVGEGKSVREVLKYPTVKEVIGVDIDKEVVALCQKHLGKTPIDDKRVRLVYQDVAEFIKNYRGEPFDVAIVDVTDDLDGPARSVHQLDFYKRLYEILGEKATVVVQGTSAFSKVKNVGFCHIYEILKEVFPFVIPYADYIPSFSDLWTFFVALKGIKDLTPRHEIPRDLKYYDEYTNERIFTLAKPLREKLGV

SEQ ID NO: 5351 - protein, 292 aa, Saccharomyces cerevisiae
TLVHVASVEKGRSYEDFQKVYNAIALKLREDDEYDNYIGYGPVLVRLAWHISGTWDKHDNTGGSYGGTYRFKKQFNDPSNAGLQNGFKFLEPIHKEFPWISSGDLFSLGGVTAVQEMQGPKIPWRCGRVDTPEDTTPDNGRLPDADKDAGYVRTFFQRLNMNDREVVALMGAGALGKTHLKNSGYEGPWGAANNVFTNEFYLNLLNEDWKLEKNDANNEQWDSKSGYMMLPTDYSLIQDPKYLSIVKEYANDQDKFFKDFSKAFEKLLENGITFPKDAPSPFIFKTLEEQGL

SEQ ID NO: 5352 - protein, 316 aa, Bacillus cereus ATCC 10987
MKNRVNPVLLPGLEMYPDQDLRPECLPTMREEASKVFPPTIIDETLSVTNEVIEGPDANPLRLKIYRPKSNNESLPALLWIHGGGYILGSINDNDDLAVKIAKEANCMVVSVDYRLAPEHPYPAPIEDCYAALKWIADNAETLNIDSNRIGVAGVSAGGGLTAALTLLARDRQYPSICFQMPLYPMIDDRNNTPSANEIKKGFVWNQKSNEAGWKMYLGKLHGTDHIPAYAAAARAEDYRNLPRTYTCVGQLDPFRSETLTYVTKLAEAGVDVEFHLYPGAYHGFEMMHPDADISVHAWNDYVRAVKTGFAKKELR

SEQ ID NO: 5353 - protein, 211 aa, Zea mays
RRGKGRLQAALSEMWQLEAASRATMNNGTEEGLGDSSEVLFPQELQMEVDRQPAPANVPPARRRGDQMVPTMTTSSLNRAGTEVSADLVVANSEEEDTRAQVPFHAHLHLHPRAEAPPAARRTNNGARQHDAFQQPRNHRRDALLAPSASEASSSWTGREGAVVPVWSPPAASGHSDAFAADEADVSSRSYLGRHPQSHRLMNWSQLSQSS

SEQ ID NO: 5354 - protein, 128 aa, Methylobacillus flagellatus KT
MALSKAEILDAIASLTVLELSELIKDLEEKFGVSAAAAAVAVAAPAAGGGDAGAAAAEKTEFDVILASAGDNKVNVIKAVRELTSLGLKEAKDLVDAAPKAIKEGVSKADAEAAAKKLEEAGAKAEIK

SEQ ID NO: 5355 - protein, 292 aa, Saccharomyces cerevisiae
TLVHVASVEKGRSYEDFQKVYNAIALKLREDDEYDNYIGYGPVLVRLAWHISGTWDKHDNTGGSYGGTYRFKKEFNDPSNAGLQNGFKFLEPIHKEFPWISSGDLFSLGGVTAVQEMQGPKIPWRCGRVDTPEDTTPDNGRLPDADKDAGYVRTFFQRLNMNDREVVALMGAGALGKTHLKNSGYEGPWGAANNVFTNEFYLNLLNEDWKLEKNDANNEQWDSKSGYMMLPTDYSLIQDPKYLSIVKEYANDQDKFFKDFSKAFEKLLENGITFPKDAPSPFIFKTLEEQGL

SEQ ID NO: 5356 - protein, 256 aa, Arabidopsis thaliana
MEGITHPIPRTVEEVFSDFRGRRAGLIKALTNDMVKFYQTCDPEKENLCLYGLPNETWEVNLPVEEVPPELPEPALGINFARDGMQEKDWVSLVAVHSDSWLLSVAFYFGARFGFGKNERKRLFQMINELPTIFEVVSGNAKQSKDLSVNNNNSKSKPSGVKSRQSESLSKVAKMSSPPPKEEEEEEDESEDESEDDEQGAVCGACGDNYGTDEFWICCDACEKWFHGKCVKITPAKAEHIKHYKCPTCSNKRARP

SEQ ID NO: 5357 - protein, 331 aa, Arabidopsis thaliana
MSNVIGDRTEDGLSTAAASGSTAVQSSPPTDRPVRVYADGIYDLFHFGHARSLEQAKLAFPNNTYLLVGCCNDETTHKYKGRTVMTAEERYESLRHCKWVDEVIPDAPWVVNQEFLDKHQIDYVAHDSLPYAHSSGRGKDVYEFVKKVGRFKETQRTEGISTSDIIMRIVKDYNQYVMRNLDRGYSREDLGVSFVKEKRLRVNMRLKKLQERVKEQQERVGEKIQTVKMLRNEWVENADRWVPGFLEIFEEGSHKMGTAIVDQYPRKVNEAKSAERLENGQDDDTDDQFYEEYFDHDMGSDDDEGEKFYDEEEVKEEETEKTVMTDAKDNK

SEQ ID NO: 5358 - protein, 296 aa, Saccharomyces cerevisiae
MITTPLVHVASVEKGRSYEDFQKVYNAIALKLREDDEYDNYIGYGPVLVRLAWHISGTWDKHDNTGGSYGGTYRFKKEFNDPSNAGLQNGFKFLEPIHKEFPWISSGDLFSLGGVTAVQEMQGPKIPWRCGRVDTPEDTTPDNGRLPDADKDAGYVRTFFQRLNMNDREVVALMGAHALGKTHLKNSGYEGPWGAANNVFTNEFYLNLLNEDWKLEKNDANNEQWDSKSGYIMLPTDYSLIQDPKYLSIVKEYANDQDKFFKDFSKAFEKLLENGITFPKDAPSPFIFKTLEEQGL

SEQ ID NO: 5359 - protein, 449 aa, Xanthomonas campestris pv. campestris str. ATCC 33913
MSRTVIVNARLVNEGKEFDADLLIEGGRIARIDSHIAPAAGDTVVDAAGRWLLPGMIDDQVHFREPGLTHKGDIATESGAAVAGGLTSFMDMPNTNPPTLNADALQAKYDAAAGRAWANYGFYMGASNDNLAHIQSLDPKTAPGIKVFMGASTGNMLVDNPETLDAIFRDAPTPIITHCEDTPTIDATMAAYKEKYGDALTAEMHPDIRSREACLKSSQLAVSLARKHNTRLHVLHISTADELMLFEAGPLVDADGKVRKRITAETCIHFLRFDRSDYARLGNLIKCNPAIKDPEDRLALIEALAEDVIDVLATDHAPHTWDEKQKPYAQAPSGLPLVQYALVAALELVHEGKLPITRVVQKFAHAPAQLFDVEQRGFLREGYFADLVLIDNRPFTVKREQVLSKCGWSPFEGTTFRSRIAATWVNGQQVWDGEQLVGSAAGQRLTFDR

SEQ ID NO: 5360 - protein, 251 aa, Neurospora crassa
MTEGPAYSKKVVVVGDGGCGKTCLLISYSQGYFPEKYVPTVFENYITYPTHPPTGKTVELALWDTAGQEEYDRLRPLSYPETDLIFVCFAIDCPNSLENVMDKWYPEVLHFCPYTPLILVGLKSDLRNKKTCIDMLKTQGLTPVTTEQGLAVAKKMGAQYMECSSKEMKGVEEIFEQAILTVVANDRKTLEQEAANGMLGVGAGSGSGKGSGISFSSGDKAGSGIGPVKAAGVGGTIVPKTRKKKRKCGMM

SEQ ID NO: 5361 - protein, 124 aa, Cucumis sativus
GRGQFGTTFLCLEKSTGKEYACKSIAKRKLATMEDVEDVRREIQIMHHLVGIPSIVSIKGAYEDAVAVHVVMELCEGGELFDRIVKLGHYTERQAAELARTVIGVIEACNSLGVMHSDLKPENF

SEQ ID NO: 5362 - protein, 208 aa, Triticum aestivum
HELGLTFSNEAGTLPPCGTGGQCCIWQFNFRGFNPHTDPYSPDSIDLLRRSGIDFDLFAVEGVDSTRFAELMMSSGIVLNDDVQWVTFHGSHDFGYLLRLLTGREMPNTLDEFLKLTKIFFPVMYDVKHLMKFCGPGLYGGLSRLGKLLKVERVGTGHQAGSDCLLTLQCFMKLKQLYLKESVKLYDGLLFGLIPGEVEIKTAPPPIG

SEQ ID NO: 5363 - protein, 199 aa, Methylobacillus flagellatus KT
MMTLYSGTTCPYSHRCRIVLFEKGMDFQVIDVDMANKPEDLAVINPHNTVPVLVERDLVLEQANIINEYIDERFPHPQLMPADPVMRARARLFLHNFEEQLFNHVADIETGSAKAADKARATIRDNLTQIVPLFSRQEYILGDEFSMLDVAIAPLLWRLGHYGIELPKQAAPLLKYAERIFSRPAYIEAMTPSEKAMRK

SEQ ID NO: 5364 - protein, 212 aa, Saccharum officinarum
HEGQPLESEPNEPLRVNVLFKHVQKMLTGDSAVIAETGDSWFNCQKLKLPEGCGYEFQMQYGSIGWSVGALLGYAQGANNKRVIACIGDGSFQVTAQDVSTMLRCEQNSIIFLINNGGYTIEVEIHDGPYNVIKNWNYTGLVDAIHNGEGKCWTSKVKCEEELTAAIETALGEKKDCLCFIEVIAHKDDTSKELLEWGSRVSAANSRPPNPQ

SEQ ID NO: 5365 - protein, 440 aa, Glycine max
MGVCGSRPKVNEEDLSSKKKNNNNNNHRRRRRRILRRRVSSRKIEANNVSHSNSALQASNRASDAAWFDSTSALDSECDDEFYSVYDGEVSTGHADEIGEDRKLSLDHCGILPNNCLPCLTSNAIAVEKRRPMSPDTPSSRRKSLSKLSFKWREGSSDMTLLSPKAFKQKHLAGSSVPFCPLEKQTPGSWSQIEPSSFRVRGKNYLRDKKKEFASSSAAFYPLGADLFLSSRKIDHIARFIQIPSINIPGDAPSILIVNIQIPLYPAAIFQSENDGEGMNVVLYFKLSEKYSKDLPDQFRESISKLINDEVERVKGFPLDTIAPFRERLKILGRVANLENLSLSTTEKKLMNAYNEKPVLSRPQHEFFLGENYLEIDLDVHRFSYIARKGFEGFIERLKLCNLDFGLTIQGNKAEDLPEHLLCAIRLNKLDYSNFNQFGF

SEQ ID NO: 5366 - protein, 415 aa, Gibberella zeae PH-1
MALTAAQVAIVKSTAPILKEHGKTITTTFYRNMLGAHPELKNYFSLRNQQTGAQQAALANSVLAYATYIDDLGKLSHAVERIAQKHVSLFIKAEHYPIVGTHLIGAIGEVLGSALTTEIKDAWVAAYGQLADIFIQREGQLYDAAGEWNSWRKFKIAKKEAENDSVTSFYLEPLDDKPLPKFLPGQYVSLQIPIPELDGLLQSRQFSLSEAPGSNHYRISVKLQGPEEEPSLEDLSAGKIPGLVCTRLHKRYNVGDEVELSPPAGEFFLNPADTSAAKKPLVLLSAGVGATPLVSILDSVLESETASRPITWIHGARYSGSTCFVPHVLDSAKKHDNITAKIFLEDVKEGDQYDFKGEIDLDQLQKDKLLQLDSSDAEYFICGPEDWMVKVRAFLEENGVPRERQHLELFKTGDV

SEQ ID NO: 5367 - protein, 462 aa, Listeria monocytogenes
MFKTNVEQNNVPVFGSFESGQDLPEKRMNKESVDPRIAYQLVKDQLIDEGSARQNLATFCQTYMEPEAEQIMAETMEKNAIDKSEYPQTAKLESSCVNMLADLWNVDESEHYMGTSTVGSSEACMLGGMAMKFRWRSAALKNGLDIHAKKPNLVISSGYQVCWEKFCVYWDIELREVPMSEEHLSINTDIIMDYVDEYTIGIVGILGITYTGKFDDIMTLNDLVEDYNNTHDNEVVIHVDGASGAMFTPFVEPGLEWDFRLPNVVSINTSGHKYGLVYPGVGWILWRDKEYLPEELVFDVSYLGGHMPTMAINFSRSASQIIGQYYNFLRFGYEGYRQIHMRTRDGALQLSQAVAETGLFEIYNDGANLPIVCYKLKDDANVAWTLYDLADRLQMKGWQVPAYPLPKEMGNTIIQRYVCRGDLGQNMVTAFKNDLSESIEELNNAHILYHDVNTSKTHGFTH

SEQ ID NO: 5368 - protein, 657 aa, Zea mays
  misc_feature (290)..(290): Xaa can be any naturally occurring amino acid
MASVSVVLLQRSSSRVRGYIRLQRIASSSVTLVLEGEGHWWWSNSRGRDERFGARTVHHMAGSVEGENGGVPAGGQVAMAPGVVTGGVEDAYGEDRATEDQTVTPWAVCIASGHSLLRDPRHNKGLSFTEKERDTHYLRGLLPPVVLSQDLQEKRMLQNVRQFQVPLQRYTALMDLQERNERLFYKLLIDNVEELLPVVYTPTVGEACQKYGSIFRRPQGLYISLKEKGRILEVLRNWTEKSIQVIVVTDGERILGLGDLGCQGMGIPVGKLALYTALGGVRPSAVSFNXCLPITIDVGTNNEDLLKDEFYIGLKQRRATGQEYSEFLDEFMAAVRQNYGQKVLVQFEDFANHNAFTLLEKYRTNHLVFNDDIQGTAAVVLAGIIAALKSVGGTLADHTFLFFGAGEAGTGIAELVALEISRQANVSVEEARKKIWLVDSKGLIVASREETLQPFKKRYAHEHEPVKDLLGAVKAIRPTALIGSAGVGQSFTKEVIEVMSSINERPIVLALSNPTSQSECTAEQAYTWSQGRAIFGSGSPFDPVKYNDKLFVPAQANNAYIFPGFGLGVVISGAVRVSDDMVLAAAEALAEQVTPEHIEKGLIYPPFSIIRKISANIAAHVAAKAYDLGMATQLPRPKDLVKYAESCMYSPVYRSYR

SEQ ID NO: 5369 - protein, 581 aa, Triticum aestivum
MCGILAVLGCGDESQGKRVHVLELSRRLKHRGPDWSGLHQVADNYLCHQRLAIIDPASGDQPLYNEDKSIAVAVNGEVYNHEELRARLSGHRFRTGSDCEVIAHLYEEYGESFIDMLDGVFSFVLLDARDNSFIAARDAIGVTPLYIGWGIDGSVWISSEMKGLNDDCEHFEIFPPGNLYSSKEKSFKRWYNPPWFSEVIPSVPYDPLRLRSAFEKAVIKRLMTDVPFGVLLSGGLDSSLVAAVAARHFAGTKAAKRWGTRLHSFCVGLEGSPDLKAAKEVADHLGTVHHEFNFTVQDGIDAIEDVIYHIETYDVTTIRASTLMFQMSRKIKALGVKMVISGEGADEIFGGYLYFHKAPNKEEFHQETCRKIKALHQYDCLRANKATSAWGLEVRVPFLDKEFINEAMSIDPEWKMIRPDLGRIEKWILRKAFDDEERPFLPKHILYRQKEQFSDGVGYSWIDGLKDHAASNVSDKMMSNAKFIYPHNTPTTKEAYYYRMIFERYFPQSSAILTVPGGPSVACSTAKAIEWDAQWSGNLDPSGRAALGVHLSAYEQDTVAVGGSNKPGVMNTVVPGVAIET

SEQ ID NO: 5370 - protein, 268 aa, Kineococcus radiotolerans SRS30216
MTLHDGVGIPQLGFGVWQVPPEQTAEVVLRALQAGYRHIDTAAGYGNEAGVGDALRASQIPREDVFITTKLANSEHGRDKTLAAFDASMAKLGLDYLDLYLIHWPLQADDYVETWKAFEEIKASGRVRTIGVSNFQKTHLRKLLDETGTVPTVNQVEVHPYLVQEDLRSFHAEHGIATEAWSPLAQRAGLVEDPVVTGIAEQLGRTPAQVVIRWHLQQGNVVIPKSVTPERIVSNIDVFGFELPPEQVDALTGLDRAERTGPDPDVLG

SEQ ID NO: 5371 - protein, 464 aa, Listeria monocytogenes
MLYSKENKESYLEPVFGSSAEDRDIPKYTLGKEPLEPRIAYRLVKDELLDEGSARQNLATFCQTYMEDEATKLMSETLEKNAIDKSEYPRTPELENRCVNIIADLWHAPKDQKFMGTSTIGSSDACMLGGMAMKFAWRKRAEKLGLDIYAKKPNLVISSGYQVCWEKFCVYWDIDMRVVPMDKEHMQLNTDQVLDYVDEYTIGVVGILGITYTGRYDDIYALNEKLEEYNSKTDYKVYIHVDAASGGFFTPFVEPDIIWDFRLKNVISINTSGHKYGLVYPGIGWVLWKDESYLPEELIFKVSYLGGEMPTMQINFSRSASHIIGQYYNFLRYGFEGYRTIHQKTSDVAQYLAHAVEQTGYFDIFNDGSHLPIVCYKLKTTANVNWTLYDLADRLQMRGWQVPAYPLPKSLENIIIQRYVCRADLGFNMAEEFIQDFQASIQELNNAHILFHDTQQSGVHGFTH

SEQ ID NO: 5372 - protein, 179 aa, Fritillaria agrestis
MASSATMLSSVATAARAAPAQASMVAPFVGLKSASAFPVTQKPATGLSTLPSNGGRVQCMKVWPIVGLKKFETLSYLPTLSVESLLKQIEYLIRNGWVPCLEFSLEGFVSRDNNKSPGYYDGRYWTMWKLPMFGCTDAAQVVKEAAECKKEYPAAFIRVIGFDNVRQVQCVSFIVEKPE

SEQ ID NO: 5373 - protein, 228 aa, Arabidopsis thaliana
MGRGKIVIQRIDDSTSRQVTFSKRRKGLIKKAKELAILCDAEVGLIIFSSTGKLYDFASSSMKSVIDRYNKSKIEQQQLLNPASEVKFWQREAAVLRQELHALQENHRQMMGEQLNGLSVNELNSLENQIEISLRGIRMRKEQLLTQEIQELSQKRNLIHQENLDLSRKVQRIHQENVELYKKAYMANTNGFTHREVAVADDESHTQIRLQLSQPEHSDYDTPPRANE

SEQ ID NO: 5374 - protein, 247 aa, Galdieria partita
MVASKTDLEQKVRSRLVKLFEQTPCMPIMVRLAWHDAGTYDAQTGTGGVNGSIRFDPELRHGANNGLKIALDLLEPIKKEYPDIGYADLFQLASVTAIEFAKGPKIPFRMGRKDATGPDACPEEGRLPNAEDHMSQLRRTFHRMGLSDKDITVLSGAHTLGRCHKERSGYEGPWTHQPLEFDNSYFVEILKPNPDPGLIRLASDLSLLDDSYTRSLVETYAENKDIFFKDYTESHHKLSELGAVWEY

SEQ ID NO: 5375 - protein, 137 aa, Triticum aestivum
  misc_feature (57)..(57): Xaa can be any naturally occurring amino acid
  misc_feature (119)..(119): Xaa can be any naturally occurring amino acid
MAHPDRHHFQTKGESGGTNIYPEDGCGILQGELIFIQSRHCQADDDSTSYTGKLGHXRVTFAGLDIFTGKKLEDIVPSSHYCDVPHVDRPDYQLTDILDDGYASLLTDSGNTNDDLKLXNDDALLDQIKSGLADGKD

SEQ ID NO: 5376 - protein, 65 aa, Triticum aestivum
ARLISRRGLAGAADGHGSAKVPLWKDPLSPSKWKEEHFVLASLSMWGVIFYGGYKLFKWKEGSQD

SEQ ID NO: 5377 - protein, 505 aa, Triticum aestivum
  misc_feature (204)..(204): Xaa can be any naturally occurring amino acid
  misc_feature (219)..(219): Xaa can be any naturally occurring amino acid
  misc_feature (379)..(379): Xaa can be any naturally occurring amino acid
MSTCAASLAPLLGTAAANATDYLCNQFADTTTAIDSTYLLFSAYLVFAMQLGFAMLCAGSVRAKNTMNIMLTNVLDAAAGALFYYLFGFAFAFGTPSNGFIGKHFFGLRDVPQVGFDYSFFLFQWAFAIAAAGITSGSIAERTQFVAYLIYSAFLTGFVYPVVSHWIWSADGWASASRTSGPLLFNSGVIDFAGSGVVHMVGGXGRALGRAHRGPPHWXRFDHAGRAVALRGHSASLVVLGTFLLWFGWYGFNPGSFLTILKSYGPPGSIHGQWSAVGRAAVTTTLAGSTAALTTLFGKRLQTGHWNVLDVCNGLLGGFAAVTAGCSVVDPWAAIICGFVSAWVLIGLNKLAARFKFDDPLEAAQLHGGCGAWGVIFTXALFARREYVEQIYGAPGRPYGLFMGGGGRLLGAHVVLILVIAAWVSCTMGPLFLALNKLGLLRISAEDQMAGMDQTRHGGFAYAYTDEDSSSRPGRGAGGSVGGFMLKSAQTSQVAADATSPSSSV

SEQ ID NO: 5378 - protein, 99 aa, Zea mays
  misc_feature (90)..(90): Xaa can be any naturally occurring amino acid
FIRHECAAAGDYCSAGVTHQSVGDRVKLEPVISCWRCRHCKGGRYNLCEDMKFFVTPPVHRSLANQEVHPADLCFKLPYRVSLQEGAMCXPLSVGFHAC

SEQ ID NO: 5379 - protein, 221 aa, Saccharomyces cerevisiae
MRANVDFLNPIQLGLSLSDANGNKPDNGPSTWQFNFEFDPKKEIMSTESLELLRKSGINFEKHENLGIDVFEFSQLLMDSGLMMDDSVTWITYHAAYDLGFLINILMNDSMPNNKEDFEWWVHQYMPNFYDLNLVYKIIQEFKNPQLQQSSQQQQQQQYSLTTLADELGLPRFSIFTTTGGQSLLMLLSFCQLSKLSMHKFPNGTDFAKYQGVIYGIDGDQ

SEQ ID NO: 5380 - protein, 364 aa, Populus tremuloides
MGSTGETQMSPAQILDEEANFALQLISSSVLPMVLKTAIELDLLEIMAKAGPGALLPPSDIASHLPTKNPNAPVMLDRILRLLASYSILICSLRDLPDGKVERLYGLASVCKFLTRNEDGVSVSPLCLMNQDKVLMESWYHLKDAILEGGIPFNKAYGMTAFEYHGTDPRFNKVFNKGMSVHSKMAMKKILETYKGFEGLASLVDVGGGTGAVVSTIVSKYPSIKGINFDLPHVIADAPAFPGVENVGGDMFVSVPKADAVFMKWICHDWSDEHCLTFLKNCYDALPENGKVILVECILPVAPDTSLATKGVMHVDVIMLAHNPGGKERTDREFESLARGAGFKGFEVMCCAFNTHVIEFRKKA

SEQ ID NO: 5381 - protein, 182 aa, Thermococcus kodakaraensis
MKRPLPLLLALLVATAGCMSEGGVKMEKTLEVGSVFHDGEFIPKEYTCEGDDTNPPIYIGNIPAEAKSLVIIVDDPDAPAGTFTHWIAWNIPPVGEIPSWVPRKPETDEPFHIVQGKNDFGRIGYNGPCPPRGHGVHHYHFKVYALDTELKLEPGSSRKELEKAMEGHVIAWGEVVGLYERK

SEQ ID NO: 5382 - protein, 501 aa, Oryza sativa (japonica cultivar-group)
MGNCCPGSGDAEPASSDASTGNGSSSFKAGASPSSAPAQNKPPAPIGPVLGRPMEDVRSIYTIGKELGRGQFGVTSLCTHKATGQKFACKTIAKRKLSTKEDVEDVRREVQIMYHLAGQPNVVELKGAYEDKQSVHLVMELCAGGELFDRIIAKGHYTERAAASLLRTIVEIIHTCHSLGVIHRDLKPENFLLLSKDEDAPLKATDFGLSVFKDIVGSAYYIAPEVLKRSYGPEADIWSVGVILYILLCESEHGIFNSILRGQVDFTSDPWPRISASAKDLVRKMLNSDPKKRISAYEVLNHPWIKEDGEAPDTPLDNAVMNRLKQFRAMNQFKKAALRVIAGCLSEEEIRGLKEMFKSMDSDNSGTITVDELRKGLSKQGTKLTEAEVQQLMEAADADGNGTIDYDEFITATMHMNRMDREEHLYTAFQYFDKDNSGCISKEELEQALREKGLLDGRDIKDIISEVDADNDGRIDYSEFAAMMRKGNPEANPKKRRDVVI

SEQ ID NO: 5383 - protein, 133 aa, Zea mays
  misc_feature (26)..(26): Xaa can be any naturally occurring amino acid
  misc_feature (68)..(68): Xaa can be any naturally occurring amino acid
MAGIDKNMLWPLLALNLIMYIIDIAXTSWNLNHFINGQTNYPGVAANGATFYFLKFSILHGRLSATSXLAIVHHVRAWRHHSLFTNNASSLICCAITALAFCLTCKEIHIGEHRGCLLYVLQDFVIILGFLRS

SEQ ID NO: 5384 - protein, 124 aa, Cucumis sativus
GRGQFGTTYLCTYRPTGDLYACKSIPKRKLLCKEDYEDVWREIQIMHHLSEHPNVVQIKGTYEDSVFVHLVMELCAGGELFDRILLKGHYSEREAAQLIKTIVGVVETCHSLGVMHRDLKPENF

SEQ ID NO: 5385 - protein, 185 aa, Glycine max
SRKIKALGVKMVLSGEGSDEIFGGYLYFHKAPNKKEFHEETCRKIKALHLYDCLRANKSTAAWGVEARVPFLDKEFINVAMSIDPEWKMIRPDLGRIEKWVLRNAFDDDKNPYLPKHILYRQKEQFSDGVGYSWIDGLKDHANKQVTDATMMAANFIYPENTPTTKEGYLYRTIFEKFFPKVDFI

SEQ ID NO: 5386 - protein, 296 aa, Glycine max
  misc_feature (52)..(52): Xaa can be any naturally occurring amino acid
  misc_feature (65)..(65): Xaa can be any naturally occurring amino acid
  misc_feature (71)..(71): Xaa can be any naturally occurring amino acid
  misc_feature (103)..(103): Xaa can be any naturally occurring amino acid
  misc_feature (171)..(171): Xaa can be any naturally occurring amino acid
MVLIRLWFVLLGFFGGFGSAAEQRRWTLNDFDIEKPLGRGKFGHVYLAREKXDNHIVALKVLFKXQLQQSXVVHQLRREVEIQSHLRHPHILRLDGYFYDQSXGPKGDLYKELQKCKYFSERRVTTYVASLARAFIYCHGKHVIHRDIKPENLLIGKIQLFCSENNESKFXVLCFGWSVHTFNRRRTMCGTLDYLPPEMVESVEHDASVDIWSLGVLCYEFLYGVPPFEAKEHSDTYRRIIQVDLKFPPKPIVSSAAKDLISQMLVKDSSQRLPLHKLLEHPWIVQNAEPSGVYRS

SEQ ID NO: 5387 - protein, 124 aa, Cucumis sativus
GRGQFGTTYLCTEITTGIEYACKSISKRKLIAKEDVEDVRREIQIMHHLAGHKNIVTIKGAYEDSLYVHIVMELCSGGELFDRIIQRGHYSERKAAELTRIIVGVVETCHSLGVMHRDLKPENF

SEQ ID NO: 5388 - protein, 356 aa, Hypocrea virens
MSRSNPPNNASASRKISFNVSEQYDIQDVVGEGAYGVVCSAIHKPSGQKVAIKKITPFDHSMFCLRTLREMKLLRYFNHENIISILDIQKPRSYDSFNEVYLIQELMETDMHRVIRTQDLSDDHCQYFIYQTLRALKAMHSANVLHRDLKPSNLLLNANCDLKVCDFGLARSAASQEDNSGFMTEYVATRWYRAPEIMLTFKEYTKAIDVWSVGCILAEMLSGKPLFPGKDYHHQLTLILDVLGTPTMEDYYGIKSRRAREYIRSLPFKKKVPFRTLFPKTSDLALDLLEKLLAFNPVKRITVEDALKHPYLEPYHDPDDEPTAPPIPEEFFDFDKHKDTLSKEQLKQLIYQEIMR

SEQ ID NO: 5389 - protein, 494 aa, Neurospora crassa
MSSNVFVELKTPVTGTYKQPTGLFINNEFVEGVDKKTFEVINPATEEVICSVHEATEKDVDIAVAAARKAFEGVWRDVTPQQRGIYLLKLADLLEKNLDLLAAVESLDNGKSITMARGDVGAVVGTIRYYGGWADKIEGKTIDISPDSFHYTRQEPLGVCGQIIPWNFPLLMLAWKVGPALATGNTIVMKTAEQTPLSALVFAQFVKEAGFPPGVLNIISGFGRIAGAAMASHMDIDKVAFTGSTMVGRQIMKAAAESNLKKVTLELGGKSPNIIFNDADIDQAIDWVNFGIYFNHGQTCCAGSRVYVQEGIYDKFVAAFKQRAQQNKVGDPFHDETFQGPQVSQLQYDRIMGYIKAGKEEGATVETGGERHGDKGYFIQPTIFTNVRHDMKIMKEEIFGPVCAVAKFSTEEEVIKLGNDSNYGLAAAVHTKDLNTAIRVSNHLRAGTVWVNTYNALHHQLPFGGYKESGIGRELGEAALANYTQCKSVAIKLN

SEQ ID NO: 5390 - protein, 1146 aa, Neurospora crassa
MADLNFSAAIEANLLAALSKHTEEAKSPASTPTPAPAPGPAPVPTPTPPSIPTQGASAPPPQPVQQQPQQAQQPPLNHSLQSSQGPPSQTAQPPQQQLSQASSLSHALQQALQSSNPPSYQTPSTPQPQPSSTTTAAPISQPLVQVPLPQPSPHAVSNVPPQASPALTEPPKRSHSPDPQDSNGKRPKLEHVDEMDQDIPFDIKAALATALGDFEKQHSQIGNDSSLENPSGPSSAPPPALAVSLSATATPMPEKCGDKLMKASSNSTYMIRSMSLPVLGNLAVQILLRLSQQPRNETLSLLSETDAEFRKHYDLLTESFKLARKGFSDSPVLLPDELEINDSEDRETVRVANLATTAISVFGANDVACKDLDDSFFSIFVPEDGEFKDTLADLLLSLKTQAFLDSLDEQATPQQVTEQLDKFFPDNFEDWLKQRNLDVVTDTDADQLAVKIKDRRELLSTLANSEQPKKSKYPPDTFPETLCAFLQSHIGVVVEYAEEYGVKIPISEEPIAPESIVSDPIQNGNNVQDEHADLAALLQSKIVENGELKDFHAGNLHNEASVSADDNFDLSKLIEQSLPDHINGLKDGLLEQNGQGESSGLFDTKDLASLIAEKLNDNLGTPVDGLSNVPQNYEDTMRENHGQVHPQYHNINQLQTPTYQQYPPASSSNIGMGTTGETLPPNQSCPTSVLYEKARQAAVAKSSSTTRREGLHSTRRPWTPDEEKALMMGLDMVKGPHWSQILSLFGAHGSVSDILKDRTQVQLKDKARNLKLFFLKTNSEMPYYLQSVTGELKTRAPGQAARKEAEEKARLNAEDEQARLAGIMTLGGLHNNHHPVAGSPIAPSPARAHTATPGPGTGHLNGTPTPTPTQGPTNQPAALAPVPISPMVKTEPVDHSAHQVGNLPQIQPAPAPQSLQPALKPQSQPQPLHQQQSQPHLQQHPQANAQQHSQQHLQQHSQPLQPLRPQQQPQQLAQSQMRSQTPQALAPAPPQQYHHQQQHHQPQGQQQHQQLHQQQQLHPGSQQHEQTQPQPQPQVQAQPPPPQQQQQHHVAPAPASTSTTTTATPAIAAAQPHVHVAAAEPAAASSTLSNQATPSFGLPPIPPNHHSTPDQAQDVKLFETLQAAIGATSPAHESHQAATVPETSAG

SEQ ID NO: 5391 - protein, 485 aa, Nocardioides sp. KP7
MTTPRKFDEYRWNVLVDGVPLNVESRYPISDPSTGRYLTQVPDCAEADVDRAVQASRQAQAEWGALPPRARAAKLRELITLLREHREEFAMLDAIDGGFPISMMRNDVDAALELMDIFADMALDLGGKTIPVSTNLHFTTHEPFGVVARIGAFNHPFFFAASKVAAPLMAGNSVILKAPDQTPLSSLRLAEVAAEVLPQNLLITISGRGRVAGRAIVRHPQIKRIGFIGSTDTGRSIQRDAAEVAVKHISLELGGKNAQIVFADADLEQAALGAVNGMNFTWTAGQSCGSTSRLLVHESVADQVIARVVELVSAIAVGPPLDENAQMGPLVSQAQYDKSVHAIGEGIREGAKVVAGGGRPEGVGEGGWYLAPTVLADVRPGSFIEQNEIFGPVLSVIIFATDDEAVAIANGVEYGLTASVWTSDITRAHLIARRVEAGYVLVNGGSRHYWGLPFGGVKSSGVGSEESMEELISYTETKTTTVVLG

SEQ ID NO: 5392 - protein, 456 aa, Magnetospirillum magnetotacticum MS-1
GHCAGEAGYGRPRGNGASSSRKGTMNTTQQAKVRLLVDDQAQDLPVVAATEGNDGIVVSSLLKSTGLVTVDPGFMNTASCESSITYIDGEAGILRYRGYPIEQLAERSSFLEVAYLLIHGELPDAATLDAFVERVNRHTLVHEDFRTFMGTFPRNAHPMAVLSSAINALSTFYPESLDPFDDETVELATVLLLAKSRTITSYLHRRRVGEPLLYPDYSRGYVDDFLRMTFATPYQQYEADPVVVDALDKLLILHADHEQNCSTSTVRVVGSSHANLYASVAAGVNALSGPLHGGANESVLTMLDKIAGAEYDVDTFMKKVKNKEDGVRLMGFGHRVYKNYDPRAAIVKKSADAVLSTLGKKDQLLDIAMGLEEIALNDDYFIERKLYPNVDFYTGLIYKAMGFSPAMFTPLFALGRMPGWIAQWREMMKDPQTKIGRPRQVYVGETERDYVAVSDR

SEQ ID NO: 5393 - protein, 420 aa, Solanum demissum
MGNCVGSSARVEATLSSTTPSAYEASRFPDRKSNSSVPSSLSIPSYGRKSSSESLPTPRSESEILFSPNVKSFSFNELKNATRNFRPDSLLGEGGFGCVFKGWIDAQTLTASKPGSGIVIAVKKLKPEGFQGHKEWLTEVNYLGQLRHPNLVKLIGYCIDGDNHLLVYEFMPKGSLENHLFRRGPQPLNWATRIKVAIGAARGLAFLHDAKEQVIYRDFKASNILLDAEFNSKLSDFGLAKAGPTGDRTHVSTQVMGTQGYAAPEYVATGRLTAKSDVYSFGVVLLELLSGRRAVDNAKVGIEQNLVDWAKPYLGDKRKLFRIMDTKLEGQYPQKGAYTAANLAWQCLSNEPKLRPKMSEVLTALEELQSPKGVSKLSHTEHRAIPSPVAVSPMRHHRSPLHMTPSASPLQAYQKSPRGR

SEQ ID NO: 5394 - protein, 489 aa, Arabidopsis thaliana
MSTVESSKPKIINGSCGYVLEDVPHLSDYLPGLPTYPNPLQDNPAYSVVKQYFVDADDSVPQKIVVHKDGPRGIHFRRAGPRQKVYFESDEVHACIVTCGGLCPGLNTVIREIVSSLSYMYGVKRILGIDGGYRGFYAKNTVSLDSKVVNDIHKRGGTILGTSRGGHDTTKIVDSIQDRGINQVYIIGGDGTQRGASVIFEEIRRRGLKVAVIGIPKTIDNDIPVIDKSFGFDTAVEEAQRAINAAHVEAESIENGIGVVKLMGRYSGFIAMYATLASRDVDCCLIPESPFYLEGEGGLFEYIEKRLKESGHMVLVIAEGAGQDLMSKSMESMTLKDASGNKLLKDVGLWLSQSIKDHFNQKKMVMNLKYIDPTYMIRAVPSNASDNVYCTLLAQSAVHGAMAGYTGYISGLVNGRQTYIPFYRITEKQNHVVITDRMWARLLSSTNQPSFLGPKDVFDNKEKPMSALLDDGNCNGVVDVPPVTKEITK

SEQ ID NO: 5395 - protein, 256 aa, Hordeum vulgare subsp. vulgare
MAAKCYPTVSDEYLAAVAKARRKLRGLIAEKNCAPLMLRLAWHSAGTFDVATKTGGPFGTMKCPAELAHGANAGLDIAVRLLEPIKEQFPILSYADFYQLAGVVAVEVTGGPEVPFHPGRQDKPEPPPEGRLPDATQGSDHLRQVFSTQMGLSDQDIVALSGGHTLGRCHKERSGFEGAWTANPLIFDNSYFTELLSGEKEGLLQLPTDKVLLTDPAFRPLVDKYAADEDAFFADYAEAHLKLSELGFGEASEGCC

SEQ ID NO: 5396 - protein, 322 aa, Neurospora crassa
MADNKFDPEYFQAVQPLLAAKASLPPPAPLTDVDSLRTNYNDFALVLANIPDSPDITETTYQIPSKDGTLITLYRFTPAAAAATPGPRAAVLHHHGGGFVNNNVDQFRKDIKRYAHASGLTFYAADYRLAPEHPFPTPFDDCYAALEWLHANAASEQIDPTRIALFGVSAGAGLATGVALKARDDKITPPVKKLVLAYPMLDDRTYWPEDHPLSPYLMWNGAANRIAWGAYAGADGVKEISPYAAPARAKDLSGLPPTFIDCGELDLFRDEDVEFSARLLKAGVSVELHVYPGVPHGFEMVAVNVRVSKIAVENRVRALENL

SEQ ID NO: 5397 - protein, 212 aa, Triticum aestivum
MPESDNDSGGPSNTGGEGELSSPREQDRFLPIANVSRIMKKALPANAKISKDAKETVQECVSEFISFITGEASDKCQREKRKTINGDDLLWAMTTLGFEDYVDPLKHYLHKFREIEGERAAATSTSTAPQHLPDNNATGYADYGGAAVPAPAPGGMMMMGQPMYGSPPPQQHQQQQHQHQVAMGGRAGFPYHGGSSGGGGSSSSSGFGRKEG

SEQ ID NO: 5398 - protein, 1116 aa, Schizosaccharomyces pombe
MAADIGSQSSGSLEERFEQSLHLQNVDKQDWSLNSVLQFLKLYKFNKEWEDVFIKSRIEMDLFINLADQSKAEEFAFKNKLSKESAIQLSSCIRKTLLAPSSTRVPSKNSSYETLTYSAKDSSDDVFTETNSGFRSSNQNSSLKSFQSVPDSNVNVFGGFGGSVVDNNELLSTGKNSHQTTSLNLEGSPINLHAYKGTVTSIINDDSRNINKKTLSKQPVSEHKEKQTSFLRRFRVPGFSRDKDKTKDCPSSNSNPFHLASSNVKTLDASLDQGEWVPRIHRLESQIGLISKKKSFVLATMDDMKFTVVDITNVQNATQLRKLIAKSMYLDISIDQFDLFLTEVGGAQYIEILDDRKLDIARLYSDEFGTIKFFVKPSQNEESGMDSDTYLSFGTKSSSTYKADDDSIYHRKEDFKKQPSYPVLTSDFEITDAGPNLSLSGHQPDNKYYKGFSSAPNLAVVPELPSRRFRGFEKIRGAKGEMATKILDATEAQSEKNKFTVCRPHKKVTLKMPLNSGSSAPQSPSSNTSASVLTRNFVAHRDPPPPPTETSSLRRKNTLTRRPSIRHARSSPYIDTGHNEASKFSHTSFDPKASSKSSNSLKESVEALSEIPFEDAPALDESDLSGDPFWAIQPKQSSSQVPKENHHNIQSKLSINTEAATDLKANELSSPKTPEYCRGDDRSISLSPLSYRLRKSKHIRESPPSSKVINSGNWEVRPSADDLYEDVDRFFPRYDLDKVLVVDQSRMVSSPSKVSIRPKMKSVRLLAREASEARKEIRHNARRNKSGNLLRRSSTKLWGSRIVELKPDTTITSGSVVSQNATFKWMKGELIGNGTYGKVFLAMNINTGELIAVKQVEIPQTINGRHDQLRKDIVDSINAEISMIADLDHLNIVQYLGFEKTETDISIFLEYVSGGSIGRCLRNYGPFEEQLVRFVSRQVLYGLSYLHSKGIIHRDLKADNLLIDFDGVCKISDFGISKHSDNVYDNDANLSMQGSIFWMAPEVIHNDHQGYSAKVDVWSLGCVVLEMLAGRRPWSTDEAIQAMFKLGTEKKAPPIPSELVSQVSPEAIQFLNACFTVNADVRPTAEELLNHPFMKCDEEFNFKDTNLYDMLCKRKS

SEQ ID NO: 5399 - protein, 420 aa, Burkholderia fungorum LB400
MRRLADLISRDWERLAEIEIRDNGKVISEVGPQIRYLAQYFHYYAGLADKIEGAVIPVDRPGMLNYTRHEPVGVVVAITPWNSPLMLASWKIAPALAAGCTVILKPSEHTSVSSLVFSDLFDEAGFPPGVVNVVTGFGAEIGNALVSHPDVAKVAFTGGDVAGQAVYERAAAGLKRVTLELGGKSPHIVFDDADLDGALAAAMDGVFSSSGQMCVAGSRLMLHDRIHDEFVARLLDRVRTLKLGAPMNPATSIGPVTTQAQFERILSYIDVAKQEGARCLVGGVASPEAEGGSGWFVAPTVFGDVKNDMRIAREEVFGPVLSIIRFSTDDEAVHLANDSRYGLASGIWTRDVGRAISVADRIQAGTVWVNTYRAVSAASPFGGMKRSGIGRENGQEAIMGFLQTKSIWISTTSRPVAAWS

SEQ ID NO: 5400 - protein, 329 aa, Oryza sativa (japonica cultivar-group)
MIQLKDMVMKLSGTSRHHGQQRRGGSPPPRGRTTSVYRSGYYRPGMVQDDMAVPPATYLGGGGTSMSSASSTPAWDFARPAEGEAREWVAQVEPGVQITFVSLAGGGGNDLKRIRFSREMYDKWQAQKWWGENNERIMELYNVRRFSRQVLPTPPRSDDGERESFYSQVGSTRGSPAATPSPAPLTPDRVTSWSAFVRPPSASRQQQQHSFRPLSPPPPSSSNPSERAWQQQQQPQRAGKSPAAASDAMDAARTTSCSSRDEVSISNASELEVTEWVIQDEPGVYITVRELADGTRELRRVRFSRERFAELNAKLWWEENKERIQAQYL

SEQ ID NO: 5401 - protein, 325 aa, Shewanella oneidensis MR-1
MKFDYKPGQFITFVLEINGEQACRSYTLSSTPSRPYSLMVTIKRVDGGLVSNYLIDHLQPGQTVRVLPPTGQFNLFDIPANKYLFLSAGCGITPMYSMSRYLTDTQINADIAVVHSARTQADIIFKNTLETMAARHASFKLCYLVEGVTTDTVWHTEEAFHYVGRLSAQNLLSLVPDFAERIVFLCGPELYMQAVKTILTELNFDMNKLYHESFATAVKEAQSHVKQAEIQSETPTTSSTGFMLSIGDKKHLLTAEQTLLDGIEAEGLPIIAACRSGVCGACKCKVLQGETESTSYMTLTPTDIEAGYVLACSTRLKSDVTLSLI

SEQ ID NO: 5402 - protein, 320 aa, Triticum aestivum
MEKGMDPALLDNIIARLLEVKSLKPGKNAQLSESEIKQLCAASKEIFLAQPNLLELEAPIKICGDVHGQYSDLLRLFEYGGYPPQSNYLFLGDYVDRGKQSLETICLLLAYKVKYPENFFLLRGNHECASVNRIYGFYDECKRRFSVKLWKTFTDCFNCLPVSALIDEKILCMHGGLSPELNKLDQILNLNRPTDVPDTGLLCDLLWSDPSNEAQGWAMNDRGVSYTFGPDKVAEFLEKHDLDLICRAHQVVEDGYEFFADRQLVTIFSAPNYCGEFDNAGAMMSVDETLMCSFQILKPARKMLPGSTNNKSGFKSMRGW

SEQ ID NO: 5403 - protein, 114 aa, Zea mays
MVITANDLSKWENFPKGLKVLLLLNGCDSDGDGSSAAETRSELESMDYIVTTFTDETEALSAVVKNPESFHIAIVEVNMSAESESFKFLEAAKDVLPTIMISTDHCRFLYFFLF

SEQ ID NO: 5404 - protein, 312 aa, Glycine max
MISPQTKQSFGSLFLLFLVLLQKRFEMGVIVENPNSSKPIVIREVWASNLESEFEVIREVIDDYPFISMDTEFPGVVFRPHVVDPTKPYLFRLRPSDHYRFLKFNVDALNLIQVGITLSDADGNLPHLETGNRFIWEFNFRDFDIDRDDYASDSIDLLRRQGIDFRRNTAEGIDSNLFAELVMSSGLVCNDSVSWVTFHSAYDFGYLVKILTRRNLPNGLEEFLKMLRAFFGNNVYDIKHMMQFCDTLYGGLDRLARTLNVDRAVGKCHQAGSDSLLTWHVFQKMRDIYFVKDGPHKHVGVLFGLELTCSAP

SEQ ID NO: 5405 - protein, 1164 aa, Streptococcus agalactiae
MFKSNYERKMRYSIRKFSVGVASVAVASLFMGSVAHASELVKDDSVKTTEVAAKPYPSMAQTDQGNNSSSSELETTKMEIPTTDIKKAVEPVEKTAGETSATDTGKREKQLQQWKNNLKNDVDNTILSHEQKNEFKTKIDETNDSDALLELENQFNETNRLLHIKQHEEVEKDKKAKQQKTLKQSDTKVDLSNIDKELNHQKSQVEKMAEQKGITNEDKDSMLKKIEDIRKQAQQADKKEDAEVKVREELGKLFSSTKAGLDQEIQEHVKKETSSEENTQKVDEHYANSLQNLAQKSLEELDKATTNEQATQVKNQFLENAQKLKEIQPLIKETNVKLYKAMSESLEQVEKELKHNSEANLEDLVAKSKEIVREYEGKLNQSKNLPELKQLEEEAHSKLKQVVEDFRKKFKTSEQVTPKKRVKRDLAANENNQQKIELTVSPENITVYEGEDVKFTVTAKSDSKTTLDFSDLLTKYNPSVSDRISTNYKTNTDNHKIAEITIKNLKLNESQTVTLKAKDDSGNVVEKTFTITVQKKEEKQVPKTPEQKDSKTEEKVPQEPKSNDKNQLQELIKSAQQELEKLEKAIKELMEQPEIPSNPEYGIQKSIWESQKEPIQEAITSFKKIIGDSSSKYYTEHYFNKYKSDFMNYQLHAQMEMLTRKVVQYMNKYPDNAEIKKIFESDMKRTKEDNYGSLENDALKGYFEKYFLTPFNKIKQIVDDLDKKVEQDQPAPIPENSEMDQAKEKAKIAVSKYMSKVLDGVHQHLQKKNNSKIVDLFKELEAIKQQTIFDIDNAKTEVEIDNLVHDAFSKMNATVAKFQKGLETNTPETPDTPKIPELPQAPDTPQAPDTPHVPESPKAPEAPRVPESPKTPEAPHVPESPKAPEAPRVPESPKTPEAPHVPESPKTPEAPKIPKPPKTPDVPKLPDVPKLPDVPKLPDAPKLPDGLNKVGQAVFTSTDGNTKVTVVFDKPTDADKLHLKEVTTKELADKIAHKTGGGTVRVFDLSLSKGGKETHVNGERTVRLALGQTGSDVHVYHVKENGDLERIPSKVENGQVVFKTNHFSLFAIKTLSKDQNVTPPKQTKPSTQGSQVEIAESQTGKFQSKAANHKALATGNETVAKGNPTSTTEKKLPYTGVASNLVLEIMGLLGLIGTSFIAMKRRKS

SEQ ID NO: 5406 - protein, 426 aa, Mesorhizobium sp. BNC1
MPFTANRQFKQAPRMLVSAKDMHYTTDDGRKLLDGTAGLWCVNAGHCRPKITEAIRHQAGELDYAPAFQMGHPIVFEFASRLVDIAPEGMDHVFFTNSGSESVETALKIALAYHRAKGDGSRTRLIGRERGYHGVNFGGISVGGIVNNRKMFGTLLAGVDHLPHTYLPGKNAFSRGVPEHGVELADELERIVALHDASTIAAVIVEPVAGSAGVILPPKGYLKRLREICDKHGILLIFDEVITGFGRLGTPFAADYFGVVPDIMTTAKGITNGVIPMGAVFVKKEIHDAFMNGPEHMIEFFHGYTYSGNPIACAAGLATLETYREEGLLTRGEELGQHWEDALHSLKGEPHVIDIRNIGLVGAIEMEPIQGQPTKRAFSAFLKGFEKGLLIRTTGDIIALSPPLIITKGQIDEIVDHVREILRSID

SEQ ID NO: 5407 - protein, 250 aa, Zea mays
  misc_feature (96)..(96): Xaa can be any naturally occurring amino acid
SESEAASRRQGEMGKGAQGSDAAAAGGEVEENMAAWLAAKNTLKIMPFKRPPVGPYDVRVRMKAVGICGSDVHYLRVRDPIRCLCNSTARELLHGXRKKKKRPLFRLFTHHRFSQEMRIAHFVVKEPMVIGHECAGVVEEVGAGVTHLSVGDRVALEPGVSCWRCRHCKGGRYNLCEDMKFFATPPVHGSLANQVVHPADLCFKLPDGVSLEEGAMCEPLSVGVHACRRVGVGPETGVLVVGAGPIGLVS

SEQ ID NO: 5408 - protein, 112 aa, Zea mays
  misc_feature (40)..(40): Xaa can be any naturally occurring amino acid
TLLEVWADLLYTEICVIPHVDDDYPYVAMDTEFAVYVRPXSGLTSARDEVNYASLRANVRMLILIPLRFTLSLKCGALPQLGPHLPPCDLKDICRGSAAHTDAGVADSIYLL

SEQ ID NO: 5409 - protein, 133 aa, Ustilago maydis 521
MVKRSAQCKFPVARIKKIMQADEDVGKVAQATPVLISIWNLGLTAKALELFMASIVEETVKETRSRGAKKMTPYHVKRTVHTNETFDFLKDIVAKVPDPVETDSSAAATATAAAGDNRGGKRRKTAKNADESD

SEQ ID NO: 5410 - protein, 323 aa, Triticum aestivum
  misc_feature (71)..(71): Xaa can be any naturally occurring amino acid
  misc_feature (83)..(83): Xaa can be any naturally occurring amino acid
  misc_feature (103)..(103): Xaa can be any naturally occurring amino acid
MEAETAAKRARENEGAAAADGAGEQAGISAVIPGWFSEISPMWPGEAHSLKVEKVLFQGNSCYQDVPVYLXTTVPEGVLLDGXIQGPGGRVPYQEMITHLPLXQAKNPKKVLVIGGGDGGVLREVSRHSSVEQIDICEIDKMVVDVSKQFFPHLALGFEDPRVSLHIGDGVAFLKNAPEGTYDAVIVDSSDPVGPAQELFEKPFFESVSRALRPGGVVCTQAESIWLHMHIIEDIVTNCRQVFKGSVNYAWTTVPTYPSGVIGFMLCSTEGPSVDFQHPVFSIEEDEYSTKSKGPLKFYNSEFHTASFCLPSFARRVIEAKAN

SEQ ID NO: 5411 - protein, 489 aa, Bordetella bronchiseptica RB50
MTQLTQPLSRAELLRDACYIDGKWVGAGNGPSIPVDNPSTGKTIISVPKLGRKEAEQAIDAAEAALPAWSARTGKERAAILLKWAQLMMENQQDLAVIMTSEQGKPVAEAAGEIAYAASFLEWFAEEAKRIDGDILQSPKGGQRLMVLKQPIGVTAAITPWNFPAAMITRKVGPALAAGCTMVVKPAQQTPLTALALAVLAEQAGVPAGVFQVVTGSSREIGAALCESEVVRKLSFTGSTEVGRTLMEQCAPTIKKLSLELGGNAPFIVFDDADLDRAIDGILASKYRNAGQTCVCANRIYVQAGVYEEVAKRLVEKVNAMKVGDGFEQGVTQGPLIDTAAVAKVQEHIADATAHGAKVIAGGQPHALGGSFFQPTVVRDVTQSMRFAVEETFGPVAPLFKFESEDEVIGMANNTIFGLAAYFYTRDYARIWRVSEALEYGIVGINTGIISNEVGPFGGVKQSGLGREGSKYGIEDYLELKYLCVDLGA

SEQ ID NO: 5412 - protein, 162 aa, Triticum aestivum
  misc_feature (58)..(58): Xaa can be any naturally occurring amino acid
  misc_feature (78)..(78): Xaa can be any naturally occurring amino acid
  misc_feature (81)..(81): Xaa can be any naturally occurring amino acid
  misc_feature (94)..(94): Xaa can be any naturally occurring amino acid
  misc_feature (100)..(101): Xaa can be any naturally occurring amino acid
  misc_feature (124)..(124): Xaa can be any naturally occurring amino acid
  misc_feature (136)..(137): Xaa can be any naturally occurring amino acid
  misc_feature (141)..(141): Xaa can be any naturally occurring amino acid
MAPTVMASSATSVAPFQGLKSTAGLPISRRSSSAGLSSVSNGGRIRCMQVWPIEGIKXFETLSYLPPLSTGGLLKQVXDYXIRSKWVPCLRFSXVGFVLXXEHNTPPGYYDVHTGKCWELPMFXGCTDAHKCQQVXXVKKXYLTLFPLIFTAPSACLRLHRF

SEQ ID NO: 5413 - protein, 570 aa, Triticum aestivum
MAGGGVEDVYGEDRATEEQLITPWSFSVASGHQLLRDPRHNKGLAFTEAERDAHYIRGLLPPAIVSQEHQEKKIMHNLRSYTVPLHRYVAMMDLQERNERLFYKLLIDNVEELLPVVYTPVVGEACQKYGSIYRRPQGLYISLKDKGKVLEVLKNWPERSIQVIVVTDGERILGLGDLGCQGMGIPVGKLSLYTALGGVRPSACLPITIDVGTNNETLLNDEYYIGLRQRRATGEEYHELLQEFMNAVKQNYGEKVLVQFEDFANHNAFDLLAKYSKSHLVFNDDIQGTASVVLAGLLAALKMIGGGLVDQTYLFLGAGEAGTGIAELIALEMSKHTELPVDDCRKKIWLVDSKGLLVESRKESLQHFKKPFAHEHEELKTLLEAVQSIKPTVLIGTSGVGKTFTQEVIEAMASFNEKPVIFSLSNPTSHSECTAEEAYTWSKGTAVFASGSPFDPVEYEGKTYVPGQSNNAYVFPGFGLGVVISGAIRVHDDMLLAASEALAEEATQENFDKGLIFPPFTNIRKISASIAAKVAAKAYDLGLASRLPRPDDLFKYAESCMYTPLYRSYR

SEQ ID NO: 5414 - protein, 487 aa, Yersinia pestis KIM
MSTHLVWFRNDLRVTDNLALHAACQDPQASVIAVFIATPVQWAAHGMAPRQAAFLRQNLQHLQAALAARGIPLHYHQCDDFQASNTWLVDFCQQQQVDSLFYSQQYELNERLRDDALAVQLSERAITCQSFHDSVLLAPGTVLTGNNEMYKVFTPFRRAFIQRLLMSDNHCVPAPKARHAPPVLLSPLPFDYPQQSVDSQLFPAGEDAALQRLRRFCREQVQDYRQYRDLPAVPGTSCLSPYLVLGVLSPRQCFNRLWAESPEMLENADSGAFTWLNELIWREFYRHLLVAYPRLCQHHPFIGWTDGLVWNRSESQLKAWQQGQTGYPIVDAAMRQMNETGWMHNRLRMISASFLVKDLLIDWRQGERYFMSQLVDGDLAANNGGWQWAASTGTDAAPYFRIFNPTTQGERFDKDGVFIRRWLPELAAVPDSDIHQPWRWAERQQQHLDYPVPLVDHKQARLATLAAFEAAKRDSTRIPNRKEPSCY

SEQ ID NO: 5415 - protein, 358 aa, Gibberella zeae PH-1
MASNSDAPPAAATEAVLVKSEEMPKDAQKVEELDFNKLKSPITAEDLFEGMRHMGFQASSMCEAVRIINDMRAWKDPETGDKTTIFLGYTSNLISSGLRGVLRWLVEHNHVSCIVTTAGGVEEDFIKCLADTYVGSFSTPGADLRRKGLNRIGNLVVPNANYCAFEDWVVPILDKMLEEQEASKGTEEEINWTPSKVIHRLGKEINDERSVYYWAYKNNIPVFCPAITDGSLGDMLYFHTFKSSPQQLKIDLVEDIRRINTIAVRAKRAGMIILGGGIVKHHIANACLMRNGAESAVYINTAQEFDGSDAGARPDEAVSWGKIKIGADNVKVYMEATACFPFIVANTFAKDIGKEDQK

SEQ ID NO: 5416 - protein, 402 aa, Bradyrhizobium japonicum USDA 110
MPIREVDMARKRIGILTGGGDVAGLNAVIKSVTYRGSEDDIEVVGLRRGWEALTHLNLDDPNSRSHYVIPLNRENTRTIDRRGGTVLHSSRVNPSKIQKLPGHLVGNEVPVSLSTNGGIATKTWDLTSRVLANLSGLGIEHLIAIGGDDTLSYAAKLNELGVKIIAIPKTMDNDVRNTEYCIGFSTAITRASDAIQRQRTTVGSHERIGIFRVFGRDAGFTALYTAYATSIRCLIPEHKVDLDKLIQLLIEDKRANPSNYALIVLSEGAQWEGYKLREYGEPDAYGHRKKANVAESLADEIKQRTGEETITSDLTYDLRSGDPDFIDKLVALTFGNMAYDAMLESKTGLMSALVEGRYDLVPIPDAKLGPRKLDVASSYNTERYRPIYANKQGLPIFLNRAS

SEQ ID NO: 5417 - protein, 372 aa, Medicago sativa
  misc_feature (1)..(1): Xaa can be any naturally occurring amino acid
  misc_feature (29)..(29): Xaa can be any naturally occurring amino acid
  misc_feature (63)..(63): Xaa can be any naturally occurring amino acid
  misc_feature (88)..(88): Xaa can be any naturally occurring amino acid
  misc_feature (118)..(118): Xaa can be any naturally occurring amino acid
  misc_feature (149)..(149): Xaa can be any naturally occurring amino acid
  misc_feature (175)..(175): Xaa can be any naturally occurring amino acid
  misc_feature (181)..(181): Xaa can be any naturally occurring amino acid
  misc_feature (189)..(189): Xaa can be any naturally occurring amino acid
  misc_feature (197)..(197): Xaa can be any naturally occurring amino acid
  misc_feature (200)..(200): Xaa can be any naturally occurring amino acid
  misc_feature (261)..(261): Xaa can be any naturally occurring amino acid
  misc_feature (271)..(271): Xaa can be any naturally occurring amino acid
  misc_feature (329)..(329): Xaa can be any naturally occurring amino acid
  misc_feature (368)..(368): Xaa can be any naturally occurring amino acid
XGNSYITKEDNQISATSEQTEDSACLSAXVLTTNLVYPAVLNAAIDLNLFEIIAKATPPGAFXSPSEIASKLPASTQHSDLPNRLDRXLRLLASYSVLTSTTRTIEDGGAERVYGLSXVGKYLVPDESRGYLASFTTFLCYPALLQVWXNFKEAVVDEDIDLFKNVHGVTKYEFXGKDKKXNQIFNKSXVDVCATEXKRXLEIYTGFEGISTLVDVGGGSGRNLELIISKYPLIKGINFDLPQVIENAPPLSGIEHVGGDXFASVPQGDAXILKAVCHNWSDEKCIEFLSNCHKALSPNGKVIIVEFILPEEPNTSEESKLVSTLDNLXFITVGGRERTEKQYEKLSKLSGFSKFQVACRAFNSLGVXEFYK

SEQ ID NO: 5418 - protein, 269 aa, Burkholderia cepacia R18194
MMSKIPAFGLGTFRLKGQVVIDSVRNGLEVGYRAIDTAQIYGNEAEVGEAIAASGVAREDLFLTTKIWVDNYAPDKLVPSLEESLRKLRTDHVDLTLIHWPAPDNGVALDTFMTALADAKAQGLTRRIGISNFNIALTKQAIAAVGKDAIATNQIELSPYLQNRKLVEFLNAEGIHVTSYMTLAYGKVLGDPVIGAIAQRHDATPAQVALAWALQLGYSVIPSSTKRENLASNLLAQSLRLTDEDMAQIAALERNGREVDPAGLAPKWD

SEQ ID NO: 5419 - protein, 179 aa, Glycine max
MASSKIIFIFLLFLAHLHQHTFVKGDSSLIKRTCKNTKYYNLCFSSLKSDPSSPNADPKGLAVIMIGIGMTNATSTSSYLSSKLLSPSNNTTLKRVLKECADKYSYAGDALQDSVQDLANEAYDYAYMHITAAKDYPNACHNAFKRYPGLAYPRDLASREDGLKHICDVAMGIIDNLDW

SEQ ID NO: 5420 - protein, 482 aa, Triticum aestivum
  misc_feature (123)..(123): Xaa can be any naturally occurring amino acid
  misc_feature (177)..(177): Xaa can be any naturally occurring amino acid
  misc_feature (334)..(334): Xaa can be any naturally occurring amino acid
  misc_feature (390)..(390): Xaa can be any naturally occurring amino acid
PPHCAALAAAPGPRVIIVGAGMSGISPGKRLSQAGVTDLVILEATDRLGGGIPRAEAARATVHRGDRAAGGGHGERVEPGSSSGPTTGARRMRLALLKKMFPKEDVPDATEILVPRWWSNRFXRAPSPTGPSASTATDMTSSGVPMACFSLPATTPAQPTTVWSAGPTLQVVLLLPXDQLFPEQDVQICCQGTESLLSRLIAESPAKTAGSNGLKPSQCTALFRCSSVSGHCSMAFWAIHILSLCDMREVCLCPGGVSFHYLVIKLHRADYVVVSASLGVLQTDLIRFKPQLPSWKIVSIYQFDMAVYTKIFLRFPKRFWPEGSGKEFFLYASXRRGYFPVWQQFEQQYPGSNVLLVTVTDDESRRIEQQSDNQTMAEAVAVLRKMFPGXNVPDATEILVPRWWSNRFFKGSFSNWPIGVNRYEYDLIRAPVGRVYFTGEHTSEKYNGYVHGAYLAGIDSADILINCAKKKMCKYNVKGKHD

SEQ ID NO: 5421 - protein, 382 aa, Metarhizium anisopliae
MSFAGMLNRLHGQPESYDKKSKYKFGRTLGAGTYGVVREADGPSGKVAIKIILKKNVKGNEKMVYAELDMLQRLTHPHIVKFVDWFESRDKFYIVTQLATGGELFDRICDQGKFTEVDASQTIRQIMTAVDYLHDNDVVHRDLKPENLLYVTRDPDSDLVLADFGITKTLDIKEETLTTMAGSFGYAAPEVMEQKGHGKPVDMWSMGVITYTLLCGYSPFRSENLRDLLRECTAAPVPFHERYWKDVSQDAKDFILVLLVPEPEKRWTSKEALGHIWLSGKNATDHNLLPELEAYRRRARLRRVIEIVKLQNRIAKLKEHEEDPSESDMGDAQGASDNHKGDGSRLHALGLFAVREAKQKQESLQVEEELEKESRRRSFSNA

SEQ ID NO: 5422 - protein, 158 aa, Bradyrhizobium japonicum USDA 110
MSAIYDFKANSLLGEEVPMRRFEGQVLLIVNTASKCGFTPQYRGLEDLYRDLSPRGFAVLGFPCNQFGAQEPGQASEIQEFCSTNYDVTFPLFEKIDVNGANAHPLYEYLKRQQSGLLGASIKWNFTKFLVDRAGRVIARYAPTARPEGLRQQIETLL

SEQ ID NO: 5423 - protein, 313 aa, Streptomyces rochei
MPVPAVDPEIRTLLETADTGIFPVYGLDAVLADPQPYALLRAYPDTPADDQVTVLDLHIPGPAGGDLRVRVYRPDTTEVLPVILYITRRRLHYGSPEAEEGRSLRYARDARAVVVSVDYRLAPEHPYPAAADDAYAALIWIAANPAELGGDRARIAVAGGSAGGNIAASTVLRARDQAGPHILFQLLTYPGVDGSLTSASVREFTDTPVLNRGAMELAWQYYAKDTHPHPYASPIRATDLGALPPTYIAVAEIDPLRDEGRDYAARLSAAGVTTELVQVPGAVHGFDILFPSARISERSLADQVRALHDALHP

SEQ ID NO: 5424 - protein, 509 aa, Bacillus sp. KSM-K16
MRIHIVQKGDTLWKLAEKYEVDYEHLKEANPNLTNPEMLMPGMKVKVPAGSVAVRKEQKKTTPKAKEVDKKPQKAKEQSVKPPKKPELKASEKTQAANVAPAPPYYGQTQQGVAKPPEYPPLPPKPPCTPCQGNAFQEFAPQANMYQQSYAPNQQLYSQQMNQPPSYQPQANQPQSYQPQSYQPQANQPQSYQPQSYQPQANQPQSYQPQSYQPQANQPQSYQPQSYQPQANQPQSYQPQIFQPQAYGENAQLQAQSHGPKQQESAGKHQPLPQDKKDNEAGEWNGVQPQAHKGSSKSGIHGQQSPWGSNAPFVQQSGGPNQQSYPIQENQNKGFQGQQNTNFTPWPQQENKGWNQEQAYAHQVEMNWGQSNGAQPFSQQMDINWGQYRYSPYQGEIGDAAPFQSYPGWQPAALPQMPVANSYPPPQTPFFAPGTLNQQAGPYRQPPVGQLDDQSYQQPHYMNQAPSFLTGPYAAQPQQWAHPQSPYLQEQEYEPEEQINAYEEEDQQD

SEQ ID NO: 5425 - protein, 342 aa, Burkholderia cepacia R1808
MGVVGVICPWNLPLLLMTWKVGPALACGNTVVVKPSEETPQTAALLGEVMNTAGVPPGVYNVVHGFGPNSTGEFLTTHRGINAITFTGETRTGAAIMKAAADGARPVSLEMGGKNAAIVFADCDLDAAIEGTLRSCFANCGQVCLGTERVYVERPIFDRFVSALKKGAEGMQLGRPEDLATGMGPLISQEHRDKVLSYYKKAVEAGATVVTGGGVPDMPEALKGGAWVQPTIWTGLGDDSVIAREEIFGPCALVMPFDSEEEVIRRANDNDYGLATAIWTTNLSRAHRVAGAIEVGIAWVNSWFLRDLRTPFGGAKQSGIGREGGAHSLEFYTELKNVCIKL

SEQ ID NO: 5426 - protein, 503 aa, Triticum aestivum
MVATAKIPQRQLFIDGDWRAPALGRRLPVINPTTEASIGEIPAGTSEDVDAAVAAARAALRRNRGRDWARAPGAVRAKYLRAIAAKMIERKSDLARLEALDCGKPLDEAAWDMDDVAGCFEFFAGHAEALDKRQNAAVALPENFKCHLKKEPIGVVALITPWNYPLLMAVWKVAPALAAGCTAVLKPSELASVTCLELGDVCKEIGLPSGVLNIVTGLGHEAGAPLSSHPDVDKVAFTGSYATGQKIMVAAAPTVKPVTLELGGKSPIVVFDDVDIDKAVEWTLFGCFWTNGQICSATSRLLIHKNIAKEFVDRMVAWSKNIKVSDPLEEGCRLGPVVSEGQYEKIKKFVANAKSEGATILTGGVRPKHLEKGFFIEPTIITDINTSMEIWREEVFGPVLCVKEFSTEEEAIELANDTHYGLAGAVISGDRDRCQRLAEEIDAGCIWVNCSQPCFCQAPWGGNKRSGFGRELGEGGIDNYLSIKQVTEYTSDAPWGWYKAPAN

SEQ ID NO: 5427 - protein, 477 aa, Thermoproteus tenax
MILWPMPDVVVVNPATEEVLAVLPSASREEVRRAIDEAEDAFYRWSELPLRERAKLLRRAADLIEADDTLINTLVAESGKPIRDARAELRRAIEIFRASAEEAKYILEGKIPRVDAYDYPLANENRIAMEVREPMGVVAGALSYNNPASTFAHKIAPVIAAGNTVIAKPSSHTPLTALKMAQILQKAGVPQGVVQVVVGSGEEIFNEFVDNPKVVGISFTGSTAVGLQVAAKAAGRGKKFMIAPGGSDPAIVFADADLEAAASIIARARFENAGQNCNATKRVFVERKVYDKFLDILRRKIAAIKVGDPMDESTEMGPVISDKMVKAMEGIVADAVEKGGKLLYGGRRMQRKGYFFEPTLVAFDGRPPEAKAFREEVFGPVLPVAPFEDEREAVELANWTQYGLQSAVFTSDYKRAFRVARAIKAGAVMINDSTRVRFDALPYGGVKMSGLSAGWREGVRSTMLLFTEIKYYVLNIA

SEQ ID NO: 5428 - protein, 451 aa, Oryza sativa (japonica cultivar-group)
MMAAAAEEGEGKKGGGTVLQGRYEMGRVLGHGNFGRVHVARDLRTGRSVAVKVVAKEKVVRAGMMEQIKREIAVMKRVSHPNIVELHEVMATRSKIYLALELVRGGELFGRIVRLGRVREDAARHYFRQLVSAVDFCHSRGVYHRDLKPENLLLDEAGNLKVVDFGLSALADHARADGLLHTLCGTPGYAAPEVLRDKGYDGAKADLWSCGVILYVLLAGSLPFPDDNIVTLYRKAQRGDYRCPAWLSTDARRLIPRLLDPNPTTRISVAQLVETPWFKKTSISRPVSIELPPAFADPAPAKEEAEKDEPETLNAFHLISLSEGFDLSPLFEGDSAKGRRDGGMLFATREPASGVISRLEGVAARGGGRMRVTKSGARGVRLEGAERGGAKGRLAVAADIFSVAPSVLVVDVKKDGGDTLEYRSFCSEELRPALQDIVWGAAADPTPTAAV

SEQ ID NO: 5429 - protein, 481 aa, Papaver somniferum
SLVAVVITTFLYLIFRDSSPKGLPPGPKPWPIVGNLLQLGEKPHSQFAQLAETYGDLFSLKLGSETVVVASTPLAASEILKTHDRVLSGRYVFQSFRVKEHVENSIVWSECNETWKKLRKVCRTDLFTQKMIESQAEVRESKAMEMVEYLKKNVGNEVKIAEVVFGTLVNIFGNLIFSQNIFKLGDESSGSVEMKEHLWRMLELGNSTNPADYFPFLGKFDLFGQSKDVADCLQGIYSVWGAMLKESKIAKQHNNSKKNDFVEILLDSGLDDQQINALLMEIFGAGTETSASTIEWALSELTKNPQVTANMRLELLSVVGKRPVKESDIPNMPYLQAFVKETLRLHPATPLLLPRRALETCKVLNYTIPKECQIMVNAWGIGRDPKRWTDPLKFSPERFLNSSIDFKGNDFELIPFGAGRRICPGVPLATQFISLIVSSLVQNFDWGLPKGMDPSQLIMEEKFGLTLQKEPPLYIVPKTRD

SEQ ID NO: 5430 - protein, 239 aa, Oryza sativa (japonica cultivar-group)
MRKSSGGGGGWSTSDVRGQTAWVGSGTMLGEVYYAIANKTSRLGFPGSVGPTVGIGGYLSGGGFDLMLRKHGLASDHVLDATMVDAKGRLLDRAAMKADLFWAIRGGGSGNFGIVLSCKLRLVPIPATVTVFTVHRSRNQSTTNLLIKWQRVAPSLPSDAFLHVVVPLYLDTRAGLIAIMADTFPELNVTASDCTEMMWIQSVLDFAFYSTGKPSEMLLDRGNGIGDPSGSWMRLARSS

SEQ ID NO: 5431 - protein, 117 aa, Glycine max
  misc_feature (76)..(76): Xaa can be any naturally occurring amino acid
HWREGERELVGKGGMSIDEHGEGKEENMAAWLVGMNSLKIQPFKLPTLGPHDVRARMKAVGICGSDVHYLKTLRCXKEPMVIGHECAGIIEEVGSQVKSLVPGDRVAIEPGISCWHC

SEQ ID NO: 5432 - protein, 179 aa, Glycine max
MVSSKIFFLFLLFLAHLHQHASVEGDSSLIKRTCKNTKYYNLCFSSLKSDPSSPNADPKGLAVIMIGIGMTNATSTSSYLSSKLPTPSNNTTWKRVLKECADKYSYAGDALQDSVQDLANEAYDYAYMHITAAKDYPNACHNAFKRYPGLVYPRDLARREDGLKHICDVAMGIIDNLDW

SEQ ID NO: 5433 - protein, 363 aa, Thermoproteus tenax
MEAAILEKYNSELVIEEVDVEPPKSGEVALRVKAAGVCHSDLYVLEGATPVPPPLVPGHEAVAEVIEVGPDVQGLSRGDLVVTSFIWPCGRCRNCARGHENLCERFSEVRLKGVLLDGTTRLRRRKSGEPLRIFLGGLWAQEAVVPASAVAKLPPRLANRPELAMLGCAFLTAYGAVVNSGSVQPGDTVAVIGTGGVGLAIVQVARAVGARVIAVGRNPEKLKLAAEMGAEVVNARDGDAVAEVRKLTDGRGADVVVEAVGSEQTVEQAIDMASTGGRVVLVGLMGLGKKAPLHVARVVRGGISVIGSYGARPRVDLPKVIGMVERGLLRPELMARDFYKLEQINEAVEALRSGRSIRPIVLP

SEQ ID NO: 5434 - protein, 197 aa, Medicago truncatula
MSGSRFIKCVTVGDGAVGKTCLLISYTSNTFPTDYVPTVFDNFSANVVVDGSTINLGLWDTAGQEDYNRLRPLSYRGADVFLLAFSLISKASYENIAKKWIPELRHYAPGVPIILVGTKLDLRDDSQFFQDHPGAAPITTAQGEELRKLIGAPVYIECSSKTQKNVKAVFDSAIKVVLQPPKQKKTKRKGQKACSIL

SEQ ID NO: 5435 - protein, 375 aa, Arabidopsis thaliana
MPLSLQSPPCATLSASIRKGRWKTLAAGFSVTPLPAVNFSLRRSIPRILASASSSSSPASSSLEAGENNELNAVSAFSEIVPDTVVFDDFERFPPTAATVSSALLLGICGLPDTIFRNAVDMALADSSCAGLETTESRLSCFFNKAIVNVGGDLVKLVPGRVSTEVDARLAYDTNGIIRKVHDLLRLYNEIDVPHDRLLFKIPATWQGIEAARLLESEGIQTHMTFVYSFAQAAAASQAGASVIQIFVGRLRDWARNHSGDTEIESAIKSGEDPGLALVKRSYNYIHKYGYKSKLMAAAVRNKQDLFSLLGVDYVIAPLKVLQSLKDSPAIPDDEKYSFVRKLTPETATHYHFTNKELVKWDQLSLASSMGPASV

SEQ ID NO: 5436 - protein, 197 aa, Medicago truncatula
MSASRFIKCVTVGDGAVGKTCLLISYTSNTFPTDYVPTVFDNFSANVVVNGSTVNLGLWDTAGQEDYNRLRPLSYRGADVFILAFSLISKASYENVSKKWIPELKHYAPGVPIILVGTKLDLRDDKQFFVDHPGAVPITTAQGEELRKLINAPAYIECSSKSQQNVKAVFDAAIRVVLQPPKQKKKKSKAPKACSIL

SEQ ID NO: 5437 - protein, 375 aa, Arabidopsis thaliana
MPLSLQSPPCATLSASIRKGRWKTLAAGFSVTPLPAVNFSLRRSIPRILASASSSSSPASSSLEAGENNELNAVSAFSEIVPDTVVFDDFERFPPTAATVSSALLLGICGLPDTIFRNAVDMALADSSCAGLETTESRLSCFFNKAIVNVGGDLVKLVPGRVSTEVDARLAYDTNGIIRKVHDLLRLYNEIDVPHDRLLFKIPATWQGIEAARLLESEGIQTHMTFVYSFAQAAAASQAGASVIQIFVGRLRDWARNHSGDTEIESAIKSGEDPGLALVKRSYNYIHKYGYKSKLMAAAVRNKQDLFSLLGVDYVIAPLKVLQSLKDSPAIPDDEKYSFVRKLTPETATYYHFTNKELVKWDQLSLASSMGPASV

SEQ ID NO: 5438 - protein, 197 aa, Medicago truncatula
MSASRFIKCVTVGDGAVGKTCLLISYTSNTFPTDYVPTVFDNFSANVVVNGSIVNLGLWDTAGQEDYNRLRPLSYRGADVFILAFSLISKASYENVSKKWIPELKHYAPGVPIILVGTKLDLRDDKQFCIDHPGAVPITTAQGEELRKLINAPAYIECSSKSQENVKAVFDAAIRVVLQPPKQKKKKNKAQKACSIL

SEQ ID NO: 5439 - protein, 382 aa, Corynebacterium efficiens YS-314
MNDKNVEVRRGLYGVVSDYTAISKVMPETNSLTYRGYPVQDLVEHCSFEEVIYLLWNGELPTAEQLREFNTRGRSYRVLDAGLIALIHSLPMGCHPMDVLRTAVSYMGTKDPEPFTTGADHVLRIGHNLLAQLPMVVAMDIRRRSGADIIAPDPDKGIAENFLSMVFGTASASVATNPEDVRDFEKSLILYAEHSFNASTFTSRVITSTRSDAYSAIAGAIGALKGPLHGGANEFVMHTMLDIDDPDNAAAWVHRALDNKDLIMGFGHRVYKSGDSRVPSMEKSMRALAQRHDAEKWVRMYEQMQQVMEDRTGIKPNLDFPAGPAYHILGFPVDFFTPLFVLARLAGWTAHIVEQYENNSLIRPLAAYNGVEQREVVPIDQR

SEQ ID NO: 5440 - protein, 327 aa, Spiroplasma citri
MLKKIGILTSGGDSQGMNAAIAGVIKTAHAKGLETYIIRDGYLGLINNWIEVVDNNFADSIMLLGGTVIGSARLPEFKDPEVQKKAVDILKKQEIAALVVIGGDGSYQGAQRLTELGINCIALPGTIDNDITSSDYTIGFDTAINIVVEAIDRLRDTMQSHNRCSIVEVMGHACGDIALYAGIAGGADIISINEAALSETEIADRVAMLHQAQKRSVIVVVSEMIYPDVHKLAKLVESKSGYITRATVLGHTQRGGNPTAMDRYRAFQMAQFAVEQIIAGVGGLAIGNQGDQIIARPIMEALSIPRSSRKEIWAKFDQLNQNIYQKS

SEQ ID NO: 5441 - protein, 345 aa, Candida albicans
MSTDHHSHPVEGHQFKKIFNRLSGQPESYSRKQNYTFGKTLGAGSFGIVRYARDNSTDEEVAVKIILKKALKGNESMIIDEMQLLEQLNNPHIVGFRDWFESKDKFYLVTQLATGGELFDRIVQKGRFTEHDASLVVLQMLEALEYLHNKDIVHRDIKPENILYLTSKDDSPIVLADFGIAKRLQNPNEKLTSSAGSFGYAAPEVILGTGHGKPCDIWSLGVVTYTLLCGYSPFRSENVQDFINEVKHNNAVIFHADYWKDVSKDARRFIIKALQFNPDNRPTATELLNDPWLVSIAKEYKETDLLPNFKQGFDAKKKFRQAIELVKLNNRIKKLKEWQTDEDDD

SEQ ID NO: 5442 - protein, 314 aa, Streptococcus dysgalactiae subsp. equisimilis
YAADEKTVPNFKSPDPDYPWYGYDAYRGWESRYHDLKVNLEGSKEYQVYCFNLHRHFPSKSTSIVKNWYQKIEGTEDSFKKNARTPRIGNGDLKRNISNVIYNGYKSNANGFMNGIEDLNAILVTQNAIWYYSDSASLDVSKMWEKEAKSNEISQEQVKLMREALKKLIDPKLGETVEKKLPTNYKLNIFVSKDNSIQNLLSAEYVPDSPPMPGEVPKEENPKEEDPKVPGLDGEEVPEVPSESLEPALPPLMPELDGQEVPEVPSESLEPALPPLMPELDGQEVPEVPSESLEPALPPLMPELDGQEVPEKPS

SEQ ID NO: 5443 - protein, 168 aa, Zea mays
MAASSTATSVHDFIVKDASGKDVDLSTYKGKVLLIVNVASQCGLTNSNYTELAQLYEKYKDQGFEILAFPCNQFGGQEPGTNEEIVQFACTRFKAEYPIFDKVDVNGSNAAPIYKFLKSSKGGLFGDSIKWNFSKFLVDKEGRVVDRYAPTTSPLSIEKDIKKLLGSS

SEQ ID NO: 5444 - protein, 297 aa, Neurospora crassa
MSKLGINDKIKLNSGYEIPQLGFGVYQTPADQVDKIVQEAFKVGYRHVDSASAYRNEAGCGAAILRSTIPRSEIFFTSKVGPKHISYNAAKRIISESLAKTGLGYIDLMLLHAPYGGSVHRKGAWLALVEAVEEGKIRSIGVSNYGVHHLDELEQHIKELEQERGGSGKGGVLSVGQWEVHPWCPRQDIVEWCRKRNVVVEAYAPIVRGERFGEPRLKSLAEKYGKTEAQVLVRWSLQKGYVPLPKSVKAERIKENADVYDFDLSEEEVKALETDEYSPVCWDPTTSELDNYSGQEV

SEQ ID NO: 5445 - protein, 210 aa, Candida albicans
MSGKGTSSRAYDMIMKLLLVGDSGVGKSCLLLRFVEDKFNPSFITTIGIDFKIRTIESKGKRIKLQVWDTAGQERFRTITTAYYRGAMGIVLIYDVTDSRSFENVENWFQTVTQHANEDAQIFLVGNKCDDEVNRQVSKEQGQELAAKLNVPFLEASAKSNENVDSIFYELASIIQEKHVEENIGGVGGASGAGGIDVSQNNSGAKNNCC

SEQ ID NO: 5446 - protein, 254 aa, Zea mays
MRKKLGTRFPAARIKKIMQADEDVGKIALAVPVLVSRALELFLQDLIDRTYEITLQSGAKTLNSFHLKQCVKRYSSFDFLTEVVSKVPDLGGADSCGDERGLPRRRKSNGSDPENDESRSSKMAIRNANISPRGRGRGRGRGRGRPPTKRKEVGYVQFEDESSMFAEQGEPLPGEETVQEINGNETMPQSTQPPVEAPPTALAQATTSSKAEEANSDHQSDWPMPDAIGSIGVVPSGFGHLTVQVEDEDYDNED

SEQ ID NO: 5447 - protein, 255 aa, Medicago truncatula
MAMTRESWAFVFGIIGNIISFAVFLSPLPTFYVIFKKKSAEGFQALPYVVALFSAMLWIYYAFVKRESALLLITINTFGIVVESAYIIMFLIYAPKKQRLSTIKLLLLLNVFGFGAMLLSTLYLSKGAKRLAIIGWICLVFNISVFAAPLFVISKVIRSRSVEYMPFFLSFFLTINAVMWFFYGLLLRDYYVALPNTLGFVFGIIQMVVYLIYRNATPVVEAPMKGQELSGGHIIDVVKIGTDSNRAGGGAGSKV

SEQ ID NO: 5448 - protein, 355 aa, Schizosaccharomyces pombe
MSDSKLADSLNCLSVSTPSTTANPGRQQLLRLAVSNQRQVNNVSLANGKENKRTSNSKFNSSLRKIEEPIAGVPSSAGPQWREFHIGMFEIGKPLGKGKFGRVYLAKEKKTGFIVALKTLHKSELVQSKIEKQVRREIEIQSNLRHKNILRLYGHFHDEKRIYLILEFAGRGELYQHLRRAKRFSEEVASKYIFQMANALSYLHKKHVIHRDIKPENILLGIDGEIKLSDFGWSVHAPSNRRTTLCGTLDYLPPEMVEGKEHTEKVDLWSLGVLTYEFLVGAPPFEDMSGHSATYKRIAKVDLKIPSFVPPDARDLISRLLQHNPEKRMSLEQVMRHPWIVKYKDSWTRKSSESS

SEQ ID NO: 5449 - protein, 276 aa, Schizosaccharomyces pombe
  misc_feature (93)..(93): Xaa can be any naturally occurring amino acid
MKPFSPSQTNFEKEQLCFGVYQLKDCYQQVIEALSLGIRVIDSAITYRNEKECEQAIQDFCHQNVNIKREDITLITKIPDSLQGFERTWKAVXQSLRRTGRPKLDVVLIHSPKWPVRRIESWRALLQHQKEGRINKIGVSNYNIHHLEEIISLGLPLPAINQVEFSAFNNRPTFLSYCFNHGILVQAFSPLTRGYRLSDIRLLDLSLKYNKTPANILLRYCLQKGVSPISKASSFVHIHENVKAEQFMLDPSDMDVMDTWDEEFVSKPTWNPIILP

SEQ ID NO: 5450 - protein, 137 aa, Glycine max
  misc_feature (28)..(28): Xaa can be any naturally occurring amino acid
  misc_feature (101)..(101): Xaa can be any naturally occurring amino acid
  misc_feature (110)..(110): Xaa can be any naturally occurring amino acid
  misc_feature (121)..(121): Xaa can be any naturally occurring amino acid
GSRIKPSISMFLTSCNIKSTGHKMGISXKGSDQILERYLYLHNVPNNEDFDPDTRLKNHALHKYDSVPAIQLTFASGTHTRVLYLDKTTVTTSMNIDPDCXKRSRSDTGXILKCTPRRASXDEQHSYLPQPILYSQK

SEQ ID NO: 5451 - protein, 162 aa, Zea mays
MVAFSLKIFYWPEGNPTTASMQEILYWQGHTMSMMYKIVADALRKEGLHERHPQEYLNFYCLGKREVSNEVPTTGNSNENSAVRLSQKFKRFMIYVHSKGMIVDDEYVLIGSANINQRSMDGSRDTEIAMGAYQPHYSWAGSGRPPRGQARLSSVWGSSHHI

SEQ ID NO: 5452 - protein, 405 aa, Bradyrhizobium japonicum USDA 110
MKNSDELYLSAREAAAELAISPATLYAYVSRGLIRSEPTPDSRKNRYRAEDVRALKERRVPSPEPRGLRSFDADLPVMDTEISTITEEGAIYRGVNCVDLAENDTLEHTATLLWDVSGVDPFAPDNQPEISEEMRTIAGAARRAAPIDRAIAVLALAASADPRAFTRAPDGRAMVGARIVRLLVATMLNAEASAEPLHQQVARVWAADNKHAPDLIRRALVLLADHELNASTFTARCAASTGLNLYDAVIAGLAALKGPKHGGAGVLASQLVKTLVDRDVAPVVRERVALGERFAGFGHGVYKRGDPRAQSLLNALSRAGAPRKFTREVPERIAEATGEFVNIDYALAVLVHALRLPAGSELALFAMARSVGWIAHASEQLQFGKLIRPRARYVGPAPGRRTGGS

SEQ ID NO: 5453 - protein, 364 aa, Bradyrhizobium japonicum USDA 110
MNIHLTKSQIGLDGVPAAETVLSHVDGERGELIIAGEHVGRLAAKSSFEGVTARLWNGASKTSLSEANVRASLGAARERAFARLAELLPATHGMGIVDGFRAAVAGLRAEHGLEHEATIVGAFPVISGALVRRAKGLDPVAPDPSASHAADTLRMLHGRAPATREVTALDAYLVTVCDHGMNASTFTTRVVASTQADLFAAVTAGYCALTGPLHGGAPEPVLEMLDAIGSRERIQPWVDAALARGERMMGFGHRVYRVRDPRADVLKTAIEALASNGADLPFAGEVEAYIRAALRKKNPDRPLETNVEFFTAILLDALAIPRQAFTPIFAVARAAGWTAHAREQQRTGRLIRPSSSYVGAVPEA

SEQ ID NO: 5454 - protein, 317 aa, Photorhabdus luminescens subsp. laumondii TTO1
MLAELITSYRKSAAIYAFVDTGLSIHFRNGAYVDIDELSRQCGIDYSRLDRLCDFLIEIGILVNHGHKVTLSEECSALADPESMESLIVKWELSPDCWNAWSMYPRSLLENDGKPAFEITHGKSFFEHLASNKLLKSNFDSSMSKGSDKIIEKLLDIYDFGQYNRILDIGGGEGSLLVKMSEKVKGKHYAVLDRYDEIPVLENIDFINGDFLKVIPSGYDLYILKDVIHDWSDNNAILILENCRKAMDNGSAVLLISYMKKPQSKMVIYLDILMDVLFSGKERYLTEFERLANQAGLVIQDVKDIDESSSIIQLGIK

SEQ ID NO: 5455 - protein, 317 aa, Photorhabdus luminescens subsp. laumondii TTO1
MLIDLITSYRKTAAIYTFVDAGLSIHFKNGDYVDINKLASQYGIDYSRLNRLCDFLIEIGVLVSSDHGVALSEECSALADPNSVEFLTVKYEINSEHWDSWLMYPKSLLENNGKSAFEMVHGKSFFEHLDSNKGLKSDFDALMSKYTNKIIKELLVIYDFDKHNRILDLGGGDGELLIRISEQVKGKDYTVLDRYNEVPISEGINFIKGDFFKPIPTGYDLYILKNVLHNWPDNDAISILKNCREAMDNNATLLIITLMKKPQSLVVKSVDILMDMLFSAKQRYLSEFEDIANQAGLVIRHYKDLDEIFSLIELKVK

SEQ ID NO: 5456 - protein, 118 aa, Triticum aestivum
  misc_feature (82)..(82): Xaa can be any naturally occurring amino acid
  misc_feature (86)..(86): Xaa can be any naturally occurring amino acid
ATSVAPFQGLKSTAGLPVSRRSNGASLGSVSNGGRIRCMQVWPIEGIKKFETLSYLPPLSTEALLKQVDYLIRSKWVPCLRXSKLXHLPVEHNALLGTTMARVLACGTAYFGCTDPHR

SEQ ID NO: 5457 - protein, 375 aa, Arabidopsis thaliana
MPLSLQPPPCATLSASIRKGRWKTLAAGFSVTPLPAVNFSLRRSIPRILASASSSSSPASSSLEAGENNELNAVSAFSEIVPDTVVFDDFERFPPTAATVSSALLLGICGLPDTIFRNAVDMALADSSCAGLETTESRLSCFFNKAIVNVGGDLVKLVPGRVSTEVDARLAYDTNGIIRKVHDLLRLYNEIDVPHDRLLFKIPATWQGIEAARLLESEGIQTHMTFVYSFAQAAAASQAGASVIQIFVGRLRDWARNHSGDTEIESAIKSGEDPGLALVKRSYNYIHKYGYKSKLMAAAVRNKQDLFSLLGVDYVIAPLKVLQSLKDSPAIPDDEKYSFVRKLTPETATHYHFTNKELVKWDQLSLASSMGPASV

SEQ ID NO: 5458 - protein, 435 aa, Anabaena variabilis ATCC 29413
MTTELLQQVRVIDPVSGIDNITDVLIADGVIQAIAPNIPNTSPDTQIRDCRGLVLGPGLVDLYSHSGEPGFEERETLASFLQAAAAGGFTKVSILPDTSPAIDNPGLVAQLQKRGLGIGDWGLGSNSSPLHPCTPAPLLHLWGAITLDVAGKQMTELADLAAAGVVGFTDGLPLDNLSLVRRLLEYVQPLGKPVAFWPCDRQLSANGVMREGADALRFGLPPIPPSAETTAIAALLELVAATGNTQVHIMRVSTARSVELIAAAKAKGLPITASTTWLHLLLDTKAVKSYDTSLHLDPPLGNASDVKALRAGVRTGVIDAIAIDHAPYTYEEKVQAFAEAPPGAIGFELALPLLWQNLVETGEFTALELWQALSTRPAQCIQQKVSAFAPHHKAELTLFDPQKIWKVEKKNLCTLSSNTSWLGQELQGRVIQIWL

SEQ ID NO: 5459 - protein, 84 aa, Brassica napus
AMGFPPEFFPVLFAVPRMAGYLSHWRESLDDPDTKIMRPQQAYVDPRVRHYEPVRQRTLSSDSDKMGQVSISNASRRRLSGSAL

SEQ ID NO: 5460 - protein, 110 aa, Triticum aestivum
MGGHAAGPTSYGSSGRRSFPAPAATAKQRRAPAPAGNGGKSDGGGYFGAEAAVVLALMTAALLVLPLLLPPRPPPPPLSLFVPVAILAGLLLLVLLPSDARGLRVAPSYL

SEQ ID NO: 5461 - protein, 435 aa, Thermus thermophilus HB27
MEGLTPEMQREAEALRREWETNPRWKGVRRDYRPEDVVRLRPSVMVEYTLAKRGAEKLWKLLHERPYVHTFGAYTGAMAVEMVRAGLEAIYLSGWQVAADANLAWQTYPDQSLYPYNSVPQIVKRINNALMRADQVERIEGRVTRDWYVPIVADAEAGFGGALNVFELTKAMIEAGAAGIHYEDQLASEKKCGHLGGKVLVPTGQHIRTLQAARLAADVMGVPTVIIARTDAEAATLITSDIDERDKPFILPDERTPEGFYRFKNGIEAGIARALAYAPYADVIWMETSKPDLEEARKFAEAVKKEFPDKLLAYNLSPSFNWKKFLDDETIAKFNRELGEMGYKFQFITLAGWHALNYYIWELAKGYKERGMPAFVELQQKEFAAQKEGFTAVKHQREVGAGYFDEVVLALTQGQASTLALKGSTEEAQFNEPVH

SEQ ID NO: 5462 - protein, 254 aa, Brassica rapa subsp. pekinensis
MGRGRVEMKRIENKINRQVTFSKRRAGLLKKAHEISILCDAEVSLIVFSHKGKLFEYSSESCMEKVLERYERYSYAEKQLKAPDSHVNAQTNWSMEYSRLKAKIELLERNQRHYLGEDLESISIKELQNLEQQLDTSLKHIRSRKNQLMHESLNHLQRKEKEILEENSMLTKQIKERESILRTHQNQSEQQNRSHHVAPQPQPQLNPYMISHQASPFLSMGGMYQGEDPTAVRRNRLDLTLEPIYNCNLGYFAA

SEQ ID NO: 5463 - protein, 509 aa, Arabidopsis thaliana
MGLDSGAFSVSFVFVFLCLLFKSLDRQIRDSILAKRKRKVFNSLMRLWLNESLRIRVVMGKDRISELPDALLIKILSFLPTKIVVATSVFSKQWRPLWKLVPNLEFDSEDYDDKEQYTFSEIVCKSFLSHKAPVLESFRLEFESEKVDPVDIGLWVGIAFSRHLRELVLVAADTGTGTAFKFPSSLCTCNTLETLRLVLLILVDISSPVVMKSLRTLHLELVSYKDESSIRNLLSGCPILEELLVIRGEDSDIEVFTIDEVPSLKRLTINDDHDGQEFWGYVINAPSLKYLLIEDLRCPGFCLNAPELMEANIFDGTSITNDNFLGYLTSVKRLLLNLSPWKITYPTGSIFYQLVSLEMYTREIDWWDLLTLMLEHSPKLQVLKLTDVRHFIISQLCIFNCVKFHKNGLPGGKWNEPKYVPECLLSHLETFVWRRFDWGREEEKEIATYILKNARRLNKATFSTNPVNSEELDKLKERRKVHNELDGVVRASNSCQVLGSGASRWELKT

SEQ ID NO: 5464 - protein, 375 aa, Arabidopsis thaliana
MPLSLQSPPCATLSASIQKGRWKTLAAGFSVTPLPAVNFSLRRSIPRILASASSSSSPASSSLEAGENNELNAVSAFSEIVPDTVVFDDFERFPPTAATVSSALLLGICGLPDTIFRNAVDMALADSSCAGLETTESRLSCFFNKAIVNVGGDLVKLVPGRVSTEVDARLAYDTNGIIRKVHDLLRLYNEIDVPHERLLFKIPATWQGIEAARLLESEGIQTHITFVYSFAQAAAAAQAGASVIQIFVGRLRDWARNHSGDNEIESAIKSGEDPGLALVKRSYNYIHKYGYKSKLMAAAVRNKQDLFSLLGVDYVIAPLKVLQSLKDSPAIPEDEKYSFVRKLTPETATHYHFTNKELVKWDQLSLASSMGPASV

SEQ ID NO: 5465 - protein, 250 aa, Zea mays
  misc_feature (104)..(104): Xaa can be any naturally occurring amino acid
MAAAARQRGTVKWFNDTKGFGFISPEDGSEDLFVHQSSIKSEGFRSLAEGEEVEFSVSEGDDGRTKAVDVTGPDGSFVRGGGGGGGGGGGYGSRGGGGSGGGGXAYGGSWGGGRRSGGGGGPGACYKCGEPGHMARDCPSADGGGGYGGGGYGGGGYGGGGGGGGGCFKCGEPGHMARDCSSGGGGYRGGGGGGGGGGGCYNCGQAGHMARDCPSGGGGGGGRFGGGGGGGDRSCYNCGEAGHIARDCPT

SEQ ID NO: 5466 - protein, 108 aa, Glycine max
MEHGSVADSSASTFSIMEEDHTLANSVRFVLNQDPRVAFCGYSIPHPADNKVNIRVQTTGDPAKDVMKDALQDLMVMGQHVRGTFDKAVADFKSKMPAEQMDVDLNQQ

SEQ ID NO: 5467 - protein, 420 aa, Solanum demissum
MGNCVGSSARVEATLSSTTPSAYEASRFPDRKSNSSVPSSLSIPSYGRKSSSESLPTPRSESEILFSPNVKSFSFNELKNATRNFRPDSLLGEGGFGCVFKGWIDAQTLTASKPGSGIVIAVKKLKPEGFQGHKEWLTEVNYLGQLRHPNLVKLIGYCIDGDNHLLVYEFMPKGSLENHLFRRGPQPLNWATRIKVAIGAARGLAFLHDAKEQVIYRDFKASNILLDAEFNSKLSDFGLAKAGPTGDRTHVSTQVMGTQGYAAPEYVATGRLTAKSDVYSFGVVLLELLSGRRAVDNTKVGIEQNLVDWAKPYLGDKRKLFRIMDTKLEGQYPQKGAYTAANLAWQCLSNEPKLRPKMSEVLTALEELQSPKGVSKLSHTEHRAIPSPVAVSPMRHHRSPLHMTPSASPFQAYQKSPRGR

SEQ ID NO: 5468 - protein, 212 aa, Secale cereale
MDAADAGSPRFGHRTVCSEPPKRPAGRTKFKETRHPLYRGVRRRGRLGQWVCEVRVRGAQGYRLWLGTFTTAEMAARAHDSAVLALLDRAACLNFADSAWRMLPVLAAGSSRFSSAREIKDAVAVAVVEFQRQRPFVSTSETADGEKDVQGSPRPSELSTSSDLLDEHWFSGMDAGSYYASLAQGMLMEPPAARAWSEDGGEYSGVHTPLWN

SEQ ID NO: 5469 - protein, 227 aa, Glycine max
  misc_feature (192)..(192): Xaa can be any naturally occurring amino acid
MDQFLWRVLPLLTILVSFGVFFYLQDSYTAQLFPLIKLPRDKCSLLPHRHFWISSKRIVTPQGIISGSVEINDGKIISVVEGHAIQGKPKQEEVIDYGDAVIMPGLIDVHVHLNEPGRTEWEGFDTGTRAAAAGGVTTVVDMPLNCYPTTVSKEKLKLKLDAAEDKIYVDVGMTNNLCLSIQLTELLRYFLXSYTGFWGGLIPENALNTSILDGLLSAGVLGVKVYI

SEQ ID NO: 5470 - protein, 268 aa, Secale cereale
MDVADIASRSGQQQQGHRTVSSEPPKRPAGRTKFHETRHPLYRGVRRRGRVGQWVCEVRVPGIKGSRLWLGTFNTAEMAARAHDAAVLALSGRAACLNFADSAWRMLPVLAAGSFGFDSAREVKAAVAVAVVAFQRKQIIPVAVAVVALQKQQVPVAVAVVALQQRQVPVTVAVVALQKLQVPVAVAVVALQKKQIILPAACLAPEFYMSSGDLLELDEEQWFGGMDAGSYYASLAQGMLVAPPDDRARPENGEQSGVQTPLWSCLFD

SEQ ID NO: 5471 - protein, 143 aa, Zea mays
  misc_feature (130)..(131): Xaa can be any naturally occurring amino acid
MAMAFKMATTGMWVTDECKNSFMEMKWKKVHRYIVFKIDERSRLVTVDKVGGPGESYDDLAASLPNDDCRYAVFDFDFVTVDNCRKSKIFFIAWAPTASRIRAKMLYATSKDGLRRALDGISYEVQATDXXEMGFDIIKDRAK

SEQ ID NO: 5472 - protein, 174 aa, Glycine max
  misc_feature (140)..(140): Xaa can be any naturally occurring amino acid
  misc_feature (154)..(154): Xaa can be any naturally occurring amino acid
MICSLAVTTANRAGAGMVAPFTGLNSMAGLPTTKTNTDITFIACIGGIEQCMQVWPPLGKKKLETLSYLPYLDDAQLAKEVKYLLRKGWIPCLEFNLDHSSVYREHNTSPRYYDRRYCTMSNLTMLGCTDASHVLNELHXAKTAYPNGSVRIIXFDNATQVQCITFIVYNTPAY

SEQ ID NO: 5473 - protein, 158 aa, Petroselinum crispum
MDFRLMGFNHPLLNTLSPHCDEDNQDSSNKNKSEQARSYVRDAKAMATTPADVKEYPNSYVFVVDMPGLKSGDIKVQVEEDNVLVVSGERKREEEKEGVKYVRMERKVGKFMRKFVLPENADLENINAVCQDGVLSVTVQKLPPPEPKKPKTIEVKIA

SEQ ID NO: 5474 - protein, 497 aa, Mesorhizobium loti
MKGDDGLTVTQSLTRRLKNPELFDDLAGVPGRKAEQSTRRFSVFNPSTGELLAELPDMDVRDVSKAIDKAEAAQEHWAALTARERSDILWEWHQLILDHSEDLAAILTAEMGKPLAEAKSEIAHAAAYLQWYAEEANRIYGETISPPSNDRRMLVIKQPIGVVGAITPWNFPASMVARKISPALAAGCAIVLKPAEQTPLVAGAMFTLARMAGFPDGVLNLIYASEGDAVGRELCSNPKVRKISFTGSTEVGRLLMRECSDQIKRTSFELGGNAPFIVFDDADVDAAVDGALQAKFRNAGQTCVSANRLYVQSSVYNEFCDKFTKRVSALRVGDGFEPEVAIGPLIDKCALAKIEDHIRDAVRQGGKIRCGGNRIGESGTFFEPTVITDVERTMRVAQEETFGPLAPIIRFNDPDQVVREANDTIYGLAAYFYASNLKRVWRVAETLEYGMVGINTGRMSSEAAPFGGMKQSGIGREGSRHGLEDYLEMKYLCMGGL

SEQ ID NO: 5475 - protein, 336 aa, Klebsiella pneumoniae
MAADPSVHIQGVIMSFDLIIKNGTVILENESRVVDIAVNDGKIAAIGEHLGEAKQVMDATGLIVSPGMVDAHTHISEPGRTHWEGYETGTRAAAKGGITTMIEMPLNQLPATVDRQTIELKFDAAKGKLTIDAAQLGGLVSYNLDRLHELDEVGVVGFKCFVATCGDRGIDNDFRDVNDWQFFKGIQKLAEMKQTVLVHCENALICDELGEEAKREGRVTAHDYVASRPVFTEVEAIRRVLYLAKVAGCRLHVCHVSSPEGVAEVTRARQEGQDVTCESCPHYFVLDTDQFAEIGTFGEVLSADPRCGKTRKACGKSCSTEKSTAWSPTIRRAHRK

SEQ ID NO: 5476 - protein, 430 aa, Rubrobacter xylanophilus DSM 9941
MDAAVDRAKRAFPGWRDVPPAERARLLGRLAEALDAEREDLARTESLNVGKPLSAARAEMKMVVDTFAYYAGAPERLLGETIPVAGGVDMTFREPLGVVGLIVPWNFPLQITSWKVAPALAAGNTVVLKPAELTPLTALKLERIAGEAGIPEGVLNVVVGPGEIVGKRLVEHPEVAKIAFTGSTEVGRKIMAGAAGTVKRVTLELGGKSASIVFADADLEKAAAAAPLAVFDNAGQDCCARSRILVERGAFERFMSLLEPAVKELRVGDPQDETTQMGPLISASHREKVASYVTEEAPVAIRGEAPDGKGFWYPPTVLAPVSNKDRVAREEIFGPVAAVIPFEDEEEAVRLANDTIYGLSGSVWTRDVARALRVARRVETGTLSINSNTSVRVSTPFGGFKQSGVGRELGPHALEHYTEVKNVFVATEEG

SEQ ID NO: 5477 - protein, 536 aa, Glycine max
MASSLRISRLISRSFSSTSFFSRGGNGFLGSRHCKYSTSSAIEEEPVKPSVQVEHTQLLIDGKFVDAASGKTFPTLDPRTGEVIAHVAEGHSEDVDRAVAAARKAFDHGPWPKMTAYERQRILLRAADLLEKHNDELAALETWDNGKPYEQAAKIEVPMLVRLIRYYAGWADKIHGLTVPADGPYHVQTLHEPIGVAGQIIPWNFPLLMFAWKVGPALACGNTIVLKTAEQTPLSALYAAKLFHEAGLPAGVLNVVSGFGPTAGAALASHMEVDKLAFTGSTDTGKVVLELAAKSNLKPVTLELGGKSPFIVCEDADVDQAVELAHFALFFNQGQCCCAGSRTFVHESVYDEFVEKAKARALKRVVGDPFKGGIEQGPQIDSDQFEKILRYIRSGVESGATLETGGDKLGNKGFYIQPTVFSNVKDGMLIARDEIFGPVQSILKFKDLGEVVQRANNTRYGLAAGVFTTNMDTAYTLTRALRVGTVWINCFDTFDAAIPFGGYKMSGQGREKGEYSLKNYLQVKAVVNPLKNPAWL

SEQ ID NO: 5478 - protein, 298 aa, Glycine max
MVFSANDLQEWKDFPKGLKVLLLERDNISAAEIRAKLEAMDYNVSTFCEENEALSAISSGLESFHIAIVEVSSSSGQGGFKFLENAKDLPTIMTSNNHCLNTMMKCIALGAVEFLRKPLSEDKLRNIWQHVVHKAFNARASILSESLKPVKESVVSMLQLQTDDEQHESRVSRDIEKVSRFVDNDHELSSGNDKYPAPSTPQLRQGTRLLDDGDCQEQTNCSTGKESGEHEGESKSVETTCGNLNAESTPQQRKSEITLVREEVESTPQQRKSEITLVKEEVDIVDASKGESVASPHT

SEQ ID NO: 5479 - protein, 275 aa, Bacillus cereus ATCC 14579
MHIPTTTLHNGVKMPMIGLGVYKAKEGDEVKQAVKTALEVGYRSIDTATVYENESGVGEAIRESGIPREDIFITTKVWNDDQGYEETLEAFEKSLKKLQMDYVDLYLIHWPVRGKYVDTYRALEKLYEEGKVRAIGVSNFHKHHLELLLPNCKVKPMVNQVELHPMLTQFELRNYCQDEQIQMEAWSPLMRGGEVFQHPIIQAIANKYEKTPAQVILRWDIQSGIVTIPKSVTPSRIKENFTIFDFALTEEEIRQINTLNRDLHVGTNPDKYDTL

SEQ ID NO: 5480 - protein, 340 aa, Streptococcus agalactiae NEM316
MKRIAVLTSGGDAPGMNAAIRAVVRKAISEGMEVYGINQGYYGMVTGDIFPLDANSVGDTINRGGTFLRSARYPEFAELEGQLKGIEQLKKHGIEGVVVIGGDGSYHGAMRLTEHGFPAVGLPGTIDNDIVGTDYTIGFDTAVATAVENLDRLRDTSASHNRTFVVEVMGRNAGDIALWSGIAAGADQIIVPEEEFNIDEVVSNVRAGYAAGKHHQIIVLAEGVMSGDEFAKTMKAAGDDSDLRVTNLGHLLRGGSPTARDRVLASRMGAYAVQLLKEGRGGLAVGVHNEEMVESPILGLAEEGALFSLTDEGKIVVNNPHKADLRLAALNRDLANQSSK

SEQ ID NO: 5481 - protein, 511 aa, Liquidambar styraciflua
MDSSLHEALQPLPMTLFFIIPLLLLLGLVSRLRQRLPYPPGPKGLPVIGNMLMMDQLTHRGLAKLAKQYGGLFHLKMGFLHMVAVSTPDMARQVLQVQDNIFSNRPATIAISYLTYDRADMAFAHYGPFWRQMRKLCVMKLFSRKRAESWESVRDEVDSAVRVVASNIGSTVNIGELVFALTKNITYRAAFGTISHEDQDEFVAILQEFSQLFGAFNIADFIPWLKWVPQGINVRLNKARGALDGFIDKIIDDHIQKGSKNSEEVDTDMVDDLLAFYGEEAKVSESDDLQNSIKLTKDNIKAIMDVMFGGTETVASAIEWAMTELMKSPEDLKKVQQELAVVVGLDRRVEEKDFEKLTYLKCVLKEVLRLHPPIPLLLHETAEDAEVGGYYIPAKSRVMINACAIGRDKNSWADPDTFRPSRFLKDGVPDFKGNNFEFIPFGSGRRSCPGMQLGLYALETTVAHLLHCFTWELPDGMKPSELEMNDVFGLTAPRAIRLTAVPSPRLLCPLY

SEQ ID NO: 5482 - protein, 195 aa, Zea mays
  misc_feature (69)..(69): Xaa can be any naturally occurring amino acid
MSSTYMKRMLQGIGSDQVIGKAAMDDEEHEVYGQEIPEDGDMDGADVDMAAAGDDAANVQELDEMKRKXEEMQGCDPSISTAEAKEQVDARSVYVGNVDYACTPEEVQQHFQACGTVNRVTILTDKFGQPKGFAYVEFLEQEAVQEALNLNESELHGRQIKVAPKRTNVPGMKQRPPRGYNPYHGYPYRSYGAPY

SEQ ID NO: 5483 - protein, 327 aa, Triticum aestivum
  misc_feature (297)..(297): Xaa can be any naturally occurring amino acid
MASRTAAVPEVALRSGDARPMPAIGMGTAQSPVVPDTTVKAVLEAVEVGYRHFDTASMYATERPLGEALAEAVRRGLLASREEVFVTSKLWCTQCHPHLVLPSLQESLQNLQMEYVDLYLIHWPISLKPGPVVFPVKREDAVPFDLEGVWRAMEECHRLGLAKAIGVSNFTTRHLDKLLPAATVPPAVNQVEMNPVWQQRKLREYCAEKGIHVAAYSPLGGQNWSGDGNAVLDSEVLAEIAKARGKSVAQVALRWIYEQGVTPIVKSFSKERLKENLGIFDWGLTDDDLRKIGQIPXKKIVKAETVLFSAEGEFTSADLADMEIVED

SEQ ID NO: 5484 - protein, 427 aa, Glycine max
  misc_feature (176)..(176): Xaa can be any naturally occurring amino acid
MNSERQSTTTTLLHGKYELGRVLGHGSFAKVYHARNLKTGQHVAMKVVGKEKVIKVGMMEQVKREISVMKMVKHPNIVELHEVMASKSKIYISIELVRGGELFNKVSKGRLKEDLARLYLQQLISTIDFYHKPHIYHHNPPPENLLLDERRNLKVSDFGLTAFSEHLKEDGLLHTXTCGTPAYVSPEVIAKKGYDGAKADIWSCGVILYVLLAGFLPFQDDNLVAMYKKIYRGDFKCPPWFSLDARKLVTKLLDPNPNTRTGVGSRMESSWFKKPVPRKLAAEKVDLEEEKIESQLETINAFHIISLSEGFNLSPLFEDKRREEMRFATAGTPSTVISRLEEVAKAGKFDVRSSETKVRLQGQERGRKGKLAIAADIYAVTPSFMVVEVKKDNGDTLEYNQFCSKQLRPALKDIFWNSSQNSAPASA

SEQ ID NO: 5485 - protein, 340 aa, Xanthomonas axonopodis pv. citri str. 306
MKALVKREANKGIWLEQVPVPTPGPNEVLIKLEKTAICGTDLHIYLWDEWSQRTIEPGLTIGHEFVGRVAELGSAVTGYQIGQRVSAEGHIVCGHCRNCRGGRPHLCPNTVGIGVNVNGAFAEYMVMPASNLWPIPDQIPSELAAFFDPYGNAAHCALEFDVIGEDVLITGAGPIGIIAAGICKHIGARNVVVTDVNDFRLKLAADMGATRVVNVSKTSLKDVMADLHMEGFDVGLEMSGNSRAFNDMLDCMYHGGKIAMLGIMPRGAGCDWDKIIFKGLTVQGIYGRKMYETWYKMTQLVLSGFPLHKVLTHQLPIDDFQKGFDLMEEGKAGKVVLSWN

SEQ ID NO: 5486 - protein, 511 aa, Thermobifida fusca
MDDALVQRLTRHVVSSTGRTVVTTAPFTGEPLATLPQSSASDVTEAFRRARAAQREWAQRSPRQRIAPFLRFSDLLLDRQTEILDILQWETGKARKNAFEEVCDAALGTLHYARHAPRLLRRRRAPGAIPLATRTRVNYQPKGVVSVITPWNYPLTLPVADAVPALLAGNAVVAKPDTQTALSALWAIDLLVEAGLPRDLWLVVLGEPAEIGDPLVDEADYVAFTGSSATGARIAQRAASRLIGCSAELGGKNPMIVCADADLDRTVHGAVAACFSNSGQLCISMERLYVHDSIYDAFVEKFVAETKNLRLGADLDYSADLGSLTSQRQFDRVVAHVEDARSKGATVLAGGRPRPDVGPLFYEPTVLTGVDESMTLCAEETFGPVVSLYRFTTEDEAIERANHTPYGLNASVWTRDVARGRRIAERLKAGTVNINEGYGAAFASYGAPMGGMKRSGLGRRHGVEGILRYTEAQTVSSQHVVGLSGPPGMSAETLSRVMTTGIRLMRALRIR

SEQ ID NO: 5487 - protein, 189 aa, Glycine max
MISGHWNVTDVCNALLGGFAAITAGCSVVEPWTAIVCGFVASVVLIACNKLAEKVKFDDPLEAAQLHGGCGAWGVIFTALFAKKEYVSQVYGEGRAHGLFMRGGGKLLAAHVIQILVIVGWVSATMGPLFWGLNKLKLLRISSEDELAGMDLTRHGGFAYAYEDDESHKHGIQLRKVGPNASSTPTTDE

SEQ ID NO: 5488 - protein, 227 aa, Thermus thermophilus
  misc_feature (24)..(24): Xaa can be any naturally occurring amino acid
  misc_feature (101)..(101): Xaa can be any naturally occurring amino acid
  misc_feature (163)..(163): Xaa can be any naturally occurring amino acid
  misc_feature (210)..(210): Xaa can be any naturally occurring amino acid
MERPLESYKKEAAHAAIAYVQDGXVVGLGTGSTARYAVLELARRLREGELKGVVGVPTSRATEELAKREGIPLVDLPPEGVDLAIDGADEIAPGLALIKGXGGALLREKIVERVAKEFIVIADHTKKVPVLGRGPVPVEIVPFGYRATLKAIADLGGEPELRXDGDEFYFTDGGHLIADCRFGPIGDPLGLHRALLEIPGVVETGLFVGXATRALVAGPFGVEELLP

SEQ ID NO: 5489 - protein, 309 aa, Mesorhizobium loti MAFF303099
MRDPYEVLGVAKNASAKDIKSAYRKLAKKHHPDQNPNDPKAKDRFAAANQAYEIVGDEKNRAAFDRGEIDADGKPRFQGFEGAAGGGDPFAGFRRQQGAGGSRFEFRSGRPGGDPFDGNSDIFSQIFGDAFSGARGAGMGDRRQPATAADLNVTLDVTIEEAATAEKVTAMFPDGRKVAVKLPAFVEDGQTIRLKGQGEQGPGQPGDALVKIHIRRHPRYRIEGRDLHADVPVSLADAVLGAKVPVETPTGRLAVNVPAWSSSDKVLRLKGRGLPEKAGGHGDLYAHVRIMLPEGGDSALEALLRGQKG

SEQ ID NO: 5490 - protein, 270 aa, Secale cereale
MDVADIASPSGQQEQGHRTVSSEPPKRPAGRTKFHETRHPLYRGVRRRGRVGQWVCEVRVPGIKGSRLWLGTFNTAEMAARAHDAAVLALSCRAACLNFADSAWRMLPVLAAGSFGFGSPREIKAAVAVAVIAFQRKQIIPVAVAVVALQQQQVPVAVAVVALKQKQVPVAVAVVALQQLHVPVAVAVVALQQQQIILPVACLAPEFYMSSGDLLELDEEHWFGGMDAGSYYASLAQGMLVAPPDERARPENGEQERRPDAAMELFVRLI

SEQ ID NO: 5491 - protein, 375 aa, Arabidopsis thaliana
MPLSLQSPPCATLSASIQKGRWKTLAAGFSVTPLPAVNFSLRRSIPRILASASSSSSPSSSSLEAGENNELNAVSAFSEIVPDTVVFDDFERFPPTAATVSSALLLGICGLPDTIFRNAVDMALADSSCAGLETTESRLSCFFNKAIVNVGGDLVKLVPGRVSTEVDARLAYDTNGIIRKVHDLLRLYNEIDVPHERLLFKIPATWQGIEAARLLESEGIQTHITFVYSFAQAAAAAQAGASVIQIFVGRLRDWARNHSGDNEIESAIKSGEDPGLALVKRSYNYIHKYGYKSKLMAAAVRNKQDLFSLLGVDYVIAPLKVLQSLKDSPAIPEDEKYSFVRKLTPETATHYHFTNKELVKWDQLSLASSMGPASV

SEQ ID NO: 5492 - protein, 499 aa, Corynebacterium efficiens YS-314
MRLWGAGGLAEAMSTENFVSNQIFINGWVDGTSERSTTTLNPFNGEEVATIRNASQEDVDKAYATAAEVQKEWAAVPPVKKARILNKAAQVIEDNRDAIVELIRRESGSTALKANIEAGLAMASLREAATFPARITGQILPSNTPGKSNYVFREPLGVVGVISPWNFPFALSMRSVAPALACGNGVVLKPASDTPIVGGTLLAHIFEAAGLPTGLFNVVVGAGSEIGDYFVEHRIPRLISFTGSTPVGKQVGATATGGKYIKKVALELGGNAPMVVLSDADINKAVAAASMGSFLHQGQICMAVNRIIVEAPVYDQFLEGFAARVSKVAYGDQLDDATMVGPIVNDSQVESVSGKIDLAREQGARAVVSGPIEGRVIAPHVFADVTPDMELFREEIFGPVVGVVKADNEEHALELANDTEFGLSSAVFTEDLQRGINFARRVEAGMTHINDITVNDEAHVMFGGEKNSGLGRFNGEWAIDEFTTDHWVSVTTGTDAYPI

SEQ ID NO: 5493 - protein, 238 aa, Glycine max
MGRGKIPIRRIENSTNRQVTFCKRRNGLLKKTRELSILCDAEVGVIVFSSTGKLYEYSNTSMETIIERFNKQNNNHHRLMDATSAIKGEAASLRQQLQHLQENHRQLMGEELSGLGINQLKHLENQLQMSLNNVRNKKDHIFSDEIKELQQKGSLIRRQNEELHKKIDLIHNENAELKKVIEARHKEEERAALKPPCAIKNRYDTLDPNSLQQRQSQPQPSEPSAEVMIMGYSLKLKM

SEQ ID NO: 5494 - protein, 243 aa, Rhodobacter sphaeroides 2.4.1
MDLVQDGMKLGLGTGSTAAWMVRCLAERVREEGLRVQGVPTSTRTAELARALGIQVVTLDEAKWLDLTIDGADEFDADFNLIKGGGAALLQEKIVATASDRMVVIADAAKEVAHLGAFPLPVEVIPFGWQSTKMLIEETLEGMDVLGREVTLRLSGDAPLLTDEKNYILDLHLKRIGEPRPLALALNQIAGVVENGLFIDICDTVVVGHGDGRVSLRDLQSGQAEEGSIDMDRARNIFADLGD

SEQ ID NO: 5495 - protein, 375 aa, Arabidopsis thaliana
MPLSLQSPPCATLSASIQKGRWKTLAAGFSVTPLPAVNFSLRRSIPRILASASSSSSPASSSLEAGENNELNAVSAFSEIVPDTVVFDDFERFPPTAATVSSALLLGICGLPDTIFRNAVDMALADSSCAGLETTESRLSCFFNKAIVNVGGDLVKLVPGRVSTEVDARLAYDTNGIIRKVHDLLRLYNEIDVPHDRLLFKIPATWQGIEAARLLESEGIQTHMTFVYSFAQAAAASQAGASVIQIFVGRLRDWARNHSGDTEIESAIKSGEDPGLALVKRSYNYIHKYGYKSKLMAAAVRNKQDLFSLLGVDYVIAPLKVLQSLKDSPAIPDDEKYSFVRKLTPETATHYHFTNKELVKWDQLSLASSMGPASV

SEQ ID NO: 5496 - protein, 82 aa, Brassica napus
  misc_feature (14)..(14): Xaa can be any naturally occurring amino acid
  misc_feature (27)..(27): Xaa can be any naturally occurring amino acid
  misc_feature (42)..(42): Xaa can be any naturally occurring amino acid
  misc_feature (76)..(76): Xaa can be any naturally occurring amino acid
MRKKLDTRFPAARXKKIMQADEDVGKXALAVPVLVSKALELXLQDLCDRTYEITLQRGAKTVSSLHLKNCVETYNXFDFLRE

SEQ ID NO: 5497 - protein, 161 aa, Triticum aestivum
MSDSEEHHFESKADAGASKTYPQQAGTIRKNGHIVIKNRPCKVVEVSTSKTGKHGHAKCHFVAIDIFNGKKLEDIVPSSHNCDVPHVNRTDYQLIDISEDGFVSLLTESGGTNDDLRLPSDEALLTQIKDGFAEGKDLIVTVMSAMGEEQICALKDIGPKN

SEQ ID NO: 5498 - protein, 237 aa, Hordeum vulgare subsp. vulgare
MPSRPAPFIHRLRLLRSAVVSPSSAPLPCSRPRLAVPFAQPPIRAPAFAAAGSPLLRPVGARFSLSSNMAAAASSASSVHDFTVEDASGKDVDLSTYKGKVLLIVNVASQCGLTNSNYTELAQLYEKYKDQGFEILAFPCNQFGGQEPGTNEEIVQFACTRFKAEYPIFDKVDVNGDNVAPVYKFLKSSKGSLFGDNIKWNFSKFLVDKDGNVVDRYAPTTSPLSIEKDIKKLLASS

SEQ ID NO: 5499 - protein, 131 aa, Candida albicans SC5314
MSAEDIQMEDASNNSEQEQIQEQEYDINKIKILPGSSEDGTSASFQIIDEDHTLGNALRYIIMKNPEVEFCGYSIPHPSENKLNIRIQTYGNISAVEALHQGLDNLSELCGAIEDKFDDAIKAGGYSTKEP

SEQ ID NO: 5500 - protein, 171 aa, Hordeum vulgare subsp. vulgare
MGAAESSSKLGGSVHDFVVKDVRGNDVELSRYKGKVLLIVNVASRCGLANSNYTEMGQLYEKYREKGLEILAFPCNQFAGQEPDSDEKIVEFACDRFQAQFPIFRKVDVNGNNAAPLYKFLKSERGGLFGERIKWNFTKFLVDKEGHVMNRYAPTWSPLGIENDIKKLLEV

SEQ ID NO: 5501 - protein, 165 aa, Hordeum vulgare subsp. vulgare
MAAASSATSVHDFTVKDASGKDVDLSVYKGKVLLIVNVASQCGLTNSNYTELSQLYPKYKDQGFEILAFPCNQFGGQEPGTNDEIVQFACTRFKAEYPIFDKVDVNGNNVSPLYKFLKSSKGGFFGDSIKWNFSKFLVDKEGHVVDRYAPTTSPMSIEKDIKKLL

SEQ ID NO: 5502 - protein, 115 aa, Zea mays
SAAGRPGNQARDNRCVNESIAMASRLVAAAASSSSSLSSASPLARLISRRGLAGAADGHGSAKVPLWKDPLSPSKWKEEHFVLASLSMWGVIFYGGYKLFSGKKEAKTEAASPQA

SEQ ID NO: 5503 - protein, 505 aa, Mesorhizobium loti MAFF303099
MNKVEFSRPVKAPFDKRYGNFIGGKWTEPRSGRYFENHSPVNGQLLCEVARSDADDIEAALDAAHAAKDAWGRTSVAERSLILNRIADRMEENLDLLACAETWDNGKPIRETTVADLPLAIDHFRYFASAVRGQEGSLSQIDDDTVAYHFHEPLGVVGQIIPWNFPLLMACWKLAPALAAGNCVVLKPAEQTPAAILLWADLIGDLLPPGVLNIVNGFGLEAGKPLASSPRIAKIAFTGETTTGRLIMQYASQNLIPVTLELGGKSPNIFFKDVVAEDDDFFDKAIEGFVMFALNQGEVCTCPSRALIHESIYDRFMERALKRVEAIVQGDPLDPATMIGAQASSEQLEKILSYIDIGRQEGAEVLTGGARNVLPGDLAGGYYVKPTVFRGHNKMRIFQEEIFGPVVSVTTFKDDDEALSIANDTLYGLGAGVWTRDGNRAYRFGRAIQAGRVWTNCYHAYPAHAAFGGYKQSGIGRETHKMMLDHYQQTKNMLVSYSPKKLGFF

SEQ ID NO: 5504 - protein, 292 aa, Aspergillus nidulans FGSC A4
MSEITHPTIKDGWFSEQSEMWPGQAMNLRVNQILHHEKSKYQDVLVFESSDYGTVLVLDNVIQCTERDEFSYQEMITHLAMNSHPNPKKVLVIGGGDGGVLREVVKHETVEEAILCDIDEAVIRVSKKYLPGMSIGFQHPNVKVHVGDGFEFLKQRQNEFDVIITDSSDPEGPAESLFQKPYFELLRDALRDGGVITTQAENQWLHLPLIADLKKACNEVFPVAEYAYTTIPTYPSGQIGFMVCCKDANRNVKEPVRTWSREEEERLCRYYNQDIHRASFVLPNFARKALGN

SEQ ID NO: 5505 - protein, 479 aa, Pyrococcus abyssi GE5
MCLIAGGFNVSREDAIKIINLGKHRGPDSFGFWSERQMLKSDNFSDVSEIEGGEIALIQCRLAMTGSKSYTQPFYNEIILVHNGEIYNHESLRKYLIERGVAFETDVDSEVILRLLEYLVFDRKLKVEEAIKLSMKMLRGDYAVAFFFNGKFYLFRDPLGVRPLYYSSRGHFASEKKVLWGLGEDAEPVLPGEIVSISKHGITRVRGFNVFSIRTQGKDYFNGLQNLLIDSVKVRASKKVGVLFSGGVDSSLIALIASRYSDVILYTSGTEDSKDVEWARRVAEELGLKLRESLFSREDIENEIERIMFAIEEPNPMNLAIAIPLYFSTKRAREDGVKVLLSGQGADELFGGYAKYLQNPGLMLKDVEELGERNLARDDKVAMLNGVETRYPYLDLPFAILALNVPLELKIRDGKRKFILREIAKSLGLPEWVAEREKKAAQYGSNAQKILEKIAKSRGVKLKGLADILFSKVFHGIQN

SEQ ID NO: 5506 - protein, 306 aa, Glycine max
HGKKPTTKLSFKWKEGHGNATLFSSKMLLQRPIAGSQVPFCPIEKKMLDCWSQIDASTFKVRGVNYFKDKKKDFAPNYPAYYPFGVDVFLSPRKVDHIARFVELPVMSSSAKFPPILVVNVQVPLYPATLFQGETDGEGMSIVLYFKLSESYSKELPQTFQESIRRLMDDEVEKVKGFPVDTIAPFRERLKILGRVINLEDLHLSAAERKLMQAYNEKPVLSRPQHEFYMGENYFEIDLDMHRFSYISRKGFEAFLDRLKVCTLDVGLTIQGNKQEELPEHVLCCIRLNGIDYMNYQQLGLTQDPL

SEQ ID NO: 5507 - protein, 113 aa, Rickettsia sp. 'midichlorii'
ANEAVINMLKEIGSSENIPKYIAKAKDKNDPFRLMGFGHRVYKNYDPRAAVLKETCKEVLKELGQLENNPLLQIAIELEAIALKDEYFIERKLYPNVDFYSGIIYKAMGIPSQ

SEQ ID NO: 5508 - protein, 480 aa, Glycine max
  misc_feature (230)..(230): Xaa can be any naturally occurring amino acid
  misc_feature (425)..(425): Xaa can be any naturally occurring amino acid
MSIPIPHRQLFIDGDWKVPVLKNRIPIINPSTQHIIGDIPAATKEDVDLAVAAAKAALSRNKGADWASASGSVRARYLRAIAAKITEKKPELAKLEAIDCGKPLDEAAWDIDDVAGCFEFYADLAEKLDAQQKAHVSLPMDTFKSYVLKEPIGVVALITPWNYPLPMATWKVAPALAAGCAAILKPSELASVTCLELAEICKEVGLPPGVLNILTGLGPEAGAPLAAHPXDVDKIAFTGSSATGSKIMTAAAQLIKPVSLELGGKSPIIVFEDVDLDKAAEWTIFGCFWTNGQICSATSRLIVHASFESIATEFLNRIVKWVKNIKISDPLEEGCRLGPIVSEGQYEKILKFISNAKSEGATILTGGSRPEHLKKGFFVEPTVITDVTTSMQIWREEVFGPVLCVKTFSTEEEAIDLANDTVYGXCSAVISNDLERCERITKAFNAGIGGIRYSEPCVTQSPWGGIITSGDVRRLEECGG

SEQ ID NO: 5509 - protein, 491 aa, Musa acuminata
GTRRDRERERERERERERERERERERERERERERERVHLLGSSSLHRSLWELSKKHGPLMHLKFGRVPVVVVSSPEMAKEVLKTHDLECCSRPSLLSFSKFSYGLSDVAFIPYGERWRQLRKLCTVELLSTRKINSFRDIRKEEMERVTKLICSHVRASSMVNLSELLLSLSCNMTCRSAFGSGFDDGGDIQLHDMLREAQEELSGLFLSDYLPLLGWVDRLSGMRSRLERAFLKLDSIYQRRIDYHQDRLRQQGKEDGDVLDALLRMQKDEEGLTEDHIKGVLMDIFIAGTDTSSATVEWAMAELIRQPELMKRAQDEVRRCVGSKGEVEESDLHQLHFFKCVIKETMRLHPPAPLLLPRETMQHFKLNGYDILPKTWMYVNAWAIGRDPNSWGRPHVFDPERFMHDSTEASGQDFKLIPFGEGRRICPGKNLGMLMVELVLANLLYSFDWHLPPGMVKEDISMEEAPGVPVHREYALCLMATKYDATTA

SEQ ID NO: 5510 - protein, 507 aa, Musa acuminata
MALPPLLLSPLPSLLVVLALLSSLLLAGRKARGGSATWKLPPGPPKLPVIGHLHLLGSSLLHRSLWELSKKHGPLMHLKFGRVPVVVVSSPEMAKEVLKTHDLECCSRPSLLSFSKFSYGLSDVAFIPYGERWRQLRKLCTVELLSTRKINSFRDIRKEEMERVTKLICSHVRASSMVNLSELLLSLSCNMTCRSAFGSGFDDGGDIQLHDMLREAQEELSGLFLSDYLPLLGWVDRLSGMRSRLERAFLKLDSIYQRRIDYHQDRLRQQGKEDGDVLDALLRMQKDEEGLTEDHIKGVLMDIFIAGTDTSSATVEWAMAELIRQPELMKRAQDEVRRCVGSKGEVEESDLHQLHFFKCVIKETMRLHPPAPLLLPRETMQHFKLNGYDILPKTWMYVNAWAIGRDPNSWGRPHVFDPERFMHDSTEASGQDFKLIPFGEGRRICPGKNLGMLMVELVLANLLYSFDWHLPPGMVKEDISMEEAPGVTVHREYALCLMATKYDATTA

SEQ ID NO: 5511 - protein, 242 aa, Capsicum chinense
MWNQPYRKYDVEAGTAPLYPEMLESPELRWSFTRKVYSIITIQLLLTIAVASVVVTVHPISHFFATTSAGIGVYIVLVITPFITLCPLYYYHQKHPVNYLLLGLFTVSLAFTVGLTCAFTSGKVILEAVILTTAVVISLTAYTFWAAKRGQDFNFLGPFLFGALVVLLLFSLIQIFFPLGKISVMIYGGLASIIFCGYIVYDTDNLIKRYTYDEYIWAAISLYLDVINLFLSLLTIFRAADN

SEQ ID NO: 5512 - protein, 93 aa, Zea mays
MPGSHGRPLAIDGLGRPPPVDPFQGLKCTASLPDSARSFISLGNVSNGGRILCMQVWPDYGTKKFQTLSYLPQLTTEDLLKQMDSLLCNRWIP

SEQ ID NO: 5513 - protein, 275 aa, Musa acuminata
HEVDWLRGMRSRLERAYVKLDSIYQRLIDYHQDRFRLQGKEDEDILDALLRMQKDEEGVTEDHIKGVLMNIIIAGTDTSTATVLWTMAELIRQPELMKRAQDEVRGCVRSKGEVEESDLDQLHFLKCVIKETMRLHPPVPLLLPRETMQHFKLNGYDILPKTWMYVNAWAIGRDPNSWARPHVFDPERFMHDSTEASGQDFKLIPFGEGRRICPGKNLGMLMVELVLANLIYSFDWHLPPGMVKEDISMEEAAGFTMNREYALCLMATKYDSPTA

SEQ ID NO: 5514 - protein, 375 aa, Arabidopsis thaliana
MPLSLQSPPCATLSASIQKGRWKTLAAGFSVTPLPAVNFSLRRSIPRILASASSSSSPSSSSLEAGENNELNAVSAFSEIVPDTVVFDDFERFPPTAATVSSALLLGICGLPDTIFRNAVDMALADSSCAGLETTESRLSCFFNKAIVNVGGDLVKLVPGRVSTEVDARLAYDTNGIIRKVHDLLRLYNEIDVPHERLLFKIPATWQGIEAARLLESEGIQTHITFVYSFAQAAAAAQAGASVIQIFVGRLRDWARNHSGDNEIESAIKSGEDPGLALVKRSYNYIHKYGYKSKLMAAAVRNKQDLFSLLGVDYVIAPLKVLQSLKDSPAIPEDEKYSFVRKLTPETATHYHFTNKELVKWNQLSLASSMGPASV

SEQ ID NO: 5515 - protein, 197 aa, Azotobacter vinelandii
MSTNLMSQALAVDAARRARAKGQKPVALWLTGLSGAGKSTIANALELALVERGRHTYLLDGDNVRMGLCRDLGFSDADREENIRRVAEVAHLFVDAGLIVISAFISPFRRDRAIAREVIGNGAFIEIFVDTPLAECERRDPKGLYGKARQGLIKNFTGIDSAYEPPVDPHIRIDTLKDDLPTAVARILDYLDKWERA

SEQ ID NO: 5516 - protein, 445 aa, Streptomyces turgidiscabies
MSGIRRMRDRWRTDEAGLTSAAEDFGHCVHAKPAAVLAPRSPAEVQEAVSYAAGQGRPLAARGAGHSTYGQGQAADGIVLDMTELDTVHEVGPDHIVVDAGARWSDVVAATLPGLRTPPVLTDFLGTTVGGTLSVGGFGGASHRHGAQTDNVVDLDVVTGTGALVRCSPLGNRDLFDCVRGGLGQFGVIVRATLRLVPAFDKTHWYKFLYNDLTVFLAEQTRLAHEGMFDHVEGRVLPLGSGPWRYRLDLAKHCLTGDPPDERSVLRSLHPECRAEPVEVLPHAEFLDRMAAGEQELRRTGEWFHPHPWLNMLLPAPTAEGFVRQALDGLTQESTGRSGLVIVYPLPTAKLATPFVRKPTDATAFMVALLRTALPGEQGPMIASNRQIYEQALAAGGVAYPVNALPMSPEDWRRHFGPLWNDFARAKRRFDPNIILTPGHGIRLI

SEQ ID NO: 5517 - protein, 309 aa, Triticum aestivum
HASATTAVPEVALRSGDARPMPAIGMGTAKLPVVPETTVKAVLEAVVVGYRHFDTASMYATERPLGEALAEAVRRGLLASREEVFVTSKLWNLQMEYVDLYLIHWPISLKPGPAVFPVKREDAVPFDFAGVWRAMEECHRLGLAKAIGVSNFTTSHLHKLLAAATVPPAVNQVEMNPVWQQRKLREYCAEKGIHVAAYSPLGGQNWSGDGNAVLDSEVLAEIAKARGKTVAQVALRWIYEQGATPIVKSFSKERLKENLGIFDWGLTDDDLRKIGQIPQKKIVRAETVLFSAEGEFTSADLAEMEIVEE

SEQ ID NO: 5518 - protein, 363 aa, Crucihimalaya himalaica
  misc_feature (17)..(17): Xaa can be any naturally occurring amino acid
  misc_feature (253)..(253): Xaa can be any naturally occurring amino acid
  misc_feature (350)..(350): Xaa can be any naturally occurring amino acid
IRCKAAVAWEAGKPLVXEEVEVAPPQKHEVRIKILFTSLCHTDVYFWEAKGQTPLFPRIFGHEAGGIVESVGEGVTDLQPGDHVLPIFTGECGDCRHCHSEESNMCDLLRINTERGGMIHDGESRFSIKGKPIHHFLGTSTFSEYTVVHSGQVAKINPDAPLDKVCIVSCGLSTGLGAVLNVAKPKKGQSVAVFGLGAVGLAAAEGARIAGASRIIGVDLNSKRFDEAKKFGVTEFVNPRDHDKPVQQVIAEXTDGGVDRSVECTGSVQAMIQAFECVHDGWGVAVLVGVPSKDDAFKSHPMNFLNERTLKGTFFGNYKPKTDIPGVVEKYMNKELELEKFITHTVPFSXINKAFDYMLKGES

SEQ ID NO: 5519 - protein, 337 aa, Sulfolobus tokodaii
MGFTVALIQGDGIGPEIVSKSKRILAKINELYSLPIEYIEVEAGDRALARYGEALPKDSLKIIDKADIILKGPVGESAADVVVKLRQIYDMYANIRPAKSIPGIDTKYGNVDILIVRENTEDLYKGFEHIVSDGVAVGMKIITRFASERIAKVGLNFALRRRKKVTCVHKANVMRITDGLFAEACRSVLKGKVEYSEMYVDAAAANLVRNPQMFDVIVTENVYGDILSDEASQIAGSLGIAPSANIGDKKALFEPVHGAAFDIAGKNIGNPTAFLLSVSMMYERMYELSNDDRYIKASRALENAIYLVYKERKALTPDVGGNATTDDLINEIYNKLG

SEQ ID NO: 5520 - protein, 116 aa, Zea mays
  misc_feature (46)..(46): Xaa can be any naturally occurring amino acid
PQPQRTVRRAQRYGEGQRNRRVLVARFDDVSLPPEGHPQGGGGGGXEEPSSSRGGGSLCSGYLSLPALLLVGVTASLVILPLVLPPLPPPPSMLMLVPVAMLLLLLVLAFMPTSST

SEQ ID NO: 5521 - protein, 430 aa, Mycobacterium bovis AF2122/97
MSVLIRGVRPYGEGERVDVLVDDGQIAQIGPDLAIPDTADVIDATGHVLLPGFVDLHTHLREPGREYAEDIETGSAAAALGGYTAVFAMANTNPVADSPVVTDHVWHRGQQVGLVDVHPVGAVTVGLAGAELTEMGMMNAGAAQVRMFSDDGVCVHDPLIMRRALEYATGLGVLIAQHAEEPRLTVGAFAHEGPMAARLGLAGWPRAAEESIVARDALLARDAGARVHICHASAAGTVEILKWAKDQGISITAEVTPHHLLLDDARLASYDGVNRVNPPLREASDAVALRQALADGIIDCVATDHAPHAEHEKCVEFAAARPGMLGLQTALSVVVQTMVAPGLLSWRDIARVMSENPACIARLPDQGRPLEVGEPANLTVVDPDATWTVTGADLASRSANTPFESMSLPATVTATLLRGKVTARDGKIRA

SEQ ID NO: 5522 - protein, 151 aa, Glycine max
  misc_feature (95)..(95): Xaa can be any naturally occurring amino acid
LKSMAGFPTTKTNNDITCIVSNRGKLQCMHVWPPLGKKKAETLCYLTDLDDAQLANEVQYLLRKGWIPCWELESEHGCMYREHNMSPGYYYGLYXTMWKLTMLGCTDAYHVLNELQEANTAYPSGYIRIIGFDSVRQLLCISYIIYKRSRF

SEQ ID NO: 5523 - protein, 345 aa, Ralstonia solanacearum
MKALVYEGPGKISLENKPKPELQAPGDAVVRVTLTTICGTDLHIIKGDVPTCEPGRTLGHEGVGVIESVGAAVTSLKPGDHVLISCISSCGKCANCRRGMYSHCETGGWILGHRIDGVQAEYVRVPHAETSLYKVPPGVDEEALVMLSDIFPTGFECGVLNGRVQPGSTVAIVGAGPIGLASLLTAQFYSPARIIMIDTNVARLEVASGLGASDCINVTRENAAAAVKRLTDGMGVDCAIEAVGVPATFELCQELVAPGGVIANIGVHGVKADLHLETLWSQNIAITTRLVDTVSTPMLLKTVRAGKLLPGQLITHRFKLDDILAAYDTFRNAGETHALKVIIAT

SEQ ID NO: 5524 - protein, 107 aa, Lilium longiflorum
RAAPAQASMVAPFVGLKSSSAFPVTQKPATGLPTLPSNGGRVQCMKVWPIVGKKKFETLSYLPTLPVEALLKQIEYLIRSGWVPCLEFSLVGFVSRDYHQSPGYYDG

SEQ ID NO: 5525 - protein, 263 aa, Glycine max
MATFSKERENFVYVAKLAEQAERYDEMVEAMKKVAKLDVELSVEERNLFSVGYKNVVGSRRASWRILSSIEQKEDSKGNELHVKHIRDYRNKVELELSNICSDIMIILDEHLIPSTNIAESTVFYYKMKGDYYRYLAEFKAGNEKKEVADQSLKAYQTASTTAESELQPTHPIRLGLALNFSVFYYEILNSPERACHLAKQAFDDAVSELDTLNEDSYKDSTLIMQLLRDNLTLWTSDIPEEGEDLKMESAARVDQGEDELGR

SEQ ID NO: 5526 - protein, 489 aa, Burkholderia cepacia R18194
MSTVQETLALKDPSLFRQQAYVNGEWQGATNGETFEVRNPATGGLLGTVPAMGTAETRHAIEAANAAWPAWRKKTAKERAVVLRKWHDLMMEHADDLALILTTEQGKSLAEAKGEIGYAASFLEWFAEEGKRVYGDTIPTPASDKRIVVTKEAIGVCAAITPWNFPAAMITRKVGPALAAGCPIVVKPAEATPFSALAMAVLAERAGVPAGVFSVVTGDPKAIGGEMTSNPIVRKLSFTGSTPVGRLLMSQCAATVKKVSLELGGNAPFIVFDDADLDAAVQGAIASKYRNSGQTCVCTNRFYVHEAVYDQFAQKLAAAVGQLKVGRGTEPGVTQGPLINEAAVLKVEAHIEDALAKGATVVTGGKRHALGHGFFEPTVLTGVTPAMKVAKEETFGPLAPLFKFGSDDEVIRLANDTEFGLAAYFYSRDIGRVWKVAEALEYGMVGVNTGLISNEVAPFGGVKQSGLGREGSHYGIDDYVVIKYLCLAV

SEQ ID NO: 5527 - protein, 140 aa, Ralstonia solanacearum
MSQLRRYDPFAIEPAGDIFQGLLRSFRGGMDSALPFKVDVTESDTAYSVVAEIPGAKKEDIDVTVDRGTVMISAKVERQSEKKEGERVIRSERYSGSMQRMFTLEAGVDENKVEATYESGLLRVTLPKKEVSPQQRITIR

SEQ ID NO: 5528 - protein, 283 aa, Listeria monocytogenes str. 1/2a F6854
MKTVKLNNGVEVPILGFGTYQITDAAEAEQAVKDAIKTGYRHIDTAQSYMNEEAVGRGIAASGVDRKELFITTKIWVENVSYKGVMSSFDRSLKRLGLDYVDLLLIHQPFNDVYGAWIAMEELQASGKIRAIGVSNFSPDRVIDLAAFNEVTPQVNQIEVNPFQQQTANLAILRKEGVAIEAWAPFAEGKNDVFNNPVLTKIGAKYGKSAAQVILRWLVEQDIIVLAKSVKPERMAQNLAIFDFELTEADKEEIAGLNQGESQFFSHADPEMVKWMASRKLNV

SEQ ID NO: 5529 - protein, 315 aa, Haemophilus ducreyi 35000HP
MNQLDALREMTVVVADTGDIEAIRQYQPQDATTNPSLILSASALSQYAPLIDDAIRYAKSKSGNKAQQLVDAEDKLAVNIGLEILKIVPGRISTEVDARFSYDTEKTIAKARKLIGLYNEAGVANNRILIKIAATWQGIRAAEILEKEGINCNLTLLFSQAQARACAEAGVYLISPFVGRILDWYKANEKKEYAAAEDPGVISVTAIYNYYKQYNYKTIVMGASFRNVGEITEIAGCDRLTIAPPLLKALAESNETLVRKLDYQGEILDRPAPLSEAEFYWQHNQDPMAVDKLAEGIRKFAIDQEKLEEMLSAKL

SEQ ID NO: 5530 - protein, 140 aa, Bordetella parapertussis 12822
MRRAALLLGLWLLLGAPAAADIAQRELRLAHSLRCLVCQNQTLAESNAPLAHDMRALIRQQLADGRSDEEVMQFFEDRYGDFVRYEPPFKPATWLLWLGPFALLLAGFVVLWRALARRPGAAPLTDAQRARAERFLDEES

SEQ ID NO: 5531 - protein, 462 aa, Bacillus cereus ATCC 14579
MTINSKTIEKSSYTYEELAEKNKAYVWHPFTQMKDYLEEDPVIIERGEGRKLYDVNGNEYWDGVSSIWLNVHGHQVPELDEAIREQLNKIAHSTMLGLANVPSILLAEKISEVVPDGLKKVFYSDSGSTAVEIAIKMAFQYWQHKGKPKKQRFVTLKEAYHGDTIGAVSVGAIDLFHQVYSSLLFDAIKMPYPYTYRSPYGNNKEEIVKSHLEEMEELLKEKHEEVAAIIVEPLMQGAGGMITMPKGYLKGLRDLCTKYNVLFITDEVATGFGRTGKMFACEHENVTPDILTAGKGLTGGYLPIAVTVTTDEIYNAFLGEYEEQKTFFHGHSYTGNPLGCAVAIANLELYEKTNLIEEVARKTDYVAAQLEKLFAYKHVGDIRQCGLMVGIELVKNKETKEAFDWTERVGVQVCKRSRELGMILRPLGNTIVFMPPLASTFEEIDDMLRILYKAISDVTEGE

SEQ ID NO: 5532 - protein, 437 aa, Methylobacillus flagellatus KT
MTTSNASLLQRSLAAVWHPCTQMKQHEALPLVPVKRGEGVWLEDFDGKRYLDGVSSWWVNLFGHNHPHIKQAIKAQLDQLEHVILAGFTHEPVVRLSEQLSLLTGLGHSFYASDGASATEIALKMSFHYWRNHGETAKTRFLSLQNGYHGETLGSLSVTDIALFKDTYAPLLREESIALPSPDWRRAEPGESAEQYALRCAGQAEAYIAQHHAGIAAVIVEPLVQCATGMAMYHPVYLQRLRALCDRYQVHLIADEIAVGFGRTGTMFAIEQAGIKPDFICLSKGITGGYLPLSVVQTTQDIYAAFYDDSVTRGFLHSHSYTGNALACSAALATLDIFAQHDVLNSNRRKAGYLNRRLAAWRDLPIRHLRNTGMIWAFDVTPSRPGFQQRFYQAALQRGLLLRPVGNTVYFMPPYIISEEEMDWMLEQARGALEESL

SEQ ID NO: 5533 - protein, 496 aa, Burkholderia cepacia R1808
MRAQNKFKTGLDIAKYTAKIMRADMAAYDADPSKYTQSLGCWHGFIGQQKMISIKKHFNSTERRYLYLSGWMVAALRSEFGPLPDQSMHEKTSVSALIRELYTFLRQADARELGGLFRELDAAKDAAAKAAIQQKIDNHVTHVVPIIADIDAGFGNAEATYLLAKQFIEAGACCIQIENQVSDEKQCGHQDGKVTVPHEDFLAKIRAIRYAFLELGVDDGIIVARTDSLGAGLTKQIAVTNAPGDLGDQYNSFLDCEELSGDQLGNGDVVIKRDGKLLRPKRLPSNLFQFRAGTGEARCVLDCITSLQNGADLLWIETEKPHIAQIAGMVNEIRKVIPNAKLVYNNSPSFNWTLNFRQQVYDALKAEGKDVSAYDRAQLMSVEYDDTELAKLADDKIRTFQADASREAGIFHHLITLPTYHTAALSTDNLAKEYFGEQGMLGYVAGVQRKEIRQGIACVKHQNMSGSDIGDDHKEYFSGEAALKAAGKDNTMNQFS

SEQ ID NO: 5534 - protein, 444 aa, Oryza sativa (japonica cultivar-group)
MRMGKYEMGRALGEGHFGKVKLARHADTGAAFAIKILDRQRILAMKIDEQIKREIATLKLLKHPNVVRLHEVSASKTKIYMVLEYVNGGELFDKIALKGKLSEKEGRKLFQQLMDAVSYCHEKGVYHRDLKPENVLVDAKGNIKVSDFGLSALPQNQRKDGLLHTTCGSPNYIAPEVLLNRGYDGSLSDIWSCGVILYVMLTGNLPFDDQNTVVLYQKILKGDARIPKWLSPGAQDILRKILDPNPITRLDITGIRAHEWFRQDYTPAMPFDDDDDNNISDGNLHMTENQDIETSPAISQINAFQLIGMSSCLDLSGFFEKEDVSERKIRFVSNYSPTSLFEKIESTVTEKGFQVQKNSGKLKVIQVCKEPANPRGHGNLLISAEVFEINESLYVVELKRSSGDCSLYRQLCASLSEDLGICKRQQLLKKDSMRQDLCRYNSSF

SEQ ID NO: 5535 - protein, 282 aa, Zea mays
MATANGSSKGPFEVPKVEVRFTKLFIDGKFVDAVSGKTFETRDPRTGEVIASIAEGGKADVDLAVKAAREAFDNGPWPRMTGYERGRILHRFADLIDEHVEELAALDTVDAGKLFAVGKARDIPGAAHLLRYYAGAADKVHGATLKMAQRMHGYTLKEPVGVVGHIVPWNYPTTMFFFKVGPALAAGCAVVVKPAEQTPLSALFYAHLAREAGVPAGVLNVVPGFGPTAGAAVAAHMDVDKVSFTGSTEVGRLVMRAAAESNLKPVLLELGSYGGGGGGWRD

SEQ ID NO: 5536 - protein, 335 aa, Xanthomonas axonopodis pv. citri str. 306
MTQTITVIRGDGIGPEIMDATLFVLDALQAGLTYEYADAGLVALEKHGDLLPESTLASITKNKVALKSPLTTPVGEGFSSINVAMRRKFDLYANVRPAKSFPNTKSRFADGVDLITVRENTEGAYLSEGQTVSEDGETAFSGTRITRKGSERIVRYAFELAKSTGRKKVTAVHKANIIKSTSGLFLKVARDVAAQYPEIEFQEMIVDNTCMQLVMRPEQFDIIVTTNLFGDIISDLCAGLVGGLGLAPGANIGLDAAIFEAVHGSAPDIAGQGKANPCALLLGAAQMLDHIGQPQNAERLREAIVATLEAKDSLTPDLGGTGNTMGFAKAIASRL

SEQ ID NO: 5537 - protein, 474 aa, Aspergillus niger
MASTLRLGTSALRSTSIAAKPVVQSAAFNGLRCYSTGKAKSLKETFAEKLPAEIEKVKKLRKEHGSKVIGEVTLDQAYGGARGVKCLVWEGSVLDSEEGIRFRGRTIPECQELLPKAPGGQEPLPEGLFWLLLTGEIPTEQQVRDLSAEWAARSDLPKFIEELIDRCPSTLHPMSQFSLAVTALEHESAFAKAYAKGINKKDYWNYTFEDSMDLIAKLPTIAAKIYRNVFKDGKVAPIQKDKDYSYNLANQLGYGDNNDFVELMRLYLTIHSDHEGGNVSAHTTHLVGSALSSPMLSLAAGLNGLAGPLHGLANQEVLNWLTKMKAAIGNDLSDEAIKNYLWSTLNAGQVVPGYGHAVLRKTDPRYVSQREFALRKLPDDPMFKLVSQVYKIAPGVLTEHGKTKNPYPNVDAHSGVLLQYYGLTEANYYTVLFGVSRALGVLPQLIIDRALGAPIERPKSYSTEAFAKLVGAKL

SEQ ID NO: 5538 - protein, 397 aa, Candidatus Rickettsia tarasevichiae
PILKASIGEDVIDISRVSSEADCFTYDPGFMSTASCRSTITYIDGDKGILRHRGYDIKDLAEKSDFLEVAYLLIYGELPSSEQYNNFTKKVAVHSLMNERLHYLFQTFCNSSHPMAIMLAAVGSLSAFYPDLLKFKEADYELTAIRMIAKIPTIAAMSYKYSIGQPFIYPDNSLDFTENFLRMMFATPCTKYEVNPVIKNALNKIFILHADHEQNASTSTVRIAGSSGANPFACISTGIASLWGPAHGGANEAVINMLKEIGSSENIPKYIAKAKDKDDPFRLMGFGHRVYKNYDPRAAVLKETCKEVLKELGQLENNPLLQIAIELEASALKDEYFIERKLYPNVDFYSGIIYKAMGIPSQMFTVLFAIARTVGWMAQWKEMHEDPEQKISRPRQL

SEQ ID NO: 5539 - protein, 197 aa, Brassica napus
MSASRFIKCVTVGDGAVGKTCLLISYTSNTFPTDYVPTVFDNFSANVVVNGATVNLGLWDTAGQEDYNRLRPLSYRGADVFILAFSLISKASYENVSKKWIPELKHYAPGVPVILVGSKLDLRDDKQFFVDHPGAVPITTAQGEELRKLIDAPTYIECSSKSQENVKAVFDAAIRVVLQPPKQKKKKSKAQKACSIQ

SEQ ID NO: 5540 - protein, 265 aa, Sulfolobus tokodaii str. 7
MIREVLRFINKSDLVIEVIDAREPDLTRSKKLEEYALNRERKILIVLNKADLIPREILEGWKKIFENEGKNAIYISATMHLGTKILRDKIKELLRGKEGTVIFVGYPKTGKSSIINALKGKHSASTSKIPMAYGYTKTIQKFKIDSKIYAWDSPGIIPPDGNELEKVIRGISVEKLEDPVKAGEMLLLRIIKYNPNAIKETYNITFNSPYEFFEKLALKRGWLYKSTKEPNIEEAAKAFIRDYHKGKIIYYVPPLSMNDDKDSSV

SEQ ID NO: 5541 - protein, 297 aa, Zea mays
MAAAAVTSNGGAVAANGPAPGRLASVYSEVQTSRLLHTLPLPSVLRSNFSVVDGPASSAAGNPDEIAKLLPNLVGQPSASLVPTAEPAATRPLKIGVVLSGGQAPGGHNVICGIFDYLQERAKGSTLYGFKGGPAGIMKCKYVELTSDFVYPYRNQGGFDMICSGRDKIETPEQFKQAEDTANKLDLDGLVVIGGDDSNTNACLLGEYFRSRNMKTRVIGCPKTIDGDLKCKGVPTSFGFDTACKIYSEMIGNVMTDARSTGKYYHFVRLMGRAASHITLECALQTHPNAALIGEEV

SEQ ID NO: 5542 - protein, 445 aa, Rubrobacter xylanophilus DSM 9941
MTQEPQGRSDGAASTVQKDGSLSVTDNRTGRSYEIEIKDGTVRSMDFRQIKVDEDDFGLMTYDPGYTNTASCRSAITYIDGERGILQHRGIPIEELCEHSTYLEVAYLLIHGHLPTEEELSQWVYDITHHTYVHENIKSFMDGFRHDAHPMGILLASVGALSTFYPEASDIDDEEQRNMAAIRLIAKMPTIAAFAYRHSLGLPYVYPDNDLSYTGNFLSMLFKMAEPKYEPDPRLEKALDVLFILHADHEQNASTSAVRTVGSTRADPYTAVAAGVAALYGPLHGGANVAVLKMLQRIGSVKNIPDFLETVKQGKERLMGFGHRVYKNYDPRARIIKSHVDEVLEATGKESPWLDIAVELEKRALDDEYFTSRKLYPNVDFYSGLIYEALGIPTEAFTVMFAIPRTSGWIAQWMEMLRDPELKIARPRQIYTGPRDQHYVPMSER

SEQ ID NO: 5543 - protein, 461 aa, Mycobacterium bovis AF2122/97
MATATTQRPLKGPAKRMSTWTMTREAITIGFDAGDGFLGRLRGSDITRFRCAGRRFVSISHPDYVDHVLHEARLKYVKSDEYGPIRATAGLNLLTDEGDSWARHRGALNSTFARRHLRGLVGLMIDPIADVTAALVPGAQFDMHQSMVETTLRVVANALFSQDFGPLVQSMHDLATRGLRRAEKLERLGLWGLMPRTVYDTLIWCIYSGVHLPPPLREMQEITLTLDRAINSVIDRRLAEPTNSADLLNVLLSADGGIWPRQRVRDEALTFMLAGHETTANAMSWFWYLMALNPQARDHMLTELDDVLGMRRPTADDLGKLAWTTACLQESQRYFSSVWIIAREAVDDDIIDGHRIRRGTTVVIPIHHIHHDPRWWPDPDRFDPGRFLRCPTDRPRCAYLPFGGGRRICIGQSFALMEMVLMAAIMSQHFTFDLAPGYHVELEATLTLRPKHGVHVIGRRR

SEQ ID NO: 5544 - protein, 141 aa, Triticum aestivum
  misc_feature (57)..(57): Xaa can be any naturally occurring amino acid
  misc_feature (85)..(86): Xaa can be any naturally occurring amino acid
  misc_feature (88)..(88): Xaa can be any naturally occurring amino acid
  misc_feature (90)..(90): Xaa can be any naturally occurring amino acid
  misc_feature (102)..(103): Xaa can be any naturally occurring amino acid
  misc_feature (107)..(107): Xaa can be any naturally occurring amino acid
  misc_feature (118)..(119): Xaa can be any naturally occurring amino acid
  misc_feature (124)..(125): Xaa can be any naturally occurring amino acid
  misc_feature (132)..(132): Xaa can be any naturally occurring amino acid
  misc_feature (135)..(135): Xaa can be any naturally occurring amino acid
MAPAVMASSATTVAPFQGLKSTAGLPVGRRSSGSLSSVSNGGRIRCMQVWPIEGIKXFETLSYLPPLSTGGLLKQVDYLDSLKVXXCXRXNKVGSSPVEHNXXPGYXDGRYWDKLELXXFRVEXXTQGAEQXEEXKKDTLP

SEQ ID NO: 5545 - protein, 494 aa, Brassica napus
MGSASKEYEFLSEIGLSSSHNLGNYVGGKWLGNGPLVSTLNPANNQVLPIAQVVEASLEDYEIGLKACEEAAKTWMQVPAPKRGDIVRQIGDALRSKLDYLGRLLSLEMGKILAEGIGEVQEVIDMCDFAVGLSRQLNGSVIPSERPNHMMLEMWNPLGIVGVITAFNFPCAVLGWNACIALVCGNCVVWKGAPTTPLITIAMTKLVAEVLEKNHLPGAIFTAMCGGAEIGEAIAKDTRIPLVSFTGSSKVGLTVQQTVSARSGKTLLELSGNNAIIVMDDADIQLAARSVLFAAVGTAGQRCTTCRRLLLHESVYDKVLEQLLTSYKQVKIGDPLEKGTLLGPLHTPESKKNFEKGIEVIKSQGGKVLTGGKAVEGEGNFVEPTIIEISSDAAVVKEELFAPVLYALKFKTFEEAVAINNSVPQGLSSSIFTRSPDNIFKWIGPMGSDCGIVNVNIPTNGAEIGGAFGGEKATGGGREAGSDSWKQYMRRSTW

SEQ ID NO: 5546 - protein, 443 aa, Arabidopsis thaliana
MEQQLKTDGLNLSIRDAVKEDRISELPEDLLLQILSDIPTENVIATSVLSKRWRSLWKMVPNLTFDFTFDPKYHQTFSENLYRSLTSHEASVLESLQLNFTRGIDGLNIGMWIATAYVRHVRKLVLVSFGDVRDKRARFRSALFNFNDTLDILEIQDYILLDLPSPVCLKSLRELRLYEVHFKDEASVCNLLCGCPSLEVLSVHRERNVDVETFTIVVPSLQRLTIYDFCIGGGKGGYVINAPSLKYLNIVGFEGLDFCLIENAPELVEAEISDVSHIANENILESLTSVKRLSLESPIKIKFPTGKVFDQLVYLDVLTKEREWWNLLSRMLESSPKLQILKLTGLSCIEKGLDGQNWNPPKCVPECLLFHLEKFLWTGYEWQRGDEKEVATYILENARLLKKATFSTKRIDLENLEKRREMLNELASVARASDSCHLVFHSI

SEQ ID NO: 5547 - protein, 186 aa, Pyrococcus abyssi GE5
MFLGEFSIMRYLVPLLVFMVLGMGCLGGGGEEMVKVSSVFGNDEFIPAKYTCEGIDVNPPLRIEGISENAKSLVIIVDDPDAPLGTFTHWIAWNIPPVEEIPEGIPKQGEVEKPIHMIQGRNDFGRIGYNGPCPPRGHGVHHYHFKVYVLDTTLNLRPGATREELEKAMEGHIIQFGELVGLYERK

SEQ ID NO: 5548 - protein, 235 aa, Streptochaeta angustifolia
EMRRIENKISRQVTFAERRNGLPKKAYELSLLCDAEVALIIFSSGRLFEFSSASCMYRTLERYRTCNYRSHEAAAPIETESNYQEYLKLKTRVEFLQTTQRNLPGEDLGPLNMKELEQLENQIESSLKNIRSTKNQTLLDQLFDLRHKQQQLQDLNKDLRRKLQEVGGHDNALQVWEDGGPSGSAGHEHLQGLLQPSEIDPSLQIGYHQAYLDQLNNGQIAQYPNGHLPSSAPWI

SEQ ID NO: 5549 - protein, 447 aa, Arabidopsis thaliana
MEQKCKIGGEGLRNRGLVNEEDRISELPEALLLLILSSLPTETVIATSVLSKQWKSLWKLVPNLKFDSKYHYHYTFSDNVFRSLISHKAPVLDSLHLKVEDKDDALDVGILIGIAFSRHMRKFVLKITLLEESFVRFPSAWCSCNDTLEILELKYCILLDFPSLVCLKSLRKLYLYHVRFNDEESVCNLLCGCPSLEDLVVHRHSTTDVESYTIAVPSLQRLTIYDDYYGEGVGGYVINAPSLKYLNIDGFNGLEFCLIEKAPELVEAKISAVFEIANENIMDSLTSAKCLSLHLAPFKIKYPTGKIFYQLLSLELRAYSYEWWNLLWFMLDSSPKLQILKLVDPYQFPKEDCSVGWEWSRPKCVPECLLFHLETFVWTRYEWQREDEKAVATYILKNARCLKKATLSTKPIGSEELEKLGKRREMLNELATQASPSNSCNLVFESE

SEQ ID NO: 5550 - protein, 286 aa, Burkholderia cepacia R18194
MDASEFSKFLKAALPPQATAGAALTVTEVEIPGYAQDIVLRLYRRPDKTGLPVVLYFHGGGFVRGSLEDADFAARFLAERLPALVVSVDYSLAPAFPFPAAPEDAYRAAVWAATRARAFGGNPKKIGVAGHDAGGQLANCLAFIARDRGEVQIVAQALFGPMLDPSMTRIGDADRLASDITPRECAACYRAYLPQAAQRMHPYAAPLESVRLAGLPPTLVVTAQNDVLHVEAEKYASCLISSGVLTQVIRYPDITHAALATHEAAFEEAVRFFQCRFQARQPNRSE

SEQ ID NO: 5551 - protein, 271 aa, Neurospora crassa
MSVVSLLGVNVMNNPAKFTDKYLFEITFECLEHLEKDLEWKLTYVGSATSDNYDQELDSLLVGPIPVGVNKFIFEAEPPDTKRIPIDELLGVTVILLTCAYDGREFVRVGYYVNNEYESEELINDPPPKPVIEKIRRNVLAEKPRVTRFAIKWDSEASAPPEFPPEQPEADEVADEEEYGADELAEQSSIADPAVNGGMEVEGQPNGAIVIEEDEMSEDGSVDLENESEDELDGEGDAEGELEQGQDEDIEMGDEMEIDDHPKQQGMAMAQ

SEQ ID NO: 5552 - protein, 222 aa, Chasmanthium latifolium
ELRRIENKISRQETFAKRRNGLLKKAYELSVLCDAEVAHIIFSSRGRLYEFSTSSCIYKTLERYRSCSYASEASAPMEAELSNYQGYLKLKTRVEFLLTTQRNLLGEDLGPLSAKELEQFENQVEISLKHIRSTKSRQLLDQLFELKRKEQQLQDANKDLRRKIQDTSGENMLRMTCKDIGSSGSSSGHARDAKHQELPHSGVCDPSLRIGYQAYMDQLNNE

SEQ ID NO: 5553 - protein, 221 aa, Pennisetum glaucum
  misc_feature (12)..(12): Xaa can be any naturally occurring amino acid
  misc_feature (202)..(202): Xaa can be any naturally occurring amino acid
EMRRLENKISRXVTSAKRRNGLLKKAYEVAVLCDAEVALIIFSSRGRLFEFSTSSCMYETLEQYRSCNFTSEASSAPIEAELSNYEEYLKLKTRIEFLQTTQRNLLGEDLGPLSTKELEQLENQIEISLKHIRSSKNQQMLDQLFELKRKEQQLQDSNKDLRKKIQETSEENVLRPTFQDLGACGSSGHPRDANQEYLRQLXCDPTLRIGYQSYIDHLSNE

SEQ ID NO: 5554 - protein, 203 aa, Solanum demissum
MDILGNLYIDPLPLVIPTTTSSTTFDNNSNEKVMLLLASKIPKRRGDRKKFHETRHPVYRGVRWKNFEKWVSEVRVPAKKSRIWLGTFPNAEMAAKAHDVAVMALKGRSACLNFADSTWRLPVPASAAVKDIQKAAAEAAEAFRVSESLERENSEEVVINNDDHYVVDSGWRLVIPASAVARDIQKAVAEAFCPSESSKGEYF

SEQ ID NO: 5555 - protein, 354 aa, Bacillus cereus ATCC 14579
MEKRIVCLAGDGVGPEVMESAKEVLHMVERLYGHHFHLQDEYFGGVAIDLTGQPLPQRTLAACLASDAVLLGAVGGPRWDSAKERPEKGLLALRKGLGVFANVRPVTVESATAHLSPLKNADEIDFVVVRELTGGIYFSYPKERTEEVATDTLTYHRHEIERIVSYAFQLANKRKKKVTSIDKANVLESSKLWRTVTEEVALRYPNVEVEHILVDAAAMELIRNPGRFDVIVTENLFGDILSDEASVLAGSLGMLPSASHAEKGPSLYEPIHGSAPDIAGKNKANPIAMMRSVAMMLGQSFGLTREGYAIEEAVSAVLKSGKCTADIGGTETTTSFTKAVIQEMEEQALVGRGR

SEQ ID NO: 5556 - protein, 182 aa, Zea mays
  misc_feature (33)..(33): Xaa can be any naturally occurring amino acid
PDDGAARAGPSRRTGYVDFLSRVNRVEGPATQXDAPHPWLNPSSPRATSPLERRHQGHARDGIDGPMLVYPMLKSKWDPNTSVALPEGEVFYLVALLRFCRSGGPAVDELVAQNGAILRACRANGYDYKAYFPSYRGEADWARHFGAARWRRFVDRKARYDPLAILAPGQKIFPRVPASVAV

SEQ ID NO: 5557 - protein, 399 aa, Halobacterium sp. NRC-1
MHSLDLIDMGAIPDDRVMSDLEGDVKAIVPTHGHLDHIGAISKLAHRYDAPIVGSPFTIELVKGEIESEQKFGVENDLVKMEAGGTMEIGDRCELEFVHVTHSIIDAINPVLHTPEGAVVYGLDKRMDHDPVLEDPIDMERFREIGREGEGVLCYIEDCTNAGKKGRTPSESTARRHLKDVLTSVADYDGGIVATTFSSHISRVSSLVEFAKEIGREPILLGRSMERYSGTAERMGRVNFPDDLGMFGHRKSVDRAFKRVMNEGKENFLPIVTGHQGEPQAMLTRMGRGETPYDIEDGDKIIFSASVIPEPTNKGQRYQSEQLLRMQGARIYDDIHVSGHLREEGHYQMLDALQPQHLIPAHQDMKGMAPYAKLAKSQGYKIGRDLHMTENGNTIQLVE

SEQ ID NO: 5558 - protein, 317 aa, Glycine max
MAGLVVSSQCFLKLLLVVSVFHVSFAARRLNELVQDQSQLLHYHNGPLLYGKIAVNLIWYGNFKPSQKAIITDFVTSLSSPASQSSQPSVATWWKTTEKYYHLSPRKASLSLSLGDQILDETYSLGKSLTGKNLVQLASKGGQRNSINVVLTSADVAVEGFCMSRCGTHGSSASHLKKNSKSYKFAYIWVGNSETQCPGQCAWPFHQPIYGPQSPPLVAPNNDVGLDGMVINLASLLAGTATNPFGNGYFQGPAEAPLEAASACPGVYGKGAYPGYAGDLLVDSTTGASYNVKGANGRKYLVPALYDPSTSSCSTPV

SEQ ID NO: 5559 - protein, 394 aa, Corynebacterium glutamicum ATCC 13032
MTSTFSPTEKEKTMSDSQVRKGLNGVISDYTSISKVMPESNSLTYRGYAVEDLVENCSFEEVIYLLWFGELPTTEQLRTFNTTGRSYRSLDAGLISLIHSLPNTCHPMDVLRTAVSYMGTFDPDPFTRDADHIRSIGHNLLAQLPMVVAMDIRRRSGEEIIAPDHNKGIASNFLSMVFGNDDGSVANSADDIRDFERSLILYAEHSFNASTFSARVISSTRSDTYSAITGAIGALKGPLHGGANEFVMHTMLDIDDPNNAADWMGKALDRKERIMGFGHRVYKNGDSRVPSMEKSMRSLAARHRGQKWVHMYESMQEVMEARTGIKPNLDFPAGPAYYMLGFPVDFFTPLFVLARVSGWTAHIVEQFENNALIRPLSAYNGVEEREVVPISERT

SEQ ID NO: 5560 - protein, 416 aa, Salmonella typhimurium LT2
MESKVVVPVEGKKITLQNGKLNVPENPIIPFIEGDGIGVDVTPAMLKVVDAAVEKAYKGERKISWMEIYTGEKSTQVYGQDVWLPAETLDLIRDYRVAIKGPLTTPVGGGIRSLNVALRQELDLYVCLRPVRYYQGTPSPVKHPELTDMVIFRENSEDIYAGIEWKADSADAEKVIKFLREEMGVKKIRFPEHCGIGIKPCSEEGTKRLVRAAIEYAITNDRDSVTLVHKGNIMKFTEGAFKDWGYQLARDEFGGELIDGGPWLKIKNPNTGKEIVVKDVIADAFLQQILLRPAEYDVIACMNLNGDYISDALAAQVGGIGIAPGANIGDECALFEATHGTAPKYAGQDKVNPGSIILSAEMMLRHMQWFEAADLIVKGMEGAIAAKTVTYDFERLMEGAKLLKCSEFGDAIIANM

SEQ ID NO: 5561 - protein, 146 aa, Triticum aestivum
  misc_feature (139)..(139): Xaa can be any naturally occurring amino acid
  misc_feature (141)..(141): Xaa can be any naturally occurring amino acid
  misc_feature (143)..(143): Xaa can be any naturally occurring amino acid
MAPTVMASSATSVAPFQGLKSTAGLPVSRRSNGASLGSVSNGGRIRCMQVWPIEGIKKFETLSYLPPLSTEALLKQVDYLIRSKWVPCLEFSKVGFIFREHNASPGYYDGRYWTMWKLPMFGCTDATQVINEVEEVKKXNXDXMSE

SEQ ID NO: 5562 - protein, 295 aa, Triticum aestivum subsp. spelta
MKTLLILTILAMAITIGTANMQVDPSSQVQWPQQQPVPQPHQPFSQQPQQTFPQPQQTFPHQPQQQFPQPQQPQQQFLQPQQPFPQQPQQPYPQQPQQPFPQTQQPQQLFPQSQQPQQQFSQPQQQFPQPQQPQQSFPQQQPPFIQPSLQQQVNPCKNFLLQQCKPVSLVSSLWSMIWPQSDCQVMRQQCCQQLAQIPQQLQCAAIHTVIHSIIMQQEQQQGMHILLPLYQQQQVGQGTLVQGQGIIQPQQPAQLEAIRSLVLQTLPTMCNVYVPPECSIIKAPFSSVVAGIGGQ

SEQ ID NO: 5563 - protein, 387 aa, Oryza sativa (japonica cultivar-group)
MEGGGAKDGSAAAAQTRGSGDDGSHKPLPPCCLKAKAAAAESEAKCHATVVSGWFTEPRSHSGKTSKVQYFNNPMWPGEAHSLKVENILYQGKSPYQEILVFESSTYGNVLVLDGIVQLTEKDECAYQEMVTHLPLCSIPSPKSVLVVGGGDGGVLREIARHASVENIDICEIDQLVIDVCKDFFPQLSVGFKDPRVQLHVGDAVDFLRNAPEGKYDAIIVDSSDPIGPAQELVEKPFFQTIARALKPGGVLCNQAESMWLHTHLIQDMLSICRETFKGAVHYAWTSVPTYPSGVIGFLLCAKEGPAVNFLSPVNPIEKLEGAMEAGREIRFYNSEVHRAAFVLPTFVRRELESHNTCAEKDKSETKPVAKPKKMKIMPNSAIPTAS

SEQ ID NO: 5564 - protein, 107 aa, Glycine max
  misc_feature (65)..(65): Xaa can be any naturally occurring amino acid
MDSPSRPSVIIVGAGISGIAAAKVLAENGIEDLVILEASDRVGGRIRKESFGGVSVELGAGWIAXVGGPQPNPVWELGVQFGLRTCFFDYSNARYNIYDRSGNIIPS

SEQ ID NO: 5565 - protein, 507 aa, Lolium rigidum
MNLEVAFLHEYASPRALVVAVVLVLVAVHLARSTSRAERLRRKLPCPRFTLPVIGHLHLIGSLPHVGLRDLARKHGPDVMLLRLGAVPTLIVSSPSAARAVLRTHDHVFASRPDTVVGDILFVGSTNVGHSPYGEYWRQVRKIITTHVLTAKKIRANLPYREQEARLALASVREAAAAGTAVDLTHLFSHFAHDMVSQAVAGRIHREDRWGKLFHDLFVGNGQLLGGFNLDDCFPSLARLGIGSANIAKQRKRWDDLLDEVIDRHTSTPMEKGDEPDFIDVMLSVQDEYKLTRNNIKSILMDMFQAGTDTTFIWLDYAMAELARAPQVMAKLQAEVRRCSTTNQLLTQEDLSSMSYLKAVMKETMRLHPPGPLLLPHASIADCEVEGYVVPAGTRVIINVWAIGRHASSWERAEEFVPERFLEGSVDANSDFYGNDFRLLPFGSGRRMCPGINFATLTFEIILANLIYHFDWELPEGSPGVDMTEAFGMDVHRKENLLLVPRVAKIV

SEQ ID NO: 5566 - protein, 500 aa, Mesorhizobium sp. BNC1
MELQDYAQHIGGEAVAAADGETYITHNPANGRPWGRFPAGKSADVARAVAAAMEALRGSWGSMAPTRRGRLLIEWARAISVNAEKIARLETAQNGKIFRDCLNQARDLENWLYYYGGQADKIEGTVVPLLRQSILNYTLREPLGVIGIITPWNSPASLTMSSAAPALAAGNAIVIKPSEVTPASILEIARLAEEAGIPKGVINVVTGGRNAGEALVDHPDIAKIAFTGSVEAGRAIAERAGKRLIGCTLELGGKSPNIVFPDADLARAEAGVLGGIFASTGQTCVAGSRAYVHESLFDSFVERLATRARQIVLGDPMDPRTQMGPVSTELQLQKDERLVAEALSEGAVKIAGGERVSPPGCEDGYFYAPTVLTKLNPAASILKTEVFGPVLSVLPFKSEDDVVAMANDSPFGLAAGFWTRDFARAHRLARRLEAGTVWINMYRAFAFNSPMNGHKQSGIGWQNGSEAIFQYLKTKSVWCETDEDYGDMFARAQPASTGRE

SEQ ID NO: 5567 - protein, 564 aa, Zea mays
  misc_feature (515)..(515): Xaa can be any naturally occurring amino acid
MASSHIILPKEEEEEAAAAVAEAGLGAAVEADHDHRRYQEQAPGKAALPFSATCVRISRDSYPNLRALRNASTMSLHDDDAAFVKLEEGDYGYVLDDVPHLTDYLPDLPTFPNPLQDHPAYSTVKQYFVNADDTVPEKVVVQKNSPRGVHFRRAGPRQRVYFESEEAKACIVTCGGLCPGLNTVIRELVCGLSHMYNVSNVFGIQNGYKGFYSSNYLPMTPKSVNDIHKRGGTVLGTSRGGHDTKKIVDNIQDRGINQVFIIGGDGTQKGAYEIYKEIRRRGLQVAVAGIPKTIDNDIAVIDKSFGFDSAVEEAQRAINAAHVEASSAENGIGLVKLMGRYSGFIAMYATLASRDVDCCLIPESPFYLEGEGGLFEYIDRRLKENNHMVIVVAEGAGQDLIAQSIPAADQQDASGNKLLLDVGLWLTHKIKDYCKSKKMEMTIKYIDPTYMIRAIPSNASDNVYCTLLAHSAIHGAMAGYSFTVGMVNGRHAYIPFHRVTSTRNKVRITDRMWAXLLSSTNQPSFLSQKDIDAAREADKAANRMKSREDVSKKQSTPVLANGEK

SEQ ID NO: 5568 - protein, 246 aa, Brassica napus
MNIAHTIFGVFGNATALFLFLAPSITFKRIIKNKSTEQFSGIPYPMTLLNCLLSAWYGLPFVSKDNTLVSTINGTGALIERVYVLIFLFYAPKKEKAKIFGVFTAVLAVFATVALVSLFALHGNARKLFCGIAATVFSIIMYASPLSIMRLVIKTKSVEYMPFFLSLFVFLCGTSWFIYGLIGRDPFVAIPNGFGCALGTLQLILSIIYCGNKGEKSAEKDAKSLEMKGEEKKQNVVNGKQQEQQV

SEQ ID NO: 5569 - protein, 453 aa, Escherichia coli CFT073
MSFDLIIKNGTVILENEARVVDIAVKDGKIAAIGQDLGDAKDVMDASGLVVSPGMVDAHTHISEPGRSHWEGYETGTRAAAKGGITTMIEMPLNQLPATVDRASIELKFDAAKGKLTIDAAQLGGLVSYNIDRLHELDEVGVVGFKCFVATCGDRGIDNDFRDVNDWQFFKGAQKLGELGQPVLVHCENALICDALGEEAKREGRVTAHDYVASRPVFTEVEAIRRVLYLAKVAGCRLHVCHVSSPEGVEEVTRARQEGQDVTCESCPHYFVLDTDQFEEIGTLAKCSPPIRDLENQKGMWEKLFNGEIDCLVSDHSPCPPEMKAGNIMKAWGGIAGLQSCMDVMFDEAVQKRGMSLPMFGKLMATNAADIFGLQQKGRIAPGKDADFVFIQPNSSYVLTNDDLEYRHKVSPYVGRTIGARITKTILRGDVIYDIEQGFPVAPKGQFILKHQQ

SEQ ID NO: 5570 - protein, 430 aa, Mycobacterium avium subsp. paratuberculosis str. k10
MSVLLRGVRLYGEGDRVDVLVDDGQIADIGAGLDIPDTADVIDATGQVLLPGFVDLHTHLREPGREYAEDIETGSAAAALGGYTAVFAMANTNPVADSPVVTDHVWHRGQQVGLVDVHPVGAVTMGLAGKELTEMGMMAAGAAQVRMFSDDGVCVHDPLVMRRALEYATGLGVLIAQHAEEPRLTVGAVAHEGPTAARLGLAGWPRAAEESIVARDALLARDAGARVHICHASTAGTVEIVKWAKQQGISITAEVTPHHLMLDDSRLASYDGRNRVNPPLREAADAAALRRALADGVIDCVATDHAPHAEHEKCVEFSAARPGMLGLQTALSIVVHTMVRPGLLTWRDIAKVMSENPARIANLPDHGRPLEVGEPANLTVVDPDASWTVAGSDLASRSANTPYEAMTLPATVTATLLRGKVTARDGKCPA

SEQ ID NO: 5571 - protein, 162 aa, Zea mays
  misc_feature (7)..(7): Xaa can be any naturally occurring amino acid
QVIVVTXGERILGLGDLGCQGMGIPVGKLALYTALGGVRPSACLPITIDVGTNNEDLLKDEFYIGLKQRRATGQEYSEFLDEFMAAVRQNYGQKVLVQFEDFANHNAFTLLEKYRTNHLVFNDDIQGTAAVVLAGIIAALKSVGGTLADHTFLFFSASYTIK

SEQ ID NO: 5572 - protein, 510 aa, Glycine max
  misc_feature (368)..(368): Xaa can be any naturally occurring amino acid
MPSFMAFLSHPYFFAALSASLTLLVVQLLFRKLNKRHSRKKYHPVAGTIFNQMLNFNRLHHYMTDLAAKHRTYRLLNPFRYEVYTTEPTNVEYILKTNFENYGKGLYNYHNLKDLLGDGIFTVDGEKWREQRKISSHEFSTKMLRDFSISIFRKNVVKLVNIVSEAATSNSTLEIQDLLMKSTLDSIFQVAFGTELDSMCGSSQEGKIFADAFDTSSALTLYRYVDVFWKIKKFLNIGSEAKLRKTTEILNEFVFKLINTRILQMQISKGDSGSKRGDILSRFLQVKEYDPTYLRDIILNFVIAGKDTTAATLSWFMYMPCKCPALPEMAAGVVGQAPYTTCLSSYNEFVYSVTDEALERMNYLHAAXTETLRLYPAVPVDAKICFSDDTLPDGYSVNKGDMVSYQPYAMGRMKFIWGDDAEDFRPERWLDENGIFKPESPFKFTAFQAGPRICLGKEFAYRQMKIFAAVLLGCFRFKLKDEKKNVTYKTMINLHIDEGLEIKAFNRYRD

SEQ ID NO: 5573 - protein, 248 aa, Triticum vavilovii
QQQPVPQPHQPFSQQPQQTFPQPQQTFPHQPQQQFPQPQQPQQQFLQPQQPFPQQPQQPYPQQPQQPFPQTQQPQQLFPQSQQPQQQFSQPQQQFPQPQQPQQSFPQQQPPFIQPSLQQQVNPCKNFLLQQCKPVSLVSSLWSMIWPQSDCQVMRQQCCQQLAQIPQQLQCAAIHTVIHSIIMQQEQQQGMHILLPLYQQQQVGQGTLVQGQGIIQPQQPAQLEAIRSLVLQTLPTMCNVYVPPECSI

SEQ ID NO: 5574 - protein, 274 aa, Triticum aestivum
SINRKGYDGAKADIWSCGVILFVLLAGYLPFQDKNLMNMYKKIGKAEFKCPSWFSSDIRRLLLRILDPNPSTRISIERIMEHPWFRKGLDAKLLRYNLQAKDAVPAADMTATSDSLSCSNSATEGKDQEAKKLANLNAFDIISLSTGLDLSGMFEDNDKKRESKFTSTNSASTIVSKIEDIAKCMRLKLVKKDGGMMRMESFKPGRKGVMSIDAEIFEVTPDFHLVELKKTNGDTIEYQKVLNQEMRPALKDIVWAWQGEQQPQPQPQPQQQPC

SEQ ID NO: 5575 - protein, 254 aa, Triticum vavilovii
QWPQQQPVPQPHQPFSQQPQQTFPQPQQTFPHQPQQQFPQPQQPQQQFLQPQQPFPQQPQQPYPQQPQQPFPQTQQPQQLFPQSQQPQQQFSQPQQQFPQPQQPQQSFPQQQPPFIQPSLQQQVNPCKNFLLQQCKPVSLVSSLWSMIWPQSDCQVMRQQCCQQLAQIPQQLQCAAIHTIIHSIIMQQEQQEQQQGMHILLPLYQQQQVGQGTLVQGQGIIQPQQPAQLEAIRSLVLQTLPTMCNVYVPPECSI

SEQ ID NO: 5576 - protein, 238 aa, Zea mays
PAVSRYQKKEFHDETCRKIKALHLYDCLRANKATSAWGVEARVPFLDKSFISVAMDIDPEWKMIKRDLGRIEKWVIRNAFDDEERPYLPKHILYRQKEQFSDGVGYSWIDGLKDHASQHVSDSMMMNAGFVYPENTPTTKEGYYYRMIFEKFFPKPAARSTVPGGPSVACSTAKAVEWDASWSKNLDPSGRAALGVHDAAYEDTAGETPASADPVSDKGLRPAIGESLGTPVASATAV

SEQ ID NO: 5577 - protein, 876 aa, Zea mays
MDLLSTLLRRLCLCPPLAGITPARRRSLSDDDDDSAHAHAHTHPHHHHLRGRLHRRPRRRHEPQPHGHLLLPTSDPYAAVVVAGPHETTVARTYVFRNSEAPRWEASFLLPLAHAATGLEFHVKDADPFGSDLIGVAWLPAAAVLASAAAPIESQWLDLARPDARGPPAPGGGSAIRVSAAFVPAAASRGRSGVGVPAYFPLRRGCDVRLYQDAHVAAGELEGVGVVPGFLPGRCWEDLCMAVLGAQRLVYVAGWSVHTTVRLTREAMSPEMAAKVAELEELGGEPVEHMSLGELLKYKSQEGVRVLLLVWDDRTSHNNFFVKMLFGRSIVLQLCMAWVEKLSATSAAAAVQVVGTLYTHHQKCVLVDTPASESTRRITAFLGGLDLCAGRYDTPSHRLFRDLQTVFHGDVYNPTFGGDVNGPRQPWHDLHCRLDGPAAYDILKNFEQRWRKATKLREMFGGKAAHRKDDALLKLERIPWILSPTKPKQQPPSAAADTGAADHDDDERDQPALHVLPDGDPERWHAQVFRSVDAGSVKRFPRPWERAEMARRHLVGDKNLAVERSIHAAYVAAIRSAERFVYVENQYFIGGSYAWPSYRNGGACNLVPMEIALKVASKVRAGEPFAAYVVLPMWPEGNPGSGPAQEILFWQNQTMEMMYSVVAAALEGKGGHPQEHLNFYCLGNREPAEDAGDGNKWAPADPLDDATTSSAAAHARRHRRFMVYVHSKGMIVDDEYVIIGSANINQRSLAGSRDTEIAVGAYQPDHTGACPRGKVHGYRMSLWEEHLGKEAVRRPEVLRPESPRCVKLVNRIARDNWRRYAADDDKLGPLQGHLLRYPVHVRADGRVEPLPGNELFPDVGGRVVGAPNNLPDYLTM

SEQ ID NO: 5578 - protein, 470 aa, Zea mays
  misc_feature (145)..(145): Xaa can be any naturally occurring amino acid
  misc_feature (161)..(161): Xaa can be any naturally occurring amino acid
  misc_feature (268)..(268): Xaa can be any naturally occurring amino acid
  misc_feature (386)..(386): Xaa can be any naturally occurring amino acid
MARSGREAEPGEEERKLVLGKYELGRLLGQGTFAKVYYARDLSAGAGTGHSCSVAIKVIDKARLRRTEGMVEQLRREISIMRMVRHPNVVGIREVLASRSRVFVVMEYARGGELFAKVARGRLDEDHARRYFQQLGSPAVGFCHXRGVAHRDLKPENLLLXDRRGRLKVTDLPGLGRACPSSCATTAWLHTQCGNPRVRRRPRCSGSAGYDGARADLWSCGVVLYVLLCGFLPFQHDNYVKLYQKIFKADYQVPPWVSGDARRLIARXLLVVDPAKRASIAEIMCTPWFRKGFVPPVLSPPVTPKKQQLDEGAALFDNDDDDNSNSNHSGATSPRSCNAFQLISSMSSGFDLSGLFESEQKTATVFTARAPAATVVEKLESVARRXGFEVTRGKGWKVRMEAKAEGTNGRLAATAEVLEVAVDVTVVEFVHDAGDALDFNKFCAVDVRPGLTEIVWAWQGDSPAAAVGTA

SEQ ID NO: 5579 - protein, 229 aa, Brassica napus
MLRSSFRLLYITRTNLLVRASPSSLSRLPSKFTSAKPLVCSHHQIPLSTTGAIHSSFEHSMAASSEPKSIYDFTVKDAKGNDVDLSIYKGKVLLIVNVASQCGLTNSNYTELAQLYQKYKDHGFEILAFPCNQFGNQEPGSNEEIVQFACTRFKAEYPIFDKVDVNGDKAAPIYKFLKSSKGGLFGDGIKWNFAKFLVDKDGNVVDRYAPTTSPLSIEKDLKKLLGVTA

SEQ ID NO: 5580 - protein, 57 aa, Zea mays
MAFTASDICKIIFAVLLPPLGVFLERGCGGDLCINILLTILGYIPGIIHALYIILKY

SEQ ID NO: 5581 - protein, 429 aa, Xylella fastidiosa Temecula1
MSDLDKVTLNAGETSLVLPVLKPTLGNGCVDIAKLTKETGLFTYDSGFTATASCKSAITYIDGEKGVLLYRGYPIEQLAEHSSFLEVAYLLMNGELPRKDEFAKFDDEITHHTMMHESLKNFLGGFHYDAHPMAMLAASVASLSAFYHDTLDLNDLEQRRLAAIRLIAKVPTLAAAAHRYSIGWPIRYPRNNLGYVERFLHMMFEVPSEPLQLNPVVIKALDLLFILHADHEQNASTSTVRLVGSTGANPYASVAAGITALWGPAHGGANEAVLKMLEEIGDAKNVDLVIAKAKTKDKNSPFRLMGFGHRVYKHFDPRAKIIREMAHTVLGELGVNDPLLEVALKLEEAALKDDYFVQRKLYPNVDFYSGIIYKAINIPLEMFTVMFAIARTAGWVSHWLEQQVDPEMKISRPRQIYTGHRERDYKDAR

SEQ ID NO: 5582 - protein, 495 aa, Staphylococcus aureus subsp. aureus Mu50
MAVNVRDYIAENYGLFINGEFVKGSSDETIEVTNPATGETLSHITRAKDKDVDHAVKVAQEAFESWSLTSKSERAQMLRDIGDKLMAQKDKIAMIETLNNGKPIRETTAIDIPFAARHFHYFASVIETEEGTVNDIDKDTMSIVRHEPIGVVGAVVAWNFPMLLAAWKIAPAIAAGNTIVIQPSSSTPLSLLEVAKIFQEVLPKGVVNILTGKGSESGNAIFNHDGVDKLSFTGSTDVGYQVAEAAAKHLVPATLELGGKSANIILDDANLDLAVEGIQLGILFNQGEVCSAGSRLLVHEKIYDQLVPRLQEAFSNIKVGDPQDEATQMGSQTGKDQLDKIQSYIDAAKESDAQILAGGHRLTENGLDKGFFFEPTLIAVPDNHHKLAQEEIFGPVLTVIKVKDDQEAIDIANDSEYGLAGGVFSQNITRALNIAKAVRTGRIWINTYNQVPEGAPFGGYKKSGIGRETYKGALSNYQQVKNIYIDTSNALKGLY

SEQ ID NO: 5583 - protein, 157 aa, Triticum aestivum
  misc_feature (8)..(8): Xaa can be any naturally occurring amino acid
AKKAAEEXSNTENNNASSSNSDSVMAEAEPASNAAAGDKKEQPKDDDDLLQQALAMSMEGGASGSAAVTDSAMAEAGAVDPDLALALQMSVQDANMSSDTDMSKVFEDRTFVSSILNSLPGVDPNDPSVKDLLASLHSQGEQEKKEDKSDKTEDEKN

SEQ ID NO: 5584 - protein, 447 aa, Arabidopsis thaliana
MSGSRRKATPASRTRVGNYEMGRTLGEGSFAKVKYAKNTVTGDQAAIKILDREKVFRHKMVEQLKREISTMKLIKHPNVVEIIEVMASKTKIYIVLELVNGGELFDKIAQQGRLKEDEARRYFQQLINAVDYCHSRGVYHRDLKPENLILDANGVLKVSDFGLSAFSRQVREDGLLHTACGTPNYVAPEVLSDKGYDGAAADVWSCGVILFVLMAGYLPFDEPNLMTLYKRICKAEFSCPPWFSQGAKRVIKRILEPNPITRISIAELLEDEWFKKGYKPPSFDQDDEDITIDDVDAAFSNSKECLVTEKKEKPVSMNAFELISSSSEFSLENLFEKQAQLVKKETRFTSQRSASEIMSKMEETAKPLGFNVRKDNYKIKMKGDKSGRKGQLSVATEVFEVAPSLHVVELRKTGGDTLEFHKFYKNFSSGLKDVVWNTDAAAEEQKQ

SEQ ID NO: 5585 - protein, 312 aa, Triticum aestivum
  misc_feature (42)..(43): Xaa can be any naturally occurring amino acid
MERDKVIREIGDASCGLAFWAHMIVSLVIGAGEKMKRKFYHXXECISLREVKALQKLNHPNIVQLKEVTMENHELFFIFEHMDCNLYDVIRERSAPFSEEEIRTFMLQILQGLVYMHNNGYFHRDLKPENLLVTNGIVKIADFGLAREVCSSPPYTDYVSTRWYRAPEVLLQASAYTPSIDMWAIGAILAELFTLSPLFPGETETDQLYKICAVLGTPDHSLWPEGMNLPRSSSFQFFQIPPRNLWELIPNASLEALDLIKQLCSWDPRRRPTAEQALQHPFFNVRKWVPRPLQDASYPKMNEPRATPRLEL

SEQ ID NO: 5586 - protein, 338 aa, Arabidopsis thaliana
MVLKAAFELGVIDTIAAAGNDTWLSPCEIACSLPTKPTNPEAPVLLDRMLSLLVSHSILKCRMIETGENGRTGKIERVYAAEPVCKYFLRDSDGTGSLVPLFMLLHTQVFFKTWTNLKDVILEGRDAFNSAHGMKIFEYINSDQPFAELFNRAMSEPSTMIMKKVLDVYRGFEDVNTLVDVGGGNGTVLGLVTSKYPHIKGVNFDLAQVLTQAPFYPGVEHVSGDMFVEVPKGDAVFMKWILHDWGDEDCIKILKNCWKSLPEKGKIIIVEFVTPKEPKGGDLSSNTVFAMDLLMLTQCSGGKERSLSQFENLAFASGFLRCEIICLAYSYSVIEFHK

SEQ ID NO: 5587 - protein, 72 aa, Glycine max
  misc_feature (34)..(34): Xaa can be any naturally occurring amino acid
MASSMISSPAGTTVNPAGAGMDAAWAGLNFMAAXHSKKTNSDIPSIASSGSRVHRMQVWPTTGMRKFETLYY

SEQ ID NO: 5588 - protein, 506 aa, Ruta graveolens
MDLLLLEKALLGLFAAAVVAIAVSKLRGKRFKLPPGPFGFPVFGNWLQVGDDLNQRKLANLSKKFGDVYLLRMGQRNLVVVSSPEMAKEVLHTQGVEFGSRTRNVVFDIFTGKGQDMVFTVYSEHWRKMRRIMTVPFFTNKVVQQQRFNWEDEAARVVEDVKKDPQAATTGIVLRRRLQLLMYNNMYRIMFDRRFESVDDPLFNKLKALNGERSRLAQSFEYNYGDFIPILRPFLRGYLKLVKEVKERRLKLFKDYFVEERKKLTSTKSMTEENFKCAIDHVLDAQQKGEINEDNVLYIVENINVAAIETTLWSIEWGIAELVNHPDIQKKLRAEIDRVLGPDHQITEPDTHKLPYLQAVIKETLRLRMAIPLLVPHMNLNDAKLAGYDIPAESKILVNAWWLANNPAHWKDPQVFRPERFLEEESGVEANGNDFRYIPFGVGRRSCPGIILALPILGITIGRMVQNFELLPPPGQSKIDTSEKGGQFSLFILNHSTIVLKPRSSV

SEQ ID NO: 5589 - protein, 754 aa, Zea mays
  misc_feature (117)..(117): Xaa can be any naturally occurring amino acid
FGHQLQTSEKRRVGGKLLLYDSCAHSSTVLGNLGGEEEESSGSQRTTHYSWLHGFLTSLCGGDPAMRIVVWFRRDLRVEDNPALAAAARAGGEVVPAYVWSPEEEGPYYPGRVSRWXWISQSLNHLDASLRRLGAGKLVTRRSADAAVALLQLVRDTGATHVYFNHLYDPISLVRDRRLKEMLAAEGIVVQSFNSDLLYEPWEVVDDEGQPFTMFDPFWNRCLSMPYDPPAPLLPPKRINSGDLSMCPSEDLIFEDESERGSNALLARAWTPGWQNADKALTAFLNGPLADYSVNRKKADSASTSLLSPHLHFGELSVRKVFHLVRMKQLVWSNEGNHAAEESCTLFLRSIGLREYSRYLSFNHPSSHERPLLAHLRFFPWVVDESYFKIWRQGRTGYPLVDAGMRELWATGWLHDRIRVVVASFFVKVLQLPWRWGMKYFWDTLLDADLESDALGWQYITGSLPDGRELDRIDNPQFEGYKFDPHGEYVRRWIPELARLPTEWIHHPWDAPVSVLQAAGIELGSNYPLPIVELDAAKGRLQAALSEMWQLEAASRATMNNGTEEGLGDSSEVLFPQELQMEVDRQPAPAEAAANVHVHVPMPARRRGDQMVPTMTTSSLNRAGTEVSADLVVANSEEEDTRAQVPFHAHLHLHPRAEAPPAARRTNNGARQHDVFQQRRNHRRDALLAPSASEASSSWTGREGAVVPVWSPPAASGHSDAFAADEADVSSRSYLGRHPQSHRLMNWSQLSQSS

SEQ ID NO: 5590 - protein, 308 aa, Arabidopsis thaliana
MAPGGSALKEVMESNSTGMDYEVKTAKVEVNNNKPTKPGSAGIGKYGIHSNNGVYELLECPVCTNLMYPPIHQCPNGHTLCSNCKLRVQNTCPTCRYELGNIRCLALEKVAESLEVPCRYQNLGCHDIFPYYSKLKHEQHCRFRPYTCPYAGSECSVTGDIPTLVVHLKDDHKVDMHDGCTFNHRYVKSNPHEVENATWMLTVFNCFGRQFCLHFEAFQLGMAPVYMAFLRFMGDENEAKKFSYSLEVGAHGRKLTWQGIPRSIRDSHRKVRDSQDGLIIPRNLALYFSGGDRQELKLRVTGRIWKEE

SEQ ID NO: 5591 - protein, 513 aa, Lolium rigidum
MVMEMEPSSATLFFLSVVTLVILVSLVSRKPSSKLRRPPGPRDLPFVGSLHHLLTSQPHVALRNLAKTHGPVMRLRLGQVEAVVVSSSAAAQEVLRDNDLSFASRPNLLATEIMCYGNLDVAFAPYGAYWRALKKLCVLELLSSRKVRQFKPVRDSETMSLIKEICAAGKGGKPVKLRSLLVKCTSSVTGKATFGERCDIDLREQFMAAMEVAQIHSSGFCVGDLFPSLGFLDVATGMRYQLWRARQQLDNVVDKIISDCEARREEKKSTPTGDEDLLSLMLRIRDEGGSDFPIETINIKAIIVDLFTAGTETTSSTAEFVMSELMRNPKVMKKAQEEVWRMMENKSPQDHENHMDELPYLRMVIKETMRLHPVVPLLLPRLCRESCHVGGFEITKGTRVIINAWALATSPENWNEPEEFRPERFEDSVVVNDKGTQFKLMPFGGGRRMCPGDGFALATLELMVARLLYYFEWSLPDGMRPDELDMDVKVGTTSRRRNELRVVASPCRIPIEI

SEQ ID NO: 5592 - protein, 556 aa, Zea mays
  misc_feature (94)..(94): Xaa can be any naturally occurring amino acid
  misc_feature (119)..(119): Xaa can be any naturally occurring amino acid
  misc_feature (127)..(127): Xaa can be any naturally occurring amino acid
  misc_feature (141)..(141): Xaa can be any naturally occurring amino acid
  misc_feature (177)..(177): Xaa can be any naturally occurring amino acid
  misc_feature (187)..(187): Xaa can be any naturally occurring amino acid
  misc_feature (221)..(221): Xaa can be any naturally occurring amino acid
MARRAASSLVSRCLLARAPAGAPPAAPSALRRTVPADGMHRLLPGVLQRFSTAAAVEEPITPSVQVNYTKLLINGNFVDSASGKTFPTLDPRTXGEVIAHVAEGDAEDINRAVAAARKXAFDEGPWXPKMTAYERSRILLXRFADLIEKHNDELAALETWDNGKPYEQAAQIEVPMXVARLMRYYAXGWADKIHGLIVPADGPHHVQILHEPIGVAGQIIXPWELPLLMFAWKVGPALACGNTLVLKTAEQTPLSALYISKLLHEAGLPEGVVNVVSGFGPTAGAALASHMDVDKIAFTGSTDTGKIILELAAKSNLKTVTLELGGKSPFIIMDDADVDHAVELAHFALFFNQGQCCCAGSRTFVHERVYDEFVEKAKARALKRVVGDPFRKGVEQGPQIDDEQFKKILRYIRYGVDGGATLVTGGDRLGDKGFYIQPTIFSDVQDGMKIAQEEIFGPVQSILKFKDLNEVIKRANASQYGLAAGVFTNSLDTANTLTRALRAGTVWVNCFDVFDAAIPFGGYKMSGIGREKGVDSLKNYLQVKAVVTPIKNAAWL

SEQ ID NO: 5593 - protein, 252 aa, Pinus taeda
MSCSVVGSMGMALEKSGGNAQHEKRDSLDFAETELKLGLPGVAADESRAHQKSCGKRSFSEAMESRSYTITDVDITRTGTPEDADKFHGPIVKEKQMALPANDPATTGSRPPPKAQIVGWPPVKDFRKVRTISTCDSLYVKVSMDGAPYLRKVNLKIYSTYHDLSSALENMFSCLLTMGKSRSHGLNESSLMDMPNGSGYVPTYEDKDGDWMLVGDVPWQMFVDSCQRMRIMKASEAIGLAPRTMEKCKKRN

SEQ ID NO: 5594 - protein, 376 aa, uncultured archaeon
MEERGISKHELKLFLKEQKQRDLTYRKVLSSMCTYPHEIAVYAHNLFLDSNLGDSGLFPGTKEIEDELIRMIGALLGNENAHGYISAGGTESNIQAIRAIRNRKRKEGLQQMNIIVPKTAHFSFDKIEDLLSLEVKKAGLDDELRVDVNLVEDLIDDNTISIVGIAGTTEFGQIDPIKELADLAHNSDIFLHVDAAFGGFVIPFLDAEYLFDFSLDAVSSISIDPHKMGLSTIPAGCILFRDVSYLADLAVNTPYLTTNEQCSLIGTRSGAPVAATYAVLKYLGRNGLRAIVDECMQLTRMLVHGAKEMGIYPVIEPVMNVVTLRFPDVERVAKALEARGWQVSTTRAPKALRLVIMPHVTEDTIEMFLNDLENAK

SEQ ID NO: 5595 - protein, 320 aa, Mycobacterium avium subsp. paratuberculosis str. k10
MPRLDNPADEKPGIDPILQKVLDAVPFRLSTEDGIDAARQRFRDLPRRPLHPELRVEDRTIPGPQGAIAVRIYWPPSHSESCPAPVVLYFHGGGFVIGDLDTHDGTARQHAVGAGAIVVSVDYRLAPEHPYPAAVEDAWAATLWAAENAAGLHGDPGRIAVAGDSAGGTLAAVTAQRARDRGGPPVRFQLLWYPSTMWDASLPSFAENATAPILDVKAVAEFSRWYAGDVDLSDPPADMAPGRATDLSNLPPAYIGVAGYDPLRDDGIRYGEPLAAAGVAAQVHNAETLVHGYLGYAGVVPAATAAMERGLAALRTALQG

SEQ ID NO: 5596 - protein, 192 aa, Triticum urartu
PQPQPFSQQPRQAFPQPQQTFPLQPQQVFPQPQQPQQQFPQPQQPQQPFPQPQQPQLPFPQQPFPQPQQPQQPFPQSQQPQQPFPQPQQQFPQPQQPQQSFPQQQQPLIQPYLQQQMNPCKNYLLQQCNPVSLVSSLVSMILPRSDCQVMQQQCCQQLAQIPRQLQCTAIHSVVHAIIMQQEQQGIQILRPL

SEQ ID NO: 5597 - protein, 174 aa, Pyrococcus abyssi GE5
MEGFTIWLTGPSGAGKTTLAVKLAKKLREMGYKVEILDGDTIRKTLYPNLGFSKEAREMHNRIVIYMAKLLTRNGVIAIVSLISPYKRIREYARKEIGRFMEVYVYAPLEVRIKRDPKGLYAKAIRGEIRGLTGYDGVYEEPENPEVKVDSSRMTPDEEAELVIRKAKELGYLP

SEQ ID NO: 5598 - protein, 480 aa, Listeria monocytogenes str. 1/2a F6854
MQIKNKAMLITYSDSLGENMEELSKVMETYFEDAIGGIHLLPFFPSTGDRGFAPSDYTTVDSDLGSWEMIEKLGEKYYLMFDFMINHISRESLFFQDFKKEHLNSKYKDMFIRINDFFPPGRPNEKDLDLIYKRKDKAPFQEVEFADGETELVWNTFGEEQIDLDVTAEVTKEFIRQTIKNMAAHGCSILRLDAFAYAIKKLDTNDFFVEPEIWDLLDEVKAEAAKYDMELLPEIHEHYSIQMKIANHDYYIYDFALPMVMLYSLYSGRVEHLAKWLEMSPMKQFTTLDTHDGIGVVDARDLLTDEELDYTSAELYKIGANVKKIYSSEKYNNLDIYQINSTYYSALGDDDKSYLLARVIQCFAPGIPQIYYVGLLAGKNDIDLLEETKEGRNINRHYYTIDEIKNEVKRPVVKALCNLLRFRNTSEAFDLEGSIEIETPSSNEIVIIRKNKTNKITATLKADLSTKTFQISENERNILI

SEQ ID NO: 5599 - protein, 296 aa, Zea mays
  misc_feature (290)..(290): Xaa can be any naturally occurring amino acid
MDRADPARGRLAVLSSHLRGAGAEEAAGLERSPVSAPAPGPRAGALAVVDGRTGKRHEVKVSEDGTVRATDFKKITTGKDDKGLKIYDPGYLNTAPVRSSICYIDGDEGILRYRGYPIEELAESSSFVEVAYLLMYGNLPTQSQLAGWEFAISQHSAVPQGLLDIIQSMPHDAHPMGVLASAMSTLSVFHPDANPALQGQDLYKSKQVRDKQIVRVLGKAPTIAAAAYLRLAGRPPVLPLNTLSYSENFLYMLDSLGDRTYKPNPRLARALDILFILHAEHEMNCSTAAXRHLASR

SEQ ID NO: 5600 - protein, 192 aa, Triticum urartu
PQPQPFSQQPQQVFPQPQQTFPLQPQQVFPQPQQPQQQFPQPQQPQQPFPQPQQPQLPFPQQPFPQPQQPQQPFPQSQQPQQPFPQPQQQFPQPQQPQQSFPQQQQPLIQPYLQQQMNPCKNYLLQQCNPVSLVSSLVSMILPRSDCQVMQQQCCQQLAQIPRQLQCTAIHSVVHAIIMQQEQQGIQILRPL

SEQ ID NO: 5601 - protein, 429 aa, Sinorhizobium meliloti
MSEKSATVTFGGKSADLPVRSGSIGPDVVDIGSLYKQTTMFTYDPGFTSTASCESKITYIDGDEGVLLHRGFPIEQLAEHGDFLEVCYLLLYGELPTKAQKADFDYRVTHHTMVHEQMSRFFTGFRRDAHPMAVMCGCVGALSAFYHDSTDITDPHQRMVASLRMIAKMPTIAAMAYKYHIGQPFVYPKNDLDYASNFLRMCFAVPCEEYVVNPVLARAMDRIFILHADHEQNASTSTVRLAGSSGANPFACIAAGIACLWGPAHGGANEAALNMLAEIGTVDRIPEYITKAKDKNDPFRLMGFGHRVYKNYDPRAKIMQKTTHEVLAELGHKDDPLLEVAMELERIALTDEYFIEKKLYPNIDFYSGITLKALGFPTTMFTVLFALARTVGWIAQWNEMIEDPEQRIGRPRQLYVGAPLRDYVPISKR

SEQ ID NO: 5602 - protein, 181 aa, Brassica napus
  misc_feature (166)..(166): Xaa can be any naturally occurring amino acid
MAKATSPIFLLLLLVILSSTLLSVKPNTTTIETTCKTTNYYRLCVSALKSDPRSPTADTKGLATIMVGFGMKSATATATYIAGNHTAAAANDTVLRKVLKDCSDKYALAADSLRLTVQDLDDEAYDYAYMHVLAAQDYPNVCRNIFRRAKGLVYPTEIRRREVSLXRICGVVSGILDRLAE

SEQ ID NO: 5603 - protein, 364 aa, Ganoderma applanatum
MFSKVFLSLVVLASSVAAAVPTVGRRATCANGKTTANDACCVWFDVLDDIQENLFHGGQCGEDAHESLRLTFHDAIAFSPALTAAGQFGGGGADGSIIAHSDVELTYPVNDGLDEIVEASRPFAIKHNVSFGDFIQFAGAVGVANCNGGPQLSFFAGRSNDSQPSPPNLVPLPSDTADTILSRFSDAGFDAVEVVWLLVSHTVGSQNTVDSSIPGAPFDSTPSDFDAQFFVETMLNGTLVPGNGLQDGEVLSPYPGEFRLQSDFALSRDSRTTCEWQKMIADRANMLEKFEITMLKMSLLGFDQSALTDCSDVIPTATGTVQDPFIPAGLTVDDLQPACSSSAFPTVTTVAGAVTSIPAVPLNS

SEQ ID NO: 5604 - protein, 254 aa, Hyacinthus orientalis
MGEEADRSGYDRLASDGDGDGSGGDGDDGRVLEWEIGLPSADDLTPLSQPLVPPELASAFSITPDPARTILDVHRASHSTMSSLRRHNLASSSSAMKSFSPFPSGDPTVLESDDQKDESRVRRSEAENSEDDQSARSLKRPRLVWTPQLHTRLLTWVAHLGIKTAVPKTIMQLRMSRGLTRENVASHLQKYRLYFEEDAGRCRTNGHRPAIRCSHRRRCLIVCTKICCQLLLRRWPMPYAVPTMIPRARVWECR

SEQ ID NO: 5605 - protein, 122 aa, Amborella trichopoda
MIQAQTYLNVADNSGARELMCIRIVGASNPRYAHIGDVIVAVIKEAVPNMPLERSEVIRAVIVRTCKELKRDNGIIIRYDDNAAVVIDPEGNPKGTRVFGSIAGELRHLNFTKIVSLAPEVF

SEQ ID NO: 5606 - protein, 332 aa, Glycine max
IRLEARGRLREETARLYFQQLISAVDFCHSRGVFHRDLKPENLLLDDDGNLKVTDFGLSTFSEHLRHDGLLHTTCGTPAYVAPEVIGKRGYDGAKADIWSCGVILYVLLAGFLPFQDENLVALYKKIYRGDFKCPPWFSSEARRLITKLLDPNPNTRITISKIMDSSWFKKPVPKNLVGKKREELNLEEKIKHQEQEVSTTMNAFHIISLSEGFDLSPLFEEKKREEKELRFATTRPASSVISRLEDLAKAVKFDVKKSETKVRLQGQENGRKGKLAIAADLYAVTPSFLVVEVKKDNGDTLEYNQFCSKELRPALKDIVWRTSPAENPTLA

SEQ ID NO: 5607 - protein, 212 aa, Schizosaccharomyces pombe
KARHLIKLYEAEGIGRERVLIKIASTYEGIQAAKQLEEEGIHCNLTLLFSFVQAVACAEANVTLISPFVGRILDFYKAKNNRDYTAQEDPGVVSVSNIFNYYKKFGYKTIVMGASFRNVGEIKELAGVDFLTISPALLEQLNNSTDAVPKKLDASKASSLNLEKVSYLTDEPKFRFDFNNDEMAVVKLSTGIAAFAKDADTLRTILKAKLEA

SEQ ID NO: 5608 - protein, 140 aa, Triticum aestivum
  misc_feature (69)..(69): Xaa can be any naturally occurring amino acid
  misc_feature (82)..(82): Xaa can be any naturally occurring amino acid
  misc_feature (92)..(92): Xaa can be any naturally occurring amino acid
  misc_feature (97)..(97): Xaa can be any naturally occurring amino acid
  misc_feature (118)..(118): Xaa can be any naturally occurring amino acid
  misc_feature (127)..(127): Xaa can be any naturally occurring amino acid
  misc_feature (130)..(130): Xaa can be any naturally occurring amino acid
MAPTVMASSATSVAPFQGLKSTAGLPVSRRSNGASLGSVSNGGRIRCMQVWPIEGIKNSETLSYLPPLXSTEASSKQVDYLXIRSKWVPCLXFSKLXHLPVSTTTPGYYDGRSGTMWXLPISGCTDXTMXNEVEESRRIP

SEQ ID NO: 5609 - protein, 107 aa, Bartonella capreoli
GGANEACLKMLQEIGSIEKIPEFIARAKDKNDPFRLMGFGHRVYKNYDPRAKLMQKTCHEVLKELNIKDDPLLDIAMELEKIALSDEYFIEKKLYPNVDFYSGITLK

SEQ ID NO: 5610 - protein, 167 aa, Streptococcus pyogenes MGAS8232
MPNLYDFTVKAQNGNDLSLAAYKEKVVLIVNTATKCGLTPQYQALQALYDTYHDKGFEVLDFPCNQFLNQAPGDAEEINHFCSLTYHTTFPRFAKIKVNGKDADPLFTWLKEEKSGPLGKRIEWNFTKFLIDQNGQVIKRYSSKTDPKLIEEDLKALLDKIQCYHHL

SEQ ID NO: 5611 - protein, 211 aa, Brassica napus
KDVTQATRAQGLEEDPRNYLTFFCLGNREVKKEGEYEPAERPDPDTDYMRAQEARRFMIYVHSKMMIVDDEYIIVGSANINQRSMDGARDSEIAMGGYQPHHLSHRQPARGQVHGFRMSLWYEHLGMLDETFLDPSSLECIEKVNRIADKYWNFYSSESLEHDLPGHLLRYPISVDNEGNISELPGFEFFPDTKARILGNKVDYLPPILTT

SEQ ID NO: 5612 - protein, 109 aa, Bartonella bovis
ANEACLKMLQEIGSTEKIPEFIERAKDKNDPFRLMGFGHRVYKNYDPRAKLMQKTCHEVLKELNIQDDPLLDIAMELEKIALNDEYFIEKKLYPNVDFYSGITLKALGF

SEQ ID NO: 5613 - protein, 133 aa, Glycine max
MEPMDIVGKAKEDASLPKATMTKIIKEMLPPDVRVARDAQDLLIECCVEFINLVSSESNEVCNKEERRTIAPEHVLKALGQDSLKGAKWSNRAEMTEEEALAEQQRMFAEARARMNGGAIQSKEPEADQSLES

SEQ ID NO: 5614 - protein, 499 aa, Mesorhizobium sp. BNC1
MNRFELPSSKLYIGGRWEEGSGAEIVSIFSGDGSVNRVIKGASRADGERAIERALKAQSDPAWRNLKPHERARFLHRIADGIETNAARIAFIQTRDTGKTLRETTALVASAAGTFRYFAGALESLDDTLTAPRGDYLSMSVHEPLGLVSAITPWNSPIASDAQKVAPALAAGNAVLLKPASWSPLVSLELARIVEAAGLPQGLFSVLPGAGREIGNLLVEHPAISRVSFTGGTATGRMLARQAAEKLMPISLELGGKSPTIVFADADIDLAIAGILFGVFSSSGQSCIAGSRLFVERSIYESFVDRLVAATKKLVVGDPFDERTQVAPLVHFDHRDAVAAQVAAAVEAGAEVLCGAAIPTGADYDRGAYYLPTILAGLENDDPICREEVFGPVLCVLPFDDEADVIAQSNANDYGLACGIWTRDFPKAWRTARAITTGTVWINTYKQFSISTPFGGEKDSGMDREKGREGIRAYMAQKSVYVDLTGKPHPWARWPEAGA

SEQ ID NO: 5615 - protein, 161 aa, Rubrobacter xylanophilus DSM 9941
MGARRWCEMLSPFRGFWDVRSELDRMFDDVVRDAFRLWRGEGRAARTAEWAPAIDVYSKDGDLVIKAELPGMKPEDVDITLQEGVLTISGERKAEEEREGAGYFVRERRYGSFRRSMRLPEGVDESKIHARFEDGVLEVVVEGAGAVTEPRRIQIEAPKGS

SEQ ID NO: 5616 - protein, 489 aa, Bacillus cereus ATCC 10987
MPQDRKAEVQKHAYERKEIMPDNSQSLPRHMQKELPHEFSVNPLFAREGESVVPRFHISDEGMLPETAYQIVHDEITLDGNARLNLATFVSTWMEPAAEQLYAKSFDKNMIDKDEYPQTAEIEERCVRILANLWHSPSPLTTMGVSTTGSSEACMLGGLALKRRWQNARKSEGKPLDRPNIVFSSAVQVVWEKFANYWEVEPRYVKVSPEHPQLDPQGVLAAVDENTIGVVPILGETYTGLYEPVAEIAKALDDLQARTGLDIPMHVDAASGGFIAPFLQPDLVWDFQLPRVKSINVSGHKYGLVYPGLGWIIWREAEDLPEDLIFRVSYLGGNMPTFALNFSRPGAQVLLQYYNYLRLGKSGYYDIQRASQKVALFLSKAIQKMEPFELLSDGSDIPVFAWRLKEGYTSNWNLYDLSRQLRVFGWQVPAYPLPPDMESVTIMRVVVRNGFSMDLAHLFLRNLKQTVAFLDSLDGPMPHDTKCNNGFHH

SEQ ID NO: 5617 - protein, 390 aa, Aspergillus nidulans FGSC A4
MATKTLEARFEHLSVKDDSGNGNKGTSYPKHKSSLSTAVSLSGLGVAGQLTSGANRSNLLKLALQNTNDNKVNAMNANASQSPGKGTQNPASLRNLDENGEYEQPAPRKLHLGMFEIGKPLGKGKFGRVYLAKERSSGFVCALKVLHKSELQQGGVQKQVRREIEIQSNLRHPNVLRLFGHFQDSKRIFLILEFAGRGELYKHLRKEHRFPEWKAAHYIAQMASALKYLHKKHVMHRDIKPENILVGIHGEIKISDFGWSVHAPNNRRQTMCGTLDYLPPEMLTSNPQGNFYNEKVDLWSLGVLTYEFLVGEAPFEDTPVMTQRRIQRGDMQVPSFVSPEAKDLIKRLLVLDPEKRISLDEIQRHPWILKHCVKDDRTIKRGSAPHAANE

SEQ ID NO: 5618 - protein, 167 aa, Synechococcus elongatus PCC 6301
MKIRNVSMAPQVTDIAVTTIDGAAKSLSDYAGQVLLIVNVASYCGYTSQYSGLEALYRQYRDRGLQVLAFPCNDFGAQEPGSNEEIKTFCSTRFDVSFELFDKVHAKGADQHPLYAALTQTDPAGDVAWNFEKFLVGKDGTVLARFKSGVAPNDASLIQAIEAALAA

SEQ ID NO: 5619 - protein, 458 aa, Burkholderia cepacia R18194
MDEPIRSEGGASDAPKRRHADLLVHGGMVMTPNGAERIDVACVNGRVVALGALHGNWSADVVLDAGGLHVLPGVVDSQVHFREPGLTHKETLEAGTRGAVLGGVTTIFEMPNTHPLTLTAQDLQAKLDLAHGRAWCDYAFYIGGSAANAERLPELENLPGCAGVKVFMGSSFGDLLADDEAVLRRIVRNGRRRMAVHAEDEARLRERRALVEASGDVRDHHRWRDEESALAATRRIVGLATETGRRLHVLHVSTAEEMAFLARHRQRVTVEVTPHHLSLYAPDCYERLGTFAQMNPPVRERHHQDALWQAVRDGVVDVIGSDHAPHTRDEKRRPYPQSPSGMTGVQTLLPLMLDHVHAGRLSLARLVDLTSAGPARIFGIAGKGRIAAGYDADFSIVDLRARRIIRDEWIASVSGWTPYDGCAVTGWPVHTVVRGRVVVRDGALNGEPEGQAVTFLDA

SEQ ID NO: 5620 - protein, 426 aa, Helicobacter hepaticus ATCC 51449
MLFQNATLCDYQGIKKADLRAQNGLITDIGSLQPLKDEDIYDAKDRILFPAMIDLNVAPKSLSLSRKNLLSLAQKALKGGAGSILLYPHTTPSCSENGSIELIKSLNKESPIHLIPAISPLDSQGKLSDISTLHTNGAKAIFAPSDIDAHSLMSIAQYAQMLDIPLMCFCQDSSVADGVMNEGILSASLGLPSIPAYSQTKEVAKIAEMFKNMPIKLIFDTLVYPRSFEILQSFRAIHNKTSQKNKDSMQFGETPQFFTQTSIHHLILDESLCDNYNTAAKLNPPLVEKNAQSKLIEMLQNGYIDTLTSLQCADFNSKKDQVFELASFGVDALEIYFPLLYTYLHKAYNIPLPLISQFTSYTPAQILNLNKGALQEGKIAQLFVFNPHTRFKVNDMFSPYHQHNLYGNIEAFLSNEILYTPHTKEL

SEQ ID NO: 5621 - protein, 481 aa, Burkholderia cepacia R1808
MANVTYTDTQLLIDGEWVDAASGKTIDVVNPATGKAIGKVAHAGIADLDRALAAAQRGFEAWRKVPAHERAATMRKAAALVRERADAIAQLMTQEQGKPLTEARIEVLSAADIIEWFADEGRRVYGRIVPPRNLGAQQMVVKEPVGPVAAFTPWNFPVNQVVRKLCAALATGCSFLVKAPEETPASPAALLRAFVDAGVPAGVVGLVYGDPAEISSYLIPHPVIRKVTFTGSTPVGKQLAALAGQHMKRATMELGGHAPVIVAEDADVALAVKAAGGAKFRNAGQVCISPTRFLVHNSIRDEFTRALVAHAQGLKIGNGLDEGTTLGALANPRRLTAMASVVENARKVGASIETGGERIGSEGNFFAPTVIANVPLEADVFNNEPFGPVAAIRGFDKLEDAISEANRLPFGLAGYAFTRSFANVHLLTQRLEVGMLWINQPATPWPEMPFGGVKDSGYGSEGGPEALEPYLVTKSVTVMAV

SEQ ID NO: 5622 - protein, 484 aa, Rhodococcus erythropolis
MQALTSSVPLVIGDQLTPSSTGATFDSINPADGSHLASVAEATAADVARAVEAAKAAARTWQRMRPAQRTRLMFRYAALIEEHKTELAQLQSRDMGKPIRESLGIDLPIMIETLEYFAGLVTKIEGRTTPAPGRFLNYTLREPIGVVGAITPWNFPAVQAVWKIAPALAMGNAIVLKPAQLAPLVPVALGELALEAGLPPGLVNVLPGRGSVAGNALVQHPSVGKVTFTGSTEVGQQIGRMAADRLITASLELGGKSALVAFGDSSPKAVAAVVFQAMYSNQGETCTAPSRLLVERPIYDEVVELVQARVEAARVGDPLDPDTEIGPLISAEQRESVHSYVVSGTEEGATLISGGDQSPTGAPEQGFYYRPTLFSGVTADMRIAREEIFGPVLSVLPFEGEEEAITLANDTVFGLAAGVFTRDVGRALRFAQTLDAGNVWINSWGVLNPASPYRGFGQSGYGSDLGQAAIESFTKEKSIWARLD

SEQ ID NO: 5623 - protein, 377 aa, Sulfolobus solfataricus
MSVVSKGLENVIIKVTNLTFIDGEKGILRYRGYNIEDLVNYGSYEETIYLMLYGKLRTKKELNDLKAKLNEEYEVPQEVLDTIYLMPKEADAIGLLEVGTAALASIDKNFKWKENDKEKAISIIAKMATLVANVYRRKEGNKPRIPEPSDSFAKSFLLASFAREPTTDEINAMDKALILYTDHEVPASTTAALVAASTLSDMYSSLTAALAALKGPLHGGAAEEAFKQFIEIGDPNRVQNWFNDKVVNQKNRLMGFGHRVYKTYDPRAKIFKKLALTLIERNADARRYFEIAQKLEELGIKQFSSKGIYPNTDFYSGIVFYALGFPVYMFTALFALSRTLGWLAHIIEYVEEQHRLIRPRALYVGPEYQEYVSIDKR

SEQ ID NO: 5624 - protein, 1184 aa, Cryptococcus neoformans var. neoformans
MFVTRPPFSPLDHRGSPLEDDHTNTSGSSRDDVPSSHSTNTAFHEFKSSTPFPPHYLNVPSGLAFKTYLEKWGPEQIMGFLAIHGCEHHSGIFIKNSIDGKLLLDLDMSVLTSLGITKVGERVRLMAGIKCLRQRIAHEAEKDNVRSAHLCNGSLGMDRVKVMIHPKMSASLYVCRQGPFDSDPSTARRSRLTPSSSADRERNPSPMQRSQEVMKHSFITRSSGGQVIPPLWSGQIHNHGIDNSPTPGLYQPPMQRSVPLRSSVSYSDIAAKGMPLLVTQSINSAADHTFAVTDSHDTTSSLGGHLPRPDYFHSTNDAFQTCTKGEDNTISELPQRNQESSPSKWKKSGVICEDEAMLDSSPFAPTSPKHPFAINVTGNNVMEYPPNLPIKNCLSLRSFQSPDKSAGEDRLNMNPRAPSLDDLRRKLVKFVNAEDGTTRTVNVMKATSGAEVLERALRKFGKTGTGSAPFLDEENHNGGKYEGSLCIDGWGVFAEDLLGEEIGPMTEGDLFDICASLQNGAAIQRDALILRQTSESQKRKDMRFYLGNMPVLPTPVNLPISFYSPHSGQFERNSALQHTAQHQPLLSKNRSRASMMSIMSGLGVSHPDIKQPTHDSVQSPTSVTRSSSKKKSMYNFFGHRPPSELISSHLADYFPSAKKRDVAKVRGSMLRLNIAHTAEHDPRSVKSLGMIETDDMPFSSTEQSLTEQGGHYFDPSTCQPADTSSRGHVDHIITDHAGNSKGYYRLPCDEKASPTVKTQELHSANSANSILRACPPNLPPTYQSARLTDLHSDSTFSQLQLLRHSSSLSFKQPSSSHRRTVDEITAEMQHRQTSLSSNRPTSTIDSDISGPPCDSETSPDHTSDVSDVSESSSEYWDDQSSVSSKDSDHNTVEHTRAFTSNGSKRNIKWIKGALIGAGSFGSVFLGMDAQSGLLMAVKQVELPRGIAKMEARRRDMLSALEREIELLKDLQHENIVQYLDSSADANHLNIFLEYVPGGSVAALLNSYGAFEEALVGNFVRQILTGLNYLHERDIVHRDIKGANILVDNKGGIKISDFGISKKVENSLLNGLHPNRPSLQGSVFWMAPEVVKQTSYTSKADIWSVGCLVVEMLTGTHPWARLTQMQAIFQIGSMGQPDIPSDISAHAADFLSRAFALDYRMRPSATSLLQHAFIIHDGSGGNDEV

SEQ ID NO: 5625 - protein, 691 aa, Zea mays
MPALACCVDAAAPPGYAFAGDISFPAPVALTGVPPATTDDSNNNRWSPSLSAALYNVDGWGGPYFAVNTAGNISVRPHGSDTLSHQEIDLLKIVKKASDPKSLGGLSLQLPLIARFPDVLKNRLESLQSAFDYAIQSGGYESHYQGVYPVKCNQDRFVVEDIVKFGSPFRFGLEAGSKPELLLAMSCLCKGNPDALLICNGFKDAEYISLALVANKLALNTVIVVEQEEEVDLIVELSKKLCIKPVIGLRAKLRTKHSGHFGGTSGEKGKFGLTTAQILRVVKNLDLAGMLDCLQLLHFHIGSQIPSTALLADGVGEAAQIYCELVRLGANMRVIDIGGGLGIDYDGSKSCDSDISVEYSLEDYAVAVVHAVQCVCDRRSVKHPVICSESGRAIVSHHSVLIFEAVGTSSTTGGGASPALSAQYLAEELSEDYRNLSELAFRGEYETCLVYTEEMKERCVEQFKQGTVCMEQLAAVEGLCELARKAVGAGESVRRYHVNLSVFTSVPDAWGIEQVFPIIPIHRLDEKPSVRGILSDLTCDSDGKIDKFINGESSLPLHEMEGGRTYYLGMFLGGAYEEALGGVHNLFGGPSVVRVSQSDGPHSFAVTRAVPGPSCGDVLRVMQHQPELMFETLKHRAQEYVSHDNAAALLAAGLARTFDRMPYLLSLSSFVADDVAAAVPAAQDLGEQWSY

SEQ ID NO: 5626 - protein, 272 aa, Glycine max
MESFPEIIKAVDPRASANLDGNHLDDDDRMEINSDIEPAETEALPHEFNMAPIADLFDNLQDKAHQETVIDSEDSPESVDSESSSDKEVSDQHMKITFPGKKMQTIAERFEEALGTSSVITEGTHVGAPNSLRPGIFGKLQHMMLKVKETDMEFWKKLQPEARPDGELGCIDVKIISRYRDGKLTVCHCSFGKYTENFLLQDNSKGMRFGGSECSQSTIIFSPRVCNNVDLEVGSLIRIHPPWFWFLDRKEVQAGNDNVILCTYFSEILFPV

SEQ ID NO: 5627 - protein, 304 aa, Zea mays
MCSSRALWPVHCCRFKAEGSLSSLEAGRGLGAFLYRPDPSFIRVVTVRPRSPRRSPKSQPRFLWSARASMASPSPAVSSLETEAPQATVTRERRLNPDLQEHLPKPYLARAMVAVDPDHPTGTEGRDPRGMSVLQQHVAFFDRNGDGVVYPWETFKGMRAIGCGFFTSLVLSFLINLVMSYPTQPGWLPSLLLSVHVKNIHKAKHGSDSETYDTEGRFDPSKFDAIFSKYGRTHPDALTKDEMNSMLKANRNIYDFLGWIAAIGEWHLLYSVAKDKDGLLQRETVRGLFDASLFERLQDSKKSS

SEQ ID NO: 5628 - protein, 372 aa, Arabidopsis thaliana
MFAQLAPSPSPSPANVSHFVHHRTFRQCTYAVSASLPTANSSRPPPIQIVGGKDLNLDVTRKDDSIGFKLEANEDEIDWMNLESDIRLWTRALRPVQWYPGHIMKTEKELREQLKLMDVVIEVRDARIPLSTTHPKMDAWLGNRKRILVLNREDMISNDDRNDWARYFAKQGIKVIFTNGKLGMGAMKLGRLAKSLAGDVNGKRREKGLLPRSVRAGIIGYPNVGKSSLINRLLKRKICAAAPRPGVTREMKWVKLGKDLDLLDSPGMLPMRIDDQAAAIKLAICDDIGEKAYDFTDVAGILVQMLARIPEVGAKALYNRYKIQLEGNCGKKFVKTLGLNLFGGDSHQAAFRILTDFRKGKFGYVSLERPPL

SEQ ID NO: 5629 - protein, 67 aa, Brassica napus
  misc_feature (29)..(29): Xaa can be any naturally occurring amino acid
MVFTSNDISKWENFLKGLRVLLLDCGDGXSAAETRSKLESMDYIVTTFTDGTEALSAVFKSLESFHI

SEQ ID NO: 5630 - protein, 291 aa, Glycine max
IRLERLEQRLTKCQPAEAPEPNQLIWPNLKIKYFQRELRQYLVYFIVALTIFFYMIPITFISAFTTLDNLVKYLPFIKPIVNIKALKTVLEAYLPQLALIIFLALLPKLLLFLSKFEGIPTESHAVRAASGKYFYFTVLNVFIGVTIGGTLFKAFKRIREHPTLDEISSLLAESLPGNATFFLTYVALKFFIGYGLELSRIVPLIIYHLKRKYLCKTEAELKEAWRPGDLGYGTRVPGDMLIVTIVFCYSVIAPVIIPFGALYFGLGWLVLRNQVKFLEFCLMNPVLCFMW

SEQ ID NO: 5631 - protein, 245 aa, Schizosaccharomyces pombe
KSFIKVSSLEQLKATGTVVVSDTGDFESIAKYKPQDATTNPSLILAASKKPQYAALVDAAVDYAKAKGGSINSQIEIAFDRLLIEFGTKILAIVPGRVSTEVDARYSFDTQTTIEKARHLIKLYEAEGIGRERVLIKIASTYEGIQAAKQLEEEGIHCNLTLLFSFVQAVACAEANVTLISPFVGRILDFYKAKNNRDYTAQEDPGVVSVSNIFNYYKNSVTRPLSWVLLSVTSVRSRNSLVLTF

SEQ ID NO: 5632 - protein, 182 aa, Triticum aestivum
YTYIVQSLVPTVMASLATSVAPFQGLKSTAGLPVSRRSNGASLGSVRNGGRIRCMQVWPIEGIKRFETLSYLPPFSTEALLKQVDYLIRSKWVPCLEFSKVGFIFREHNASPGYYNGRYWTLWKLPMFGCTDASQVINEVEEVKKEYPDAYVRIIGFDNMRQVQCVSFIAFKPPGCEESGKA

SEQ ID NO: 5633 - protein, 435 aa, Yersinia pestis KIM
MTISRTQQIQQLEQEWTSPRWKNITRPYSAEDVIKLRGSVNPECTFAQNGAKKLWELLHGGSRKGYINCLGALTGGQALQQAKAGVEAIYMSGWQVAADANTASSMYPDQSLYPVDSVPAVVKRINNSFRRADQIQWSNNIEPGSKGYTDYFLPIVADAEAGFGGVLNAFELMKAMIEAGAAGVHFEDQLAAVKKCGHMGGKVLVPTQEAIQKLVAARLAADVLGVPTLLIARTDADAADLLTSDCDPYDREFITGDRTAEGFFRTRAGIEQAISRGLAYAPYADLVWCETSTPDLALAKRFADAVHAQFPGKLLAYNCSPSFNWKKNLTDQQIASFQDELSAMGYKYQFITLAGIHSMWFNMFDLAHAYAQGEGMKHYVEKVQQPEFASVDRGYTFASHQQEVGTGYFDKVTNIIQGGASSVTALTGSTEEQQF

SEQ ID NO: 5634 - protein, 425 aa, Vibrio cholerae O1 biovar eltor str. N16961
MSDDNRLNPTPEEQFRQRALDYHAYPTAGKIGIALTKPADSAADLALAYSPGVAEPVREIAQNVDNVYKYTAKGNTVAVISNGTAILGLGNLGPMASKPVMEGKALLFKRFAGLDSIDIEVKHRTIDEFIDTVANIADTFGGINLEDIKAPDCFEIERRLIERCDVPVFHDDQHGTAIVTAAGMLNALELQGKQLKDCIIVCLGAGAAAVACMELLIKCGAMREKIYMLDRKGVIHTRRDDLNEYKALFANNTDKRTLEDVIAGADLFLGVSGPNLLPADALKLMADKPVVFACSNPDPEIKPEIAHQVRNDMIMGTGRSDYPNQVNNVLCFPFIFRGALDVRASEINDQMKLAAVEAIRQLAKEPVPAEVLAAAGVDKLSFGIDYIIPKPMDPRLLPRVARAVAEAAVESGVARIPMPENYMQA

SEQ ID NO: 5635 - protein, 469 aa, Triticum aestivum
  misc_feature (256)..(257): Xaa can be any naturally occurring amino acid
MDPTVPNSGDHAASTPTNTTVTLPPLTLRDAPRLPALPSGATTIPNPISSHPYFHPPPTFYISPGDVSLRHAFFDLSSGSPNPLVAYRRAGPRESLAVDPARARAALVTCGGLCPGLNTVLRELVVGLHELYGVLDVFGVAAGYRGFYGADDDHVRLDPASVDDWHKKGGTALKTTRGGFDLNKIVDGIVARGYTQVYAIGGDGTMRGAVAIFEEFKRRGLRISITGIPKTVDNDIGIIDRSFGFQTAWEIAQQAXXAAHVEAVSAVNGIGLVKLMGRSTGHIALHATLSSRDVDCCLIPEIDFHVEGKGGLFEFLYERIKKKGHAVVVVAEGAGQEVIPRTDDQKREQDESGNMLFLDVGPWLKSELGRWWKREHPTELFTVKYIDPTYMIRAVPANATDNLYCTLLAHSAIHGIMAGFTGFVPGPINGNYSYIPLEDIAVAKNPVDVNDHKWAWVRSVTDQPDFLKP

SEQ ID NO: 5636 - protein, 497 aa, Staphylococcus xylosus
MELVKNLSRRQFIDGEWVESSNKETRKIINPFNQEVIFEVAEGTADDSERAILAARRAFEDGEWANETSENRGKKVRAISDLIVKHREELAKLETLDTGKTLEESYADMDDIANVFNFFAGLADKDGGEIIDSPIPNTESKVIKEPIGVVTQITPWNYPLLQASWKIAPALASGCSLVMKPSEITPLTTIRVFELMEEVGFPQGVINLVLGKGSEVGEPLSAHKEVDLVSFTGGIQTGKHIMKNAADHVTNIALELGGKNPNIIFDDADFDLAVDQALNGGFFHAGQVCSAGARIIVHNDIKEKFEAALIERIKNIKLGNGFDEDTEMGPVISAEHREKIENYMEVAKSENATIAIGGKRPEREDLQDGFFFEPTVITDCDTSMRIVQEEVFGPVVTIESFTTEAEAIKLANDSIYGLAGGVFTNDVGKAQRIANKLKMGTVWINDFHPYFAQAPWGGYKQSGIGRELGKAGLAEYQEEKHILRNTNPEPVNWFGKA

SEQ ID NO: 5637 - protein, 244 aa, Zea mays
HASELLEDLQGRSGSYVETASLSHQHTRAKHWKPKFLSSEKKTIAILGDRSIDSEDPLEHVIDGTSSEEEDATQNHLSLVNKDENQQTMADLFQEVFNPTNMDGAMKSMRSTGAGNYGRMQQIMQMEKDWHVEFLRQYSREHSYSGDLKGTTVQILSRSLEGKLTVCSCMFQEKGNDATISNASADGTMDESRTRRTIIFSPKICNNVDLLVGNIIHIFPPWKEVKIQEEHVIICTYFSHHHRT

SEQ ID NO: 5638 - protein, 332 aa, Anabaena variabilis ATCC 29413
MTKNLLEQLREMTVVVADTGDIQAIEKFTPRDATTNPSLITAAAKMPEYQEIVDQTLLQAKKDAGAGASKGQIVSLAFDRLAVSFGLKILQIIPGRVSTEVDARLSYDTEATITKARELIAQYKAAGIGPERVLIKIASTWEGIKAAEILEKEGIHCNLTLLFGLHQAIACAEAGITLISPFVGRILDWYKKETGRDSYPSAEDPGVISVTTIYNYYKKFGYTTEVMGASFRNIGEITELAGSDLLTISPGLLGELQATIGELPRKLDPAKAATLDIEKISIDKATFDKMHAADRMAYDKLDEGIKGFTKALEELETLLAERLARLEVVASH

SEQ ID NO: 5639 - protein, 294 aa, Triticum aestivum
HSITSLYKKAGWYRSGIPLDTRIPLVSFTGSTKVGQMVQQQVSARFGKCLLELSGNNAIIVMDDADIPLAVRSVLFAAVGTAGQRCTTCRRLLLHESIYQTFLDQLVEVYKQVRIGDPMEKGTLLGPLHTTTSKESFLKGIQTIKSQGGKILLGGSAIESEGNFVQPTIVEISPDAPVVREELFGPVLYAMKFLTLKEAIEINNSVPQGLSSSIFTRKPDAIFKWIGPHGSDCGIVNVNIPTNGAEIGGAFGGEKATGGGREAGSDSWKQYMRRATCTINYGSELPLAQGINFG

SEQ ID NO: 5640 - protein, 587 aa, Glycine max
  misc_feature (124)..(124): Xaa can be any naturally occurring amino acid
VITTQFASNLHRLGSVKAAADLTGRKLVFVGMSLRTYLDAAWKDGKAPIDPSTLVKAEDIDAYAPKDLLIVTTGSQAEPRAALNLASYGSSHAFKLAKEDVVLYSAKVIPGNESRVMKMLNRIXEIGSTIVMGKNEGLHTSGHAYRGELEEILRIVKPQHFLPIHGELLFLKEHELLGKSTGIRHTAVIKNGEMLGVSHLRNRRVLSNGFISLGKENLQLKYSDGDRAFGTSSDLFIDERLRIALDGIIVISMEIFRPKILDGSAENTLKGKIRITTRCLWLDKGKLMDALYKAARAALSSCPVKSPLAHIERIVSEVLRKMVRKYSGKRPEVIAIAIEKPAAILADEINTKLSGKSHVGLGMSTLSKAVDGHGKGNQSTALQVKDDSIDNASGAEGDLSEEDNTASGPEGYLSEEDNTASGAEGDLSESEDSDEFWKPFITSLPVEKSINADNGYVSPKEQKSNLKKDESEDIDEAKSEETSNSEAKSSKSVKRNKWKTEEVKKLIGMREELSERFQVVKGRMALWEEISQKLLADGICRSPGQCKSLWTSLVVKYEGIKNEDRKKSWPYIEDMERIMSDKEAPAK

SEQ ID NO: 5641 - protein, 257 aa, Bradyrhizobium japonicum
VYLSGWTIAALRSEFGPLPDQSMHEKTSVPVLIEELYTFLRQADSRELNDIFRSLDKARKEGDKTREKELIEKIDGFQTHVVPVIADIDAGFGNAEATYLLAKKMIEAGACALQIENQVSDEKQCGHQDGKVTVPHDVFLAKIRACRHAFLELGVEDGVVVTRTDSLGAGLTQQIAVSHKPGDIGDQYNSFLDCEEITAENARNRDVIINRNGKMMRPKRLPSNLYQFRPGTGEDRCVLDCITSLQNGATDLDRDQS

SEQ ID NO: 5642 - protein, 231 aa, Triticum aestivum
MPESDNDSGGPSNTGGEGELSSPREQDRFLPIANVSRIMKKALPANAKISKDAKETVQECVSEFISFITGEASDKCQREKRKTINGDDLLWAMTTLGFEDYVDPLKHYLHKFREIEGERAAATSTSTSTTPDMPRNNNNNARRLPRRPGRHDDDGAAHVPARPHHKEPNKIAMGRGEAGFYFGGGGSSVLTEKGLFLFLFFSFWLTRGGFQTVSFWVKTLLKFFPGGFFPV

SEQ ID NO: 5643 - protein, 478 aa, Ralstonia eutropha JMP134
MHAQHFVANRLIAPDNGLRIKVFDPSNGEPFAEIARGNATDINVAVHAARQAADGAWGAMAPAERVRLLNRVALTLVAHEEELTALETRDTGKPVRQARADARAVARYFEFYAGAVDKLHGQTIPYNPGYTVFTLREPHGVTGHIIPWNYPLQIFGRSVGAALAAGNACVVKPAEDACLSLLRVAELAAEAGLPEGALNIVTGYGHEAGAALARHPGINHISFTGSPQTGKLVSQLAAENHVPVTLELGGKSPQIVFADADVDALVPVIVNGIVQNAGQTCSAGSRVLVERPLYNALLDRIASVFESLRVGPSELDLECGPLISRKQQQRVWDFVSDAQHAGISVMAQGQIVAEAPESGYYQVPMLFRDVPPAHRLAQEEVFGPLLAAMPFDSEAEAVALANGTPYGLVAGLWTRDGGRQLRLARKLRAGQVFINNYGAGGGVELPFGGTGQSGYGREKGFEALYGFTTLKTIAIQHG

SEQ ID NO: 5644 - protein, 178 aa, Triticum aestivum
  misc_feature (101)..(101): Xaa can be any naturally occurring amino acid
  misc_feature (138)..(138): Xaa can be any naturally occurring amino acid
  misc_feature (157)..(157): Xaa can be any naturally occurring amino acid
  misc_feature (161)..(161): Xaa can be any naturally occurring amino acid
  misc_feature (168)..(168): Xaa can be any naturally occurring amino acid
MAPTVMASSATSVAPFQGLKSTAGLPVSRRSNGASLGSVSNGGRIRCMQVWPIEGIKKFETLSYLPPLSTEALLKQVDYLIRSKWVPCLEFSKVGFIFREXHNASPGYYDGRYWDNVGSCLCSGGTDATKGVQRRWRXAKKGLPDAFVRIIGFQKHXQVQXVRFIASXQPGWKESRKG

SEQ ID NO: 5645 - protein, 354 aa, Burkholderia cepacia R18194
MKAAVWHGRHDIRVEQVPVPERPPAGWVTIRVHWCGICGSDLHEYVAGPVFIPVDAPHPLTGLKGQCILGHEFSGEIAELGAGVTGFAVGDRVTADACQHCGTCWYCKHGLYNICENLAFTGLMNNGAFAEYVNVPAELLYKLPDDFPTEAGALIEPLAVGLHAVKKAGNIVGQTVVVVGAGTIGLCTIMCAKAAGAGRVIALEMSAARKQKALEVGASVVIDPKTSDAIAEVKALTGGYGADVSFECIGHTTTAKLAIDVIRKAGKSVMVGIFEEPAPFNFFDIVSTEKEVIGSLAYNGEFADVIRFIADGRIDVQPLITGRIALGDIVSHGFEELVNHKERNVKIIVQPALA

SEQ ID NO: 5646 - protein, 360 aa, Triticum aestivum
MGSTATDMAASAHEEACMFALQLGSSSILPMTLKNSIELGLLDTLVAADGKLLSPAELAAKLPSTANPAAPDMVDRMLRLLASYKVVSCTLEEDKDGRLSRRYGAEPVCKFLTPNEEGVSMAPLALMNQDKVLMESWYYLKDAVLDGGIPFNKAHGMSAFEYHGTDPRFNRVFNEGMKNHSIIITKKLLELYKGFNGLDTLVDVGGGIGATVGAITAHYPTVKGINFDLPHVISEAPPFSGVTHVGGDMFQKIPSGDTILMKWILHDWSDEHCATLLKNCYDALPAHGKVVLVECILPVNPEATPEAQGGFHLDMIMLAHNPGGRERYEREFEALAKGAGFGAIKTTYIYANIWVIEFTK

SEQ ID NO: 5647 - protein, 468 aa, Bacillus halodurans C-125
MDLYINGEWMRSGKTLDVTNPATGEVIDTVPFAGKKEAELAVSAAYEAFPQWSSQTASERSRYLMRWFQLIDEQQDEIGEIMTKEQGKPLREAIGEVQYANSFIQWYAEEAKRIYGDTIPASAINKRILVQKQPVGVIAAITPWNFPAAMITRKVAPALAAGCTAIVKPAEQTPLTALKLAQLAEEAGIPAGVLNVITGNAQDIGEAWLEDSRVRKITFTGSTEVGKLLMRGAAQTVKKISLELGGHAPFIIMDDANLEEAVDQVIASKFRNAGQTCVCANRIYVAREIAEAFTEKFAAKVNELKVGNGLEEGVTIGPLIDKAAVEKVEAHIHDALKKGGQVTVGGRWTNHFFEPTIITGATDEMLCMNEETFGPLAPVATFDTEEEVIERANHTPYGLAAYVFTENIGRAIRLSEKLEYGIVGVNDGMPSVAQAPFGGWKESGLGREGGKYGIEEYLEVKYVSVAFK

SEQ ID NO: 5648 - protein, 486 aa, Saccharomyces cerevisiae
MGTGKKEKSRRIREGDTKDGNLRVKGENFYRDSKRVKFLNMYTSGKEIRNKKGNLIRAASFQDSTIPDARVQPDRRWFGNTRVISQDALQHFRSALGETQKDTYQVLLRRNKLPMSLLEEKDADESPKARILDTESYADAFGPKAQRKRPRLAASNLEDLVKATNEDITKYEEKQVLDATLGLMGNQEDKENGWTSAAKEAIFSKGQSKRIWNELYKVIDSSDVVIHVLDARDPLGTRCKSVEEYMKKETPHKHLIYVLNKCDLVPTWVAAAWVKHLSKERPTLAFHASITNSFGKGSLIQLLRQFSQLHTDRKQISVGFIGYPNTGKSSIINTLRKKKVCQVAPIPGETKVWQYITLMKRIFLIDCPGIVPPSSKDSEEDILFRGVVRVEHVTHPEQYIPGVLKRCQVKHLERTYEISGWKDATEFIEILARKQGRLLKGGEPDESGVSKQILNDFNRGKIPWFVLPPEKEGEEKPKKKEVEKTA

SEQ ID NO: 5649 - protein, 496 aa, Pseudomonas putida KT2440
MVAGLLERLGVAAEAYTQGDYPVHTPIDGSQIASVKLLGKAETIARIDQAQSAFEAWRSVPAPRRGELVRLFGEVLREHKADLGELVSIEAGKITQEGLGEVQEMIDICDFAVGLSRQLYGLTIASERPGHHMRETWHPLGVVGVISAFNFPVAVWAWNTALALVAGNSVVWKPSEKTPLTALACQALFEKALKAFGDAPAGLAQLVIGGREAGEAMVDDPRVPLVSATGSTRMGREVGPRVAARFGRSILELGGNNAMILAPSADLDLAVRGILFSAVGTAGQRCTTLRRLIVHRSIKDEVVARVKAAYGKVRIGDPRKDNLVGPLIDKQSFDAMQGALAKARDEGGQVFGGERQLADQYPNAYYVSPAIAEMPAQSDVVRHETFAPILYVLAYDDFEEALRLNNEVPQGLSSCIFTTDIREAERFQSASGSDCGIANVNIGTSGAEIGGAFGGEKETGGGRESGSDAWKGYMRRQTNTVNYSRELPLAQGIVFD

SEQ ID NO: 5650 - protein, 187 aa, Aspergillus nidulans FGSC A4
MTTEEAEIKDERLETPHEEGGDDEEEIEAMKRRVAEMESEAAKLREMQATLDQQSESLKEDKEDIDARSIFVGNVDYGASPEEIQAHFQSCGSINRVTILLDKFTGQPKGYAYVEFAEPSLVAQALVLNESVFRGRNLKVVPKRTNLPGMSSRGRGRGRGRGYGRGGFPRGGYRGGYRGRGRGYAPY

SEQ ID NO: 5651 - protein, 313 aa, Glycine max
KLLNQQVSFFFSFFLLNYSSFYKLLLYHSSGVYLQEVLLPGGHGLMVRGYLPVVNSLAKGLDIRLGHRVTKVVRRYNGVKVTVENGKTFFADAAVIAVPLGVLKAKKILFEPKLPDWKEAAIADLGIGLENKIILHFENVFWPNVEFLGVVADTPYECSYFLNLHKATGRAVLVYMPSGQLAKDVEKMPDEAAVNFAFMQLKKIFPDASSPIQYLVSRWGSDINSLGSYSYDAVGKPHELYERLRVPVDNLFFAGEATSMSYPGSVHGAYSTGTMAAEDCRMRVLERYGEVDLFQPVMGEEGSMSIPLQISRL

SEQ ID NO: 5652 - protein, 144 aa, Glycine max
  misc_feature (62)..(62): Xaa can be any naturally occurring amino acid
  misc_feature (94)..(94): Xaa can be any naturally occurring amino acid
  misc_feature (107)..(107): Xaa can be any naturally occurring amino acid
FAFLISYDNPGILAGLGCSASSQAKRGRGLELSRIQAHRGPDWSQLHQYGDHYLAHHRLAIXDPAHGEHPLFNADYTESVPVNGEIYNHEELMXQLPNDTFQTGCDXDVIAHLHEEHGDYYMDMLDGIFSAALLDSRDSMHIVA

SEQ ID NO: 5653 - protein, 442 aa, Mesorhizobium loti MAFF303099
MSNRLKVTPNDLSAFWMPFTANRQFKQAPRMFVSAKDMHYTTSDGRKVLDGTAGLWCVNAGHCRPKITEAIQHQAAELDYAPAFQMGHPIVFELANRLVDIAPKGMDHVFFTNSGSESVETALKMAIAYHRMKGEGARTRLIGRERGYHGVNFGGISVGGIVSNRKMFGTLLGGVDHMPHTHLPEKNAFSKGVPEYGAELANELERIVALHDASTIAAVIVEPVAGSTGVILPPKGYLQKLREICTKHGILLIFDEVITGFGRLGAPFAADYFGVVPDIMTTAKGVSNGVIPMGAVFVKKEIHDAFMTGPEHMIEFFHGYTYSGNPIACAAALGTLDTYKEEGLLTRGEELAPYWEDALHSLKGEPHVIDIRNIGLIGAIELAPIAGSPTKRAFSAFVKAFERGALIRTTGDIIALSPPLIITKGQINELIDHVREVLRSID

SEQ ID NO: 5654 - protein, 327 aa, Triticum aestivum
MKTLLILTILAMAITIGTANIQVDPSGQVQWLQQQLVPQLQQPLSQQPQQTFPQPQQTFPHQPQQQVPQPQQPQQPFLQPQQPFPQQPQQPFPQTQQPQQPFPQQPQQPFPQTQQPQQPFPQQPQQPFPQTQQPQQPFPQLQQPQQPFPQPQQQLPQPQQPQQSFPQQQRPFIQPSLQQQLNPCKNILLQQCKPASLVSSLWSIIWPQSDCQVMRQQCCQQLAQIPQQLQCAAIHSVVHSIIMQQQQQQQQQQGMHIFLPLSQQQQVGQGSLVQGQGIIQPQQPAQLEAIRSLVLQTLPSMCNVYVPPECSIMRAPFASIVAGIGGQ

SEQ ID NO: 5655 - protein, 505 aa, Glycine max
MSSLSNNSSSSHGNSFLQMPPIKFTKLFINGDFVDSLSGRTFETIDPRTEEVIARVSEGDKEDIDIAVKAARQAFDSGPWPRLPASERAKIMMKWADLIDENIEELAALDTVDAGKLNYINKVVEIPSATNALRYYAGAADKIHGEVLKMNGDFHAYTLLEPIGVVGHIIPWNAPSLSFFIKVSPSLAAGCTMVLKPAEQTPLSALFYAHLAKLAGIPDGVLNIVPGFGPTAGAAISSHMDIDVVSFTGSIEVGREVMQAAARSNLKPVSLELGGKSPLIIFNDADIDKAAQLALFGIMSNKGEICVASSRVFVQEEIYDEFEKKLVEKAKSWVVGDPFDPKSLQGPQADRNQLEKILSYIEHGKREGATLLTGGNTVGNKGYYIEPTIFCNVKEDMLIARDEIFGPVLALMKFKTMEEAIKSANNTKYGLAAGIVTKNLDTANTMSRSIRAGIVWINCYLTVGSDVPFGGYKMSGFGRDLGLQALHKYLQVKSVVTPIHNSPWL

SEQ ID NO: 5656 - protein, 408 aa, Glycine max
FGSRLGRVLGHGSFAKVYHARNLKTGQHVAMKVVGKEKVIKVGMMEQVKREISVMKMVKHPNIVELHEVMASKSKIYISIELVRGGELFNKVSKGRLKEDLARLYFQQLISAVDFCHSRGVYHRDLKPENLLLDEHGNLKVSDFGLTAFSDHLKEDGLLHTTCGTPAYVSPEVIAKKGYDGAKADIWSCGVILYVLLAGFLPFQDDNLVAMYKKIHRGDFKCPPWFSLDARKLVTKLLDPNPNTRICISKVMESSWFKKQVPRKVEEVVEKVDLEEKIENQETMNAFHIISLSEGFNLSPLFEEKRKEEMRFATAGTPSSVISRLEEVAKAGKFDVKSSETKVRLQGQERGRKGKLAIAADIYAVTPSFMVVEVKKDNGDTLEYNQFCSKQLRPALKDIFWNSAPASA

SEQ ID NO: 5657 - protein, 90 aa, Triticum aestivum
  misc_feature (27)..(27): Xaa can be any naturally occurring amino acid
  misc_feature (37)..(37): Xaa can be any naturally occurring amino acid
  misc_feature (45)..(45): Xaa can be any naturally occurring amino acid
MALRGVHTVAPFQGLKCTAGMPVARRXGNSSFGNVSXGGRIRCMXVWPIEGIKKFETLYYLTPITVEDLLKQIENLLRSRGCLLEGPVPP

SEQ ID NO: 5658 - protein, 432 aa, Sulfolobus tokodaii str. 7
MDCIFIFRRDLRLEDNTGLNYALSECDRVIPVFIADPRQLINNPYKSEFAVSFMINSLLELDDELRKKGSRLNVFFGEAEKVVSRFFNKVDAIYVNEDYTPFSISRDEKIRKVCEENGIEFKAYEDYLLTPKSLFHHRNFTSFYNEVSKVKVREPETMEGSFDVTDSSMNVDFLLTFKKIESPLFRGGRREGLYLLHRNVDFRRRDYPAENNNYRLSPHLKFGTISMREAYYTQKGKEEFVRELYWRDFFTLLAYYNPHVFGHCYRREYDNISWENNESYFEAWKEGRTGYPIIDAGMRMLNSTGYINGRVRMLVAFFLVKVLFVDWRWGERYFATKLVDYDPAINNGNWQWIASTGVDYMFRVFNPWKQQEKFDPEAKFIKEWVEELKDVPPSIIHSIYKTKVPGYPSPIVNWLERVNYVKSEYKNVKAVL

SEQ ID NO: 5659 - protein, 193 aa, Zea mays
  misc_feature (72)..(72): Xaa can be any naturally occurring amino acid
  misc_feature (124)..(124): Xaa can be any naturally occurring amino acid
  misc_feature (137)..(137): Xaa can be any naturally occurring amino acid
GSNKIKIFHQRNTEAVLKMLSEIGSVDNIPEFIEGVKNRKRKMSGFGHRVYKNYDPRAKVIKKLADEVFSIXVGRDPLIEVAVALEKAALSDDYFVKRKLYPNVDFYSGLIYRAMGFPPEFFTXVLFAIPRMGWILXSHWKESGGMILDTKDHAHNRGTPPGRCGLRHLHTSLKGRGMEAKGGQNRVGVQVST

SEQ ID NO: 5660 - protein, 339 aa, Zea mays
  misc_feature (77)..(77): Xaa can be any naturally occurring amino acid
MTMVDDPTTNAVVSWSAANNSFVVWDPHIFGTVLLPRYFKHNNFSSFVRQLNTYVAVLPCLFLRLWNHARRDDAAVXKGFRKVDPDRWEFANEEFLRGQRHLLKNIRRRKPPHSSPNQQSLGSYLEVGHFGYEEEIDQLKRDKQLLMAEVVKLRQEHQNTRSDLQAMEEKLQDTEQKQQQMMAFMARVMQNPDFMRQLISQREMRKELEDAISKKRRRRIDQGHEAGSMGTGSSLEQGPQGVFEPQEPVESLANGVPSDLESSSVEAKGLEVRQGVSSGGSEHLNGRPSGELNDDFWEDLLHEGGLGADAGNAVGQDDMNMDMDPDVSLPQLKQHGPRH

SEQ ID NO: 5661 - protein, 1172 aa, Oryza sativa (japonica cultivar-group)
MVCGNVSTVVPMLQHTSMAREQKLVLDADADDDGLHHTGAGGKQQKLVLDAAADGLHLTGVGGKQHNLVLDAGAGGKQQKLVLDAADDGLHLAGVGGKQHNLVLDAGTGRKQQKLVLDADDDGLHLAGVGGKQHNLVLDAADDGLHLPGVGGKQHNLVVDAGAGGKQQKLVLDDADDGLHLAGVGGKQHNLVVDAGASGKQQKLVLDAADDGLHLAGVGEKQHNLVLDAVTDGLHLAGVGGKQHNLVLDAGTGRKQQKLVLDADDDGLHHTGAGGKQQKLVLNAADDGTTWCSMPPTTGFTSPAWDAADDGLHLAGVGGKKHNLVLDAAPDGLHLAGVGGKQHNLVLDAGTGRKQQKLVLEDDGLHHTGAGRKQQKLVLDAANDGLHLAGVGGKQHNLVLDAADDGLHLAGVGGKQHNLVVDAGAGAKQQKLVLDAADDGLHLAGVGGKQHNLVLDAGAGGKQQKLVLDAADDGLHLAGVGWKQHNLVLDAGAGGKQQKLVLDTAVDVSQHTVGGAEQNLLLDSTDDGLHHTGAGGEQNLVIDDDIDGSNHTVGGAEQDDGLHTTGAGWEQNLVLCTDVDGLLHTGAGGEQNMVCDNVGTIVSGLHDTIARWERNLVFDDVGTAVPWLRHTGVDGKQNLVYHLATATVQSVWRENCMEQFKLVLEALHQPHRHLYIAVDMEFAADAATNVSHRPVTSISCYQHMRRYVNGGGIFQMGLTFAFVGEGEQAPSPLIALEINFDFNVNSPKYHGKSIDFLSSQGHDLTQHSKRGVAPEFVYEGLLRHLPFGDGSVTWVAFHGDYDLAFLLRLLQGGDHGGNCLLPPKLATFLQKVREKFPVVYDVRVLGKLVKDGFNGSLTALAEYLGIPRNGDEHHAGSDALLTLSCFFKIVSLSGHQMHRMDARRGLLAGLEEWNMAIKCARHIDNHTGSIYVVKMLPHKLDEEARRIEELVASNFNIVGVEVIHAQLGKRSYAVEAQQNYELIKTFLKDSDLYEIIVTFMNAEGMLAYSRAWKFCISSRADNACVHPQQFAKFMASCGALGDPNISWVTFHGAHGIARMIRSFLSPQDLPSQWCSYIGHRRAFFPAIYDVALLVRRSFDIITIPWIECKGGLLDVAQALNLKEIEADMEAARVLLTLRCYMRLAERPDFPGTKMAVQGLLKESCCWKCPANC

SEQ ID NO: 5662 - protein, 75 aa, Zea mays
GPVGVNPGEYPPLKAPGGKVFFPGEPTIQHNKGFVPGDYFSVFGGEEIFNDCAQKKMCKYKVQGKYVLEGHGDGN

SEQ ID NO: 5663 - protein, 360 aa, Glycine max
MGESNVMTKTEDGACLSAMLLSTNLVYPAVLNAAIELNLFEIIAKATPAGSFMSSHEIASKLPTQHPDLPNRLDRMLRLLASYSVLTTSTRTTHHGATETVYGLSQVGQYFVPDGTRGYLASFTAFVCYPPLLQVWLNFKEAVVDADIDLFKKILGVTMYQYMENDPKMNQIFNKSMANLCATEMSRILEIYTGFEGISTLVDVGGGNGQNLKMIISKYPLIKGINFDLPQVIENAPPLPGIEHVGGDMFAKVPQGDTIILKAVCHNWSDEKCIEFLRNCHKALSPNGKVIVVEFILPEEPEPTEESQLVSTLDNLMFITVGGRERTQKQYETLCKLSGFSNFQVACRAFSSLGVMEFYK

SEQ ID NO: 5664 - protein, 331 aa, Vibrio cholerae O1 biovar eltor str. N16961
MIFDSQSSRVSMIKKIGVLTSGGDAPGMNAAIRGVVRTALGAGLEVFGIYDGYQGLYEDRIKQLDRSSVSDVINRGGTFLGSARFPQFREVEVREKAIENLKKHGIEALVVIGGDGSYMGAKKLTEMGFPCIGLPGTIDNDIAGTDYTIGYLTALNTVIEAIDRLRDTSSSHQRISIVEIMGRHCGDLTLTSAIAGGCEYIITPETGLNMEQLISNIKDGIAKGKKHAIIALTELMMDANKLAKEIESATGRETRATVLGHIQRGGKPTAFDRVLASRMGNYAVHLLMEGHGGRCVGIQKEQLVHHDIIDAIENMKRPVRTDLYKVAEELF

SEQ ID NO: 5665 - protein, 69 aa, Glycine max
  misc_feature (44)..(44): Xaa can be any naturally occurring amino acid
CRNATSAVPAGASMVAPFTGLKYIAVLPTRNTILDFAYIASNGXRAQCMHVWPPIGKKKVETLSYLPDL

SEQ ID NO: 5666 - protein, 462 aa, Oryza sativa (japonica cultivar-group)
MENNMQAARTATTRERAPPRATAISRYIFLALARIPVNKCVAWRSAGALLLLVTDMAAMASAAAEVPSYFVCPISLQLMRDPVTLPTGISYDRAAIARWLAAPGARRTCPVTRQPLEHGLELTPNHTLRRLIQSWAASVSPGSAVDEEVAALRPVSSDEVASLLSDAAAAQVGALRRLRELAAECEDSRAMLESQGGVFDVLSRVVTSGSACSTAREEAVGVLASLRIPEQELIGVSTRHGNLAESLTAVLRSSNLQSRAHAVQLVRTLADAVVPAWVIGLNAELLAEVVGVVRDRVSARATKASLHALAALCPYGRHRVKIVGAGAVAALVELLLDEPERRVCELALAVLDRLCTCAEGRAELVAHAAGVAVVGKKVLRVSEAASERAVRVLRSVARHAATPAVLQEMAQCGVVGKLCLALRSEQCGVKTKEKAHEVLKLHSRVWRASPCLSPSFLALYPS

SEQ ID NO: 5667 - protein, 491 aa, Bacillus sp. KSM-K16
MIRGKMFINGEWTDAKNGRVREIINPFNQEVIATVPEGSAEDSHAAIAAARAAFDEGVWSAASASERGERVRLIGQKIANQNEEFARLESLDTGKTLEESRTDMEDIANVFFYFAGLADKNGGEVIRSPLPNSTSIVVREPVGVCGLITPWNYPLLQAAWKLAPALVAGNTLILKPSELTPLTTMKLFELFEEVGLPTGVANLVLGTGKEVGAPLAESTDVDLISFTGGIETGKTIMQAASSNVKKMALELGGKNPNIVFADADFETAIDQALNAVFFHAGQVCSAGSRLLVEEAIHDDFVEELVKRTKRIKLGNGFDEKTESGPLISAAHRAKVESYIQIGLDEGATLACGGKRPDAAELQNGFFLEPTIFTNCRSSMRIVQEEVFGPVLTVETFRTTEEAIAKANDTIYGLAGAIFSNDIGKAERIASKLRLGTVWINDFHPYFVQAPWGGYKQSGFGRELGKIGLEEYTETKHIFRNKQPQPIGWFRG

SEQ ID NO: 5668 - protein, 478 aa, Burkholderia cepacia R1808
MDITYDALHLFIDGEWIGASERETAPVINPATQIQIGRVPLATAADLDRALQAAVPAFDVWRNTVPAERARILKRAAELMRERAEHIATVMTLEEGKPLAESRDEVLRAADYFEWFAEEARRIDGRVVPSNRPGVQQLVKKQAIGPVAAFTPWNFPAITPARKLSAALAAGCSVIIKPGEESPATALALARALDDAGLPKGVLQVVFGVPDQVSTQLIASPVIRKVTFTGSVPIGRLLSARAAEGVKPITLELGGHGPVLVFNDADVEKAAVEGAANRFRGTGQVCISSTRFLIQREVYDEFVGHFVRATSALKVGNGMDAGTQVGPLANPRQLAKMEELIADAVERGATILAGGKRIEGEGYFFEPTVLADVPKDARVMHEEPFGPIAVLMRFDALADGLAEANRLPYGLSAYAFTSSARTAIDVADGLEAGMIGINQYRIVSTELPFGGMKESGHGSEGGTEGIEYYLTHKFISQA

SEQ ID NO: 5669 - protein, 373 aa, Zea mays
PLWVDVLRATLRHGLAPRVWTDYLRLTVGGTLSNAGIGGQAFRHGPQIANVHELDVVTGTGEMVTCSMDVNSDLFMAALGGVRWVPLAYTDVATFTKDQEFLISNRASQVGFDYVEGQVQLSRSLVEGPKSTPFFSGADVARLAGLASRTGPAAIYYIEGAMYYTKDTAISVDKKMKALLDQLSFEPGFAFTKDVTFVQFLDRVREEERVLRSAGAWEVPHPWLNLFVPRSRILDFDDGVFKALLKDSNPAGIILMYPMNKDRWDDRMTAMTPATNDDDVFYAVSFLWSALSADDVPQLERWNKAVLDFCDRSGIECKQYLPHYTSQDGWRRHFGAKWSRIAELKARYDPRALLSPGQRIFPVPVEASGIASA

SEQ ID NO: 5670 - protein, 467 aa, Caulobacter crescentus CB15
MNAPIRNHDVAELKRLDLAHHLPAQADHKVIAELGGSRIVTRADGCYITDGDGHRILDGMAGLWCVNVGYGRKELADAAYEQMLELPYYNTFFKTATPPTVKLAAKIAEKMGGHLTHVFFNSSGSEANDTVFRLVRHYWKLKGQPNRTVFISRWNAYHGSTVAGVSLGGMKHMHVQGDLPIPGVEHVMQPYPFGEGFGEDPAAFRDRAVKEIEDKILEVGPENVAAFIGEPVQGAGGVIIPPDGYWPAVEAVCRKYGILLVCDEVICGFGRLGQWFGHQHYGIKPDLIAMAKGLSSGYLPISAVGVADHIVAELREKGGDFIHGFTYSGHPTCAAVALKNIEIIEREDLITRTREDTGPYLAKALARLNDHPLVGETRSLGLIGAVEIVREKGTNHRFLDKEGEAGPIVRDICIRNGLMVRAIRDSIVCCPPLIVSHAEIDELVGIIEKSLTEAEPILRALKPEAVS

SEQ ID NO: 5671 - protein, 354 aa, Vitis aestivalis
MRRGPLNPSNLKLTLPPDEDSLTKFLTQSGTFMDGDLLVNRDGVRIVSKSEAEVPPLIKPSDNQLSLADIDTIKVIGKGAGGTVQLVQHKWTGQFFALKVIQMNIQEAALKHIAQELKINQSSQCPYVVVCYKSFYDNGAFSIILEYMDGGSLLDFLKKVKSIPEPYLAAICNQVLKGLSYLHHERHIIHRDLKPSNLLINHRGEVKITDFGVSAILTSTSGQANTFVGTYNYMSPERISGGKYGSKSDIWSLGLVLLECATGQFPYSPPEQGEGWTSFYELMEAIVDQPPPCASTNQFSAEFCSFISACIQKDPNDRKSAHELMAHPFISMYRDLNVDLATYFTNAGSPLATF

SEQ ID NO: 5672 - protein, 244 aa, Haematococcus pluvialis
MATERELALYSAKLSEQAERYPDMVSEMKKIAAGAQDQELSVEERNLLSVAYKNLVGARRASWRILQSVEQSELAKGNEKRVKLIQKYRTVVEKELDEVCGEILSLLDTYLVPSASSVEASVFYLKMKADYHRYLAEFKVDEDRRSAAEKTLEAYKAAQNKATSELPSTNPIRLGLALNFSVFYYEVLNQPDQACSLAKQAFDEAISDLDTLGEDSYKDSALIMQLLRDNLTLWTSEMQDSKPE

SEQ ID NO: 5673 - protein, 119 aa, Vitis aestivalis
MGSSGAVKLACVMVICMVMAAPAAVEAAITCGQVASALSPCISYLQKGGAVPPACCSGIKSLNSSAKTTADRQAACKCLKNFSSTVSGINLSLASGLPGKCGVSVPYKISPSTDCTKVT

SEQ ID NO: 5674 - protein, 147 aa, Glycine max
  misc_feature (72)..(72): Xaa can be any naturally occurring amino acid
DSGALLKLFTSQHLPHTQVGLFNFINMYFPTVSPIKHLIKFCSSLHGGLSKLSEMLEVSRVGIYHQAGSYSXLPSCAFRKLKAHFSSGSLDKYPGVLYGLGVHNAQGSPLQEKKGPINNAIRTKTNQASVDLSLFELLHIWRNTHFY

SEQ ID NO: 5675 - protein, 224 aa, Zea mays
VFRTTLASSTWQRHMRRDLCTSVSPADLARAMVAVDPDHPTGTEGRDPRGMSVLQQHVAFFDRDGDGVVYPWETFKGMRAIGCGFFTSLVLSFLINLVMSYPTQPGWLPSLLLSVHVKNIHKAKHGSDSETYDTEGRFDPSKFDAIFSKYGRTHPDALTKDEMNSMLKANRNIYDFLGWIAAIGEWHLLYSVAKDKDGLLQRETVRGLFDASLFERLQDSKKSS

SEQ ID NO: 5676 - protein, 316 aa, Glycyrrhiza glabra
MAAAAIEIPTKVLPNSTCELRVPVIGMGSAPDFTCKKDTKEAIIEAIKQGYRHFDTAAAYGSETALGEALKEARDLGLVTREDLFVTSKLWVTENHPHLVVPALRKSLETLQLEYLDLYLIHWPLSSQPGKFSFPIQAEDLLPFDVKGVWESMEESLKLGLTKAIGVSNFSVKKLQNLLSVATIRPAVNQVEMNLAWQQKKLREFCNANGIVLTAFSPLRKGASRGPNEVMENDMLKGIAEAHGKSIAQVSLRWLYEQGVTFVAKSYDKERMNQNLQIFDWELTTEDHQKIDQIKQNRLIPGPTKPQLNDLWDDEI

SEQ ID NO: 5677 - protein, 170 aa, Triticum aestivum
VASSATSVAPFQGLKSTAGLPVSRRSNGASLGSVINGGRIRCMQVWPIEGIKKFETLSYLPPLSTEALLKQVDYLIRSKWVPCLEFSKVGFIFREHNASPGYYDGRYWTMWKLPMFGCTDATQVINEVEEVKKEYPDAYVRIIGFDNMRQVQCVSFIAFKPPGCEESGKA

SEQ ID NO: 5678 - protein, 161 aa, Zea mays
  misc_feature (94)..(94): Xaa can be any naturally occurring amino acid
MDARMFGLENPLVAALHHLLDVPDGDAGAGGDKAGGGATRTYVRDARAMAATPADVKELAGAYAFVVDMPGLSTGDIRVQVEDERVLMISGERXRREEREDAKYLRMERRMGKFMRKFVLPDNADVDKVAAVCRDGVLTATVEKLPPPEPKKPKTIEIKVA

SEQ ID NO: 5679 - protein, 317 aa, Zea mays
GRAITCLAARRGGFPPLTQLSSPPSAASSSSQSIADYTADAEWLVTRPPDAAFDYVEGFAFVNSDDPVNGWPSVPIPGGARFDPSLLPAGAGPVLYCLEVALYQYAHRPDDVDDDDEEDQAAVTVSRMMAPLKHVRGLEFAADVGYVDFLSRVNRVEEEARRNGSWDAPHPWLNLFVSARDIADFDRAVIKGMLADGIDGPMLVYPMLKSKWDPNTSVALPEGEVFYLVALLRFCRSGGPAVDELVAQNGAILRACRANGYDYKAYFPSYRGEADWARHFGAARWRRFVDRKARYDPLAILAPGQKIFPRVPASVAV

SEQ ID NO: 5680 - protein, 447 aa, Zea mays
IRLEWGLDGSVWFSSEMKALSDDCERFITFPPGHLYSSKTGGLRRWYNPPWFSETVPSTPYNALFLREMFEKAVIKRLMTDVPFGVLLSGGLDSSLVASVASRHLNETKVDRQWGNKLHTFCIGLKGSPDLKAAREVADYLSTVHHEFHFTVQEGIDALEEVIYHIETYDVTTIRASTPMFLMSRKIKSLGVKMVISGEGSDEIFGGYLYFHKAPNKKEFHEETCRKIKALHLYDCLRANKATSAWGVEARVPFLDKSFISVAMDIDPEWKMIKRDLGRIEKWVIRNAFDDDERPYLPKHILYRQKEQFSDGVGYSWIDGLKDHASQHVSDSMMMNAGFVYPENTPTTKEGYYYRMIFEKFFPKPAARSTVPGGPSVACSTAKAVEWDASWSKNLDPSGRAALGVHDAAYEDTAGKTPASADPVSDKGLRPAIGESLGTPVASATAV

SEQ ID NO: 5681 - protein, 324 aa, Candida tropicalis
MSTTPTIPTIKLNSGYEMPLVGFGCWKVNNETAADQIYNAIKTGYRLFDGAEDYGNEKEVGEGINRAIKEGLVKREELFITSKLWNNFHDPKNVETALNKTLSDLNLDYVDLFLIHFPIAFKFVPIEEKYPPGFYCGDGDNFHYEDVPLLDTWKALEKLVEAGKIKSIGISNFTGALIYDLIRGATIKPAVLQIEHHPYLQQPKLIEYVQKAGIAITGYSSFGPQSFLELESKRALNTPTLFEHETIKSIADKHGKSPAQVLLRWATQRNIAVIPKSNNPERLAQNLSVVDFDLTKDDLDNIAKLDIGLRFNDPWDWDNIPIFV

SEQ ID NO: 5682 - protein, 211 aa, Glycine max
MHVNVTILPRVRPRVRPRVRGRVGGPRVRPRVRKKLGFVTLSFACESESNNNQSIIMSSAKKITLKSSDGEAFEVDEAVALESQTIKHMIEDDCADSGIPLPNVTSKILAKVIEYCKKHVEAANPEDKPSEDDLKAWDADFVKVDQATLFDLILAANYLNIKSLLDLTCQTVADMIKGKTPEEIRKTFNIKNDFTPEEEEEVRRENQWAFE

SEQ ID NO: 5683 - protein, 336 aa, Glycine max
  misc_feature (304)..(304): Xaa can be any naturally occurring amino acid
AEFTLYTTCKLLRKGTPSCGKSRSGNPNNNNLFDGRQGESDHWSELDTDLYNWTKALRPVQWFPGHIAKAEKELKEQLKLMDVVIEVRDGRIPMSTSHPQMDLWLGNRKRILVLNREDMISTADRNAWADYFTRNGTKVVFSNGQLGMGTMKLGRLAKELAADVNVKRRSKGLLPRAVRAGIVGYPNVGKSSLINRLLKRRMCPAAPRPGVTRELRWVRFGKDLELLDSPGILPMRISDQSAAIKLAICDDIGERSYDVADVAAILVQMLSKLPTVGRDALCKRYKIDVDCRDGRIFIEKLAVXVFNGDVHQAAFRVLADFRKGKFGWTALERPPK

SEQ ID NO: 5684 - protein, 502 aa, Streptomyces avermitilis MA-4680
MRPGRQSAMTELVEHGQLFIGGVLADPLGKDVIEVISPHTEEVIGRVPHASTADVDRAVAVARKAFDEGPWPRATLDERIEVVTRIKDAIAVRHEEIARVISSENGSPYSWSVLAQALGAMMVWDAAITVARNFTYEETRDGVLGKIVVRREPVGVVAAVVPWNVPQFVAAAKLAPALLTGCTVVLKPSPESPLDAYLLGEIAREAGLPEGVLSILPADREVSEYLVGHPGIDKVSFTGSVAAGRRVMEVASRNLTRVTLELGGKSAAVVLPDADITTSVPGIVSAAWMNNGQACVAQTRILVPRSRYDEFADAFAAAASALVVGDPLDPATQVGPLVARRQQRRNLDYIRIGQEEGAKILTGGGRPPGLDRGWYVEPTLFGDVDNSMRIAREEIFGPVICLLPYGDETEAVKIANDSDYGLSGSVWTADVEHGIDVARRVRTGTYSVNTFSLDMLGPFGGYKNSGLGREFGPEGYGEFLEHKMIHLPAGYEAPTGVEGAGA

SEQ ID NO: 5685 - protein, 120 aa, Triticum aestivum
MRDAVLLRCDASMAAGSTSYGSSSGRRSFLAQAATAKQRRAPAPAGNGGKSDGGGYFGPEAAVVLALMTAALLVLPLLLPPLPPPPPLFLFVPVAILAVLLLLVLLPSDARGLRVAPSYL

SEQ ID NO: 5686 - protein, 374 aa, Petroselinum crispum
MESSSAATADHTHIKGVPTHGGRYVQYNVYGNLFEVSRKYVPPIRPVGRGAYGIVCAAMNSDTREEVAIKKIGNAFDNRIDAKRTLREIKLLRHMNHENVIAIKDIIRPPQIESFNDVYIVYELMDTDLHQIIRSNQQLTDDHCRYFLYQLLRGLKYVHSANVLHRDLKPSNLLLNANCDLKIGDFGLARTTSETDFMTEYVVTRWYRAPELLLNCSEYTAAIDIWSVGCILGEVMTRQPLFPGKDYVHQLRLITELIGSPDDASLGFLRSDNARRYVRQLPQYPKQQFSARFLNKSPGALDLLEKMLIFDPNRRITVDEALCHPYLAALHDINEEPVCPRPFSFDFEQPTCTEENIKELIWKESVKFNPDPIL

SEQ ID NO: 5687 - protein, 216 aa, Glycine max
FSRPGEYSGLEHQVVRGVVESLKIITRQASLRVAEYAFHYAKAHGRERVSAIHKANIMQKTDGLFLKCCREVAEKYPEITYEEVVIDNCCMMLVKNPALFDVLVMPNLYGDIISDLCAGLVGGLGLTPSCNIGEGGIALAEAVHGSAPDIAGKNLANPTALLLSGVTMLRHLNLHDKAEQIQKAILNTIAEGKYRTADLGGSSKTTEFTKAIIDHL

SEQ ID NO: 5688 - protein, 375 aa, Rhodococcus equi
GVTRNYTAEQVVKLQGTVVEEATLARRGSEILWDLVNNEDYINSLGALTGNQAVQQVRAGLKAIYLSGWQVAGDANLSGHTYPDQSLYPANSVPQVVRRINNALLRADEIAKVEGDTSVDNWLAPIVADGEAGFGGALNVYELQKAMIAAGVAGSHWEDQLASEKKCGHLGGKVLIPTQQHIRTLTSARLAADVADVPTVVIARTDAEAATLLTSDVDERDREFLDGTRTAEGFYGVKNGIEPCIARAKAYAPYSDLIWMETGVPDLEVAKKFAEAVRSEFPDQLLAYNCSPSFNWKAHLDDATIAKFQKELGAMGFKFQFITLAGFHSLNYGMFDLAHGYAREGMTAFVDLQEREFKAAEERGFTAIKHQREVG

SEQ ID NO: 5689 - protein, 472 aa, Aspergillus nidulans FGSC A4
MSSPLSNSKRKRADSQHLSTADIAKSSTTDLLQPSSRDASGEEGDESTGPIISPVKASNNPPPKRARKASVSEGQSGDAGKDTSISKEDPGEPSETTPASSDIETHTKTRPGLHLNTKPDEELMKPPVLGKLQDPAGGYKTNPPPVGRPVRVYADGVFDLFHVGHMRQLEQAKKAFPDVYLIVGVTGDKETHERKGLTVLSGAERAESVRHCKWVDEVFPNCPWIVTPEFMEEHKIDYVAHDDLPYGAAEGDDIYAPIKAQGKFLVTQRTEGVSTTGVITRIVRDYDRYISRQFKRGASRQELNVSWLKKNELEIKRHVSELRDSIMTNWTNTGQELSRELRQLWNSRPNSPAPSTRTSMDWGSSRGVVSPTAGGKSHVSRVEALGRTESITGREPDFATGYSLGLIGGVRAWKAEASHQPVKKNTSLNWNAATVRDPPNLSGKLAVHRMCRTGEVTFMIFIFEAILGHIGT

SEQ ID NO: 5690 - protein, 376 aa, Vitis aestivalis
MGCFPCAGKSNKKGKKNQEKNSKDQIPSTSERLKVNSSVDGRKDASKDGGSDHIAAHTFTFRELAAATKNFRAECLLGEGGFGRVYKGRLESTNKIVAIKQLDRNGLQGNREFLVEVLMLSLLHHPNLVNLIGYCADGDQRLLVYEYMALGSLEDHLHDLPPDKKRLDWNTRMKIAAGAAKGLEYLHDKASPPVIYRDLKCSNILLGEGYHPKLSDFGLAKLGPVGDKTHVSTRVMGTYGYCAPEYAMTGQLTLKSDVYSFGVVLLEIITGRKAIDNSKAAGEHNLVAWARPLFKDRRKFSQMADPMLHGQYPLRGLYQALAVAAMCVQEQPNMRPLIADVVTALTYLASQKYDPETQPVQSSRMGSSTPRSRREL

SEQ ID NO: 5691 - protein, 482 aa, Caulobacter crescentus CB15
MTALNLVETAALIDGQWVRGEASFDVLNPADGTLIAAVADLGAAETTLAIDAAHRALPAWAARTAKERGAILRRWSDLILAHADDLARLMTDEQGKPLAEAKGEVVYGASFIDWFAEEAKRAYGHTIPTPMPGKRLASIKQPVGVCAAIAPWNFPIAMITRKVGPALAAGCTVVVKPAAETPLSALAIARLATEAGVPAGVLNIVTTTRSSEVGKVLCDDSRVRKLSFTGSTPIGKVLYQQCAGTMKKLSLELGGNAPFIVFDDADLEAAVDGAIASKYRNAGQTCVCANRLIVQSGIHDAFAARLAEKVAALKVGPGTGEGVQIGPLINEKALTKVVGLVSGAVQAGAEVLTGGDVHGLGGHFYQPTVLVGATPEMRIFQEEIFGPVAPIVKFETEAEAVELANATPFGLAAYFYSRDVGRCWRVAEQIEAGMVGINEGLISTEVAPFGGVKESGLGREGASEGLDEYLETKYLCFGGVAG

SEQ ID NO: 5692 - protein, 121 aa, Triticum aestivum
MAGCCVFLRRPSTSSAHRLGYHSLDGDHEAGPPPAATVTVVVGKERRVFAVDQLVLDTYPFRVLLETAARKEERRGKALFVDVDAILFEHILWLAGCHDRSAVSLLQPDLQDIIDFYSQDA

SEQ ID NO: 5693 - protein, 411 aa, Candida albicans
  misc_feature (207)..(207): Xaa can be any naturally occurring amino acid
MDNHQQQQQLQQYQQQFQQPQQQLYPGEQIVHPAAAQTGQNTTNVTAVSSSNITQSATSSLHSQQLQHVDVSKSAAEEAIRRSLLPERSTVSKGKYSLTDFSIMRTLGTGSFGRVHLVRSVHNGRYYAIKVLKKHQVVKMKQVEHTNDERRMLKLVEHPFLIRMWGTFQDSKNLFMVMDYIEGGELFSLLRKSQRFPNPVAKFYAAXVTLALEYLHSHDIIYRDLKPENILLDRNGHIKITDFGFAKEVSTVTWTLCGTPDYIAPEVITTKPYNKSVDWWSLGVLIFEMLAGYTPFYDSTPMKTYEKILAGKIHYPSFFQPDVIDLLTKLITADLTRRLGNLINGPADIRNHPWFSEVVWEKLLAKDIETPYEPPITAGVGDSSLFDHYPEEQLDYGSQGEDPYASYFLDF

SEQ ID NO: 5694 - protein, 496 aa, Caulobacter crescentus CB15
MTLPADMTERLAKLAPPSQAVIDGDLVEAASGATFHNVSPRDGQVLNLVTACQADDVERAVAGARAAFEDGRWRDQGPRQKKAVLFRLAELMERDADELALLESLDVGKPISDARNVDIPLAINTCRWYAEALDKVYGEVGTSPADRLSYAVHEPLGVIGAIVPWNFPLHMAMWKVAPALAMGNSVVLKPAEQSPLTALKLGALALEAGLPPGVLNVIPGLGGVAGEALALSMDVDMIAFTGSGPVGRRLMEYSARSNLKRVSLELGGKSPQIVFADCPDLEAAAQAAAWGVFYNQGEVCTAASRLLVEAPIKDAFLARVIEVAKGMKVGDPLDPSTQFGAMVSERQMNTALDYIATADSQGARRVLGGQRVRQEAGGFYVEPTIFDQVRPDQTLAREEVFGPVLGVMTFSSEDEAMRLANDTVYGLAAGLWTADVSKALRGARRLKAGLVWVNGWDACDITMPFGGFKQSGFGRDRSLHALHKYADLKSVSVTLR

SEQ ID NO: 5695 - protein, 173 aa, Flaveria pringlei
MASIPATVATVAQANMVAPFTGLKANAAFPVTKKVNDFSTLPSNGGRVQCMKVWPPLGKKKYETLSYLPDLTEVQLAKEVDYLLRNKWVPCLEFELEHGFVYRENARSPGYYDGRYWTMWKLPMFGCTDSAQVMKELQECKKEYPQAWIRIIGFDNVRQVQCISFIASKPGGF

SEQ ID NO: 5696 - protein, 110 aa, Arabidopsis thaliana
MSGVWVFKNGVIRLVENPNQSGSDTQNRRKVMVYLPTGEVVSSYSTLEQILQSLGWERYFGGGDTDLLQFHKRSSIDLISLPRDFTKFNSVYMYDIVVKNPNYFHVRDSH

SEQ ID NO: 5697 - protein, 439 aa, Caulobacter crescentus CB15
MPDFGANDLDAFWMPFTPNRRFKRHPRMLSSASGMWYRTPESREVLDATSGLWCVNAGHDRPKIREAIQKQAAEMDYAPCFNMGHPLAFQFASRLAQITPKGLDRIFFTNSGSESVDTALKIALAYHRARGKGTKTRLIGRERGYHGVGFGGISVGGIPKNRMYFGSLLTGVDHLPHTHGLPGNTCAKGQPENGAHLADDLERIVALHDASNIAAVIVEPVAGSTGVLIPPKGYLERLRAICDKHDILLIFDEVITGFGRVGAPFAAERFGVTPDLICMAKGLTNAAVPCGAVAASGKIYDAMMDGADAPIELFHGYTYSAHPLACAAGLATLETYREDDLFARAAGLEGYWQDAMHSLADARHVVDVRNLGLVAGIELEPRPGAPTARAMEVFETCFDEGLLIRVTGDIIALSPPLILEKDHIDRMVETIRRVLGQVD

SEQ ID NO: 5698 - protein, 315 aa, Glycyrrhiza glabra
MAAAIEIPTKVLPNSTCELRVPVIGMGSAPDFTCKKDTKEAIIEAIKQGYRHFDTAAAYGSETALGEALKEARDLGLVTREDLFVTSKLWVTENHPHLVVPALRKSLETLQLEYLDLYLIHWPLSSQPGKFSFPIQAEDLLPFDVKGVWESMEESLKLGLTKAIGVSNFSVKKLQNLLSVATIRPAVNQVEMNLAWQQKKLREFCNANGIVLTAFSPLRKGASRGPNEVMENDMLKGIAEAHGKSIAQVSLRWLYEQGVTFVAKSYDKERMNQNLQIFDWELTTEDHQKIDQIKQNRLIPGPTKPQLNDLWDDEI

SEQ ID NO: 5699 - protein, 497 aa, Pseudomonas putida KT2440
MTTLTRADWEQRAQQLKIEGRAFINGEYTDAVSGETFECLSPVDGRFLAKVASCDLADANRAVENARATFNSGVWSQLAPAKRKAKLIRFADLLRKNVEELALLETLDMGKPIGDSSSIDIPGAAQAIHWTAEAIDKVYDEVAPTPHDQLGLVTREPVGVVGAIVPWNFPLLMACWKLGPALATGNSVVLKPSEKSPLTAIRIAQLAIEAGIPAGVLNVLPGYGHTVGKALALHMDVDTLVFTGSTKIAKQLMVYAGESNMKRIWLEAGGKSPNIVFADAPDLQAAAEAAASAIAFNQGEVCTAGSRLLVERSIKDKFLPMVVEALKGWKPGNPLDPQTTVGALVDTQQMNTVLSYIEAGHKDGAKLLAGGKRTLEETGGTYVEPTIFDGVTNAMRIAQEEIFGPVLSVIAFDTAEEAVAIANDTPYGLAAGIWTSDISKAHKTARAVRAGSVWVNQYDGGDMTAPFGGFKQSGNGRDKSLHALEKYTELKATWIKL

SEQ ID NO: 5700 - protein, 309 aa, Bartonella vinsonii subsp. berkhoffii
ITYIDGNKGVLLYRGYPIEQLAEKGDFLESCYLLLYGELPTQQEKSDFDRCIMQHTMVHEQFARFFHGFRRDSHPMAVMVACLGAMSAFYHDSIDIIDPQQRMIASVRLISKVPTLAAMAYKYSIGQAFVYPRNDLSYAANFLRMCFSVPCEEYKTNPVLTRAMDRIFILHADHEQNASTSTVRLAGSSGANPFACIAAGVACLWGPAHGGANEACLKMLLEIGSVKRIPEFIARAKDKNDPFRLMGFGHRVYKNYDPRAKIMQKTCHEVLKELNIQNDPLLDIAIELEKIALNDEYFVEKKLYPSVDF

SEQ ID NO: 5701 - protein, 305 aa, Saccharomyces cerevisiae
MSSSSQFKQLEKLGNGTYATVYKGLNKTTGVYVALKEVKLDSEEGTPSTAIREISLMKELKHENIVRLYDVIHTENKLTLVFEFMDNDLKKYMDSRTVGNTPRGLELNLVKYFQWQLLQGLAFCHENKILHRDLKPQNLLINKRGQLKLGDFGLARAFGIPVNTFSSEVVTLWYRAPDVLMGSRTYSTSIDIWSCGCILAEMITGKPLFPGTNDEEQLKLIFDIMGTPNESLWPSVTKLPKYNPNIQQRPPRDLRQVLQPHTKEPLDGNLMDFLHGLLQLNPDMRLSAKQALHHPWFAEYYHHAS

SEQ ID NO: 5702 - protein, 104 aa, Triticum aestivum
  misc_feature (58)..(58): Xaa can be any naturally occurring amino acid
  misc_feature (80)..(80): Xaa can be any naturally occurring amino acid
  misc_feature (89)..(89): Xaa can be any naturally occurring amino acid
MAPTVMAWSDTSVAPFQGLKSTAGLPVSRRSNGASLGSVSNGGRIRCMQVWPIEGIKXIRDLSYLPTLNKEASSSKSTNXFAPNWVPCXSSTKVGSTSVNGMPV

SEQ ID NO: 5703 - protein, 425 aa, Triticum aestivum
  misc_feature (42)..(42): Xaa can be any naturally occurring amino acid
  misc_feature (240)..(240): Xaa can be any naturally occurring amino acid
  misc_feature (273)..(273): Xaa can be any naturally occurring amino acid
  misc_feature (293)..(293): Xaa can be any naturally occurring amino acid
  misc_feature (334)..(334): Xaa can be any naturally occurring amino acid
  misc_feature (342)..(342): Xaa can be any naturally occurring amino acid
SKSRTQPETSKQPLPSLLLLCSSSLQSTLLASHRPIRWTAPXPARGRLAVLSSHLLAAGADPAAALERSPASAAAPGTRAGVLAVVDSRTGKRYEVKVSEDGTVRATDFKKITAGKDDKGLKTYDPGYLNTAPVRSSICYIDGDEGILRYRGYPIEEVAESSSFVEVAYLLMYGNLPSQSQLAAWEFAISQHSAVPQGLLDIIQSMPHDAHPMGVLASAMSTLSVFHPDANPALRGQDLXPSQTTRRALRALHNRGKMAAGDYQGLLVSSFVXLPSITIAFLVNFVYMLDDMXDINYQLNRLLESLLDLLVEHEANRETTCARALVRHLVSGGXVDVFTALXLAVGALFGALQRGSIECLMRLELVGVRVYTNYVHGVKVRRQKMSDVGHRVCRDSLTGATVIRKLAEEVVSIVRRDPLNEDAVS

SEQ ID NO: 5704 - protein, 431 aa, Vibrio cholerae O1 biovar eltor str. N16961
MVMADKKATLHIEGKAPIELPIMDGSLGPQVIDVRTLGSNGYFTFDPGFLATASCESQITYIDGAKGILLHRGYPIDQLANNADYLEVCYILLYGEAPNRKQYEEFKKIVTRHTMVHEQIASFFHGFRRDAHPMAVMCGVVGALAAFYHDSLDINNDTHREIAAYRLLSKMPTLAAMCYKYSVGQPFIYPRNDLSYAENFLHMMFATPCEEYEVNPIVARAMDKIFTLHADHEQNASTSTVRLAGSSGANPFACIAAGIASLWGPAHGGANEACLRMLEEIGSVDKIPEYVRRAKDKDDPFRLMGFGHRVYKNYDPRATVMREACHEVLKELSIQDPLLDVAMELERIALSDEYFIEKKLYPNVDFYSGIILKAIGIPVSMFTVIFAMSRTIGWIAHWNEMHSDPDNRIGRPRQLYTGQKLRDFTPLHERS

SEQ ID NO: 5705 - protein, 511 aa, Glycine max
  misc_feature (407)..(407): Xaa can be any naturally occurring amino acid
MEPNQLFSTHFRDGTIASCIEGQHRGAIPSVIVIGAGISGLAAARSLHDASFKVTVLESRDRLGGRIHTDFSFGCPVDMGASWLHGVCNENPLAPLIRGLGLSLYRTSGDNSVLYDHDLESYMLFNIDGKQVPQQMVIEVGDIFKKILEETGKVRDEHTEDISVSQAISIVLDRHPELRQQGLAHEVLQWFICRMEAWFAADADMISLKTWDQEHVLSGGHGLMVQGYDPIIKVLAKDIDICLNQRVKMISSGYNKVMVTVEDGRNFVADAAIITVPIGILKANLIQFEPKLPDWKVSAISDLGVGNENKIALRFDKVFWPNVELLGTVAPTSYTCGYFLNLHKATGHPVLVYMVAGRFAYDIEKLSDEAAANFVMQQLKKMFPNSSKPVMSASYLRTLTSLFVGLXVQYLVSRWGTDPNSLGCYSYDLVGKPLDVYDKLRAPLGNLFFGGEAVSLDNQGSVHGAYSAGVMAAENCESYLLEKLGHVEKLSLASVRHEMLETLIPLQISRM

SEQ ID NO: 5706 - protein, 140 aa, Ralstonia eutropha JMP134
MTNLRHFDPFSVEPISDMLQGMLRSFRGTADNGLAFKVDVSESESAYTLAAELPGVKKEDIDVSVDRGTVMISAKVEKSSEQKEGERVIRRERYSGSMQRAFTLDASIDEGKVEASYDNGVLRVVLPKKETSPQQRITVK

SEQ ID NO: 5707 - protein, 345 aa, Glycine max
MLLLERQRILLRAADLLEKHNDELAALETWDNGKPYEQAAKIEVPMLVRLIRYYAGWADKIHGLTVPADGPYHVQTLHEPIGVAGQIIPWNFPGKVVLELAAKSNLKPVTLELGGKSPFIVCEDADVDQAVELAHFALFFNQGQCCCAGSRTFVHESVYDEFVEKAKARALKRVVGDPFKGGIEQGPQIDSDQFEKILRYIRSGVESGATLETGGDKLGNKGFYIQPTVFSNVKDGMLIARDEIFGPVQSILKFKDLGEVVQRANNTRYGLAAGVFTTNMDTAYTLTRALRVGTVWINCFDTFDAAIPFGGYKMSGQGREKGEYSLKNYLQVKAVVNPLKNPAWL

SEQ ID NO: 5708 - protein, 339 aa, Arabidopsis thaliana
MGEAVEVMFGNGFPEIHKATSPTQTLHSNQQDCHWYEETIDDDLKWSFALNSVLHQGTSEYQDIALLDTKRFGKVLVIDGKMQSAERDEFIYHECLIHPALLFHPNPKTVFIMGGGEGSAAREILKHTTIEKVVMCDIDQEVVDFCRRFLTVNSDAFCNKKLELVIKDAKAELEKREEKFDIIVGDLADPVEGGPCYQLYTKSFYQNILKPKLSPNGIFVTQAGPAGIFTHKEVFTSIYNTMKQVFKYVKAYTAHVPSFADTWGWVMASDHEFDVEVDEMDRRIEERVNGELMYLNAPSFVSAATLNKTISLALEKETEVYSEENARFIHGHGVAYRHI

SEQ ID NO: 5709 - protein, 213 aa, Brassica napus
RPTRPGTLQSPGGSILWNGINTGARMRSSGSDWWYEDVSYLSVDLFRRLIKTMETKGIRAESLVGAMVYYARKYLPGLGRWQSRTSGSNNNKSRTSVVSFSLAAASSSSSSMSPVDQIALLETILSLLPEKRGRSFCKFLLCLLRVAFILGVDGSCVKQLERRIGMQLELATLENLLILNYSDSDTLYNVDCVERMIRHFVSSSSSSELSDFS

SEQ ID NO: 5710 - protein, 124 aa, Desulfitobacterium hafniense DCB-2
MSKTAEILEAVKGLTVLELAELVKAFEEEFGVSAAAPVAVAAAPGAAAAPVAEEQTEFDVVLMNAGAGKINVIKVVREITGLGLKEAKELVDGAPKPVKEKVSKDDAEAIKAKLVEAGATVEVK

SEQ ID NO: 5711 - protein, 272 aa, Zea mays
MTSASELFTARRAARGARISDLDLDPHADALRDQHGLGARHRRRGCRPRRQLDAAGDVRQHLHTGAPPPRRRGSYTDQILSYIDNNNLGVGDSAARRNRLDRLMFRTNERLPGAVLQAQARVLERLRGISLGSSASRPSISLDEFSASDVFRIIDFRNREARHEANRHHSSWFHPSSESDEERPTVSSTHSNRSTGLTKAAFLRLQVEIFEASKDDSREASPECSICLDGFYDGDELIRLRCGHRFHSTCLEPWARKCADCPYCRTNIRSRS

SEQ ID NO: 5712 - protein, 183 aa, Glycine max
  misc_feature (153)..(153): Xaa can be any naturally occurring amino acid
MEECHTVFGKYEMGRLLGKGTFAKVYYGKQISTGENVAIKVINKEQVRKEGMMEQIKREISVMRLVRHPNVVEIKEVMATKTKIFFVMEYVRGGELFAKISKGKLKEDLARKYFQQLISAVDYCHSRGVSHRDLKPENLLLDEDENLKISDFXGLSALPEQLRYDGLLHTQCGTPAYVAPGVL

SEQ ID NO: 5713 - protein, 122 aa, Vigna angularis
MIQPQTHLNVADNSGARELMCIRILGASNRRYAYIGDIVVAVIKQAVPNTNLERSEVIRAVIVRTCKQLKRSNGIIIQYDDNAAVIIDQEGNPKGTRIFCAIARELRQLNFTKIVSLAPEVL

SEQ ID NO: 5714 - protein, 451 aa, Staphylococcus epidermidis ATCC 12228
MANTRELNHKDAQYVWHPFTQMGVYAKNDNIIIEKGRGSYLYDTEGNKYLDGYASLWVNVHGHQHKKLNKAIHKQLDKIAHSTLLGSSNIPSIELAEQLVKLTPDRLQKVFYSDTGSASVEIAIKMAYQYWKNIDAKQYAKKNKFLTLHHGYHGDTIGSVSVGGIDSFHKIFKDLIFENIQIETPCLYKSKYRNEAEMLNSILNQIENILSERNDEIVGFILEPLIQGATGLFVHPHGFLKAVEQLCRKYDVLLICDEVAVGFGRTGEMFACNHEDVQPDIMCLGKAITGGYLPLAATLTSQKIYDAFLSQSHGKNTFFHGHTYTGNQLVCSVALENINLFKKKHLIGHIQKTSQTLKQRLEALQPHKNIGDIRGRGLMYGVELVENKSTQTPLDIPTVELIIRRCKENGLMIRNLENVITFVPILSMSNKEIKKMVKIFNKALHQTLGKK

SEQ ID NO: 5715 - protein, 169 aa, Triticum aestivum
  misc_feature (92)..(92): Xaa can be any naturally occurring amino acid
  misc_feature (100)..(100): Xaa can be any naturally occurring amino acid
  misc_feature (107)..(107): Xaa can be any naturally occurring amino acid
  misc_feature (126)..(126): Xaa can be any naturally occurring amino acid
  misc_feature (154)..(154): Xaa can be any naturally occurring amino acid
MAPTVMASSATSVAPFQGLKSTAGLPVSRRSNGASLGSVSNGGRIRCMQVWPIEGIKKFETLSYLPPLSTEALLKQVDYLIRSKWVPCLEFXSKVGFIFXREHNASXPGYYDGRLLGQCWKLPMFXGATDATQVINEVEEVKEGVPDAYVRIIXGFDNMRQVQCVSSSP

SEQ ID NO: 5716 - protein, 254 aa, Methanococcoides burtonii DSM 6242
MASYKLMVKDVIKQADILLEVVDARFPDETRNLEVERDVKRSGKPLIIVLSKCDLVSKETLQKAKSRLSKVAPTVFVSSKERYGTTMLRHKILEIADIQGRNILIGSLGYPNTGKSSVINGVAGKNKAGTSSISGHTKGVQIVKAGSRIVFIDTPGVIPFGDNDEYRQGLLGVKDATHLNDPIGVAMKIIAHICDNNKSVLEEFYNIEIKENNPEKVLELIGLKGNCLKKGGEVDEMRIAIKIINDWQRGKMLI

SEQ ID NO: 5717 - protein, 202 aa, Escherichia coli
LRPVRYYQGTPSPVKHPELTDMVIFRENSEDIYAGIEWKADSADAEKVIKFLREEMGVKKIRFPEHCGIGIKPCSEEGTKRLVRAAIEYAIANDRDSVTLVHKGNIMKFTEGAFKDWGYQLAREEFGGELIDGGPWLKVKNPNTGKEIVIKDVIADAFLQQILLRPAEYDVIACMNLNGDYISDALAAQVGGIGIAPGANIG

SEQ ID NO: 5718 - protein, 113 aa, Rickettsia sp. ATT
VNEAVINMLKEIGSSEYIPKYIAKAKDKNDPFRLMGFGHRVYKNYDPRAAVPKETCKEVLKELGQLDNNPLLQIAIELEAIALKDEYFIERKLYPNVDFYSGIIYKAMGIPSQ

SEQ ID NO: 5719 - protein, 178 aa, Flaveria pringlei
MASISSTVATVSRAAPAQANMVAPFTGLKSNVAFPATKKANDFSTLPSNGGRVQCMKVWPPLGKKRYETLSYLPNLTEAQLAKEVDYLLRNKWVPCLEFELEHGFVYRENARSPGYYDGRYWTMWKLPMFGCTDSAQVMKELQECKKEYPQAWIRIIGFDNVRQVQCISFIASKPEGF

SEQ ID NO: 5720 - protein, 173 aa, Flaveria pringlei
MASIPATVATVAQANMVAPFTGLKSNAAFPVTKKVNDFSTLPSNGGRVQCMKVWPPLGKKRYETLSYLPNLTESQLAKEVDYLLRNKWVPCLEFELEHGFVYRENARSPGYYDGRYWTMWKLPMFGCTDSAQVMKELQECKKEYPQAWIRIIGFDNVRQVQCISFIASKPDGF

SEQ ID NO: 5721 - protein, 286 aa, Pseudomonas syringae pv. tomato str. DC3000
MSDYQETLYEGYGQRFRMEKMLHEVRTEHQHLVIFQNPRMGRVMALDGVIQTTEADEFIYHEMLTHVPILAHGAAKRVLIIGGGDGGMLREVAKHLTVEHITMVEIDATVVEMCKEFLPNHSSGAFDDSRLNLVIDDGMRFVATTEEKFDVIISDSTDPIGPGEVLFSENFYQACHRCLNEGGILVTQNGTPFMQLSGVQTTAGRMNGLFADWHFYQAAIPTYIGGAMTFAWGATDKSYRKLPLETLRQRFSGSGIVTRYYNPEVHIGAFALPQYVLHAVNKASND

SEQ ID NO: 5722 - protein, 178 aa, Flaveria pringlei
MASISSTVATVSRAAPAQANMVAPFTGLKSNAAFPATKKANDFSTLPSNGGRVQCMKVWPPLGKKKYETLSYLPNLTEAQLAKEVDYLLRNKWVPCLEFELEHGFVYRENARSPGYYDGRYWTMWKLPMFGCTDSAQVMKELQECKKEYPQAWIRIIGFDNVRQVQCISFIASKPDGF

SEQ ID NO: 5723 - protein, 432 aa, Amycolatopsis mediterranei
MTMTVQKAPSQLLAAKLQIPPIPYSHAAGSWVYASDGTRYLDGASGIVNVNIGHAHPTVVAALRDQVGICTYASPGTFAPDLMEQLAAAAARAVHRPDDRVMFTPTGTHATESAIALARLVQRARGEEGRHKILTSTLGYHGNSAFVLALSGHRSRRPHEDDSFGLAPAFNPPYPGQHLGCPFDACRVECVRAVRDAIVAAGPESVAAVLMEPVNGTTGGGYVPPAGYLRALREVCDEFGVLVIHDEVLTGLGRCGLPLASHHTPGSAADIVTLSKGLGAGYVPLAATMLSPDLAEDIMTSGKWLPLMGTMSATPLQGRAGLAVLSVLEELGALDRDEVRGAALGRLVADAVRGRQVVTDVRGLGYFYGIELAPGTLGDVMRITRSRGLLLYPYVGFRPDRTGEGLLVAPRSTRPTAISASSARRWARHWTS

SEQ ID NO: 5724 - protein, 201 aa, Triticum aestivum
LMNQDKVLMESWYYLKDAVLDGGIPFNKAYGMSAFEYHGTDPRFNRVFNEGMKNHSIIITKKLLELYKGFNGVGTLVDVGGGIGATVGAITAHYPTIKGINFDLSHVISEAPPFPGVTHVGGDMFQKIPSGDTILMKWILHDWSDEHCATLLKNCYDALPTHGKVMLVECILPVNPEATPKAQGGFHLDMIMLAHNPGGKE

SEQ ID NO: 5725 - protein, 113 aa, Rickettsia sp. HOT1
ANEAVINMLKEIGSSEYIPKYIAKAKDKNDPVRLMGFGHRVYKNYDPRAAILKETCKEVLKELRQLDNNPLLQIAIELEAIALKDEYFIERKLYPNVDFYSGIIYKAMGIPSQ

SEQ ID NO: 5726 - protein, 338 aa, Escherichia coli CFT073
MISSGQTGYIPLTSCLKRNTIMTDKLTSLRQYTTVVADTGDIAAMKLYQPQDATTNPSLILNAAQIPEYRKLIDDAVAWAKQQSNDRAQQIVDATDKLAVNIGLEILKLVPGRISTEVDARLSYDTEASIAKAKRLIKLYNDAGISNDRILIKLASTWQGIRAAEQLEKEGINCNLTLLFSFAQARACAEAGVFLISPFVGRILDWYKANTDKKEYAPAEDPGVVSVSEIYQYYKEHGYETVVMGASFRNIGEILELAGCDRLTIAPALLKELAESEGAIERKLSYTGEVKARPARITESEFLWQHNQDPMAVDKLAEGIRKFAVDQEKLEKMIGDLL

SEQ ID NO: 5727 - protein, 173 aa, Flaveria pringlei
MASIPATVATVAQANMVAPFTGLKSNAAFPVTKKVNDFSTLPSNGGRVQCMKVWPPLGKKRYETLSYLPNLTEVQLAKEVDYLLRNKWVPCLEFELEHGFVYRENARSPGYYDGRYWTMWKLPMFGCTDSAQVMKELQECKKEYPQAWIRIIGFDNVRQVQCISFIASKPDGF

SEQ ID NO: 5728 - protein, 270 aa, Schizosaccharomyces pombe
MSTTSREDAVYLAKLAEQAERYEGMVENMKSVASTDQELTVEERNLLSVAYKNVIGARRASWRIVSSIEQKEESKGNTAQVELIKEYRQKIEQELDTICQDILTVLEKHLIPNAASAESKVFYYKMKGDYYRYLAEFAVGEKRQHSADQSLEGYKAASEIATAELAPTHPIRLGLALNFSVFYYEILNSPDRACYLAKQAFDEAISELDSLSEESYKDFTLIMQLLRDNLTLWTSDAEYSAAAAGGNTEGAQENAPSNAPEGEAEPKADA

SEQ ID NO: 5729 - protein, 74 aa, Triticum aestivum
LFFRLALILIQRRHIEQVKVVLPAILRVMHANLSECDGEHGMSAVDLFSAALRIGNAIQEMCKTMVNHRKEELC

SEQ ID NO: 5730 - protein, 187 aa, Pisum sativum
MEFKATELRLGLPGITEEEEKKIIHGSSVVKNNNKRQLPQTSEESVSISKVTNDEHIVESSSAAPPAKAKIVGWPPIRSYRKNSLHEADVGGIFVKVSMDGAPYLRKIDLRVYGGYSELLKALETMFKLTIGEYSEREGYKGSEYAPTYEDKDGDWMLVGDVPWDVTSCKRLRIMKGTEAKGLGCGV

SEQ ID NO: 5731 - protein, 173 aa, Flaveria pringlei
  misc_feature (63)..(63): Xaa can be any naturally occurring amino acid
  misc_feature (172)..(172): Xaa can be any naturally occurring amino acid
MASIPATVAAVAQANMVAPFTGLKANAAFPVTKKVNDFSTLPSNGGRVQCMKVWPPLGKKKYXTLSYLPNLTEAQLAKEVDYLLRNKWVPCLEFELEHGFVYRENARSPGYYDGRYWTMWKLPMFGCTDSVQVMKELQECKKEYPQAWIRIIGFDNVRQVQCISFIASKPDXF

SEQ ID NO: 5732 - protein, 143 aa, Chloroflexus aurantiacus
MTNLTRWDPFREMTQLLDDTFFTGFTGVLPRNGSLVPALDLSETADAYHIEMAVPGMTADQLNITFENNVLTISGEITQSSDRKERQYHVTERRFGRFSRSIRLPNQIHPDRIEARLENGVLTVTVPKAEEIKPRKIAVNVAQ

SEQ ID NO: 5733 - protein, 501 aa, Cytophaga sp. KUC-1
MSNTIQRPEFKAKYDNYINGKFTAPVKGEYFDVLSPIDGKVFTKAAHSGKEDLELAVDAAYEAFKTWGKTSVTERSILLNKIAQKIEDNLEYIATVETIDNGKPIRETLAADIPLAIDHFRYFAGVIRAEESSIAELDSQTVSIALSEPLGVVAQIIPWNFPILMAVWKIAPALAAGNTIVLKPAESTPISILVLMELIGDILPPGVLNIVNGFGAELGRPLVTNKKVAKAAFTGSTTTGRLVMQYATENIIPVTLELGGKSPNIFFPSVADHDDDFFDKAIEGAVLFALNQGEICTCPSRLLIHEDIYEKFIARVIERTEAIIAGNPLDKSTMIGAQTSLVQKEKIMSYIKLGKEEGAELLTGGDENHLGGDLEGGYYIKPTLFKGHNKMRIFQEEIFGPVLAVTTFKTTEEAIEIANDTMYGLGAGVWTRDAHEIYQVPRAIQSGRVWINQYHSYPAGAPFGGYKQSGIGRENHKMMLGQYRQTKNMLISYDKKKLGFF

SEQ ID NO: 5734 - protein, 205 aa, Eucalyptus globulus
MGRGRVQLKRIENKINRQVTFSKRRCGLLKKAHEISVLCDADVALIVFSTKGKLFEYATDCCMERILERYERYSYAESQVLTNNAETNGNWTLEHAKLKARMEILQKNQKNLMGEELDSLSLKELQNLEHQLDTALKNIRSRKIQLMCESISELQRKDKALQEQNNMLAKKVKEKEKALAQQTQWDNPQDDGLTSSSGSLPSEWN

SEQ ID NO: 5735 - protein, 250 aa, Glycine max
MTKNYPTVSADYQKAVEKAKKKLRGFIAEKRCAPLMLRLAWHSAGTYDVSSKTGGPFGTIKHPSELAHGANNILDIAVRLLEPLKAEFPILSYADFYQLAGVVAVEVTGGPEVPFHPGREDKPEPPPEGRLPDATKGSDHLRDVFGKAMGLSDRDIVALSGGHTIGAAHKERSGFEGPWTSNPLIFDNSYFKELLSGEKEGLLQLPSDKALLSDPVFRPLVEKYASDEDAFFADYAEAHQKLSELGFADA

SEQ ID NO: 5736 - protein, 300 aa, Aegilops bicornis
GTANMQVDPSGQVQWTQQQPVPLPQQPFSQQPQQTFPQPQQTFPHQPQQQIPQPQQPQQQFLQPQQPFPQQPQQPYPQQPQQPFPQTQQPQQLFPQSQQPQQPYPQQPQQPFPQTQQPQQQFPQSQQPQQPFPQPQQPQQSFPQQQPPFIQPSLQQQLNPCKNLLLQQCRPVSLVSSLWSMIWPQSDCQVMRQQCCQQLAQIPQQLQCAAIHSVVHSIIMQQEQQQQQQQQQQQQQGLRIPLPLYQQQQVGQGTLVQGQGIIQPQQPAQLEAIRSLVLQTLPTMCNVYVPPECSIIKAPL

SEQ ID NO: 5737 - protein, 101 aa, Brassica napus
  misc_feature (6)..(6): Xaa can be any naturally occurring amino acid
  misc_feature (11)..(11): Xaa can be any naturally occurring amino acid
  misc_feature (21)..(21): Xaa can be any naturally occurring amino acid
  misc_feature (51)..(51): Xaa can be any naturally occurring amino acid
  misc_feature (58)..(58): Xaa can be any naturally occurring amino acid
  misc_feature (62)..(62): Xaa can be any naturally occurring amino acid
  misc_feature (75)..(75): Xaa can be any naturally occurring amino acid
  misc_feature (88)..(89): Xaa can be any naturally occurring amino acid
  misc_feature (92)..(92): Xaa can be any naturally occurring amino acid
  misc_feature (94)..(94): Xaa can be any naturally occurring amino acid
  misc_feature (96)..(96): Xaa can be any naturally occurring amino acid
  misc_feature (98)..(99): Xaa can be any naturally occurring amino acid
EKEEVXAYSMXSSATVVTSPXQATMVVPFTGLKSSSAFPVTRKANNDITSXVSNGGRXNCMXAWPPIGKKKFETXSYLPDLTEAELPXXVDXLXRXKXXPC

SEQ ID NO: 5738 - protein, 321 aa, Oryza sativa
MGRKPCCSKEGLNRGAWTAMEDDILVSYIAKHGEGKWGALPKRAGLKRCGKSCRLRWLNYLRPGIKRGNISGDEEELILRLHTLLGNRWSLIAGRLPGRTDNEIKNYWNSTLSKRVAMQRTAAATSMPAAATTSSNADAAGAAARRRRSPEPRTVVVSPIRTKALRCNNNSSSGIVVVQQAGACSHGGRPPESGAPGDAAADKVATPQAVQQQQQQELAGAEDDDDLPVPAVCIDLDLDDIELGGLDGFLISPWRGGGHDDGNAAAGAVPNLPMPIGYKLGGAGGGGEAGAVDLEALLGQLEAEEDDDGDHHHHHHHHHHQ

SEQ ID NO: 5739 - protein, 105 aa, Brassica napus
  misc_feature (10)..(10): Xaa can be any naturally occurring amino acid
  misc_feature (14)..(14): Xaa can be any naturally occurring amino acid
  misc_feature (30)..(30): Xaa can be any naturally occurring amino acid
  misc_feature (52)..(53): Xaa can be any naturally occurring amino acid
  misc_feature (61)..(61): Xaa can be any naturally occurring amino acid
  misc_feature (69)..(70): Xaa can be any naturally occurring amino acid
  misc_feature (76)..(77): Xaa can be any naturally occurring amino acid
  misc_feature (85)..(85): Xaa can be any naturally occurring amino acid
  misc_feature (87)..(87): Xaa can be any naturally occurring amino acid
GIICIASLIXPYRXDRDICRTLLPEGDFVXVYMDVSLEVCEARDPKGLYKLXXAGKIKGFXGIDDPYEXXLNCEIXXGQEGTGTXPXEMAETVVAYLEHKGYLNA

SEQ ID NO: 5740 - protein, 175 aa, Triticum aestivum
MAPTVMGWSGTCAGPLQGLKSTVGLPVSRRYNGASLGSVSNGGRIRCMQVWPIEGIKKCETLSYLPPVSAEALLKQVDYLIRSKWVPWLEFSKVGFIFREHNASPGYYDGRYWTMGKLPMFGCTDATQVINEVEEVKKEYPDAYVRIIGFDNMRQVQCVSFIAFKPPGCEESGKA

SEQ ID NO: 5741 - protein, 268 aa, Photorhabdus luminescens subsp. laumondii TTO1
MSVPAFGLGTFRLKDDVVITSVKNALELGYRAIDTAQIYENEAAVGQAIEESGVAREDIYITTKIWTENLSKEKLIPSLKESIAKLRTDYVDLTLIHWPSPHNVVSVDETMNALLDAKNMGLTREIGVSNFTIDLMQQAIDAVGAEHITTNQIELSPYLQNCHVTAWAKDHGIHITSYMTLAYSKALQDEVIRRIATKHQATPAQVILSWAMALGYSVIPSSTKRENLQSNLRASVLKLDADDMAAIATLDHNERLVNPEGLAPQWDN

SEQ ID NO: 5742 - protein, 491 aa, Gibberella zeae PH-1
MASSTPKPTNSLLYKNFQKHPAALIESTEGIFLNTSDGRRILDATSGAAVACLGYNNKDVQQAVVEQLVNVPYCHPGFYKTKAAEDLADFLVESTNGLMSKAVLCGSGSEAVEVALKLAKTHFSHLAIPQPERSHFIARVGAWHGATLGALTLGDFKVRKDPFVQLISQNSSQVSACSEYRGRKEGEDDEAYVQRLAQELDDEFQRIGPEKVCAFVAETVGGSASGCAMPIKGYFPAMKAVCEKYNALLILDEVMCGMGRTGTLHAWEQEDVVPDILVVGKGLGAGYAPVSAVMLNAKLVESFQKSGKGFAHGQTYMAHPQAAAAGLKVQQIIRDENLLAHVQTMGEYLGSRLKERFLPMPFVGDIRGRGLFWAIEFVTDKKTKMPFPYSLGLNSTLHSRGMSAGYEIALFNANGGYDGYSGDHFLICPPFIVTKADVDDIVERTARVVEDTFAELVNSAVWEKVTLQMGIDNKCEVNAVNAPPAVGVAAQ

SEQ ID NO: 5743 - protein, 479 aa, Agrobacterium tumefaciens str. C58
MRRKEQPWFSTGAAGGGINTATPMRIETIIFDCFRQAAEKPQEISIFRHKFTLHLHAAVASICQTCLWVYAKRRAMMAKQKVAMLTAGGLAPCLSSAVGGLIERYSDIAPEIDIIAYRSGYQGVLLGERIEITKDMREKAHLLHRYGGSPIGNSRVKLTNAADCAKRGLVKEGDNPLRVAAERLAADGITILHTIGGDDTNTTAADLAAYLGANGYDLTVVGLPKTVDNDVVPIKQSLGAWTAAEVGAAFFDNVSNEQSAAPKTFVIHEVMGRHCGWLTAATARAYIQKTRGNDYVEGLMMNTQMKNIDGIYLPEMAFDIEAEAERLKEVMDKHGYVTLFVSEGAGLDAIVAEREAAGEAVKRDAFGHVKIDTINVGGWFQKQFAGLIGAERSMVQKSGYFARSAPANGDDLRLIQGMVDLAVESALNKVSGVTGHDEDQNGKLRTIEFPRIKGGKHFDLSAKWFTEVMEHVGQPFTAA

SEQ ID NO: 5744 - protein, 511 aa, Manihot esculenta
MSVAILTSLPPQWLSILAVFLLPILTLLLFRGKDDNQKKGLKLPPGPRQLPLIGNLHQLGGQPYVDFWKMAKKYGPVMYLQLGRCPTVVLSSTETSKELMKDRDVECCSRPLSVGPGQLSYNFLDVAFSPYSDYWREMRKLFIFELLSMRRVQTFWYAREEQMDKMIEILDGAYPNPVNLTEKVFNMMDGIIGTIAFGRTTYAQQEFRDGFVKVLAATMDMLDNFHAENFFPVVGRFIDSLTGALAKRQRTFTDVDRYFEKVIEQHLDPNRPKPETEDIVDVLIGLMKDESTSFKITKDHVKAILMNVFVGGIDTSAVTITWAFSELLKNPKLMKKAQEEVRRAVGPNKRRVEGKEVEKIKYIDCIVKETFRKHPPVPLLVPHFSMKHCKIGGYDILPGTTIYVNAWAMGKDPTIWENPEEYNPDRFMNSEVDFRGSDFELVPFGAGRRICPGLAMGTTAVKYILSNLLYGWDYEMPRGKKFEDFPLIEEGGLTVHNKQDIMVIPKKHKWD

SEQ ID NO: 5745 - protein, 293 aa, Burkholderia fungorum LB400
MSAPLLFRPSLDAVYGFPHAKRVTQVVSPYQRIEVWDTPQLGRLFTLDGRPMTSTGDEFIYHECMVHPAALAHPSPQAALVLGGGDGGAARQLLRHAGIERIVVAELDAEVVRLTREHLPEVHGGAFDDPRVELVIGDAAHYVAHAAPARFDLVVFDLTPPDSPAAGLYTPTFYQQLKRVMRPIAAVSVHLGSPYFHAARIARLLDDLRAAFAVVRTMNTFIPLYGSLWIMATASDTLDPAALAADTLIERLAARRIGPLMHYDAGTHAALFSASRSVRDKLRRCCEIKFWVC

SEQ ID NO: 5746 - protein, 113 aa, Rickettsia sp. HOT2
ANEAVINMLKEIGSSEYIPKYIAKAKDKNDPFRLMGFGHRVYKNYDPRAAVLKETCKEVLKELRQLDNNPLLQIAIELEAIALKDEYFIERKLYPNVDFYSGIIYKAMGIPSQ

SEQ ID NO: 5747 - protein, 486 aa, Pseudomonas fluorescens PfO-1
MNPALYQNGKVPVHSPIDGSRIGAVNWEGPAEVEQHISRADHAFEQWRKVPAPRRGELVRQFGEVLREYKTELGELVSWEAGKITQEGLGEVQEMIDICDFAVGLSRQLYGLTIASERPGHHMRETWHPLGVVGVISAFNFPVAVWAWNTTLALVCGNPVVWKPSEKTPLTALACQALFERVLKNFSDAPAHLSQVIIGGRDAGEALVDDPRVALISATGSTRMGREVAPKVAARFARSILELGGNNAMILGPSADLDMAVRAILFSAVGTAGQRCTTLRRLIAHESVKEEIVTRLKAAYSKVRIGHPLEGNLIGPLIDKHSFENMQDALEQALSEGGRVFGGKRQLEDQFPNAYYVSPAIVEMPEQSDVVCSETFAPILYVVGYSDFEEALRLNNAVPQGLSSCIFTTDVREAEKFMSAVGSDCGIANVNIGPSGAEIGGAFGGEKETGGGRESGSDAWRAYMRRQTNTVNYSLELPLAQGITFD

SEQ ID NO: 5748 - protein, 389 aa, Escherichia coli
TLQNGKLNVPENPIIPYIEGDGIGVDVTPAMLKVVDAAVEKAYKGERKISWMEIYTGEKSTQVYGQDVWLPAETLDLIREYRVAIKGPLTTPVGGGIRSLNVALRQELDLYICLRPVRYYQGTPSPVKHPELTDMVIFRENSEDIYAGIEWKADSADAEKVIKFLREEMGVKKIRFPEHCGIGIKPCSEEGTKRLVRAAIEYAIANDRDSVTLVHKGNIMKFTEGAFKDWGYQLAREEFGGELIDGAPWLKVKNPNTGKEIVIKDVIADAFLQQILLRPAEYDVIACMNLNGDYISYALAAQVGGIGIAPGANIGYECALFEATHGTAPKYAGQDKVNPGSIILAAEMMVRHMGWTEAADLIVKGMEGAINAKPVTYDFERLMEGAKLL

SEQ ID NO: 5749 - protein, 291 aa, Triticum aestivum
MGGGSMGIRAAARAAFIGGYRSASNARRSALPSSSAAAADTRPVSTATTFDDWYIPDREVFGPVPSHEEAMAATLDLRDAFEIAKIDSHGGRLDISKTHISHDGLDDPTKVAQETFQDHLHSEASKHEEKHDSLSVASGSSARVIEAFTMLHESPEAQDVVASLASDKNVWEAVMKNKKLVEFYKTNLSESSSVTDEAEQSDAESSQSSNGVVSPADAFSDYIQMMKAFVSEMVTNLSSIMQDLVATSDEGQSKGRLKTLIINSKKDFTNGPSSFVLLAIASILVVLLKRA

SEQ ID NO: 5750 - protein, 1166 aa, Ustilago maydis
MQAVTASRPNADSASASHRIPSQPNASNPPSASLRPPDQQLPTTAASLMREGPRDFTVIKDVGDGSFGTVCLADWKSPLPSGTMLSPMQHPTTRPEYIGKRLVAIKKMKKPFPSWQECMKLKELKSLLTIPPHPNIIPLYDAFLMPTTKELHFVFECMEGNLYQLTKSRKGRPLAAGLVASIYEQIVLGLDHIHQHGYFHRDMKPENLLITTTGLADYPNLQPALAAERDVLVIVKLADFGLARETLSKPPYTEYVSTRWYRAPEVLLRSRDYSNPVDMWALGTILAELVNLKPLFPGHSEVDQVLQICDILGDPSHSYGHDSRNRRNGGGPWDRGIRMARAVGFTFPIRKPAKFSRFFSDRVPQNLIDCIEDLLRYDPQARLTSKDCLQHDYMRLDAPRLRPPQAKPLVSATAPLRPQQNASRPLPSSHSTLLSSNHARPPFGAADSNLKPLAVLRQPDGSPIVRVNAAATSDPSLANGTTPASPMQEDATEVHWAPPVVSSSRDVSLSGYPAFPDSASLYAASSSTHPDGPPSGAPSSDATMVMSDAQLTDSTLKHTDPRHAQALQAHQYEQYQRQYRHDAGQSQSPGYDAHAAAAYDRDAALRGAAFVPFVASYPGSAATGQLAAATSSGELSQKNDSNASNETISSRDKERRRSKVWGLNISSKFGGSGSSGTLAGSSSGGAANATGTHLYAVGNAAAGRLPPNGPMQESRVSLEPTPAQRIAAEHSNATLATLPNGAPAKTADSKKARKEAEKAAREAEKAKREAQQKAARDRARAVMQKRNQLLASSNSKDPVEWLAGAIQSDEPYRSSPSEKARGKQPAIPGSQLSPSMPSFASGEFPRSPLQQPIHGLSPDYGMNANPAVMGSMAWRGVGAARYSRSNKARRREHDDDHSMSSFEDAVDPRRASMQSYQTGDSDPGPGTGQQVAQGHYVQRASSSSSLASAPSLVDQRRFAPSLESHRSSADTRSISSLDHQLITNMERMTAVEARARTPGNVSPGPAHVVGARQSLSRQSRTNSRASSTSAHRQGSASPLHHASGIPRFHPYSHGGPVTPSTGYHANYQLPPLHQSLAHPSGAQRSDTAGDRSVSPAFYSNASQPQQHVHQHHINPIFHVPAGNSGHGTTLPPFSSIAASIDVPAIDEKATQMLYAQARSPGPLPQS

SEQ ID NO: 5751 - protein, 212 aa, Shigella flexneri
ICLRPVRYYQGTPSPVKHPELTDMVIFRENSEDIYAGIEWKADSADAEKVIKFLREEMGVKKIRFPEHCGIGIKPCSEEGTKRLVRAAIEYAIANDRDSVTLVHKGNIMKFTEGAFKDWGYQLAREEFGGELIDGGPWLKVKNPNTGKEIVIKDVIADAFLQQILLRPAEYDVIACMNLNGDYISDALAAQVGGIGIAPGANIGDECALFEA

SEQ ID NO: 5752 - protein, 389 aa, Escherichia coli
TLQNGKLNVPENPITPYIEGDGIGVDVTPAMLKVVDAAGEKAYKGERKISWMEIYTGEKSTQVYGQDVWLPAETLDLIREYRVAIKGRMTTPDGGGIRSLNVALRQELDLYICLRPVRYYQGTPSPVKHPELTDMVIFRENSEDIYAGIEWKADSADAEKVIKFLREEMGVKKIRFPEHCGIGIKPCSEEGTKRLVRAAIEYAIANDRDSVTLVHKGNIMKFTEGAFKDWGYQLAREEFGGELIDGGPWLKVKNPNTGKEIVIKDVIADAFLQQILLRPAEYDVIACMNLNGDYISDALAAQVGGIGIAPGANIGDECALFEATHGTAPKYAGQDKVNPGSIILSAEMMLRHMGWTEAADLIVKGMEGAINAKTVTYDFERLMEGAKLL

SEQ ID NO: 5753 - protein, 173 aa, Flaveria pringlei
MASIPATVATVAQANMVAPFTGLKSNAAFPVTKKVNDFSTLASNGGRVQCMKVWPPLGKKRYETLSYLPNLTEVQLAKEVDYLLRNKWVPCLEFELEHGFVYRENARSPGYYDGRYWTMWKLPMFGCTDSAQVMKELQECKKEYPQAWIRIIGFDNVRQVQCISFIASKPDGF

SEQ ID NO: 5754 - protein, 208 aa, Kluyveromyces lactis
MSQAVGNVASIRRKLVIVGDGACGKTCLLIVFAKGKFPQVYVPTVFDNYVADVEVDGRRVELALWDTAGQEDYDRLRPLSYPDSNVVLICYSIDLPDSLENVMEKWISEVLHFCQGVPIILVGCKADLRNDPQVVEELRAQGLQPVSQAQAQEVADQIGAVDYIECSAKTGYGVREVFEAATRASLVGKQGKSKPKTKSSKKKKCVVL

SEQ ID NO: 5755 - protein, 332 aa, Bdellovibrio bacteriovorus HD100
MFAARYVPGKKELSLVEVPKPTPGPLDVILKIRAAGICHSDLHVLHGEVPYKESFTMGHEACGEVVEKGSEVFGTFNPGDLYAVHGPNPCGHCNYCRTGHDNLCNDPSRTFIGLGQDGAYAEYLKVPARNIVKVPKGISPEVAAVATDAVLTPYHAIKTKGGVGLGSKVLAIGLGGLGMNGVQIALALGAEVTAVDLKDANLETAKSFGVQKVLNSKQISSLTPLSFDVVVDFVGLESTFKDAQNFVKPGGTILLIGLGSAQVPLTTATAITFETKVQASFWGTHVEMQELYELIAEGKIKPQVETAPMKEVNHWLHELEAGRVKSRMALIP

SEQ ID NO: 5756 - protein, 389 aa, Escherichia coli
TLQNGKLNVPENPIIPYIEGDGIGVDVTPAMLKVVDAAVEKAYKGERKISWMEIYTGEKSTQVYGQDVWLPAETLDLIREYRVAIKGPLTTPVGGGIRSLNVALRQELDLYICLRPVRYYQGTPSPVKHPELTDMVIFRENSEDIYAGIEWKADSADAEKVIKFLREEMGVKKIRFPEHCGIGIKPCSEEGTKRLVRAAIEYAIANDRDSVTLVHKGNIMKFTEGAFKDWGYQLAREEFGGELIDGGPWLKVKNPNTGKEIVIKDVIADAFLQQILLRPAEYDVIACMNLNGDYISDALAAQVGGIGIAPGANIGDECALFEATHGTAPKYAGQDKVNPGSIILSAEMMLRHMGWTEAADLIVKGMEGAINAKTVTYDFERLMEGDKLV

SEQ ID NO: 5757 - protein, 219 aa, Brassica napus
LNRLHDRNETMYYKVLIANIEEYAPIVYTPTVGLVCQNYSGLFRRPRGMYFSSEDRGEMMSMVYNWPAEQVDMIVVTDGSRILGLGDLGIHGIGISVGKLDLYVAAAGINPQRVLPVMIDVGTNNEKLLKDPLYLGLQQHRLENDEYIEVIDEFMEAVFTRWPHVIVQFEDFQSKWAFKLLQRYRSRYRMFNDDVQGTAGVAIAGLLGAVRAQGRPMLD

SEQ ID NO: 5758 - protein, 453 aa, Arabidopsis thaliana
MEQGESLRIRVVMGKDRISELPDALLIKILSFLPTKIVVATSVFSKQWRPLWKLVPNLEFDSEDYDDKEQYTFSEIVCKSFLSHKAPVLESFRLEFESEKVDPVDIGLWVGIAFSRHLRELVLVAADTGTGTAFKFPSSLCTCNTLETLRLVLLILVDISSPVVMKSLRTLHLELVSYKDESSIRNLLSGCPILEELLVIRGEDSDIEVFTIDEVPSLKRLTINDDHDGQEFWGYVINAPSLKYLLIEDLRCPGFCLNAPELMEANIFDGTSITNDNFLGYLTSVKRLLLNLSPWKITYPTGSIFYQLVSLEMYTREIDWWDLLTLMLEHSPKLQVLKLTDNCVKFHKNGLPGGKWNEPKYVPECLLSHLETFVWRRFDWGREEEKEIATYILKNARRLNKATFSTNPVNSEELDKLKERRKVHNELDGVVRASNSCQFVFKFDTSYHVSDSS

SEQ ID NO: 5759 - protein, 488 aa, Listeria monocytogenes str. 1/2a F6854
MADVRKLKNYINGEWVESKTDKYEDVINPATGEVLCQVPISTRAELDQAAVIAEQAFEKWSQVAVPRRARVLFGFQQLLIQHKEELARLITLENGKNLSEARGEVQRGIENVEFAAGAPTLMMGDSLASIATDVEAANYRYPVGVVGGIAPFNFPMMVPCWMFPMAIALGNSFILKPSERTPLLMEKLVELFSEAGLPKGVFNVVYGAHDVVNGILENEIIKAVSFVGSKPVGEYVYKTGSANLKRVQALTGAKNHTIVLNDADLEDTVTNVISAAFGSAGERCMACAVVTVEEGIADEFLEALRTAAQNVKIGNGLDDGVFLGPVIREENQKRTIAYIEKGIEEGAKLTVDGRETGLSEGHFVGPTILEDVTTDMTIWKDEIFAPVLSVIRVKNLQEAVRVANQSEFANGACIFTNNAKAIRYFREKIDAGMLGVNLGVPAPMAFFPFSGWKSSFYGTLHANGKDSVDFYTHKKVVTARYSLKGYEE

SEQ ID NO: 5760 - protein, 369 aa, Oryza sativa (japonica cultivar-group)
MCMTLIMPGAPDVGSYYGEQWAPLAMSSLSSLFSYSPPGTAKYAAALASPSQQVSTTMPELETEGELKTLPAPMTIETTAAAAAAARSPEIVKVRSVWAHNLDEEANLIESLFPSFRLAAVDTEFPGTVHRPSAPAYTLTRKQKYALLKKNVDELHLVQLGLTLFDAGGRLPDLGTGGAARYVWEFNFREFDLRRHAHAPESIALLRSKGVDFDRTRRGGVDAAAFGPRLRRWLRAGLGRAGLVTFSGAYDLAYMLKMLYGGGGGGYRLPGDAATFEFVVRAVIGRTLYDVGKMARHCPGDMRGGLERVAGKLGVRRAVGEAHQAGSDSLLTSQMFMRMRERYFDDQDALTAVAGINFGYLNFTSCEYT

SEQ ID NO: 5761 - protein, 389 aa, Escherichia coli
TLQNGKLNVPENPIIPYIEGDGIGVDVTPAMLKVVDAAVEKAYKGERKISWMEIYTGEKSTQVYGQDVWLPAETLDLIREYRVAIKGPLTTPVGGGIRSLNVALRQELDLYICLRPVRYYQGTPSPVKHPELTDMVIFRENSEDIYAGIEWKADSADAEKVIKFLREEMGVKKIRFPEHCGIGIKPCSEEGTKRLVRAAIEYAIANDRDSVTLVHKGNIMKFTEGAFKDWGYQLAREEFGGELIDGGPWLKVKNPNTGKEIVIKDVIADAFLQQILLRPAEYDVIACMNLNGDYISDALASTVGGIGIAPGQTLGDECALFEATHGTAPKYAGQDKVNPGSIILSAKMMLRHMGWTETADLIVKGMEGAINAKTVTYDFERLMEGAKLL

SEQ ID NO: 5762 - protein, 436 aa, Bordetella pertussis Tohama I
MNLSDKKATLSFSDGSAPIEFPVYKGTVGPDVIDIRKLYGQTGMFTFDPGFMSTAACASGITYIDGDKGELLYRGYPIEQLAVNCDFLDICYLILNGELPNGGQKQDFDSQVTHHTMVNEQLHFFLRGFRRDAHPMAVLTGLVGALSAFYHDSTDITNPHHRHVSAIRLIAKMPTLVAMAYKYSQGQPFIYPQNDLSYTGNFLRMMCATPCEEYKVNDVVERALDRIFILHADHEQNASTSTVRLCGSSGTNPFAAIAAGVACLWGPAHGGANEACLQMLEELQANGGVAKVGEFMEKVKDKNSGVRLMGFGHRVYKNYDPRAKLMQETCKEVLVALGLENDPLFKLAMELERIALEDDYFVQRKLYPNVDFYSGIVQRAIGIPTSLFTAIFALARTVGWIAQWNEMLSDPDYKIGRPRQLFTGSVTRDVPGMDKR

SEQ ID NO: 5763 - protein, 500 aa, Burkholderia cepacia R18194
MTDLLSAPEYAALAAALRFPSGPFIDGAFRTASSGDTFATVNPATDAVLAQIGACNAADVDIAVANARQAFEDGRWRKLAPSHRKAVLLKFADLLEQHAHELATMESLDSGKPIRECQTIDVPETIHTIRWHAELIDKIYDNTAPVGGNALALVVREPIGVVGLVLPWNFPLLMLAWKIGPSLAAGCSIVVKPAKETTLTALRVAELAHEAGVPAGVFNVLPGGGREVGEPLGRHADVDMVSFTGSTDTGRKFLKYAAESNLKRIVLECGGKNPAVVLPDAPDLDAVAQHIVNGAFWNMGENCSASSRLIVHADIKDDLLQRIGTQMREWKMGNPLDPAHRIGAMVSKAHFEKVRSYLEQAGAEHLHVAFGGQTDGGIFVEPTVVDGVSPHSRLFREEIFGPVLSVTTFTDIAEAIALANDSVYGLAASVYTGSLNLAIRLSREIRAGVVTVNCFGEGDVTTPFGGYKESGFGGRDKSVWAHDQYTEIKTIWIDVPVDPA

SEQ ID NO: 5764 - protein, 434 aa, Bacillus halodurans C-125
MKKNDETSRNLIGLDQQHFIHPTSSMQQQQQHGPAHIFVRGKGVYLYDHDGKAYLDGMSSLWNVNVGHGRRELGEVAKKQMDTLAFSSCFATFSNKPAIELAAKLARVSPPSLRATFFTSGGSEANDTAFKLARHYWKVKDQPKKRKIIARMKSYHGVAMGATSATGLKPFRDFAPSLAPDFLHVDHMSIEALRALIDREGPETIAAFVCEPIQGAGGVHVAPDSYLCDIRSICDEYELLFIADEVITGFGRTGAYFGCDHANISPDMMCIAKGITSGYAPLGGVMLSKSLHEQLTAHSHGTLLHGYTYSGHPTSCAVALKNIQIIEEENLIDHAATMGEKLLLGFRTIQEQYSEIHDARGRGLMAALAFSHNGKNEPLAPKVVQAADQRGLILRAVTFDQQDVLVCAPPLIINEEELNQLLSILESSVQAVVS

SEQ ID NO: 5765 - protein, 464 aa, Listeria monocytogenes str. 4b F2365
MLYSKENKESYLEPVFGSSAEDRDIPKYTLGKEPLEPRIAYRLVKDELLDEGSARQNLATFCQTYMEDEATKLMSETLEKNAIDKSEYPRTAELENRCVNIIADLWHAPKNQKFMGTSTIGSSEACMLGGMAMKFAWRKRAEKLGLDIYAQKPNLVISSGYQVCWEKFCVYWDIDMRVVPMDKDHMQLNTDQVLDYVDEYTIGVVGILGITYTGRYDDIYALNEKLEEYNSKTDYKVYIHVDAASGGFFTPFVEPDIIWDFRLKNVISINTSGHKYGLVYPGIGWVLWKDESYLPEELIFKVSYLGGEMPTMQINFSRSASHIIGQYYNFLRYGFEGYRTIHQKTSDVAQYLAHAVEQTGYFDIYNDGSHLPIVCYKLKDDANVKWTLYDLADRLQMRGWQVPAYPLPKNLENIIIQRYVCRADLGFNMAEEFIQDFQASIQELNNAHILFHDTQQSGVHGFTH

SEQ ID NO: 5766 - protein, 519 aa, Zea mays
  misc_feature (144)..(144): Xaa can be any naturally occurring amino acid
LFLSSQSPITPAAQRAETGDALPSPHPPLVSWRRLGGCRCRCRPTSGGQVVLGHFAGDEYHKAVDTFSGIRGSMSNYYDDYDDIDEMEDDYDMDDPIDDMVDEQQGIRDSDAEDNDYGQPNDKIPDTSSADARKGRDIQGIPWXQINITRKKYRQSRLEQYKNYENVPNSGEEAMKDCKPTEKGGIYYEFRRNTRSVKSTILHFQLRNLVWATSKHDIYLVSHYSIRHWSALSGVDTELINVQGHVAPREKHAGSLLEGFYQTQVSTLTVKDNLLVAGGFQGELICKHLDQEGISFCCRTTYDDNAITNAVEIFNTSSGAVHFMASNNDSGVRYYDMERFQLFKHFQFEWPVNHASLSPDRKVVVIVGDDPDGLLIDANSGKTVHSIKGHRDYSFASAWSPDGRTFATGNQDKTCRIWDVRNLSKSVHVLRGNLGAIRSIRFTSDGQFMSMAEPADFVHIYDVKSDYNKRQELDFFGEISGTSFSPDTDTLFVGVWDRMYGSLLQFGRLYNYSYLDSLF

SEQ ID NO: 5767 - protein, 162 aa, Triticum aestivum
  misc_feature (81)..(81): Xaa can be any naturally occurring amino acid
  misc_feature (90)..(90): Xaa can be any naturally occurring amino acid
  misc_feature (100)..(100): Xaa can be any naturally occurring amino acid
  misc_feature (102)..(102): Xaa can be any naturally occurring amino acid
  misc_feature (110)..(110): Xaa can be any naturally occurring amino acid
  misc_feature (122)..(123): Xaa can be any naturally occurring amino acid
  misc_feature (147)..(147): Xaa can be any naturally occurring amino acid
MAPAVMASSATTVAPFQGLKSTAGLPVSRRSSGSLGRVSNGGRIRCMQVWPIEGIKNSETLSYLPPLSTEASLKQVDYLIXRSKWVPCLXFNKVGFSFRXAXSPPGYNDXPYWTMLELAIFXXTDPASLNKVEESKRIPDPIPLIGXTQFILNSIKHGSREG

SEQ ID NO: 5768 - protein, 186 aa, Aeropyrum pernix K1
MQALTTYKCIEKGIVVWLTGLPGSGKTTIATRLADLLQKEGYRVEVLDGDWARTTVSEGAGFTREERLRHLKRIAWIARLLARNGVIVICSFVSPYKQARNMVRRIVEEEGIPFLEIYVKASLEEVIRRDPKGLYKKALKGELENFTGITDPYEPPENPQLVLDTESNTIEHNVSYLYSLVKAVIE

SEQ ID NO: 5769 - protein, 400 aa, Bordetella pertussis Tohama I
MSTSQKKPTVQQKKPAAQPAEKAAFKPKKSVALSGVVAGNTALCTVGRTGNDLHYRGYDILDFAGSAEFEEIAHLLVHGKLPNKAELKAYKEKLRALRGLPAQLQNVLECLPASSHPMDVMRTAVSVLGCVLPEKDDHNTPGARDIADRLMANLGSALLYWYHYSHNGRIIDVQTDDDSIGGHFLHLLHGAKPSDEWVRAMHTSLILYAEHEFNASTFTGRVIAGTGSDMYSSITGAIGALRGPKHGGANEVAFEVQKRYETPDEAEADIRQRVENKEVIIGFGHPVYTVSDPRNKVIKDVAKKLSRKAGSTKMFDIAERLETVMWDIKKMFPNLDWFSAVSYHMMGVPTAMFTPLFVIARTAGWSAHIIEQRIDNKIIRPTANYVGPEDQTYVPISKRA

SEQ ID NO: 5770 - protein, 228 aa, Leuconostoc mesenteroides subsp. mesenteroides ATCC 8293
MSSSQDLQKIIAGRRAADFVQDGMVVGIGSGSTIAQVITALGERVANENLKIVGVPTSEKTRRNAAKLGIPMYNVDDVDKIDLTIDGADQISDDFSAIKGGGAALLWEKIVAFNSRENIWVVDSSKRVSKLNQYLPVEIIPYGSDQLFKRFTADGFHPTWRLDQNGNPVRTDSANYLIDLHVPVIEDPRDLGQELINMVGVVEHGLFTDVVNRVVIGSDDGVEIIEAP

SEQ ID NO: 5771 - protein, 429 aa, Brucella melitensis 16M
MQPRAGPSLPGAKRLPKERIAYIRRIAEIYESRLDEMAKTISMEMGAPIKLARESQAAAGLSHTKAFIAACENFEVEEVLSPKYPNQTVVHEPIGVCGLITPWNWPMNQITLKVIPAIAVGCTVVLKPSEIAPMSAMLFAEFVDQAGLPKGVFNLVNGEGPVVGEALSQHPEVDMMSFTGSTRAGTAVSRAAAATVKRVSLELGGKSPNIVFADSDLEKAISRSLAHCFENTGQSCNAPTRMLVERSVYDKAVELAKKAAESTKVGDPAQEGDHIGPLSSSIQFEKVQALIQKGIDEGARLVAGGTGRPEGFTEGDYVKPTVFADVNNNMTIAREEIFGPVLAMIPFDTEEEAIAIANDTPYGLAAYIQTGSPERAKRVARKLRAGMIQINGTSRAPGSPFGGYKQSGNGREGGKWGLEDFMEVKLISG

SEQ ID NO: 5772 - protein, 450 aa, Zea mays
  misc_feature (135)..(135): Xaa can be any naturally occurring amino acid
MAYAAGRKKRVGRYEVGRTIGQGTFAKVKFAVDADTGAPVAMKVLDKETIFAHRMLHQIKREISIMKIVRHPNIVRLNEVLAGKTKIYIILELVNGGELFDKIARYGKLRENEARKYFQQLIDAIDYCHSKGVYXHRDLKPQNMLLDSRGNLKVSDFGLSTLSQNGAGLLHTTCGTPNYVAPEVLSSNGYDGSAADIWSCGVILYVLMAGYLPFEENDLPHLYEKITAAKYSCPYWFSPGAKSLIQRILDPNPRTRITIEEIREDPWFEKNYVAIRCGEDENVSLDDVQAIFDNIEDKYVSDEVTHKDGGPLMMNAFEMIALSQGLDLSALFDRQQEFVKRQTRFVSRKPAKTVVATIEVVAESMGLKVHSRNYKVRLEGPASNRASQFAVVLEVFEVAPSLFMVDVRKVAGDTPEYHRFYENLCSKLCSIIWRPTEVSAKSTPLRTTTC

SEQ ID NO: 5773 - protein, 159 aa, Glycine max
SFYETLPCRVTKISDGYNMVMVTVEDGRNFVADAVIVTVPIGILKANLIEFSPKLPHWKAEAIKDIGMGNENKIALRFDAVFWPNVEVLGIVAPTSYACGYFLNLHKATGHPILVYMAAGKFAYDLEKLSDESAANFAMQQLKKMFPDASKPVSSPLML

SEQ ID NO: 5774 - protein, 327 aa, Yersinia pestis KIM
MVKKIGVLTSGGDAPGMNAAIRGVVRAALSAGLDVFGIEDGYLGLYENRMKKLDRYSVSDMINRGGTFLGSARFPEFRDPEVRKVALKNMHERGIDGLVVIGGDGSYAGADLLTKEGGIHCVGLPGTIDNDVAGTDYTIGFFTALETVVEAIDRLRDTSSSHQRISIVEVMGRYCGDLTLAAAIAGGCEFIAIPEVEFKRDDLVAEIKAGIAKGKKHAIVAITEKLDDIDSLAKYIEKETGRETRGTVLGHIQRGGAPVAYDRILASRMGAYAVDLLLQDHDYKKGGFCVGVQNEKMVHELISVCIAPENKKSKFKEDWYDTAKKLF

SEQ ID NO: 5775 - protein, 187 aa, Lycopersicon esculentum
VYDDDGKVFTTFDAYWEKSLSIQNEPVSQLPPWRLTQAAGSVKMCSVEGVGDLENESEKSSNALLGKGWAPGWRPIADKALTEFVESNLLAYSKDRLRVGGNSTSLLSPYLHFGEVSVRKVFNSVRLKQILWTKEGNSVGKDSATIYLRAIGLREYSRYISLNFPFTHERSLLNNLRFFPRNADQAH

SEQ ID NO: 5776 - protein, 272 aa, Rhodobacter sphaeroides 2.4.1
MTATLEFHDGSRIPQLGFGLWQVPEDRTAEVVREALELGYRLADGAAIYGNEEGLGHGLRTSGLPRDKVFVTTKVWNDAQGFESALRAVEESLKRLGLDRLDLCLIHWPAPKRNLYVETWRALIRLRDEGRITSIGVSNFDLDQIDRLTAETGVTPVLNQIELHPMLQQAELRAGHAERGIVTQSWSPLGRGMAFETPAIREIAERTGRSPAQVVLRWHIELGCAVIPRSTRRAGLAENLALFDFELTEADHAAISALDAGTRTGPDPQSFG

SEQ ID NO: 5777 - protein, 496 aa, Mentha spicata
MELQISSAIIILVATFVASLLIKQWRKSESRQNLPPGPPKLPLVGHLHLLWGKLPQHAMADMAKKYGPVTHVQLGEVFSVVLSSREATKEAMKLLDPACADRFESIGTRIMWYDNDDIIFSPYSDHWRQMRKICVSELLSARNVRSFGFIRQDEMSRLLRHLQSSAGETVDMTERIATLTCSIICRAAFGAIINDHEELVELVKDSLSMASGFELADLFPSSKLLNLLCWNKSKLWRMRRRVDTILEAIVDEHKLKKSGEFGGEDIIDVLFRMQKDSQIKVPITTNAIKAFIFDTFSAGTETSSTTTLWVMAELMRNPAVMAKAQAEVRAALKGKTSVDVDDVQELKYMKSVVKETMRMHPPIPLIPRSCREECEVNGYKIPNKARIMINVWSMGRNPLYWEKPETFWPERFDQVSRDFMGSDFEFIPFGAGRRICPGLNFGLANVEVPLAQLLYHFDWKLAEGMKPSDMDMSEAEGLTGIRKNNLLLVPTLYKSP

SEQ ID NO: 5778 - protein, 75 aa, Triticum aestivum
MCDRPAPVSSDDDGKLGDEEGVEIREVWANNLEAECAVIRDVGDDYGYMVMDTELPDIVCRPLGSFRSNDEYNYA

SEQ ID NO: 5779 - protein, 178 aa, Glycine max
  misc_feature (83)..(83): Xaa can be any naturally occurring amino acid
  misc_feature (86)..(86): Xaa can be any naturally occurring amino acid
  misc_feature (98)..(98): Xaa can be any naturally occurring amino acid
  misc_feature (113)..(113): Xaa can be any naturally occurring amino acid
  misc_feature (137)..(137): Xaa can be any naturally occurring amino acid
MASSMISAPAGTTVNRAGAGMVATFTGLKFMAGFRTRKTNSVITCIASNGGRVQCMQAWPPVGTKKTETLSYLPDLDDAQLAXKYXYLLRKGWIPCLXFELEHGLVFRDHNRXPRYYDGLYWTMSNLSIYSFADAFXVLNELHDAKTAYPNSFIHIIGFYNIHQLHYISFISYIPAVF

SEQ ID NO: 5780 - protein, 254 aa, Treponema pallidum subsp. pallidum str. Nichols
MHERNTTTNTPLDVTAQKLLVAQRSVDTLVQEGVLHAHMSIGLGTGSTAMPAVKRIADHLARGTLSDIAAVPTSFQTALICERYNIPLFSLSSKRIGGKLDVTIDGADEIDTQNFVIKGGGAALLQEKIAAYNSAHFVIIVDETKVVETLGTRAALPIEVVPEARMSVMRTLQDWGLSVHIREAVRKKGPVVTDHGNFILDARWQSLPTRTPQDMERALNALPGVIENGLFTERTVRVFVAHADGSVEERSASF

SEQ ID NO: 5781 - protein, 74 aa, Glycine max
MGFWTLLEGFLLFANALAILNEDRFLARRGWTLAEMTGPQRNSLKGQVIGLIYACQFLRLPLILFNVITIIVKL

SEQ ID NO: 5782 - protein, 155 aa, Glycine max
  misc_feature (126)..(126): Xaa can be any naturally occurring amino acid
  misc_feature (138)..(138): Xaa can be any naturally occurring amino acid
MEPMDIVGKSKEDASLPKATMTKIIKEMLPPDVRVARDAQDLLIECCVEFINLVSSESNEVCNREDKRTIAPEHVLKALQVLGFGEYVEEVYAAYEQHKLETMQDSLRGGGKWSNGAEMTEEEALXEQQRMFAEARAXMNGGAIAFKPAQMLTKS

SEQ ID NO: 5783 - protein, 425 aa, Ustilago maydis 521
MPFHNPLAKQPDSYVKKKEYDFKKTLGEGTFGIVRQATWKAADPPINVAVKVISKRILRGHDEIVKDEMNVLKGLDQPHVVKFLDWFESKDKYYLVFEEATGGELFERILSRGRFTELDACRTIRAVLSAIQYLHHHNIVHRDIKPENILYRTKAEDANVVLVDFGIAAHMKDDNEVLTSVCGSFGYAAPEILAKKGHGKAVDMWSLGVITYTMLCGYTPFRSDDAAALAAETQRGKVEFHDRYWKNVSNEAKDFVKACLTVDPKKRLTADQGMSHPWLTEHSEETQGVHDISAGLRENYRKRWKSAIAAVRASTKFRTFAQLASESRSGSQASLQTSDSSTAFADDPGKISPPTKRELYSESEDEQDGEDNQWFDTEDGSAARGNDATLADAASSQSENEPGWVEKLENKLDDLHLHSSSKSSE

SEQ ID NO: 5784 - protein, 389 aa, Escherichia coli
TLQNGKLNVPENPIIPYIEGDGIGVDVTPAMLKVVDAAVEKAYKGERKISWMEIYTGEKSTQVYGQDVWLPAETLDLIREYRVAIKGPLTTPVGGGIRSLNVALRQELDLYICLRPVRYYQGTPSPVKHPELTDMVIFRENSEDIYAGIEWKADSADAEKVIKFLREEMGVKKIRFPEHCGIGIKPCSEEGTKRLVRAAIEYAIANDRDSVTLVHKGNIMKFTEGAFKDWGYQLAREEFGGELIDGRPWLKVKNPNTGKEIVIKDVIADAFLQQILLRPAEYDVIACMNLNGDYISDALAAQVGGIGIAPGANIGDECALFEATHGTAPKYAGQDKVNPGSIILSAEMMLRHMGWTEAADLIVKGMEGAINAKTVTYDFERLMEGAKLL

SEQ ID NO: 5785 - protein, 210 aa, Shigella flexneri
LRPVRYYQGTPSPVKHPELTDMVIFRENSEDIYAGIEWKADSADAEKVIKFLREEMGVKKIRFPEHCGIGIKPCSEEGTKRLVRAAIEYAIANDRDSVTLVHKGNIMKFTEGAFKDWGYQLAREEFGGELIDGGPWLKVKNPNTGKEIVIKDVIADAFLQQILLRPAEYDVIACMNLNGDYISDALAAQVGGIGIAPGANIGDECALFEA

SEQ ID NO: 5786 - protein, 114 aa, Zea mays
  misc_feature (35)..(35): Xaa can be any naturally occurring amino acid
  misc_feature (86)..(86): Xaa can be any naturally occurring amino acid
WSASLKKTARFLVLLRRAGIRCDILAVLGCSDWSXAKRARMLAWSRWLKHMGPDWSGLYQHEGNFLAQQRLAVISTLTGDQTLFSXDRTVLAVANGEMDNHLNVLKQFTFTHNF

SEQ ID NO: 5787 - protein, 389 aa, Escherichia coli
TLQNGKLNVPENPIIPYIEGDGIGVDVTPAMLKVVDAAVEKAYKGERKISWMEIYTGEKSTQVYGQDVWLPAETLDLIREYRVAIKGPLTTPVGGGIRSLNVALRQELDLYICLRPVRYYQGTPSPVKHPELTDMVIFRENSEDIYAGIEWKADSADAEKVIKFLREEMGVKKIRFPEHCGIGIKPCSEEGTKRLVRAAIEYAIANDRDSVTLVHKGNIMKFTEGAFKDWGYQLAREEFGGELIDGGPWLKVKNPNTGKEIVIKDVIADAFLHQILLRPAEYDVIACMNLNGDYISDALAAQVGGIGIAPGANIGDECALFEATHGTAPKYAGQDKVNPGSIILSAEMMLRHMGWTEAADLIVKGMEGAINAKTVTYDFERLMEGAKLL

SEQ ID NO: 5788 - protein, 213 aa, Shigella flexneri
YICLRPVRYYQGTPSPVKHPELTDMVIFRENSEDIYAGIEWKADSADAEKVIKFLREEMGVKKIRFPEHCGIGIKPCSEEGTKRLVRAAIEYAIANDRDSVTLVHKGNIMKFTEGAFKDWGYQLAREEFGGELIDGGPWLKVKNPNTGKEIVIKDVIADAFLQQILLRPAEYDVIACMNLNGDYISDALAAQVGGIGIAPGANIGDECALFEA

SEQ ID NO: 5789 - protein, 289 aa, Salmonella enterica subsp. enterica serovar Typhi Ty2
MEYSILSNNLKMPMVGFGVFKVTDKEECQQSVLSAIRSGYRLIDTAAVYGNEDAVGDAVREAIATGLCTREELFITSKLWVQDMANYDLAKAGIEASLKKSGLDYFDLYLLHQAMGDYFSAWRALEDAYEAGKLKAIGVSNFYAHVLANFCETVRITPMVNQVELHPYFAQPAALETMKHYNVQPEAWAPLGGGRHKPYENVMLQRIADAHQKTIAQVVLRWNVQRGVTVIPKSTRQERIEENFAIWDFSLTDNEMAQINALDLGYVGEAVKHFNPEFVRGCLGVKIHD

SEQ ID NO: 5790 - protein, 492 aa, Candida albicans SC5314
MNVNPHLQYLQQQQQQQQQQQQQQQQSQPSQSNQSQSNQSPQFSQLQLQQLQRQQLLNQHLQQQQSQSQSSQVPPQLTQQSMGTPTSTNPLLAVLNGGANSNATSTGNGSLSSNPVLQQLQLQQLQQQVQLQQLQAQQQQQQQQQQQQQAIPIIKEVWSSNLEHEFQALRTFINDKTSKVFIAIHQEIPGIVARPVGTFKSSSDYHFQTLRANSDLLNLIQLSLCVIKISKNETISTPVIWQFNFLYDLTKEMYNEEHLAMLAQTSQINFQLLSTHGIPHFEFAELMIESGLILDDNINWVSFHAGYDLGFFVSLLSNDDLPVDEPDFYWWCAKYFPNFYDLKYIGNQILNKSTTNGAGGTNSNTLDEKTNKPSIEYLAEELHLLPISPAIRQHFTNSTFHSQQLTSTLHAYLSMECFKELLRRSNMTLLSSFKGTIWGLGTFSGGTSINNTNNNGVTEDEIVASRINGISTPSTPVGIISKSGMVHFGGRV

SEQ ID NO: 5791 - protein, 389 aa, Escherichia coli
TLQNGKLNVPENPIIPYIEGDGIGVDVTPAMLKVVDAAVEKAYKGERKISWMEIYTGEKSTQVYGQDVWLPAETLDLIREYRVAIKGPLTTPVGGGIRSLNVALRQELDLYICLRPVRYYQGTPSPVKHPELTDMVIFRENSEDIYAGIEWKADSADAEKVIKFLREEMGVKKIRFPEHCGIGIKPCSEEGTKRLVRAAIEYAIANDRDSVTLVHKGNIMKFTEGAFKDWGYQLAREEFGGELIDGGPWLKVKNPNTGKEIVIKDVIADAFLQQILLRPAEYDVIACMNLNGDYISDALAAQVGGIGIAPGANIGDECALFEATPGTAPKYAGQDKVNPGSIILSAEMMLRHMGWTEAADLIVKGMEGAINAKTVTYDFERLMEGAKLL

SEQ ID NO: 5792 - protein, 182 aa, Mesembryanthemum crystallinum
MASSLMSNAATTMAAATTTAQANMVAPFNGLKSISAFPVTRKNNDITSVASNGGRVQCMVWPPLGMKKFETLSYLPPLSEESLLKEVQYLLNNGWVPCLEFEPTHGFVYREHGNTPGYYDGRYWTMWKLPMFGCTDPSQVVAELEEAKKAYPEAFIRIIGFDNVRQVQCVSFIAYKPASYGA

SEQ ID NO: 5793 - protein, 592 aa, Zea mays
  misc_feature (93)..(93): Xaa can be any naturally occurring amino acid
  misc_feature (459)..(459): Xaa can be any naturally occurring amino acid
SKTSIKQLGRSLARATTSTVAALCFLLSCVSATPSTLAASSAIIHDIIRGLADTTAARVRTDAEATARAFTDFGTNATEDDAARPAAVFYPVXAADIAALLRASSASASPFPVSARGRGHSTRGQATAPGGVVVDMASLAVAAGRDETATTNASSTSASARLAVSVDGRYIDAGGEQLWVDVLHAALAHGLTPRSWTDYLRLTVGGTLSNAGISGQAFRHGPQISNVLELDVVTGTGDMVTCSKEKDADLFDAVLGGLGQFGIITRARIPLAPAPARARWLRLLYTGAADLTADQERLIADDERRGGALAGLMDYVEGSVVTDLQQGLIGSWRSQPPPSSSSLYSESATDAARIAALAEEAGGVLYFLEGAVYYGGASDTTAADVDKRVDVMLRELRYARGFAYVQDVSYEQFLDRVSAGERRLRGEGLWDVPHPWLNLFLPRSRILDFAAGVFHGVLXSPRPAAAAAGPGVVYPMNRGKWDGATSAVLPYDDGDGDEVFYTVGILRSAVADGDLRRMEEQNAEVARFCEAAGIPCTQYLPAYATQADWAARHFGPAGSGRWDTFLRRKRKYDPMAILSRGQRIFSSPLLAS

SEQ ID NO: 5794 - protein, 206 aa, Shigella boydii
YICLRPVRYYQGTPSPVKHPELTDMVIFRENSEDIYAGIEWKADSADAEKVIKFLREEMGVKKIRFPEHCGIGIKPCSEEGTKRLVRAAIEYAIANDRDSVTLVHKGNIMKFTEGAFKDWGYQLAREEFGGELIDGGPWLKVKNPNTGKEIVIKDVIADAFLQQILLRPAEYDVIACMNLNGDYISDALAAQVGGIGIAPGANIGD

SEQ ID NO: 5795 - protein, 132 aa, Glycine max
  misc_feature (32)..(32): Xaa can be any naturally occurring amino acid
  misc_feature (41)..(41): Xaa can be any naturally occurring amino acid
  misc_feature (77)..(77): Xaa can be any naturally occurring amino acid
  misc_feature (86)..(86): Xaa can be any naturally occurring amino acid
  misc_feature (107)..(107): Xaa can be any naturally occurring amino acid
YGCEKTTEGEGRIDMCLLRRASDDEEHSYMTXRILFMLKEXLSVGADYMRIDGIKAYAATYVTANMMLYARDMYLHXTPYATDAFXYTLIFERFFAQNSPMLTDTGXARVACSTYKAGEWDAACSTPLIPVA

SEQ ID NO: 5796 - protein, 286 aa, Aspergillus nidulans FGSC A4
MQGWKTIVGKLMSRYDFPLPDLSVQAEDKILGGVPTRIYTPPDVADPPLALYFHAGGWVMGSIDEEDGFVRTLCKLARTRIFSVGYRLAPEFRFPMALDDCLTVARSVLETYPVQSICFIGASAGGNMAFSTALTLVSDGLGDRVQGVVALAPVTVHPDSVSADNRDRGEYTSYEENDRLTINTGSAMRSFFDCYGAPPDDPRLSCLLHPGLGKLNKVYMAVGDADTLRDDVRLMRDALVALEVPVKCDEYPGYPHFSWLFPSPALREHQALFFGNLLSGICWVCE

SEQ ID NO: 5797 - protein, 389 aa, Escherichia coli
TLQNGKLNVPENPIIPYIEGDGIGVDVTPAMLKVVDAAVEKAYKGERKISWMEIYTGEKSTQVYGQDVWLPAETLDLIREYRVAIKGPLTTPVGGGIRSLNVALRQELDLYICLRPVRYYQGTPSPVKHPELTDMVIFRENSEDIYAGIEWKADSADAEKVIKFLREEMGVKKIRFPEHCGIGIKPSSEEGTKRLVRAAIEYAIANDPDSVALVHKGNIMKLTEGAFKDWGYQLAREEFGGELIDGGPWLKVKNPNTGKEIVIKDVIADAFLQQILLRPAEYDVIACMNLNGDYISDALAAQVGGIGIAPGANIGDECALFEATHGTAPKYAGQDKVNPGSIILSAEMMLRHMGWTEAADLIVKGMEGAINAKTVTYDFERLMEGAKLL

SEQ ID NO: 5798 - protein, 102 aa, Nicotiana tabacum
PNSYVFVVDMPGLKSGDINVQVEDDNVLLISGERKREEEKEGAKYIRMERRVGKFMRKFTLLENANTDAISAVCQDGVLTVTVQKLPPPEPKKPKTIEVKIA

SEQ ID NO: 5799 - protein, 337 aa, Petroselinum crispum
ILSPFKFSRRATGDNDVRFKVLYCGVCHSDLHMVKNEWGMTTYPIVPGHEIVGRVTEVGSKVEKFKVGDAVGVGCLVGSCLSCENCDDDSENNCAKQVQTYAFTNVDGSITYGGYADSMVADQHFVLRWPENLPLDSGAPLLCAGITTYSPLRYHGLDKPGTKVGVVGLGGLGHVAVKMAKAFGAHVTVISTSESKKQEALEKLGADEFLVSSDSDQMQAATGTLHGIIDTVSALHPVVPLLGLLKVNGKLVMVGAPEKPLELPVFPLLMGRKVLAGSNIGGLKETQEMLDFAAQHNITADVEVIPVDYVNTAMERLVKSDVRYRFVIDVANTIKTE

SEQ ID NO: 5800 - protein, 130 aa, Triticum aestivum
  misc_feature (40)..(40): Xaa can be any naturally occurring amino acid
MAPTVMASSATSVAPFQGLKSTAGLPVSRRSNGASSAASXNGGRIRCMQVWPIEGIKKFETLSYLPPLSTEALLKQVDYLIRSKWVPCLEFSKVGFIFREHNASPGYYDGRYWTMWNCYVRVTTHTVSTR

SEQ ID NO: 5801 - protein, 483 aa, Arabidopsis thaliana
MADLLRKVKSIKKKQDQSNHQALILGKYEMGRLLGHGTFAKVYLARNAQSGESVAIKVIDKEKVLKSGLIAHIKREISILRRVRHPNIVQLFEVMATKSKIYFVMEYVKGGELFNKVAKGRLKEEMARKYFQQLISAVSFCHFRGVYHRDLKPENLLLDENGNLKVSDFGLSAVSDQIRQDGLFHTFCGTPAYVAPEVLARKGYDGAKVDIWSCGVILFVLMAGFLPFHDRNVMAMYKKIYRGDFRCPRWFPVEINRLLIRMLETKPERRFTMPDIMETSWFKKGFKHIKFYVEDDHQLCNVADDDEIESIESVSGRSSTVSEPEDFESFDGRRRGGSMPRPASLNAFDLISFSPGFDLSGLFEDDGEGSRFVSGAPVGQIISKLEEIARIVSFTVRKKDCKVSLEGSREGSMKGPLSIAAEIFELTPALVVVEVKKKGGDKMEYDEFCNKELKPKLQNLSSENGQRVSGSRSLPSFLLSDTD

SEQ ID NO: 5802 - protein, 396 aa, Erwinia carotovora subsp. atroseptica SCRI1043
MLDNHTIAIVKSTIPLLAETGPKLTAHFYDRMFTHNPELKDIFNMSNQRNGDQREALFNAICAYATNIENLAALLPAVERIAQKHTSFNIQADQYQIVGNHLLATLDEMFSPGQEVLDAWGKAYGVLANVFIQREDDIYRSTETKTGGWSGVRPFRIVNKQLQSSVITSFTLEPTDGQPIADFQPGQYLAIYIKHDSFANQEIRQYSLTHAPNGKSYRIAVKREAQGTVSGYLHDTAREGDIVHLAAPHGDFFLDIPTDTPVALISGGVGQTPMLGMLHTLKQQDHQAKVLWLHAAENGTAHAFTDEIEQTGQALPHFDHHIWYREPQQTDRPGEDYHHSGLMQLASLKGELTTPDMHYYLCGPVVFMQFVAQQLLAMGIPAEQLHYECFGPHKVV

SEQ ID NO: 5803 - protein, 196 aa, Triticum aestivum
EGGKKSGGGGGGHGEKGSSKSAEQERRQGIAWTEDEHRLFLLGLEKYGKGDWRSISRNFVISRTPTQVASHAQKYFIRLNSMNRERRRSSIHDITSVNGEASAAQGPITGTNGQAAVPGKSPKQSPHQPGNLPPGVDAFGTTIGQPVGGPLVSAVGTLVTLPVAAPPHMGYAMHAPVPGTVVPRAPMYPMPPPPSR

SEQ ID NO: 5804 - protein, 127 aa, Streptomyces coelicolor A3(2)
MPTGKVKWFNSEKGFGFLSRDDGGDVFVHSSVLPAGVESLKPGQRVEFGVVAGQRGDQALSLALLDPAPSVAAAQRKKPDELASIVQDLTTLLENITPMLERGRYPEKTAGKKIAGLLRAVADQLDV

SEQ ID NO: 5805 - protein, 303 aa, Zea mays
  misc_feature (59)..(59): Xaa can be any naturally occurring amino acid
PPLDAPSSIPSRSSWRPTLLASIDVQSFNVDLLYEPWEVLDEDRRPFTMFAPLLPPLHXFWNRCLCMPDPAAPLLPPKRINSGDLSRCPWDELVFEDESERGSNALLARAWSPGWQNADKALTAFLNGPLMDHSVNRKKADSASTSLLSPYLHFGELSVRKVFHQVRMKRLMWSNDDNHAGEESCTLFLCSIGLREYLRYLTFNHPYSHEKPLLSHLRFFPWVVNEVYIIKVLENSDWIYIMPWGLYKAVTYVKEKYRDDRNAAEIFRANGDIIGLKSHCNSQLKVIGDGGDPNGHYDKDDHQ

SEQ ID NO: 5806 - protein, 500 aa, Mentha x piperita
MELQISSAIIILVVTYTISLLIIKQWRKPKPQENLPPGPPKLPLIGHLHLLWGKLPQHALASVAKQYGPVAHVQLGEVFSVVLSSREATKEAMKLVDPACADRFESIGTKIMWYDNDDIIFSPYSVHWRQMRKICVSELLSARNVRSFGFIRQDEVSRLLGHLRSSAAAGEAVDLTERIATLTCSIICRAAFGSVIRDHEELVELVKDALSMASGFELADMFPSSKLLNLLCWNKSKLWRMRRRVDAILEAIVEEHKLKKSGEFGGEDIIDVLFRMQKDSQIKVPITTNAIKAFIFDTFSAGTETSSTTTLWVMAELMRNPEVMAKAQAEVRAALKGKTDWDVDDVQELKYMKSVVKETMRMHPPIPLIPRSCREECEVNGYTIPNKARIMINVWSMGRNPLYWEKPETFWPERFDQVSRDFMGNDFEFIPFGAGRRICPGLNFGLANVEVPLAQLLYHFDWKLAEGMNPSDMDMSEAEGLTGIRKNNLLLVPTPYDPSS

SEQ ID NO: 5807 - protein, 301 aa, Archaeoglobus fulgidus DSM 4304
MRVTSPEIQRGIKVSELLDMFGSTAFNARRLGEAAKICEEMVKSDSFVFLTLAGAMIPAGMRKIVAGMMQNGFISSLVTTGANIVHEIVESLGIGHEIGSCYVDDTALAEESINRIYDVFVGQEAFERVEEFLSGIIEGLDGIYTTYEFLWEVGKRIPDERSFLRIAAEREIPVFCPTLHDSIAGLHMTIYRKNLQIDFFRDVSRIIDFCFQKRKMGVIVVGGGVPKNFTLQAMLLAEGFDYAVQITTDSPQWGGLSGATLEEAKSWCKLKPDAKAVTVYCDATIALPMLYAYLLDRCGES

SEQ ID NO: 5808 - protein, 106 aa, Nicotiana tabacum
PNCYIFIVDMPGTKANEIKVQVEDDNVLVVSGERKRDKEKKDEKESVKYLRMERRVGKFMRKFVLPENANIDSITAVCQDGVLKVTVEKLPPPERKKPKTIDVKLA

SEQ ID NO: 5809 - protein, 112 aa, Bartonella sp. Rf1554yn
ANEACLKMLQEIGSIKRIPEFIARAKDKNDPFRLIGFGHRVYKNYDPRAKIMQKTCHKVLKELNIQNDPLLDIAIELEKIALSDEYFIEKKLYPNVDFYSGIILKALGFPTE

SEQ ID NO: 5810 - protein, 498 aa, Mentha x piperita
MELLQLWSALIILVVTYTISLLINQWRKPKPQGKFPPGPPKLPLIGHLHLLWGKLPQHALASVAKEYGPVAHVQLGEVFSVVLSSREATKEAMKLVDPACANRFESIGTRIMWYDNEDIIFSPYSEHWRQMRKICVSELLSSRNVRSFGFIRQDEVSRLLRHLRSSAGAAVDMTERIETLTCSIICRAAFGSVIRDNAELVGLVKDALSMASGFELADMFPSSKLLNLLCWNKSKLWRMRRRVDTILEAIVDEHKFKKSGEFGGEDIIDVLFRMQKDTQIKVPITTNSIKAFIFDTFSAGTETSSTTTLWVLAELMRNPAVMAKAQAEVRAALKEKTNWDVDDVQELKYMKSVVKETMRMHPPIPLIPRSCREECVVNGYTIPNKARIMINVWSMGRNPLYWEKPDTFWPERFDQVSKDFMGNDFEFVPFGAGRRICPGLNFGLANVEVPLAQLLYHFDWKLAEGMKPSDMDMSEAEGLTGILKNNLLLVPTPYDPSS

SEQ ID NO: 5811 - protein, 342 aa, Oceanobacillus iheyensis HTE831
MKAVFVEDAEKIIVKDIEVPELKPNEVQIKVNVAGICGSDIHTYKGLHPFRKPPVVIGHEVAGEVVEVGSSVTKFKVGDRVTVEPQIGTGESEGVMTGNVNYSDTRLAPGMGDWLGTMAEYFASPEEQVIKLPDSVSYDQGVLVEPLAVGVHAAFKGDVQPTDRVAILGAGPIGLLTLIAVKAKGVKDIVVTDVLDYSLQVAKEMGASEVINIKDNSNWIHDAKQSLDKGSFDKVFITAGVPGIVNDSLNLLRKGGRVVTVAMFHGQQSVDIEQLQQNEKEIIGCMTYNRPDTEEALEIIASGKLDVEKVISHKLHYEEAAKGFTIVDKKKDKSVKVLVSFE

SEQ ID NO: 5812 - protein, 101 aa, Rickettsia sp. Bar29-like
GSSEYIPKYIAKAKDKNDPFRLMGFGHRIYKNYDPRAAVLKETCKEVLKELGQLDNNPLLQIAIELEAIALKDEYFIERKLYPNVDFYSGIIYKAMGIPSQ

SEQ ID NO: 5813 - protein, 112 aa, Bartonella sp. Rf1561yn
ANEACLKMLQEIGSIKRIPEFIARAKDKNDPFRLIGFGHRVYKNYDPRAKIMQKTCHKVLKELNIQDDPLLDIAIELEKIALSDEYFIEKKLYPNVDFYSGIILKALGFPTE

SEQ ID NO: 5814 - protein, 337 aa, Streptococcus pyogenes SSI-1
MKRIAVLTSGGDAPGMNAAIRAVVRKAISEGMEVYGINRGYAGMVDGDIFPLGSKEVGDKISRGGTFLYSARYPEFAQLEGQLAGIEQLKKHGIEGVVVIGGDGSYHGAMRLTEHGFPAVGIPGTIDNDIAGTDYTIGFDTAVNTAVEAIDKLRDTSSSHGRTFVVEVMGRNAGDIALWAGIASGADQIIVPEEEFDIEKVASTIQYDFEHKGKNHHIIVLAEGVMSGEAFAQKLKEAGDKSDLRVTNLGHILRGGSPTARDRVIASWMGSHAVELLKEGKGGLAVGIHNEELVESPILGTAEEGALFSLTEEGQIIVNNPHKARLDFAALNRSLSQ

SEQ ID NO: 5815 - protein, 108 aa, Brassica napus
  misc_feature (91)..(91): Xaa can be any naturally occurring amino acid
FEAFQLGMAPVYMAFLRFMGDENDARNYSYSLEVGANGRKMIWEGTPRSIRDSHRKVRDSHDGLIIQRNMALFFSGGERKELKLRVTGRIXKEQQNPDSGACIPNLFS

SEQ ID NO: 5816 - protein, 280 aa, Triticum turgidum subsp. durum
MKTLLILTILAMATTIATANMQVDPSGQVQWPQQQPFPQPQQPFCEQPQRTIPQPHQTFHHQPQQTFPQPEQTYPHQPQQQFPQTQQPQQPFPQPQQTFPQQPQLPFPQQPQQPFPQPQQPQQPFPQSQQPQQPFPQPQQQFPQPQQPQQSFPQQQQPAIQSFLQQQMNPCKNFLLQQCNHVSLVSSLVSIILPRSDCQVMQQQCCQQLAQIPQQLQCAAIHSVAHSIIMQQEQQQGVPILRPLFQLAQGLGIIQPQQPAQLEGIRSLVLKTLPTMCNVY

SEQ ID NO: 5817 - protein, 122 aa, Zea mays
KLAGCSRVSDHRRGTKARDNRCVNESIAMASRLVAAAASSSSSLSSASPLARLISRRGLAGAADGHGSAKVPLWKDPLSPSKWKEEHFVLASLSMWGVIFYGGYKLFSGKKEAKTEAASPQA

SEQ ID NO: 5818 - protein, 73 aa, Glycine max
PTRPPTRPCGCEKTTEGGLGWERYYDGDPDLYQFHKHSSIDLISLPKDFSKFNSINMYDIVIKNPNVFHVRDK

SEQ ID NO: 5819 - protein, 179 aa, Triticum aestivum
  misc_feature (91)..(91): Xaa can be any naturally occurring amino acid
  misc_feature (104)..(104): Xaa can be any naturally occurring amino acid
  misc_feature (133)..(133): Xaa can be any naturally occurring amino acid
  misc_feature (136)..(137): Xaa can be any naturally occurring amino acid
  misc_feature (144)..(144): Xaa can be any naturally occurring amino acid
  misc_feature (146)..(146): Xaa can be any naturally occurring amino acid
  misc_feature (151)..(151): Xaa can be any naturally occurring amino acid
MAPTVMASTATSVAPFQGLKSTAGLPVSRRSSSAGLSSVSNGGRIRCMQVWPIEGIKKFETLSYLPPLSTEALLKQVDYLIRSKWVPCLEXFSKVGFVFREHNXSSPGYYDGRYWTMWKAAYVRGGTDATQVXNEXXREVKKEXPXDAYVXVIGFRTGAKLRLIRFKGQPGLPKEWERA

SEQ ID NO: 5820 - protein, 723 aa, Glycine max
MDFTSFLTSLGTSFVIFLVLMIVFAFLSSRPGNNVVYYPNRILKGLDPLEGGYKSRNPFSWIKEALTSSERDVIAMSGVDTAVYFVFLTTVLSILVLSGVILLPVLLPLSVTDHGMKTQTTSNGTFSELDKLSMANITAKSSRLWGFFIACYWVSIVTFALLWRAYKHVSWLRAEALKSPDVKPEQFAIVVRDIPHVPQGQTRKEQVDSYFRDIYPETFYRSMIVTDNKVVNKIWESLEKYTKKLARAEAVYAGSKTTAKPEGTRPTNKTGFLGLVGKKVDTIEYCNEKINELEARLESEQKVTLREKQQDAAVVFFSSRVVAASASQSLHAQMVDTWSVFDAPEPNQLIWPNLKIKYFQRELRQYLVYFIVALTIFFYMIPITFISALTTLDNLVKYLPFIKPIVNIKALKTVLEAYLPQLALIIFLALLPKLLLFLSKFEGIPTESHAVRAASGKYFYFTVLNVFIGVTIGGTLFKAFKRIREHPTLDEISSLLAESLPGNATFFLTYVALKFFIGYGLELSRIVPLIIYHLKRKYLCKTEAELKEAWRPGDLGYGTRVPGDMLIVTIVFCYSVIAPVIIPFGALYFGLGWLVLRNQALKVYVPTFESYGRMWPHIHNRILASLILYQITMFGYFGTQKFYYTPLVLPLPILSLVFGFVCAKKFYPAFQHPALEVAANTLKEVPNMELIFGAYIPPSLRSEKIDGDRVEDALSQASRTTPV

SEQ ID NO: 5821 - protein, 445 aa, Pseudomonas aeruginosa UCBPP-PA14
MQSLLIRNARMVNEGQVREGDLLVRHGRIERIAGCLENCGASREIDAAGRYLLPGMIDDQVHFREPGYPQKGSIASESRAAVAGGITSFMDMPNTRPATLSLEALAEKKRLAAAHSVANYGFHFGVSRDNLDTVAALDPRDVAAVKVFMGASTGDMLVDDLPTLERLFASVPTLLLSHCEDTPRIEANLARWRQRFGERIPAAAHPRIRDAEACYRSTALAVELAQRHGTLLHVLHLSTARELALFEDKPLCQKRITAEVCVHHLLFDDSDYARLGHLLKCNPAIKSREDRDALRRALAGNRLDVIGTDHAPHAWAEKQQAYPQAPAGLPLVQHALPALLELVREGWLSLATLVAKTSHRVAELFAIADRGFLREGYWADLVLVSELEHPALASAMPLLSRCNWTPFRHRAFHHRIDTTIVSGQLAWHAGRLSDDCQGLPLRFSR

SEQ ID NO: 5822 - protein, 197 aa, Shigella flexneri
PVRYYQGTPSPVKHPELTDMVIFRENSEDIYAGIEWKADSADAEKVIKFLREEMGVKKIRFPEHCGIGIKPCSEEGTKRLVRAAIEYAIANDRDSVTLVHKGNIMKFTEGAFKDWGYQLAREEFGGELIDGGPWLKVKNPNTGKEIVIKDVIADAFLQQILLRPAEYDVIACMNLNGDYISDALAAQVGGIGIAPGA

SEQ ID NO: 5823 - protein, 423 aa, Triticum aestivum
  misc_feature (413)..(413): Xaa can be any naturally occurring amino acid
MPLSGMAIAFKASTSACTAQQLWGHPTRDQCQHGFTHLNERKSRKGSAALHARAIPGNLDLDFGDPSWKQKYQEDWDRRFSLPHITDVFDLEPCRSAFPRSTHASPRGASDASSPDKWNGYVNKDDRALLKVSDYASNTSAGAECIDPDCSWVEHWVHRAGPRKEIYYEPEEVKAAIVTCGGLCPGLNDVIRQIVFTLEIYGVKNIVGIQFGYRGFFEKGLKEMPLSREVVENINLAGGSFLGVSRGGAKTSEIVDSIQARRIDMLFVIGGNGSHAGANAIHEECRKRKLKVSVVAVPKTIDNDILFMDKTFGFDTAVEEAQRAINSAYIEARSAYHGVGLVKLMGRSTGFIAMHASLSSGQIDVCLIPEVSFTLDGEHGVLAHLEHLLETKGFCVVCVAEGAGQDLLQKSNXTDASGNVILS

SEQ ID NO: 5824 - protein, 389 aa, Escherichia coli
TLQNGKLNVPENPIIPYIEGDGIGVDVTPAMLKVVDAAVEKAYKGERKISWMEIYTGEKSTQVYGQDVWLPAETLDLIREYRVAIKGPLTTPVGGGIRSLNVALRQELDLYICLRPVRYYQGTPSPVKHPELTDMVIFRENSEDIYAGIEWKADSADAEKVIKFLREEMGVKKIRFPEHCGIGIKPCSEEGTKRLVRAAIEYAIANDRDSVTLVHKGNIMKFTEGAFKDWGYQLAREEFGGELIDGGPWLKVKNPNTGKEIVIKDVIADAFLQQILLRPAEYDVIACMNLNGDYISDALAAQVAGMGIAPGANIGDECALFEATHGTAPKYAGQDKVNPGSIILSAEMMLRHMGWTEAADLIVKGMEGAINAKTVTYDFERLMEGAKLL

SEQ ID NO: 5825 - protein, 226 aa, Clostridium beijerinckii
MKLIIDDVNIEKIKDVFSIFQIDGVTSNPSILHKYGKQPYEILIKIREFIGENSELHVQVISESSEGMLKEAHKIIKELGKNTYVKIPVTRDGLKAIKILRKEEINVTATAIYTQMQAYLAGKAGAQYAAPYVNRIDNLGANGVQVAKDIHDIFEKNNFKTEVLAASFKNSQQVLELCKYGIGAATISPDVIEGLIKNDCVDVAVENFKKDFEILCGQGNTMLNCR

SEQ ID NO: 5826 - protein, 218 aa, Shigella boydii
QELDLYICLRPVRYYQGTPSPVKHPELTDMVIFRENSEDIYAGIEWKADSADAEKVIKFLREEMGVKKIRFPEHCGIGIKPCSEEGTKRLVRAAIEYAIANDRDSVTLVHKGNIMKFTEGAFKDWGYQLAREEFGGELIDGGPWLKVKNPNTGKEIVIKDVIADAFLQQILLRPAEYDVIACMNLNGDYISDALAAQVGGIGIAPGANIGDECALFEA

SEQ ID NO: 5827 - protein, 399 aa, Bacillus anthracis str. Sterne
MYWNDGNEGSEYRMISHLFQTYGRRTVEFVKGNGTKVIDNNGKQYLDFTSGIGVCNLGHCHPTVMKAVQEQLNDIWHISNLFTNSLQEEVASLLTENIALDYVFFCNSGAEANEAALKLARKHTGKSLVVTCEQSFHGRTFGTMSATGQNKVKEGFGPLLPSFLHTPFNDIKALKEVMNEEVAAVMVEVVQGEGGVIPADLSFLKEIETLCKKFGSLFIIDEVQTGIGRTGTLFAYEQMGIDPHIVTTAKALGNGIPVGAMIGRKELGTSFTAGSHGSTFGGNYVAMAAAKEVLQVSKRLSFLKEVQEKGEYVLQKLQEELQHVECIQNIRGKGLMVGIECTHEVASFIEQLEKEGLLVLQAGPNVIRLLPPLIVTNEELEQAVYMIKKVVCTKNVSII

SEQ ID NO: 5828 - protein, 535 aa, Glycine max
MGSISHVITTTLPHLPSTRSLGFPISHSNSRLLSLPPTRVAKQVGVFAELVSRSSTASFASVDFSVHDWKIQFHEDCQLRRPPPHLTDIFPNAPPIPSTFCLKMRTPIDRDFPGHYSLDEEWHGYINNNDRVLLKTIYYSSPTSAGAECIDPDCTWVEQWVHRAGPREKIYYKPEEVKAAIVTCGGLCPGLNDVIRQQIVITLEIYGVKNIVGIPFGYRGFSDKELTEVPLSRKVVQNIHLSGGSLLGVSRGGPGVSDIVDSLEKRGINMLFVLGGNGTHAGANAIHHECRKRRLKVSVIGVPKTIDNDILLMDKTFGFDTAVEEAQRAINSAYIEAHSAYHGIGVVKLMGRSSGFIAMQASLFSGQVDICLIPEVPFNLHGPHGVLSHLKYLLETKGSAVVCVAEGAGQNLLQKTNATDASGNVVFGDIGVYIQQETKKYFKEIGVHADVKYIDPTYMIRAIRANASDGILCTVLGQNAVHGAFAGYSGITVGLCNTHYVYFPIPEVISHPRLVDPNSRMWHRCLTSTGQPDFI

SEQ ID NO: 5829 - protein, 314 aa, Aspergillus nidulans FGSC A4
MSLADTTYKLNTGAEIPALGLGTWQSAPGEVSAAVYHALKVGYRHIDAAQCYGNETEVGEGIKRALSEGIVKRSEIFVTTKLWCTYHTRIQQALDLSLSKLGLDYVDLYLVHWPLAMNPNGNHDLFPKLPDGSRDLVREHSHVTTWKGMEELITNNPDKVKAIGVSNYSKRYLEQLLPQAKIVPAVNQIENHPALPQQEIVDLCKEKGILITAYSPLGSTGSPLFKAEAIVAVAERRGVTPASVLLSWHLARGSSVLAKSVTPSRIEENRKLVKLEPEDVELIGKYSAELAATNGFQRYVYPPFGVDFGFPDKS

SEQ ID NO: 5830 - protein, 213 aa, Shigella dysenteriae
DLYICLRPVRYYQGAPSPVKHPELTDMVIFRENSEDIYAGIEWKADSADAEKVIKFLREEMGVKKIRFPEHCGIGIKPCSEEGTKRLVRAAIEYAIANDRDSVTLVHKGNIMKFTEGAFKDWGYQLAREEFGGELIDGGPWLKVKNPNTGKEIVIKDVIADAFLQQILLRPAEYDVIACMNLNGDYISDALAAQVGGIGIAPGANIGDECALF

SEQ ID NO: 5831 - protein, 303 aa, Arabidopsis thaliana
MALKFSGAYKQCKPCTGSSSSPLKKGHRSFPDYDNASEGVPYPFMGGSAGSTPAWDFTNSSHHPAGRLESKFTSIYGNDRESISAQSCDVVLDDDGPKEWMAQVEPGVHITFASLPTGGNDLKRIRFSREMFDKWQAQRWWGENYDKIVELYNVQRFNRQALQTPARSDDQSQRDSTYSKMDSARESKDWTPRHNFRPPGSVPHHFYGGSSNYGPGSYHGGPPMDAARTTTSSRDDPPSMSNASEMQAEWIEEDEPGVYITIRQLSDGTRELRRVRFSRERFGEVHAKTWWEQNRERIQTQYL

SEQ ID NO: 5832 - protein, 278 aa, Mycoplasma gallisepticum R
MITRMNHSKINWFPGHMKKTLDDINKIKKHIDLVIQVLDARAINLTSNPDLLEIFKQKKIINVALKSDLADLSYQYDPETIVTNIRDHQFSNFLLNKLHQILSDKIKRLQAKGLVTPHFNIMVIGLPNIGKSSLINKLIKKNHNKVENKAGVTKRQTFVKLNKNFTLYDTPGVLYKRIDDFILGAKLSLLNVINLEVIPMQEVLSFAYSYLNQYYHNQLLEWAKQEIIPEQFHEFIEQYAHKKGFLNKNNAIDLNATYMNFYQDISLAKIAKVNYEKN

SEQ ID NO: 5833 - protein, 204 aa, Shigella dysenteriae
RPVRYYQGAPSPVKHPELTDMVIFRENSEDIYAGIEWKADSADAEKVIKFLREEMGVKKIRFPEHCGIGIKPCSEEGTKRLVRAAIEYAIANDRDSVTLVHKGNIMKFTEGAFKDWGYQLAREEFGGELIDGGPWLKVKNPNTGKEIVIKDVIADAFLQQILLRPAEYDVIACMNLNGDYISDALAAQVGGIGIAPGANIGDEC

SEQ ID NO: 5834 - protein, 313 aa, Agrobacterium tumefaciens str. C58
MLELLWSGQTATKITAEDIRSQLGKARLRAFELMQLLFPGLAALTSVEALRLLLSWLPDDETTPHHLVAVAAVPVFATAIIRNRQGFAPIAPDASLTHSADFLRMLSGTLPSTEKVRALDTYLTTVADHGLNASTFTARVIASTGAGLFSSVVGALCALKGPLHGGAPGPVLDMLDAIGAEAEIEPWLLDALGRGERLMGFGHRIYRVRDPRADVLKHAVSTLKEGSDRIAFAGKVEEAALALLKEKKPLRPLQTNVEFYTALVLEAVGFPRDSFTNVFAAGRMAGWTAHVLEQERTGRLIRPQSHYIGPHPR

SEQ ID NO: 5835 - protein, 235 aa, Nostoc punctiforme PCC 73102
MTGTDPVKLMKQEVGKAAAALVKSGSIVGLGTGSTTAYTIQFLGDRLKSGELKDIIGIPTSFQSEVLAKQYGVPLATLDSIDHIDIAIDGADEVDPQKNLIKGGGAAHTREKVVDYLAEQFIVVVDSGKLVDRLGSSFAVPVEVIPMAITPVTNAIKKLGGKPELRMGVKKAGPVITDQGNFVLDVRFDSIEDPVSLEKTLNNIPGVLENGIFVNCVDLVLIGEVKDGQPLVRQL

SEQ ID NO: 5836 - protein, 466 aa, Triticum aestivum
NSARAAGKRLWDAGVRDLLILEATGRVGGRMHKHNFGGLNVEIGANWVEGLNGDKVNPIWPMVNASLQLRNFYSDFDGVVGNVYKESGGLYDEEFVQKRMDRGDEVEELGGKLAAEMDPSGRDDISILAMQRLFNHQPNGPATPVDMVLDYFRYDYEFAEPPRVTSLQGTEPTATFADFGDDANFVADQRGFETLIYHIAGQYLRSDKSGNIVDPRVKLNKVVREISYDQRGVVVTTEDNSAYSADYVIVSASIGVLQSDLIQFKPQLPAWKILAIYRFDMGVYTKIFLKFPRKFWPTGPGKQFFVYASSRRGYYGMWQSFEQEYPGANVLMVTVTDVESRRIEQQPDNVTMAEAVGVLRNMFPDRDVPDATDIYVPRWWSNRFFKGSYSNWPVGVNRYEYDQLRAPVGGRVYFTGEHTSEHYNGYVHGAYLAGIDSADILMNKVLNNVEFKVRPKYDEEQKAEAK

SEQ ID NO: 5837 - protein, 116 aa, Glycine max
  misc_feature (56)..(56): Xaa can be any naturally occurring amino acid
FVSDQRGCNYFLHKMAEVFLFPSQERMLDIRLKPNKVARELQYSQSGVTLQTENGXVCDTNYVILSDSIGVFQSDVMSLQSPLTRVCSILCPTLTSRKYTSAVVFFHTKNTRLFFQ

SEQ ID NO: 5838 - protein, 335 aa, Aspergillus nidulans FGSC A4
MGSNGNNGPAYAPEWQHFITELGDPLLMRGETVAELYENSNENIQKLLAKYDFPPTDKSVTTEDITLKNGVWVRIYTPPAADFNATMADSDSGKEEKITVFMHGGGWIMGSVDHEDSAVRQLCRAVGHKIVSVGYRLAPKHKYPVALDDCLQATLWTLENFASSAPSVSLMGGSAGANLAFGVALRLLDSGLGDKFKGVHALVPCVVHPEAVPEPKREQFTAYEENAEATVNTLACMRCFLDSYGPPPDDIYFSVLLHPRIGDLKRVYIVECGTDTLRDDARLMRDALIEKGVDVRYDAYPGLPHYFWSYPAKALEGVSGVFHANMYRALQWIHE

SEQ ID NO: 5839 - protein, 389 aa, Escherichia coli
TLQNGKLNVPENPIIPYIEGDGIGVDVTPAMLKVVDAAVEKAYKGERKISWMEIYTGEKSTQVYGQDVWLPAETLDLIREYRVAIKGPLTTPVGGGIRSLNVALRQELDLYICLRPVRYYQGTPSPVKHPELTDMVIFRENSEDIYAGIEWKADSADAEKVIKFLREEMGVKKIRFPEHCGIGIKPCSEEGTKRLVRAAIEYAIANDRDSVTLVHKGNIMKFTEGAFKDWGYQLAREEFGGELIDGGPWLKVKNPNTAKKIVIKDVIADAFLQQILLRRPEYDVIACMNLNGDYISDALAAQVGGIGIAPGANIGDECALFEATHGTAPKYAGQDKVNPGSIILSAEMMLRHMGWTEAADLIVKGMEGAINAKTVTYDFERLMEGAKLL

SEQ ID NO: 5840 - protein, 483 aa, Pseudomonas sp. ND6
MTVQLVIDNQKQSASDGKTFERIDPLSSHAVSVGAACSVEDALRAAQSSERAFQTWSGTGPTERRRILLAAADALEAKMADFCSAMAEEIGASQLWAQFNVGASANLLREAAAMTTQIKGETIPTDKPGALSMTLRQPVGTVLSIVPWNGPVILGARAIAYPLACGNTVIFKGSESSPRTHALLAEAFYEAGLPAGVLNFLISAPEDAAAVTEALVAHDTVRRVNFTGSTKVGRMIAQTCASHLKRCLLELGGKAPFIVLDDADIEGAVNAAVFGAFLYQGQICMSTERFVVDEAVADAFVARFAERVNALETGLPAKSPGCVIGPMIGQGSVQRINHLLDDAVNKGAKIVTGGLAETALMGPTLVDCVTREMAIYDEETFGPVTTIVRVKGAEQALAVANDTAYGLSSSIFSRDVTKALGLASRLDAGCVHINGATVQNEPQAPYGGMKKSGYGRFDGNAVIEEFTEVKWVTVEPSGQPYPF

SEQ ID NO: 5841 - protein, 280 aa, Methanothermobacter thermautotrophicus str. Delta H
MAIGKESLEQVFRAGSPRWRTSITRVEPNRIVTRGYSQEDLIGGVSFSEMVYLLIRGELPPQNVARMLEAVLVSFCDHGVTPPSTQAARMIASAGSPVHACIAGGLLAFGKNHAGAIERSMKLFQETVSSCESEDEIPDAALRLVDDHLQANRRIPGFGHRYHNADPRAVRLLELAEDYGCVGPHTSLALEVQEILLERKGVRMNVDGANAGILSDMGFDWRTGAGVFMIGRLPGLISHVYEEKVREPAFRKFFEIEEIQYDGEEERDLSAGADLEPMPE

SEQ ID NO: 5842 - protein, 616 aa, Zea mays
MDSDYGVPRELSEVQKKRALYQPEVPPCLQGTTVRVEYGDAAIAADQAGAHVISHAFPHTYGQPLAHFLRKTAVVLDAKVISEHPVVRVGIVFCGRQSPGGHNVVWGLYEAIKAHNQNSKLIGFLGGSDGLLAQRTLEITNEVLASYKNQGGYDMLGRTKDQIRTTEQVNGAMASCQALKLDALVIIGGVTSNTDAAQLAETFAEAKCATKVVGVPVTLNGDLKNQFVETTVGFDTICKVNAQLISNVCTDALSAEKYYYFIRLMGRKASHVALECALQSHPNMVILGEEVAASKLTIFDITKQICDAVQARAEKDKNHGVVLIPEGLVESIPELYALLQEIHGLHGKGVSVENISSQLSPWASALFEFLPPFIRKQLLLHPESDDSAQLSQIETEKLLAQLVETEMNRRLKEGTYKGKKFNAICHFFGYQARGALPSKFDCDYAYVLGHVCYHIIAAGLNGYMATVTNVKSPVNKWRCGAAPISSMMTVQRWSRGPSATQIGKPAVHMASVDLKGKAYDVLRQNSSRFLLEDVYRNPGPLQFEGPGADSKPISLCVEDQDYMGRIKKLQEYLEKVKSIVKPGCSQDVLKAALSAMSSVTETLNIMTSSSTGQTAL

SEQ ID NO: 5843 - protein, 289 aa, Photorhabdus luminescens subsp. laumondii TTO1
MSQKEIWSETLHANFGQYFSVDKVLYHDKTEHQDLIIFENATLGRIMALDGTVQTTERDEFIYHEMMAHVPLFAHGNAKRVLIIGGGDGGMLREVCRHQYLESITMVEIDAGVVEFCRQYLPNHNAGAYDDPRFNLIIDDGVNFVNTTDQKFDVIISDCTDPIGPGEGLFTSEFYQGCQRCLNEGGIFVAQNGVCFLQQDEAVTSHKKLSNYFADSGFYQAAIPTYYGGIMTFAWASQNPALRHVDLATLQQRFDNASFTCRYYNPAVHVGSFALPQYLLDALFTGCTI

SEQ ID NO: 5844 - protein, 302 aa, Triticum aestivum
MKTLLILTILAMATTIATANMQVDPSGQVQWPQQQPFPQPQQPFCQQPQRTIPQPHQTFHHQPQQTFPQPQQTYPHQPQQQFPQTQQPQQPFPQPQQTFPQQPQLPFPQQPQQPFPQPQQPQQPFPQSQQPQQPFPQPQQQFPQPQQPQQSFPQQQQPAIQSFLQQQMNPCKNFLLQQCNHVSLVSSLVSIILPRSDCQVMQQQCCQQLAQIPQQLQCAAIHSVAHSIIMQQEQQQGVPILRPLFQLAQGLGIIQPQQPAQLEGIRSLVLKTLPTMCNVYVPPDCSTINVPYANIDAGIGGQ

SEQ ID NO: 5845 - protein, 104 aa, Oryza sativa (japonica cultivar-group)
MVDAKGRLLDRATMEEDLFWAIRGGGGRNFGIVLSWKLRLVPIPATVTVFTVHRSRNQSATNLLIKWQHVASSLPNDAFLRVVVPLYRVPASSPPWPTPSWSST

SEQ ID NO: 5846 - protein, 381 aa, Staphylococcus aureus subsp. aureus MSSA476
MLTEQEKDIIKQTVPLLKEKGTEITSIFYPKMFKAHPELLNMFNQTNQKRGMQSSALAQAVMAAAVNIDNLSVIKPVIMPVAYKHCALQVYAEHYPIVGENLLKAIQDVTGLEENDPVIQAWAKAYGVIADVFIQIEKEIYDQMMWIGFKPFKITNIKQESEDIKSFTVETEEYDFSEFTPGQYITVDVSSEKLPYRAKRHYSIVSGEKNHLTFGVKRDVTTEHEGEVSTILHDEIKEGDMINLAAPVGGFVLENTTEPQLFLGSGIGVTPLVAMYEAASAKGLDTQMVQVAENEQHLPFKDNFNSIASHHDNAKLYTHLKDKQGYIGAEELQAFLANKPEIYICGGTKFLQSMIEALKSLNYDMDRVHYETFIPRLSVAV

SEQ ID NO: 5847 - protein, 262 aa, Hypocrea lixii
MGHEDAVYLAKLAEQAERYEEMVENMKIVASEDRDLTVEERNLLSVAYKNVIGARRASWRIVTSIEQKEESKGNSSQVTLIKEYRQKIENELAKICDDILEVLDQHLIPSAKSGESKVFYHKIKGDYHRYLAEFAIGDRRKDSADKSLEAYKAATEVAQTELPPTHPIRLGLALNFSVFYYEILNAPDQACHLAKQAFDDAIAELDTLSEESYKDSTLIMQLLRDNLTLWTSSEAETPARLMPLLRRRPLLRLPSRRRRAQG

SEQ ID NO: 5848 - protein, 213 aa, Zea mays
MGCFHSTAKRQHPGYEDPVHLASQTSFSVSEVEALFELFKSISGSVIDDGLINKEEFQLALFKNQRKENLFANRIFDLFDVKKRGAIDFGDFVRALNVFHPNIPMDEKIDFSFKLYDMDSTGFIERKEVKQMLIALLGESEMRLSDDIIETILDKTFSDADANQDGKIDRTEWENFVTRNPSLMKIMTLPYLKDITTTFPSFVFNSEVDDLVT

SEQ ID NO: 5849 - protein, 351 aa, Staphylococcus aureus subsp. aureus MSSA476
MKALVKTREGHGNLELLDKEVATPLDDKVKIKVHYAGICGTDIHTYEGHYKVNFPVTLGHEFSGEIVEVGADVKDFKVGDRVTSETTFYVCNECEYCKSKDYNLCNHRKGIGTQVDGAFTNYVIAREESLHHIPDEVSYQSAAMTEPLACAHHGVSKIQVNSGDVAVVMGPGPIGLLVAQVLKSKGATVVVTGLDNDKVRLDKAEALHMDYVVNLQQTDLKTYINGITDGYGADVVVECSGAVPAARQGLDILRKKGFYSQIGIFKDAEIPFDMEKVIQKEITVVGSRSQKPADWEPSLQLMADGLVNAEALVTKIYDISKWDEAYQHLKSGEGIKALLKPLDLDENEGEN

SEQ ID NO: 5850 - protein, 462 aa, Bacillus subtilis subsp. subtilis str. 168
MPDQLTVYNPATGEEIKTIPQQSATEVEEAIERSHQAFKTWSKTSANERTSLLKKWYELIVEHKEELADLITKENGKPYQEAVGEVLYGAGYIEWFAEEAKRVYGRTVPAPTTGKRIVVTRQPVGPVAAITPWNFPNAMITRKAAPALAAGCTFIIKPAPDTPLSAYELARLAYEAGIPKDVLQVVIGDGEEIGNVFTSSPKIRKITFTGSTPVGKILMKNSADTVKHVSMELGGHAPLIVDEDADIDLAVEQAMASKYRNAGQTCVCANRLIVHESIKDEFAAKLSEQVSKLKVGNGLEEGVNVGPIINKRGFEKIVSQIDDAVEKGAKVIAGGTYDRNDDKGCYFVNPTVLTDVDTSMNIMHEETFGPVAPIVTFSDIDEAIQLANDTPYGLAAYFFTENYRRGIYISENLEYGIIGWNDGGPSAVQAPFGGMKESGIGREGGSEGIEPYLETKYLSIGL

SEQ ID NO: 5851 - protein, 168 aa, Malus x domestica
MAGHSESKSIHDFTVKDAKGNDVDLSTYKGKVLLIVNVASQCGLTNSNYTELAQLYEKYKTQGLEILAFPCNQFGAQEPGTNDEIVEFACTRFKAEYPIFDKVDVNGDNAAPIYKFLKSSKGGLFGDSIKWNFSKFLVDKEGKVVDRYAPTTSPLSIEKDVKKLLGVA

SEQ ID NO: 5852 - protein, 205 aa, Shigella dysenteriae
PVRYYQGAPSPVKHPELTDMVIFRENSEDIYAGIEWKADSADAEKVIKFLREEMGVKKIRFPEHCGIGIKPCSEEGTKRLVRAAIEYAIANDRDSVTLVHKGNIMKFTEGAFKDWGYQLAREEFGGELIDGGPWLKVKNPNTGKEIVIKDVIADAFLQQILLRPAEYDVIACMNLNGDYISDALAAQVGGIGIAPGANIGDECAL

SEQ ID NO: 5853 - protein, 439 aa, Nostoc punctiforme PCC 73102
MLESLGRIKNPLVRSIAAAATVSSVITLSAAVVIGVSNAKAKSAYQFGVYSSLFGTASGAVFGLVYTNKASGNKSTPDLKTLDSHVWQDWRNFVVVRKVKESEEITSFYLQPEDKGEITNFQPGQFLTIKLDIPGQDKPVIRTYSLSDYPENCEYYRLSIKREPAPNGLDVMPGIASNFMHDRIQEGSVILAKPPNGKFVLDVQKSIPAVLISNGVGITPMISMAKACSLLNPTRPIWFVHGARDGKFHAFRDEVREISRQNHNLNVHFRYSRPTPEDRGKYHSVGYVDAALIQELVRQEAEYFLCGSPSFMQSIMQGLKESGVPDSRVFFESFGKPMKSVSEKQTQTVTGDDKFAEIVFAKSGKTLTWQPSDGTILEFAEANDINPPFSCRVGVCGTCMCKIREGVVAYQEEPTATTDQGSVLICISQPGTSKLVLDI

SEQ ID NO: 5854 - protein, 289 aa, Populus alba
EENWAEEVREDWFQDELEGESYCSNNSNKLNTFPILLEQDLSWEDEELSSLFAKEEQNQLCKDLETNPSLARARCEAVEWILKVNEHYSFTALTAVLAVNYLDRFLFSVHLQKEKPWMAQLAAVSCLSLAAKVEETQVPLLLDFQVEDSKYVFEAKTIQRMEILVLSTLKWKMNPVTPISFLDYITRRLGLEHYLCLEFLKRCERMVLSILADSRSMPYVPSVMAAATMLYVIDNIKPSLAAEYQSQLLSILGIDKDKVEDCSKFLMEFALREHFKLLSNKRKFCSLPG

SEQ ID NO: 5855 - protein, 389 aa, Escherichia coli
TLQNGKLNVPENPIIPYIEGDGIGVDVTPAMLKVVDAAVEKAYKGERKISWMEIYTGEKSTQVYGQDVWLPAETLDLIREYRVAIKGPLTTPVGGGIRSLNVALRQELDLYICLRPVRYYQGTPSPVKHPELTDMVIFRENSEDIYAGIEWKADSADAEKVIKFLREEMGVKKIRFPEHCGIGIKPCSEEGTKRLVRAAIEYAIANDRDSVTLVHKGNIMKFTEGAFKDWGYQLAREEFGGELIDGGPWLKVKNPNTGKEIVIKDVIADAFLQQILLRPAEYDVIACMNLNGDYISDALAAQVGGIGIAPGANIGDECALFEATHGTAPKYAGQDKVNPGSIILSAEMMLRHMGWTEAADLIVKGMEGAINAKTVTYDFERLMDGAKLL

SEQ ID NO: 5856 - protein, 193 aa, Triticum aestivum
MPSTFCRRRSRRPTVAPANSSRENFWVLIRGEEMSDSEEHQFESKADAGASKTYPQQAGTIRKNGYIVIKNRPCKVVEVSTSKTGKHGHAKCHFVAIDIFTGKKLEDIVPSSHNCDVPHVNRTEYQLIDISEDGFVSLLTDNGNTKDDLKLPTDETLLGQIKDGFAEGKDLVVSVMSAMGEEQINALKDIGPK

SEQ ID NO: 5857 - protein, 218 aa, Shigella dysenteriae
LDLYICLRPVRYYQGAPSPVKHPELTDMVIFRENSEDIYAGIEWKADSADAEKVIKFLREEMGVKKIRFPEHCGIGIKPCSEEGTKRLVRAAIEYAIANDRDSVTLVHKGNIMKFTEGAFKDWGYQLAREEFGGELIDGGPWLKVKNPNTGKEIVIKDVIADAFLQQILLRPAEYDVIACMNLNGDYISDALAAQVGGIGIAPGANIGDECALFEATH

SEQ ID NO: 5858 - protein, 3471 aa, Bacillus thuringiensis serovar konkukian str. 97-27
MKKSLKCFNVVTIIALLLSITLPSPSAFAEINKKNWDELHGNDVRIKAEQVNAEIYRGEVAEREHVFQYTIENTGDTPIQELVLKQNNENEITFLSQSMKVNGEKLPENKVADFYVEEKDKGGKLLSSNLKIRDLKSHEKMTVLIKASRTQHFNKEYKQKISVQKDQVQIGSMSFDVEGIPSEDKVEATADDEADSSKKSVVPSVNNTTKKVDEKLKVSVEDTNKPTSNTELVKQPVTEAEKQPEKEVAKQSDAEVQAASENASKVQIQVGDKQGFGDPLYSTIAAGNLVQTGNVTLGLTTDHYGRQSLGYKTNKMTVDVDNDDSTFNSSTGAFPTIPAGSKVKKAYLFWTAAMGVPGNITDRKVTEDQVRQPVKMKMGNKQYAEVSADSIRKADYLPYISNYSGSGAGYVAYADVTNVIAQQGISQTLTVANVPQIKDVTGGGYYWGNWNLILVYENYKETVKDMKIWEGLVSQKSTAWTDVSVNKINTPKEGAFKAKFSYFSSQGDPAEKDGYAYDYGEYDFDAGYIKIKNINGKDNDANDSSMTEVQVDGTNEFVTKKYPGYNPDWTNSFSTDIHTYHFEGPNQVKNDLKEAKMRFRANGATGDIYVLNNATFVTEHNAPNLQVDKKALDSAGKEIKEVKAGEEITYKIEVKNDTKNNQAPVSNVKGFDKLDDRLEYVPGSIQYVTGSNTGQKTDDASDDEAEFVNNQIDFRIGEGADAKDGGVLKPGESAVLTFKVKVKESIKSDTTVKNVVAVKGQDSAEIKYESEDDANVTVTIPKEVPGEIEARKIASNKSPKLGDEVEYRITFKNKVKDGRLDVLTIEDELPSSLEFVKDSLKAEGVQPEPVELKFENGKIIAKYPAITDMEERSIVFKTKVKETAKIGEEIVNKAIVSDKTNPPKNIEEKITPQHKAGKIDAKKKATNKKPKLGEEFEYQISFNNTVENGKLEAVTIEDEIPANLEFIQGSERAEGAGPSPVELKVENGKVIAKYPAITDTKERSIIFKVKVKEEAKAGETIVNKAVVSDPNGQSEHPEEKVTPDYKDGKVDVDKSVTNQTPKLGEEVEYRITFHNTVENGKLEKVMIEDTLPAGVEYVKDSLKAEGIKPEPVELKMENGKIIAKYPEITDTEKRSIVFKVKVKDSAKVGEAIVNKAIAKDPKHDPVDAKVVITPQSKKGEIAATKVVNNEKPKLGEEIEYRISFHNTVENGKIAEVRVEDTIPKGLEYVENSIKAEGEAPSPVELTVEAGVVKAKYIDITDTKERSIVFKVKVKEEVEVGKEIVNKAIVDDTKHQPIEPEERITPQHKDGIINAAKIVDNPSPKLGEEVEYRISFKNTVENGKLEKVKIEDTIPNGLEYVKGSEKAEGDKPAPVKLHVKDGKVIAEYENITDTKERSIVFTVKVKEEAEIGKEIVNQAIVDDTKDSKKPEAKITPLHKDGKIKAKKSVNNETPKLGEEVEYRISFKNTVENGKLAEVKIEDTLPEGLEYVENSLKAEGAGPNPVELKMENGKVLAKYPEITDIEERSITFKVKVKEEVKVGEKIVNKAIVDDTKHDPINPKAEITPQYKDGKIEAEKVVNNPSPKLEEEVEYRISFKNTVEHGKLAEVIIEDDLPNGLEYVKGSLQAEGSKPNPVELKFENGKVLAKYPEITDTKERSITFKVKVKGNVSDTIINQAIVSDTKHPPETPKAEIIPQHKDGKLEAKKVVNNLLPKLGEEVEYRISFKNTLENGKLAEVKIEDTLPEGLEYVENSLKAEGAGTDSVELKFENGKILAKYPEITDTKERSITFKVKVKDEVKIGGKIVNKAIIDDTKKEPETPTAEITPQHKDGKVEAEKTVNNPSPKLGEEIEYRISFKNTVENGKLAEVKIEDTLPNGLEYVKDSLQAEGSKPNPVELKVKDGKVIAKYPAITDIEERSIVFKAKVKEDFKVGEGIVNKVVVDDTKDPKTREVTVTPEYKDGKLKAEKFVNNKKPKLGEEVEYRINFKNTVENGKLVEVKVEDEIPAGLEYVENSLQAEGSKPSPVELKFENGKVMAKYPVITDTKERSIVFKAKVKEEAEIGKEIVNKAIVVDTTHEPEKPYVEITPQYKDGKIVAEKVANNHKPKLGEEVEYRIRFKNTVESGKLAEVNIKDTLPKGLEYVEGSITAEGSKPKPVELKVENGKVTAKYPAITDTEERSIVFKAKVKESVKAGEEIVNEAIVDDTKNVPEEPYVPITPQYKDGKIEARKEVSNYEPKLGEEIEYRIIFNNTVKDGKLAEVKIEDEIPAGLEFVQGSEKAEGAEPKPMELKVENGKVIATYAEIMDTEERSIVFKVKVKESVTIGKAITNKAIIHVDDPNHPIIEPTAKITPQYKDGKIIAHKKVNNDKPKLGEEIEYRISFSNTVKDGKLAEVKIEDEIPSGLEYVKDSLKAEGDEPAPVELKEEAGKVTAKYENITDTKERSIIFKVKVKDSVEVEKAIVNKAIVDDTKNPPERPEVDITPQHKDGKVKADKKVSKKDPKLGEEVEYRISFKNTVENGKLAELKIEDQLPAGLEYVKDSLKAEGNEPNPVELKEEAGKITAKYENITDTAERSISFKVKVTEAVKVGKTIVNKAIVDDHNPKNPPQKPEAIITPEYKDGKLKAEKTVNNPAPKLGEEVEYRITFRNVVEHGKVAKVKIKDELPTGLEFVEGSERAEGENPKPLHVKVKNGIVLAEYPEIVDTKERSIIFKVKVKEKAKVGEEIVNTAVVEDTINPPEQPNIAIQPQYKDGALQAEKTVSNQEPKLGEEVEYRISFENTVENGRLTEVKVEDEIPAGLEYVQDSIKSDGPEPDPVELKVENGKVTAKYPEITDMKKRSIIFKVKVQETVQVGKEIINKAIVDDNNPTTPPVESLIPITPQYKDGKLEARKEVSNHEPKLGEEIEYRITFNGTVDGGKLVDVKIEDEIPAGLEYVKDSLEAVGDKPVPTELKVENGKVTAKYPEITDTKERSIIFKAKVKETVKVGGEITNKAIIHVDDPNHPVIEPTATIKPEYKDGKLKAAKAVSNKEPKLGEEVEYRISFKNTVENGKVAEVKVEDEIPAGLEYVQDSLRFEGAEPNPVELKVEFGKVIAKYLDIADRKERSIIFKAKVKETVETGEKIVNKAIVGDTINQPEEPVVSITPQYKDGMLKAEKEVSNKEPKLGEEVEYRISFKNTVENGKLAEVKIEDQLPDGLEYVKDSVKAKGAIEVKVENGKLTAKYENIIDTKERNITFKVKVKEKAGEEIVNRAIVDDGINQPLEPTVSIKPKEPEVKPEDPKEPEVKPEDPKEPEVKPEDPKEPEVKPEDPKEPEVKPEDPKEPEVKPEDPKEPEVKPEDPKEPEVKPEDPKEPEVKPEDPKEPEVKPEDPKEPEVKPEDPKEPEVKPEDPKEPEVKPEDPKEPEVKPEDPKEPEVKLEKPEVRLEKLIKEPQVKVERELPKTGAASPWMVSVGAGISFLVGGVLFVLGRRRKQ

SEQ ID NO: 5859 - protein, 389 aa, Escherichia coli
TLQNGKLNVPENPIIPYIEGDGIGVDVTPAMLKVVDAAVEKAYKGERKISWMEIYTGEKSTQVYGQDVWFPAETLDLIREYRVAIKGPLTTPVGGGIRSLNVALRQELDLYICLRPVRYYQGTPSPVKHPELTDMVIFRENSEDIYAGIEWKADSADAEKVIKFLREEMGVKKIRFPEHCGIGIKPCSEEGTKRLVRAAIEYAIANDRDSVTLVHKGNIMKFTEGAFKDWGYQLAREEFGGELIDGGPWLKVKNPNTGKEIVIKDVIADAFLQQILLRPAEYDVIACMNLNGDYISDALAAQVGGIGIAPGANIGDECALFEATHGTAPKYAGQDKVNPGSIILSAEMMLRHMGWTEAADLIVKGMEGAINAKTVTYDFERLMEGAKLL

SEQ ID NO: 5860 - protein, 507 aa, Zea mays
MDSPPLQPTVFSLILALILVLYLALRRRGGGKNRSYPPVAGTVLHQLFNFGRLMEYQTALSRRYRTFRMLTPTCSYIYTVEPANVEYILKANFGNYGKGSTLHELSEDLLGDGIFNVDGAKWRHQRKVASHEFSTRVLRDYSTGVFRDTAAELAGIVAAAAAAAGEKLDMQELLMRSTLDSIFKVGFGVSLGVLSGSSEEGAAFAKAFDDASEQVLRRFLDPFWKAKRFLNFSSEAAMKRSLRTINGFVYAVVDRKIEQMERDQQEFVSPEDITSPFLVERESDPGCSDNKYLRDIILNFVIAGRDTTAGTLSWFLYVLCRNQSIQDRIAQEVRAATSGDGGLGAPELVACLTEDAISKMHYLHAALTETLRLYPSVPIDVKCCFSDDTLPDGYAVKKGDMVNYQPYQMGRMRFLWGAGAEEFRPERWLDDAGVFVPESPFKFTAFQAGPRVCLGKEFAYRQMKIFAAALLYLFRFEMWDANATVGYRAMLTLKIDRPLYLRTSLRR

SEQ ID NO: 5861 - protein, 271 aa, Zea mays
  misc_feature (66)..(66): Xaa can be any naturally occurring amino acid
  misc_feature (141)..(141): Xaa can be any naturally occurring amino acid
  misc_feature (206)..(206): Xaa can be any naturally occurring amino acid
  misc_feature (213)..(213): Xaa can be any naturally occurring amino acid
MLMKALSLLCRTSLSLHRKAAFLMPPKVLITSGSGRVGGRVGGRVGGRVGCAPLMLRLAWHSAGTXFDVATKTGGPFGTMKNPAEQAHGANAGLEIAIRLLEPIKEQFPILSYADFYQLAGVVAVEVTGGPDVPFHPGRQXKPEPPPEGRLPDATQGSDHLRQVFSTQMGLSDQDIVALSGGHTLGRCHKDRSGFEGAWTSNPLIXFDNSYFXELLSGEKEGLLQLPSDKALLSDPSFHPLVDKYAADEDAFFADYAEAHLKLSELGFVEA

SEQ ID NO: 5862 - protein, 199 aa, Shigella dysenteriae
PVRYYQGAPSPVKHPELTDMVIFRENSEDIYAGIEWKADSADAEKVIKFLREEMGVKKIRFPEHCGIGIKPCSEEGTKRLVRAAIEYAIANDRDSVTLVHKGNIMKFTEGAFKDWGYQLAREEFGGELIDGGPWLKVKNPNTGKEIVIKDVIADAFLQQILLRPAEYDVIACMNLNGDYISDALAAQVGGIGIAPGANI

SEQ ID NO: 5863 - protein, 496 aa, Pastinaca sativa
MIGVWCMLLAYTLVSIGRIRAKATRKLPPGPFPLPIIGNIHKLGKHPHKSLANLAQVYGPIMRLKLGHMTTVVISSSTTARQVLRKQDIAFSNRALPNAVRALDHNKYSAVWLPVGSQWRGLRKIMSMNLFTANKLDANQHLRSQKVHDLIRYCEKCSQSGEAVDIGGAAFLTSLNLMSNTIFSKDMIDSYENSEAKVFRDLVWNIMVEIGKPNLVDYFPLLQWMDPQGIKRRLAYNFDTLIKLFDVMVDERLELNGPQNSRDVLDELLKLVNTDEIDKSHIQHMFLDLFGAGTDTSSSTVEWAMSEILRKPATVLVKAKAELDQVIGNGKIVEEADISKLDYLRCIVKETLRLHPPAPLLVPRQVQEEVELCGYTVPKNSQVLVNAWAIGRDPMLWENPLSFQPERFVDSEIDINGHGYELIPFGAGRRICPGMPLAMRMVPIMLGSLLNCFDWKLQGGIAPEDLNMEDKFGLTLAKLHPLRVVPTSRPTHLFAF

SEQ ID NO: 5864 - protein, 388 aa, Escherichia coli
TLQNGKLNVPENPIIPYIEGDGIGVDVTPAMLKVVDAAVEKAYKGERKISWMEIYTGEKSTQVYGQDVWLPAETLDLIREYRVAIKGPLTTPVGGGIRSLNVALRQELDLYICLRPVRYYQGTPSPVKHPELTDMVIFRENSEDIYAGIEWKADSADAEKVIKFLREEMGVKKIRFPEHCGIGIKPCSEEGTKRLVRAAIEYAIANDRDSVTLVHKGNIMKFTEGAFKDWGYQLAREEFGGELIDGGPWLKVKNPNTGKEIVIKDVIADAFLQQILLRPAEYDVIACMNLNGDYISYALAAQVGGIGIAPGANIGDECALFEATHGTAPKYAGQDKVNPGSIILSAEMMLRHMGWTEAADLIVKGMEGAINAKTVTYDFERLMEGAKL

SEQ ID NO: 5865 - protein, 212 aa, Shigella dysenteriae
LDLYICLRPVRYYQGAPSPVKHPELTDMVIFRENSEDIYAGIEWKADSADAEKVIKFLREEMGVKKIRFPEHCGIGIKPCSEEGTKRLVRAAIEYAIANDRDSVTLVHKGNIMKFTEGAFKDWGYQLAREEFGGELIDGGPWLKVKNPNTGKEIVIKDVIADAFLQQILLRPAEYDVIACMNLNGDYISDALAAQVGGIGIAPGANIGDECA

SEQ ID NO: 5866 - protein, 285 aa, Xylella fastidiosa Dixon
MTTKDTWFTEHFQATGSAIGFRVTGKLDEVQSPFQKIEIYNSTDWGKLMVIDGALMLTSRDNFIYHEMISHPALFTHTAPKCVVIIGGGDCGTLREVLKHPDIEQVTQCDIDEQVTRMAEKHFPELCTSNNDPRATLLFSDGVAYMADCPTNSVDVIIVDSTDPIGPAKGLFNRTFYESCFRALKNDGLLIQQSESPLALLELIKEMRHEMSKAGFKAFKTLPFPQPCYPTGWWSVTLSSKQPNANFAFRQTDAQTKPFDTLYYNAHLHHGVLAPPPFIAHALGE

SEQ ID NO: 5867 - protein, 389 aa, Escherichia coli
TLQNGKLNVPENPIIPYIEGDGIGVDVTPAMLKVVDAAVEKAYKGERKISWMEIYTGEKSTQVYGQDVWLPAETLDLIREYRVAIKGPLTTPVGGGIRSLNVALRQELDLYICLRPVRYYQGTPSPVKHPELTDMVIFRENSEDIYAGIEWKADSADAEKVIKFLREEMGVKKIRFPEHCGIGIKPCSEEGTKRLVRAAIEYAIANDRDSVTLVHKGNIMKFTEGAFKDWGYQLAREEFGGELIDGGPWLKVKNPNTGKEIVIKDVIADAFLQQILLRPAEYDVIACMNLNGDYISDALAAQVGGIGIAPGANIGDECALFEATHGTAPKYAGQDKVNPGSIILSAEMMLRHMGWTEAADLIVKGMEGAINAKTVTYDFERLMEGDKLL

SEQ ID NO: 5868 - protein, 389 aa, Escherichia coli
TLQNGKLNVPENPIIPYIEGDGIGVDVTPAMLKVVDAAVEKAYKGERKISWMEIYTGEKSTQVYGQDVWLPAETLDLIREYRVAIKGPLTTPVGGGIRSLNVALRQELDLYICLRPVRYYQGTPSPVKHPELTDMVIFRENSEDIYAGIEWKADSADAEKVIKFLREEMGVKKIRFPEHCGIGIKPCSEEGTKRLVRAAIEYAIANDRDSVTLVHKGNIMKFTEGAFKDWGYQLAREEFGGELIDGGPWLKVKNPNTGKEIVIKDVIADAFLQQILLRPAEYDVIACMNLNGDYISDALAAQVGGIGIAPGANIGDECALFEATHGTAPKYAGQDKVNPGSIILSAEMMLRHMGWTEAADLIVKGMEGAINAKTVTYDFERLMEGAKLL

SEQ ID NO: 5869 - protein, 300 aa, Oryza sativa (japonica cultivar-group)
MGGGVMRTAAAKVGIAGGAAAAAAAAGGGRFRHVAPAFATAASAEAAAPTLVSAAGGGGGGEVPAVAASGAQWASSWEVDDWEFADWRDVAAAEPEVTAAGKPRLVFAPPSREEAEEATTELRDAIDRVYFSEAPIEVVKEQDKDLSKLGADAIIPAMPGHVMQAFTLLKSSPEAQGVVASLASDKNVWDAVLKNEKVMEFYKTHQQSLVYTFPEGTASVVSPEKLADASSENSSSGEKPESSPFADFMDNARKTVIDIVNNITNFFQDMFRKPNEAEILGGSFMALAIAVILLIMFKKA

SEQ ID NO: 5870 - protein, 190 aa, Glycine max
MPLILAKSDSIQIREVWNDNLEEEFALIREIVDNYPYIAMDTEFPGIVLRPVGNFKNSYDYHYQTLKDNVDMLKLIQLGLTFSDEHGNLPMCGGDDEESDTCCCIWQFNFREFNVNEDVFANDSIELLRQSGIDFKRNNENGIDAHRFGELLMSSGIVLNDNIHWVTFHSGYDFGYLYELLTCQALPDTQ

SEQ ID NO: 5871 - protein, 441 aa, Pseudomonas putida KT2440
MALTREQQIAALEKDWAENPRWKGVTRTYTAADVVRLRGSVQPEHTFARQGAEKLWKLVTEGAHPSFRPDKDFVNCMGALTGGQAVQQVKAGIQAIYLSGWQVAADNNSAESMYPDQSLYPVDSVPTVVKRINNAFRRADQIQWKAGKNPGDDGYIDYFAPIVADAEAGFGGVLNAYELMKNMIEAGAAGVHFEDQLASVKKCGHMGGKVLVPTQEAVQKLVAARLAADVSGVPTIILARTDANAADLLTSDCDPYDQPFVVGERTREGFYKVRAGLDQAIARGLAYAPYADLIWCETAKPDLDEARRFAEAIKKEYPDQILSYNCSPSFNWKKNLDDATIAKFQRELSAMGYKHQFITLAGIHNMWHGMFNLAHDYARNDMTAYVKLQEQEFADASKGYTFVAHQQEVGTGYFDDMTTVIQGGASSVTALTGSTEEEQFH

SEQ ID NO: 5872 - protein, 468 aa, Pseudomonas aeruginosa UCBPP-PA14
MNARLHATSPLGDADLVRADQAHYMHGYHVFDDHRVNGSLNIAAGDGAYIYDTAGNRYLDAVGGMWCTNIGLGREEMARTVAEQTRLLAYSNPFCDMANPRAIELCRKLAELAPGDLDHVFLTTGGSTAVDTAIRLMHYYQNCRGKRAKKHVITRINAYHGSTFLGMSLGGKSADRPAEFDFLDERIHHLACPYYYRAPEGVGEAEFLDGLVEEFERKILELGADRVGAFISEPVFGSGGVIVPPAGYHRRMWKLCQRYDVLYISDEVVTSFGRLGHFFASQAVFGVQPDIILTAKGLTSGYQPLGACIFSRRIWEVIAEPDKGRCFSHGFTYSGHPVACAAALKNIEIIEREGLLAHADEVGRYFEERLQSLRDLPIVGDVRGMRFMACVEFVADKASKALFPESLNIGEWVHLRAQKRGLLVRPIVHLNVMSPPLILTREQVDTVVRVLRESIEETVEDLVRAGHR

SEQ ID NO: 5873 - protein, 175 aa, Triticum aestivum
  misc_feature (132)..(132): Xaa can be any naturally occurring amino acid
  misc_feature (134)..(134): Xaa can be any naturally occurring amino acid
MAPTVMASSGTSVAPFQGLNSTDGLPVSRRSNGASLGTVSNGGRIRCMQVWPIEGIKKFETLSYLRPIRTEALLKQVEYLIRSKWVPCLEFSKVGFIFREHNASPGYYDGRYWTMWKLPMFGCTDATQVINXCXEVKNEYPDAYVRIIGFDNMRQVQCVSFIAFKPPGCKESGKA

SEQ ID NO: 5874 - protein, 295 aa, Zea mays
MQYLFDVWKDMEELKKEVREARRIKMLHQPSKAMDLENEIRILRNTFAEKSKDCVSLLKELETHKRLKENGTIPSFDLEGLQCLGSMLRIVGLSGTHMDLSNISIQWFRIHPKESNKEIISGATRPVYALEPHDVGRYLQAEIDVGGEIAVAKTAGPVDPDAGLVDYVETLVRKPETEFNVVVLQSNGVDQPKESVHVLNVGRLRMRLTKGKSVVAKEFYSSSMQLCGVRGGGEAASQAMFWRPRNDLSLVLAFESTRERNAAIMLARRFAVDCNVCAFTKRYIILAGPGDKTPW

SEQ ID NO: 5875 - protein, 161 aa, Brassica napus
MSTKKIVLKSSDAESFEVDEAVARESQTLAHMVEDDCADNGIPLPNVTGKILARVSEYCKKHVDAAAAKTEAAADGGAPSDEDLKAWDAEFMKIDQATLFELILAANYLNIKNLLDLTCQTVADMIKGKTPEEIRTTFNIKNDFTAEEEEEVRRENQWAFE

SEQ ID NO: 5876 - protein, 424 aa, Staphylococcus aureus subsp. aureus MRSA252
MKLIKNGKVLQNGELQQADILIDGKVIKQIAPAIEPSNGIDIIDAKGHFVSPGFVDVHVHLREPGGEYKETIETGTKAAARGGFTTVCPMPNTRPVPDSVEHFEALQKLIDDNAQVRVLPYASITTRQLGKELVDFPALVKEGAFAFTDDGVGVQTASMMYEGMIEAAKVNKAIVAHCEDNSLIYGGAMHEGKRSKELGIPGIPNICESVQIARDVLLAEAAGCHYHVCHVSTKESVRVIRDAKRAGIHVTAEVTPHHLLLTEDDIPGNNAIYKMNPPLRSTEDREALLEGLLDGTIDCIATDHAPHARDEKAQPMEKAPFGIVGSETAFPLLYTHFVKNGDWTLQQLVDYLTIKPCETFNLEYGTLKENGYADLTIIDLDSEQEIKGEDFLSKADNTPFIGYKVYGNPILTMVEGEVKFEGDK

SEQ ID NO: 5877 - protein, 463 aa, Synechocystis sp. PCC 6803
MVSLTPNPSYSVSLLLELPNHAGTLASVTQAIADAGGSFGQISLIESNLKLTRREIAVDASSSEHAEKIIGAVKALDNVKLLKVSDRTFDLHRQGKISVVSRIPLTSQSDLAMAYTPGVGRICRAIAEDPEKVYSLTIKSNTVAVVTDGSAVLGLGNLGPEAALPVMEGKAMLFKEFAQLDAFPICLDTQDTEEIIRTVKAIAPVFGGVNLEDIAAPRCFEIEARLKKELNIPVFHDDQHGTAIVTLAALLNALKFVGKAMAAVRIVINGAGAAGLAIAELLKESGATDIWICDSKGIVGKHRTDLNSKKQSFAVDAEGTLADAMAGADVFLGVSAPGVVTKEMVQSMAKDPIVFAMANPIPEIQPELIQEDAAVIATGRSDYPNQINNVLAFPGVFRGAIDCRASIITTTMCIEAAKAIASLVHSNTLDSEHIIPSVFDNRVATTVASAVQLAARNEGVAGQ

SEQ ID NO: 5878 - protein, 117 aa, Vigna radiata
MASIKCACVVALLCLVVATAPTAHAITCGQVASSLTSCIPFITKGGIVPPSCCAGVKSLNAAAKTTPDRQAVCNCLKSEAGRIGGFNANNAAILPGKCGVSIPYKISTSTNCASIKF

SEQ ID NO: 5879 - protein, 487 aa, Sinorhizobium meliloti
MRAQPKASHFIDGEYVEDAAGTVIESIYPATGEIIARLHAATPGIVEKAIAAAKRAQPEWAAMSPTARGRILKRAAELMRQRNRELSELETLDTGKPIQETIVADPTSGADSFEFFGGVAPAALNGDYIPLGGDFAYTKRVPLGVCVGIGAWNYPQQIACWKGAPALVAGNAMVFKPSENTPLGALKIAEILIEAGLPKGLFNVIQGDRATGPLLVNHPDVAKVSLTGSVPTGKKVAGAAAAELKHVTMELGGKSPLIVFDDADLESAIGGAMLGNFYSTGQVCSNGTRVFVQRKIKEPFLARLKERTEAIVIGDPLDEATQLGPMVSAAQRDKVFSYIGKGKAEGARLVTGGGIPNNVSGEGTYIQPTVFADVTDGMTIAREEIFGPVMCVLDFDDEVEVIARANATEFGLSAGVFTADLTRAHRVADRLEAGTLWINTYNLCPVEIPFGGSKQSGFGRENSVAALNHYTELKTVYVGMGPVEAPY

SEQ ID NO: 5880 - protein, 494 aa, Sinorhizobium meliloti 1021
MQNLPKLSMYIDGQWVAPASGEYIETVDPFTARPWALVPRGNAEDADRAVRAAHRAFSQGPWGKMHPTERGRIIQRFAALIEEHADALADIEVRDNGRLLAEMTHQIRYIPRWYHYYAGFADKIEGTLHPCDKPALSFSRHEPLGVCVGIVPWNAPLLLFSLKAAPALAAGNTLVMKPAEFTSATALKLMELVEKAGFPTGVINVVTGYGPEVGEPLVTHPLTRHVGFTGSTKTGAHLYSLAAKDVKRVSLELGGKSPNIVFGDADLDNAVRGVVGGIFGAVGQTCIAGSRLLVHRSIHDEFLEKLAVFTKTARIGDPRKVETQIGPIANSMQFEKVLGYIDIARREGAELILGGGRPDLEECGTGYFIEPTIFAGVSNDMRIAREEVFGPVLSAIVFDEPEEALAIANDSEFGLGAGVWTSDMRLALKMSERLEAGSVWVNTYRDISYTTPFGGYKKSGIGRENGVAGIYEYLQTKAVWLSTAEEIANPFVIG

SEQ ID NO: 5881 - protein, 208 aa, Gibberella zeae PH-1
MSDSGIQDGKPMVENQHEIDHDREHDEEQEQGTEMSATEEEEITAMKRRVAEMEEEAKKLREMQATLEQQSAELADDKESIDARSIFVGNVDYSASPEDIQGHFQSCGSINRVTILLDKFTGQPKGYAYVEFTEPSLVAQALVLNESMFKGRSIKVTPKRTNVPGMSRGRGRGGFRGGRGSFQGRGGFPRGGGYRGGYRGRGRGFAPY

SEQ ID NO: 5882 - protein, 347 aa, Staphylococcus aureus subsp. aureus MSSA476
MKALKLYGVEDLRYEDNEKPVIESANDVIVKVRATGICGSDTSRYKKMGPYIKGMPFGHEFSGVVDAIGSDVTHVNVGDKVTGCPAIPCYQCEYCLKGEYARCEKLFVIGSYEPGSFAEYVKLPAQNVLKVPDNVDYIEAAMVEPSAVVAHGFYKSNIQPGMTVAVMGCGSIGLLAIQWARIFGAAHIIAIDIDAHKLDIATSLGAHQTINSKEENLEKFIENHYANQIDLAIESSGAKVTIGQILTLPKKGGEVVLLGIPYDDIEIDRVHFEKILRNELTVCGSWNCLSSNFPGKEWTATLHYMKTKDINVKPIISHFLPLEKGPETFDKLVNKKERFDKVMFTIY

SEQ ID NO: 5883 - protein, 281 aa, Lactococcus lactis subsp. lactis Il1403
MTLTDTYTLNNGIKIPKVGFGTWQSASGEEAYNAVKAALEAGYRHIDTAAVYKNEESVGQAIADSGIPREELFVTTKLWGVGTTEDAAKALDESLKKLGLDYVDLYLIHWPNPKAFRPDFETRNLAVWKAMEAGVKAGKIRAIGVSNFHPRHLKPLLKFAEIKPAVNQIMVNPSDQQEEIVSFNVDNNILTEAYSPLGTGKIFEVPELADLASKYNKSIAQVVLRWSLHKGYLPLPKSVTPARIKENAEIFDFDLSIEDIAFIDSLHGKAGLAKNPDEVDF

SEQ ID NO: 5884 - protein, 248 aa, Arabidopsis thaliana
MYQWNLPYRKDDVETGVSSRRPLLYPAMHENPELRWGFIRKVYSIIAFQLLATVAVAATVVTVRPIALFFATTGLGLALYIVIIITPLIVLCPLYYYHQKHPVNYLLLGIFTLALAFVVGLTCAFTNGKVILESVILTSVVVLSLTLYTFWAARKGYDFNFLGPFLFGALTVLIFFALIQILFPLGRVSVMIYGCLVSIIFCGYIVYDTDNLIKRHTYDEYIWAAVSLYLDIINLFLYLLTVLRALQR

SEQ ID NO: 5885 - protein, 455 aa, Methanothermobacter thermautotrophicus str. Delta H
MEMIIDGEGVSGEKIFTVRNPFNGDEVDRVPLAGRSDVERAIRAAHRARDAMADLSARKISEKLYDVADELKTELDEFARLITLESGKPIRFSRDEVKRSVETARLSAEEAGRLYGESIPMDAGIGGKGLTGFTVRIPLGVVAAITPFNYPLNLAIHKVGPALAAGNTTILKPSLEAPLSALKLAWILSEHFPAGAVNAVTGRGSEVGDVIIDSPLVDKITFTGSVEVGRYISARASMKKITLELGGNDPLIVMDDADIDSAVEAAVRGSYLYSGQVCIAVKRMIVHEDVADEFADKLVNITGSLRAGDPMDVRTDVGPLINEDAAIEVERVIGAAVEDGAELLCGGSRRGNFVEPTVLDHVVPGMEVIERETFGPVSPIIRFNGADEAIRIANGTCYALQAGVFTENIRTALRMAREIEAGTVLVNKQSTFRVDHMPFGDSGAVEWVRRVSSTP

SEQ ID NO: 5886 - protein, 115 aa, Zea mays
RPGARAEREETVDGATGNTVRVNGNQQQQNLQNNMHRVLGIAPSISEASSSWTGREGGLVPVWSPPAASVHSDPYAADEADISSRSYLDRHQQSNTMMNWSQLSQSLTTGWEVDN

SEQ ID NO: 5887 - protein, 403 aa, Psychrobacter sp. TAD1
MIDNNNTTAQIVDLLPTAFSQSLPSSVSEQLTNNASDHQMWLLPPLVDLCARLREPGLQQHGTLASEGSAALANGFLHVVIPPDTNPILENGSLLKGLRERALEDGGIHLHILGALTAGLKGERPSNIAGLKKGGCIAVSNARRPFENDLVQLRTLEYAATFGMKVFFYPDEPSLSGDGVAHEGYIASYHGLQGIPWIAETVALSTQLLMVEETGIAAHFSQLSCKSSVELMRWAKDKGLPVTCDVAMHQLHLTDDNLEGFNAMSYVLPPLRSNTDQQALRRGLKDGTIDAICSHHEPLNVTAKKAPFAESIPGISNFDTFMALACQLVRDEVLTVEQLVAKICLNPAKIAGIEDQYLETGGAILVDPDMKWQVTAETMLSNGKNTPFFGQQLQGRVVETFFG

SEQ ID NO: 5888 - protein, 450 aa, Zea mays
MDIKDMKTRGKTLTERYELGKLLGKGAFGKVHYGRDLESNQDVAIKIMDKDRVLKAGLSEQVKCEITTMRLVTHKNIVRLHEVMATRNKIYIIMEYAKGGELFEKIKRSDRLTEADTHKYFQQLIDALDHCHSRGVYHRDLKPENLLLDENGDLKVSDFGLSAFSESRRTDGLLHTVCGTPVYIAPEVIKKTGYDGAKSDIWSCGVVLFVLAAGYLPFQGPNLMEIYRKIHDRDFRCPSWFSHKLKRLLYKILNPNPSMRPSIQEIKESTWFRKGPREISAVNEKVLSENATTTNAAPVLPSRRKEIAHEDMKSLVATNLNAFEIIALSAGLDLSGLFIKECRKETRFTSDKPALSIIAKLEDVAKALNLRIRKKDNNTISIQGRKEGGNGVLKFDTQIFEITPSCHLVQIKQTSGNLLEYEKLLEEGIRPGLKDVVSAWHGDDLQQKQK

SEQ ID NO: 5889 - protein, 492 aa, Arabidopsis thaliana
MFLCVIIPCLCSYLCSLFSWLLGQIPSFLFDKINESWLTSTKRNVEIVKNLMDKISQLPDELLVKVLSFLSTKDAVSTSILSMRWKSLWMWLPKLEYNFRHYSVSEGQGLARFITSSLRVHKAPAIESLSLKFRYGAIGSIKPKDIYLWVSLAVHVSNVRELSLKLFNFAELPTKLPKSLCKCKSIVILKLKDEILVDVPRKVCLPSLKTLFLGRVTYSDANSLHRLLSNCPVLEDLVMERDKIDNLGKLSVIVKSLQRLTLKMSRPCHLDGLKMNSPSLKYLKVIDERLESDSDDESDSDSPRYFYDFEDMPKLEEADFVLTFQNIKKFFGSITSVKRLSLCLGVYTEESLYHEGLVFNQLEQLKICSCDSDWSILLARLLKSSPNLRELEAYVIEDHPNGRTDLPNQWDNQLNCVPTCLLSSLETFRWSEMHGLLQNQMDVAKYILKNARCLKSATIFFPTTYAQETRDEMIEELSLSFQGPETCQVFFH

SEQ ID NO: 5890 - protein, 479 aa, Exiguobacterium sp. 255-15
MNGKFLINGQWLDQGRERTDVKNPATGEVVGSVPNGTKSDVNDAVEAAHNAFPDWSKRTVYERAALLEKLYAKMLEKKDELARLMTLEMGKPLAESEGEVEYAANFVKWFAEEGKRAYGRIIPSHDATKRLHVIKQPVGVVAAITPWNFPAAMITRKLAPALVAGCTFVLKPPTATPLTALRLLELCQEVGIPDGVVNAVTGSGKDLGESLATHPHVAKITFTGSTEVGRTLMAQGAETIKAMSLELGGHAPILVFDDCDLDLAVRETIKSKFRNGGQTCVCGNRIYVSDSIYDEFVEKLGQETAKLKTGNGLDQETKIGPMINKAGYDKVKKHVDDATSAGARIVTGGSGQTDDDNDVYYYEATVLADVTPQMLIMNEETFGPVAPVQRVSSDEEAVHYANQTPFGLASYVFTNNYARAFKAIEHLDYGIVGWNDGVPSAAQAPFGGMKQSGVGREGGSEGLEAYLETKYVSIGGLDQ

SEQ ID NO: 5891 - protein, 634 aa, Glycine max
MGSNRTIVWFRRDLRIEDNPALAAAAKEGSVLPVYIWCPKEEGQFYPGRVSRWWLKQSLAHLDQSLKSLGSRLVLIKTHSTVTALVECVKAIQATKVVFNHLYDPVSLVRDHNIKEKLVEQGISVQSYNGDLLYEPWEVNSESGRAFTTFNAFWKKCLHMQMDIVSVVPPWQLIPAEGKIEECSLEELGLENESEKPSNALLGRAWSPGWRNADKALREFVELHLLHYSKKRLKVGGESTSLLSPYLHFGELSARKVFQVTRMKQILWTNEGNSAGEESVNLFLRAIGLREYSRYLCFNFPFTHEKALLGHLKFFPWNPDADIFKNWRQGRTGFPLVDAGMRELWATGWIHNRIRVIVSSFAVKMLLLPWKWGMKYFWDTLLDADLESDILGWQYISGGLPDGHELERLDNPEIQGAKFDPEGEYVRQWLPELARMPTEWIHHPWDAPLTVLRAAGVELGQNYPKPIIDIDLARERLTEAIFKMWESEAAAKAAGSEPRDEVVVDNSNSLENLDTRKVVVLGKAPCATISANDQKVPALQDSKNEPPTRKRPKHMIEEGQNQDHSQNHNKDTGMSSIDQDICSTADSSSCKKQCASTSSYSFSVPQQCSSSSNLKWPWQDQIDMEQSSSKDGAM

SEQ ID NO: 5892 - protein, 298 aa, Glycine max
  misc_feature (51)..(51): Xaa can be any naturally occurring amino acid
SSRSSGSSARGLIFSGTASVVLARLVASLKLVGGNLADHRFLFLGAGEAGXGIAELIALETSKQTNAPLEEVRKNIWLVDSKGLIVSSRKDSLQHFKKPWAHEHEPVRNLVDAVNKIKPTVLIGTSGQGRTFTKEVIEAMASINERPIILSLSNPTSQSECTAEEAYKWSQGRAIFASGSPFPPVEYEGKVFVPGQANNAYIFPGFGLGLIMSGTIRVHDDLLLAASEALAAQVSQENFDKGLIYPPFTNIRKISAHIAANVAAKAYELGLATRLPQPKDLVKFAESCMYTPSYRSYR

SEQ ID NO: 5893 - protein, 87 aa, Triticum aestivum
MAFVPICVQCGTRSNPCRCKVVGPTLGFVALVVAGVVEWPLGAAVYLFRHPASARIMGHPARVVYSCSPAATPLSSSNASPHLPVRW

SEQ ID NO: 5894 - protein, 125 aa, Brassica napus
  misc_feature (6)..(6): Xaa can be any naturally occurring amino acid
  misc_feature (9)..(12): Xaa can be any naturally occurring amino acid
  misc_feature (14)..(16): Xaa can be any naturally occurring amino acid
  misc_feature (18)..(19): Xaa can be any naturally occurring amino acid
  misc_feature (22)..(23): Xaa can be any naturally occurring amino acid
  misc_feature (25)..(25): Xaa can be any naturally occurring amino acid
  misc_feature (28)..(30): Xaa can be any naturally occurring amino acid
  misc_feature (33)..(34): Xaa can be any naturally occurring amino acid
  misc_feature (36)..(38): Xaa can be any naturally occurring amino acid
  misc_feature (40)..(40): Xaa can be any naturally occurring amino acid
  misc_feature (44)..(44): Xaa can be any naturally occurring amino acid
  misc_feature (48)..(48): Xaa can be any naturally occurring amino acid
  misc_feature (52)..(52): Xaa can be any naturally occurring amino acid
  misc_feature (56)..(56): Xaa can be any naturally occurring amino acid
  misc_feature (63)..(63): Xaa can be any naturally occurring amino acid
  misc_feature (84)..(84): Xaa can be any naturally occurring amino acid
  misc_feature (87)..(87): Xaa can be any naturally occurring amino acid
  misc_feature (100)..(100): Xaa can be any naturally occurring amino acid
  misc_feature (110)..(110): Xaa can be any naturally occurring amino acid
  misc_feature (112)..(114): Xaa can be any naturally occurring amino acid
  misc_feature (117)..(124): Xaa can be any naturally occurring amino acid
DQSSMXSSXXXXTXXXQXXMVXXFXVLXXXAAXXVXXXAXNDIXSIAXNGGXVSCXKVWPPVXKKKFETLSYLPDLTEVELGLXKSXTLLRNKCIPCVEXELEHGFCAPXSXXXPPXXXXXXXXM

SEQ ID NO: 5895 - protein, 488 aa, Ralstonia solanacearum GMI1000
MIQNFINGAYREGRAGKRFRDLDPCTGRLVAEVSEAGKEDVDDAVQAARAALNGPWGKLTLAQRCDLLYAVADEIDRRKEDFLAAEVADTGKPRALASHLDIPRGAANFRVFADAVRNVATECFTGTAPDGKPSLNYALRRPKGVIAVVCPWNLPLLLMTWKVGPALACGNTVVVKPSEETPATAALLGEVMNAVGVPAGVYNVVHGFGPDSAGEFLTRHPDVDAITFTGETRTGAAIIKASADGIKPVSMELGGKNPALVFADADLDAVIAGLKRSVFENTGQVCLGTERVYVERPMFDKVVRALAEIAGTLRPGLPGDPHANFGPLISGEHQRKVLGYYALARDEGATVHYGGGVPDMPPDLREGAWIEPTVWTGLPRDSRVLTEEIFGPCCHVEPFDSEEEAVRLANGTPYGLATSLYTGDVNRAHRVSAKLKVGVVWVNTWFLRDLRTAFGGSGKSGIGREGGVHSLEFYTELSNVCLKLEPQA

SEQ ID NO: 5896 - protein, 341 aa, Shigella flexneri 2a str. 301
MKALSKLKAEEGIWMTDVPVPELGHNDLLIKIRKTAICGTDVHIYNWDEWSQKTIPVPMVVGHEYVGEVVGIGQEVKGFKIGDRVSGEGHITCGHCRNCRGGRTHLCRNTIGVGVNRPGCFAEYLVIPAFNAFKIPDNISDDLASIFDPFGNAVHTALSFDLVGEDVLVSGAGPIGIMAAAVAKHVGARNVVITDVNEYRLELARKMGITRAVNVAKENLNDVMAELGMTEGFDVGLEMSGAPPAFRTMLDTMNHGGRIAMLGIPPSDMSIDWTKVIFKGLFIKGIYGREMFETWYKMAALIQSGLDLSPIITHRFSIDDFQKGFDAMRSGQSGKVILSWD

SEQ ID NO: 5897 - protein, 389 aa, Escherichia coli
TLQNGKLNVPENPIIPYIEGDGIGVDVTPAMLKVVDAAVEKAYKGERKISWMEIYTGEKSTQVYGQDVWLPAETLDLIREYRVAIKGPLTTPVGGGIRSLNVALRQELDLYICLRPVRYYQGTPSPVKHPELTDMVIFRENSEDIYAGIEWKADSADAEKVIKFLREEMGVKKIRFPEHCGIGIKPCSEEGTKRLVRAAIEYAIANDRDSVTLVHKGNIMKFTEGAFKDWGYQLRREEFGGELIDGGPWLEVKNPNTGKEIVIKEVIADAFLQQILLGPAEYDVIACMNLNGDYISDALAAQVGGIGIAPGANIGDECALFEATHGTAPKYAGQDKVNPGSIILSAEMMLRHMGWTEAADLIVKGMEGAINAKTVTYDFERLMEGAKLL

SEQ ID NO: 5898 - protein, 168 aa, Zea mays
  misc_feature (78)..(78): Xaa can be any naturally occurring amino acid
SQKTEHTIRPEGELGEVPHPWLNLLIPRSSIHRFAKEVFGKILKDSNNGTILLYLVNKSKWDNITSVVIPDEEIFYLXVGFLSSAPFLSGYGSIAHSMNLNKEIVEFCEEAGIGMIQYLAPYTTQQQWKAHFGARWETFERRKHRYDPLAILAPGQRIFPKASLPLPL

SEQ ID NO: 5899 - protein, 389 aa, Escherichia coli
TLQNGKLNVPENPIIPYIEGDGIGVDVTPAMLKVVDAAVEKAYKGERKISWMEIYTGEKSTQVYGQDVWLPAETLDLIREYRVAIKGPLTTPVGGGIRSLNVALRQELDLYICLRPVRYYQGTPSPVKHPELTDMVIFRENSEDIYAGIEWKADSADAEKVIKFLREEMGVKKIRFPEHCGIGIKPCSEEGTKRLVRAAIEYAIANDRDSVTLVHKGNIMKFTEGAFKDWGYQLAREEFGGELIDGGPWMKVKNPNTGKEIVIKDVIADAFLQQILLRPAEYDVIRCMNLNGDYISDALAAQVGGIGIAPGTNIGDECALFEPTPGTAPKYAGQDKVNPGSIILSAEMMLRHMGWTEAADLIVKGMEGAINAKTVTYDFERLMDGAKLL

SEQ ID NO: 5900 - protein, 454 aa, Streptomyces parvulus
MEKTDVDRLRTLDREHMWYPWTPMTEWMARDQLVVERAEGCWLIDADGKRYLDGRSSMGMNLHGHGRSEIVEALVAQARKAGETTLYRVSHPAAVELAARLASMAPAGLQRVFFAESGSTAVETALKAAYAYWVAKGEPQRSTFVSMEGGYHGETLGTVSLRGTNGEQVDMIRKTYEPLLFPSLSFHQPHCYRCPVGQSSDSDCGLECTDSLENLLTREKGRIAAVIVEPRVQALAGVITAPEGHLAKVAEITRRHGVLLIVDEVLTGWARTGPTFSCEAEGVTPDLMTVGKALTGGYLPLSATLATEEIFGAFRESVFLSGSTYSGYALGAAVALASLDLFEKEDVPARAKALADVLTTALEPFRALTHVGDVRQLGLIAGVELVADRETRAPYPPQERVVDRICTLARDNGVLVNAVPGDVITMLPSPSMSPDDLRFLTGTLYTAVREVTEE

SEQ ID NO: 5901 - protein, 121 aa, Hordeum vulgare
MAAPRGAALVLAMVLAAMVVAPPVTVRAAISCSAVYSTLMPCLQYVQQGGTPARGCCAGIQNLLAEANNSPDRRTICGCLKNVANAAPGGSEITRAAALPSKCNVNLPYKISPSVDCNSIH

SEQ ID NO: 5902 - protein, 389 aa, Escherichia coli
TLQNGKLNVPENPIIPYIEGDGIGVDVTPAMLKVVDAAVEKAYKGERKISWMEIYTGEKSTQVYGQDVWLPAETLDLIREYRVAIKGPLTTPVGGGIRSLNVALRQELDLYICLRPARYYQGTPSPVKHPELTDMVIFRENSEDIYAGIEWKADSADAEKVIKFLREEMGVKKIRFPEHCGIGIKPCSEEGTKRLVRAAIEYAIANDRDSVTLVHKGNIMKFTEGAFKDWGYQLAREEFGGELIDGGPWMKVKNPNTGKEIVIKDVIADAFLQQILLRPAEYDVIACMNLNGDYISDALAAQVGGIGIAPGANIGDECALFEATPGTAPKYAGQDKVNPGSIILSAEMMLRHMGWTEAADLIVKGMERAINAKTVTYDFERLMEGAKLL

SEQ ID NO: 5903 - protein, 210 aa, Shigella dysenteriae
LYICLRPVRYYQGTPSPVKHPELTDMVIFRENSEDIYAGIEWKADSADAEKVIKFLREEMGVKKIRFPEHCGIGIKPCSEEGTKRLVRAAIEYAIANDRDSVTLVHKGNIMKFTEGAFKDWGYQLAREEFGGELIDGGPWLKVKNPNTGKEIVIKDVIADAFLQQILLRPAEYDVIACMNLNGDYISDALAAQVGGIGIAPGANIGDECA

SEQ ID NO: 5904 - protein, 389 aa, Escherichia fergusonii
TLQNGKLNVPENPIIPYIEGDGIGVDVTPAMLKVVDAAVEKAYKGERKISWMEIYTGEKSTQVYGQDVWLPAETLDLIREYRVAIKGPLTTPVGGGIRSLNVALRQELDLYICLRPVRYYQGTPSPVKHPELTDMVIFRENSEDIYAGIEWKADSADAEKVIKFLREEMGVKKIRFPEHCGIGIKPCSEEGTKRLVRAAIEYAIANDRDSVTLVHKGNIMKFTEGAFKDWGYQLAREEFGGELIDGGPWLKVKNPNTDKKIVIKNVIADAFLQQILLRPAEYDVIACMNLNGDYISDALAAQVGGIGIAPGANIGDECALFEATHGTAPKYAGQDKVNPGSIILSAEMMLRHMGWTEAADLIVKGMEGAINAKTVTYDFERLMEGAKLL

SEQ ID NO: 5905 - protein, 356 aa, Zea mays
TRPDGTHSAQTDMSVAYSLEEYAGAVVAAVGRVCDRKGVQHPIICSESGRALVSHHSVLVFEAFSATAPGRLDAATAYLLDELTDDCRADYRNVMAAAVRGDYDTCGLYADQLKRRSAEQFKEGVLGLEHLAAVDAFCELVARGMGAPEPPRTYHINLSVFTSLPDMWAIGQQFPIIPIQRLQERPAVDGVLSDLTCDSDGKVSEFIGGRHSLPLHELPTHATRGYYLGMFLGGAYQEALGGLHNLFGGPSVVRVSQCDGPHCFAVTRAAAGPSCADVLRAMQHEPEVMYEVLKQRTDGATAAALARAFGAMPYLVFDPEAAVMSGGESSDSERSAAGAAEEEDDEEWEFMRGLTV

SEQ ID NO: 5906 - protein, 438 aa, Zea mays
MAEKENILMQRYEMGKLLGKGSFAKVYHARNVKTSESVAIKVIDKDKIKKCGLMDQIIQEISVMKLVKHPNIVQLYEVMATKTKIYFVIEYVKGGELFKKVQRGRLKEDVARAYFQQLISAVDFCHTRQVYHRDLKPENLLLDGSRNLKISDFGLSALPNCKRKDGLLHTICGTPAYVAPEVISQKGYDGAKADIWACGVILYVLLAGYLPFQDKNMMDMYKKIFKAELKWPSWFSSDVRKLLRRILHPNPNRRISIEEIRTHPWFRIGLDARLFDSTTRDYVPSDMDLALNSLNSNMVECNSAAEKLTILNAFDIISLSNGFDLSGIFENSNKVSKFTSTNTAMTIITKLMEVAKSLDLKVITKTGGLLNMEAAESGIKGVMSINAEIFQITPNYHLVEIKKINGDILEYHNFMNQSMRPALEDIVWAWHGEQPDEK

SEQ ID NO: 5907 - protein, 493 aa, Triticum aestivum
MALSRAQTNSGESLISSTFASRYVRTALPRFRIPEQSIPKDAAYQIINDELMLDGNPRLNLASFVTTWMEPECDKLIQNSVNKNYVDMDEYPVTTEFQNRCVNMIAHLFNAPIGEDETAVGVGTVGSSEAIMLAGLAFKRKWQNKMKAEGKPHDKPNIVTGANVQVCWEKFARYFEVELKEVKLREGYYVMDPAKAVELVDENTICVAAILGSTLNGEFEDVKMLNDLLVAKNAETGWDTPIHVDAASGGFIAPFIYPELEWDFRLPLVKSINVSGHKYGLVYAGVGWIIWRNKEDLPDELIFHINYLGADQPTFTLNFSKGSSQVIAQYYQLIRLGFEGYKNIMENCQENAMVLKQGLEKTGRFNIVSKDNGVPLVAFSLKDSARHNEFEISDFLRRFGWIVPAYTMPPDAQHVTVLRVVIREDFSRTLAERLVLDVEKVLHELDALPARVVANGGDAAAASASEREMEKQREVISLWKRAVLAKKKTNGVC

SEQ ID NO: 5908 - protein, 70 aa, Glycine max
  misc_feature (43)..(43): Xaa can be any naturally occurring amino acid
SITTGNRSGTSMVAPFTGTKSMADFCIRNTNDDITIIASNGAXVQCMHMWTPVSMKQIDTDSYLPDIDHA

SEQ ID NO: 5909 - protein, 353 aa, Magnaporthe grisea 70-15
MASATEGKSPHDVCFEERPMPKLASEHDVLVAVNYTGICGSDVHYWHHGSIGDFVVKDPMVLGHESAGTVVEVGSAVKTLQVGDRVALEPGYPCRRCRDCLAGRYNLCPEMRFAATPPYDGTLAGFWTAPADFCYKLPESVSLQEGAMIEPLAVGVHIVRQAKVSPGQSVVVMGAGPVGLLCAAVARAFGATTVVSVDIVESKLEVAKQIAATHTYLSQRISPQDNAKALIAAAGLEDNGGADVVIDATGAEPSIQTSIHAVRVGGSYVQGGMGKPDITFPILAFCCKEVTASGSFRYSAGDYRLAIDLVANGKVNLKALITETVPFDKAQEAFTKVSEGQVIKVLIAGPNEK

SEQ ID NO: 5910 - protein, 339 aa, Glycine max
  misc_feature (68)..(68): Xaa can be any naturally occurring amino acid
MVVPQPIEGLHETGPPPFLTKTYDIVDDPSTNHIVSWSTGNNSFVVWDPQAFSVTLLPKFFKHNNFSXFVRQLNTYGFKKVDPDKWEFANEMFLRGQRILLKNIRRRKANHHQSHQHAMQQGVEEPFVEVGQFELDGEIDRLRRDRQVLMVELVKLRQQQQSTKSHLQEMEGRIKMTEQKQKQMMNFLARAMQNPNFVQQLAQQKECSRELEEVFSNKKRRPIDQGPNVVEVADDDDELLGCAEECSDFVKLEPQEYYSDDKVLEFEVPDLDLALNLDEENIESQKRIMEEEHVQLENSRERYIDEVFWQDLLNEGIEDQGVLGVEDVDVLAKQLGYLA

SEQ ID NO: 5911 - protein, 116 aa, Vigna radiata
MASLKVACMVAVVFMVVVSAHMAHAITCGQVASSLAPCISYLQKGGVPSASCCSGVKALNSAASTTADRKTACNCLKNLAGPKSGINEGNAASLPGKCKVNVPYKISTFTNCANIK

SEQ ID NO: 5912 - protein, 252 aa, Zea mays
  misc_feature (219)..(219): Xaa can be any naturally occurring amino acid
PSTSRLPALPQKKTARLLLLLRRAGITCGILAVLGCSDWSQAKRARILACSRRLKHRGPDWSGLYQHEGNFLAQQRLAVTKRHLVETEAAEKFGTELHSFVVGLEGSPDLKAAREVADYLGTIHHEFHFTVQDGIDAIEEVIYHDETYDVTTIRASTPMFLMARKIKSLGVKMVLSGEGSDELLGGYLYFHFAPNKEEFHRETCRKVKALHQYDCLRAXKATSAWGLEVRVPFLDKEFINVAMGMDPEWKMY

SEQ ID NO: 5913 - protein, 272 aa, Oryza sativa (indica cultivar-group)
MGRRACCAKEGMKRGAWTSKEDDVLASYIKSHGEGKWREVPQRAGLRRCGKSCRLRWLNYLRPNIKRGNIDDDEEELIVRLHTLLGNRWSLIAGRLPGRTDNEIKNYWNSTLSRKIGTAATAAAGSRGGSTPDTARATDAASSSSVVPPGQQQQPASRADTDTATAAAAAAATTTTVWAPKAVRCTRGFFFHDRETAPLAAAAPAPAGELGDGDDVDCDYYCSGSSSAATTTSSSSLPVVVEPCFSAGDDWMDDVRALASFLDTDDAWNLCA

SEQ ID NO: 5914 - protein, 366 aa, Triticum aestivum
  misc_feature (117)..(117): Xaa can be any naturally occurring amino acid
MGKGGKGEAAAAVAGEGENMAAWLVAKNTLKIMPFKLPPLGPYDVRVRMKAVGICGSDVHYLKEMRIAHFVVKEPMVIGHECAGIIEEVGDGVKHLAVGDRVALEPGISCWRCRHCXKGGRYNLCDDMKFFATPPYHGSLADQIVHPGDLCFKLPDNVSLEEGAMCEPLSVGVHACRRADVGAEKSVLIMGAGPIGLVTMLSARAFGAPRIVIADVDDHRLSLAKSLGADAVVKVSGNAEDLAGEIERIQAAMGGDIDVSLDCAGFSKTMSTALEATRPGGRVCLVGMGHNEMTVPLTSAAIREVDVVGIFRYKDTWPLCLEFLRSGKIDVKPLITHRFGFSQGEVEEAFEVSARGRDAIKVMFNL

SEQ ID NO: 5915 - protein, 272 aa, Oryza sativa (indica cultivar-group)
MGRRACCAKEGMKRGAWTSKEDDVLASYIKSHGEGKWREVRQRAGLRRCGKSCRLRWLNYLRPNIKRGNIDDDEEELIVRLHTLLGNRWSLIAGRLPGRTDNEIKNYWNSTLSRKIGTAATAAAGSRGGSTPDTARATDAASSSSVVPPGQQQQPASRADTDTATAAAAAAATTTTVWAPKAVRCTRGFFFHDRETAPLAAAAPAPAGELGDGDDVDCDYYCSGSSSAATTTSSSSLPAVVEPCFSAGDDWMDDVRALASFLDTDDAWNLCA

SEQ ID NO: 5916 - protein, 160 aa, Thermoplasma volcanium GSS1
MAFKRKVLGKTDYGRRLRLLKSKDRRFIVRITNKGIIAQIAEYSVNGDRILATITDKALSKYGIELRGNNLQICYLVGYAAGVEAQKAGVETAVLDIGRKKFRKGGRIAACLKGITDSGVDIPHGEDVFPDKKRLNGSHLKNPVKLNEAVKNFKKLEEKA

SEQ ID NO: 5917 - protein, 472 aa, Xanthomonas campestris pv. campestris str. ATCC 33913
MHRHVHEPEILADPAAFEAAEHWRQRDLAVVWHPCTQMREHPHTLPLVPIARGDGAWLIGHDGRHYLDAVSSWWTNLFGHAEPRIGAAIAQQAGRLEQVMLAGFTHAPAVQLAERLLAIAPRQPDRAPLAKVFYADNGSAGVEVALKMAFHYFHNRDEHRRTRFIALENGYHGETIGALSVGDIPLYRRVYAPLLLESIFAPSPDAYLAEPGQSAEDYALQAADALQHLLEQSPGEICALILEPRVQCAGGMRMYHPAYLRRARELCDAHGVFLIADEIATGFGRTGTLFACEQAGVMPDLLCLSKGLTGGFLPLSAVLATQQLYDAFLDDSRERAFLHSHSYTGNPLACAAALATLQIFADDDIIARNQRTAAHMTQLAAQIGEHSAVADVRQAGMIVAFELTQGGDKRTPFPAAARVGLQAYRAALARGVVLRPLGDVLYWMPPYCVDDAQLALLADTTRHAIAKAVACA

SEQ ID NO: 5918 - protein, 194 aa, Magnetospirillum magnetotacticum MS-1
MSRLLPTNPLGSFVASVVAAIGLAGGVAWGATGDHLDWSSLPLPAIAGGQVPADAFKGKVVLVVNTASQCGFTPQYQGLEALWREYRGRGLVVLGVPSNDFGAQEPGSNPEVASFCEINYGVDFPLLEKQVVTGTGAHPFYRWAAERTGALGVPRWNFHKILVGRDGQLVDWFASTTAPDSARLRAAIDKALTP

SEQ ID NO: 5919 - protein, 272 aa, Oryza rufipogon
MGRRACCAKEGMKRGAWTSKEDDVLASYIKSHGEGKWREVPQRAGLRRCGKSCRLRWLNYLRPNIKRGNIDDDEEELIVRLHTLLGNRWSLIAGRLPGRTDNEIKNYWNSTLSRKIGTAATAAAGSRGGSTPDTARATDAASSSSVVPPGQQQQPASRADTDTATAAAAAAATTTTVWAPKAVRCTRGFFFHDRETAPLAAAAPAPAGELGDGDDVDCDYYCSGSSSAATTTSLSSLPAVVEPCFSAGDDWMDDVRALASFLDTDDAWNLCA

SEQ ID NO: 5920 - protein, 272 aa, Oryza rufipogon
MGRRACCAKEGMKRGAWTSKEDDVLASYIKSHGEGKWREVPQRAGLRRCGKSCRLRWLNYLRPNIKRGNIDDDEEELIVRLHTLLGNRWSLIAGRLPGRTDNEIKNYWNSTLSRKIGTAATAAAGSRGGSTPDTARATDAASSSSVVPPGQQQQPASRADTDTATAAAAAAATTTTVWAPKAVRCTRGFFFHDRETAPLAAAAPAPAGELGDGDDVDCDYYCSGSSSAATTTSSSSLPAVVEPCFSAGDDWMDDVRALATFLDTDDAWNLCA

SEQ ID NO: 5921 - protein, 429 aa, Brucella melitensis 16M
MTDFYSLIPSAPKGRFDGIERAHTAEDVKRLRGSVEIKYSLAEMGANRLWKLIHEEDFVNALGALSGNQAMQMVRAGLKAIYLSGWQVAADANTASAMYPDQSLYPANAGPELAKRINRTLQRADQIETAEGKGLSVDTWFAPIVADAEAGFGDPLDAFEIMKAYIEAGAAGVHFEDQLASEKKCGHLGGKVLIPTAAHIRNLNAARLAADVMGTPTLIVARTDAEAAKLLTSDIDERDQPFVDYEAGRTAEGFYQVKNGIEPCIARAIAYAPYCDLIWMETSKPDLAQARRFAEAVHKAHPGKLLAYNCSPSFNWKKNLDDATIAKFQRELGAMGYKFQFITLAGFHQLNYGMFELARGYKDRQMAAYSELQQAEFAAEADGYTATKHQREVGTGYFDAVSLAITGGQSSTTAMKESTETAQFKPAAE

SEQ ID NO: 5922 - protein, 490 aa, Gibberella zeae PH-1
MSNLRRSDHASKPHIAVVGAGLAGLRCADVLLQNGFQVTIIEARNRVGGRLHQETLPNGHLADVGPNWIHGTDDNPMLDLAKQTNTAVSDWDSTSCVFAEDGELFPLKDGEKYSTMVWDIVQEAFKHANNSSHDIDPKESLHDFFVQKVTEKVPSTEADHEKKRNIVMQISEMWGAFIGSPVYRQSLKFFWLEECIEGENLFCAGTYKKVLDEVAKPALEGAEIKFETQVDEISYRTSPEEKAKLRTQSGQTLEFDEIVMTAPLGWLKRNLDAFEPALPARMTKAIGAIGYGCLEKVYINFPKAFWLGSESDDRKAEGFVQWLSPNYVPDLNPKRWNQEVVELASLGPEVSHPTLLFYTYGEQSQFITGELLKISDPKKKDEFLLNFFKPYYSLLPHYSESDPDCKPSGFMATDWLHDELSGYGSYSNFQVGLEEGDVDIRTMREGLPDHGLWLAGEHTAPFVGLGTATGAYWSGEAVGKRIAEAYGRNK

SEQ ID NO: 5923 - protein, 502 aa, Capsicum annuum
MEIQFTNLVAFLLFLSSIILLLKKWKTQKLNLPPGPWKLPFIGSLHHLAVAGPLPHHGLKNLAKLYGPLMHLRLGEIPTVIISSPRMAKEVLKTHDLAFATRPKLVVADIVHYDSTDIAFSPYGEYWRQIRKICILELLSAKMVKFFSSIRQDELSMMVSSIRTMPNFPVNLTDKIFWFTSSVTCRSALGKICRDQDKLIIFMREIISLTGGFSIADFFPTWKMLHDVGGSKTRLLKAHRKIDEILEHVVNEHKQNRADGQKGNGEFGGEDLIDVLLRVRESGEVQISITDDNIKSILVDMFSAGSETSSTTIIWALAEMMKKPSVLAKAQAEVRQVLKEKKGFQQIDLDELKYLKLVIKETLRMHPPIPLLVPRECMKDTKIDGYNIPFKTRVIVNAWAIGRDPESWDDPESFSPERFENSSVDFLGSHHQFIPFGAGRRICPGMLFGLANVGQPLAQLLYHFDRKLPNGQSHENLDMTESPGISATRKDDLVLIATPYDP

SEQ ID NO: 5924 - protein, 111 aa, Triticum aestivum
MERRAARGTSDHRRRMQMPPAQVEQKPQRRGGPKSCQRTPPPPGCFTIQLLMVFLWVAASLAFLPLVLPPLPPPPLSLLLVPVCLLAVLAALAFVPLDAHNNVVGGGSSCL

SEQ ID NO: 5925 - protein, 187 aa, Oryza sativa (japonica cultivar-group)
MADGPGSPGGGGGSHESGSPRGGGGGGGGGGGGGGVREQDRFLPIANISRIMKKAIPANGKIAKDAKETVQECVSEFISFITSEASDKCQREKRKTINGDDLLWAMATLGFEDYIEPLKVYLQKYREVRTDGDSKLTAKAGDGSVKKDVLGSHGGSSSSAQGMGQQAAYNQGMGYMQPQYHNGDVSN

SEQ ID NO: 5926 - protein, 304 aa, Gibberella zeae PH-1
MSSHNIPSYKLNDGNEIPNSQHTAALSHKANICKLAFGLGTAQFKKDSQSGLDQHVVDITTKAIKAGYLYGNEEELGEAIKAGGVPREQLYVTTKIPAEKKGSAIDAFDVSLKKLGLEYVDLYLIHGPWFAETDEDLQQRWSELEQIKESGRAKSIGVSNFLQVHLEPILKTAKVKPAINQIEYHPYLQHGDLLDFHKKHNIAVSAYGPLTPIVTAKGGPVDPLYTKLAEKYGVTESEVGLRWVIDQDTIALTTSNKVERLDGYLAKLPKFKLTQDEIAEISKLGAEKHFRGFWRNKFDENDRS

SEQ ID NO: 5927 - protein, 265 aa, Brassica napus
VDPRVRASKWLPDLSGNVSAITTPPPTESVTASVMKKRFFVETLIGILPPEKDSVPCNFLLRLLRTAKMVGANANYLTELENRVAWQLDQASLKELMIPSFSHTSGTLLDVELVTRLVKKFVGLDSEGVKTGAALVKVAKLVDSYLAEAALDGGLTLPEFISLIEALPSYARTTEDGLYRAIDTYLKAHPQVLKQERKELCRLIDSRKLSPEAALHAAQNDRLPVRSIIRVLFTEQTKLSRHVDWSGSLTRSPTNPSGSHYFEQE

SEQ ID NO: 5928 - protein, 235 aa, Zea mays
HACSVTLYQNAHLSDAFDPGVRLDGGLAYRPARLWEDLYAAIRDARRFVYVAGWSVNTEITLVRDAGRRAVPGAEGDTLGELLKRKADEGVAVLVMPWQDNTSVSFLGNAGLMKTHDEETRRFFEGTNVRCFLCPRNADASLTMVQHVETSAEFTHHQKTVTLDAATPGTDERHVVSFIGGIDLCDGRYDDENHTLFRDLDTTYSHDFMQNNYKHASLRRGGPREPWHDVHCRHA

SEQ ID NO: 5929 - protein, 432 aa, Tropheryma whipplei str. Twist
MSKIKLVTAIPGPESERLHRMRQATVARGVSSTFPIYIKESHGSILIDEDGNHLIDMGCGIGVTTLGHSHPAVVDAARAQINSVWHTLFSITPYESYVEVCKLLAKNTPGDFPKKSLLLNSGAEAVENAVKISRAYTGRPTVAVLDRSFHGRTNLTSSMTYRGSLYSSDFGPTASNIVSAPNSYPLHDRLSGKEAAARTISYLETRVAARNIACLFYEPIQGEGGVIVPADGFLPALQDWCRENDIVFVADEIQSGFGRTGCFFASETDGLEPDIVCSAKGIANGLPLSAVTGRSDIVDAARPGTLGGTFTGNHVSCAAALEVFEQYKDNAPLDSASRLGDILKELLLNLQSKHPQIAEVRGRGAMFGAEFSGNHAGEMVSRVITRAAELGVIFLSSGVEGNVVRFLPNVFMDKETIEEAIGVLDSAISSVV

SEQ ID NO: 5930 - protein, 507 aa, Streptomyces avermitilis MA-4680
MHNPGHRFQAQDRFADGAQYIAGRFAKGTSGRRHAVVDPATGEEVYRYELAGTADVDAAVAAARAAFPGWAATTPGDRSDALHRFAAVLADRAEEFARAESLQCGKPLKLTREFDVPGTIDNTSFFAGAARHLQGQSAGEYSGDHTSYIRREPIGVVGSIAPWNYPLQMAAWKVLPAIAAGNTIVLKPAEITPLTSLLFAEAATRAGIPDGVVNIVTGAGRDAGEHLVAHPDVAMTSFTGSTAVGRRVAEIATSTVKRLHLELGGKAPFVVFDDADLDAAVHGAVAGSLINTGQDCTAATRAYVQRPLYEEFVARTAALMETVRLGDPFAHGTDLGPLVSHAQRDRVAGFVDRARAYARVVTGGEIPEELKDGAYYRPTLIADAAQDSEIVQSEIFGPVLVVLPFDSDDEGIRLANDTPYGLAASAWSRDVYRANRATREIKAGCVWVNDHIPIISEMPHGGYKASGFGKDMSAYSFEEYTQIKHVMFDNTAIVRKDWHRTIFGDRP

SEQ ID NO: 5931 - protein, 219 aa, Shigella dysenteriae
QELDLYICLRPVRYYQGTPSPVKHPELTDMVIFRENSEDIYAGIEWKADSADAEKVIKFLREEMGVKKIRFPEHCGIGIKPCSEEGTKRLVRAAIEYAIANDRDSVTLVHKGNIMKFTEGAFKDWGYQLAREEFGGELIDGGPWLKVKNPNTGKEIVIKDVIADAFLQQILLRPAEYDVIACMNLNGDYISDALAAQVGGIGIAPGANIGDECALFEAT

SEQ ID NO: 5932 - protein, 489 aa, Dechloromonas aromatica RCB
MSQPQRIHHFINGEFTASPDPRYFDKRSPVDGRVIAHIAEAGQADVDAAVTAARAALKGEWGKLSTDQRVDLLYGVANEITRRFDDFVAAEMADTGQPSHVQTHVFIPRGAANFKVFADVIKNVAAESFRMATPDGKGALNYAIRNPKGVIGVISPWNAPFLLMTWKVGPALACGNTVVVKPSEETPLTATLLGEVMNSVGIPKGVYNVINGFGPDSAGAYLTQHPGVDAITFTGETRTGTAIMKAAAEGMRDVSFELGGKNAGIVFADCNFEAAVDGIFRSAFLNTGQVCLGTERVYVERPIFENFVQALKAKVEGVRYGRPEDHTSTYGPLISQEHRDKVLSYYKKAVDEGATVVTGGGVPDMPAELAGGSWVQPTIWTGLPETAAVVREEIFGPCCHIRPFDSEEEVIELANANDYGLATTIWTENLSRAHRVAERVEVGVTWVNSWFLRDLRTPFGGSKQSGIGREGGVHSLEFYTETRNVCIKL

SEQ ID NO: 5933 - protein, 213 aa, Candida maltosa
DQSLNILLAGRDTTAGLLSFAVFELGRNPEVWSKLRQEIGDKFGLDSDSRIEDISFELLKLCEYLKAVINETLRLYPSVPRNGRFAAADTTLPHGGGKDGMSPILVRKGQTVMYSVYALQRDEKYYGKDANEFRPERWFEPEVRKLGWAFLPFNGGPRICLGQQFALTEASYVLVRLIQSFETLELSPEAAYPPAKLTHLTMCLFDGAPVRIE

SEQ ID NO: 5934 - protein, 215 aa, Shigella flexneri
LYICLRPVRYYQGTPSPVKHPELTDMVIFRENSEDIYAGIEWKADSADAEKVIKFLREEMGVKKIRFPEHCGIGIKPCSEEGTKRLVRAAIEYAIANDRDSVTLVHKGNIMKFTEGAFKDWGYQLAREEFGGELIDGGPWLKVKNPNTGKEIVIKDVIADAFLQQILLRPAEYDVIACMNLNGDYISDALAAQVGGIGIAPGANIGDECALFEAT

SEQ ID NO: 5935 - protein, 264 aa, Triticum aestivum
FPWQPQQPFPQTQQSFPLQPQQPFPREPQQPFSQPQLQFPQQPEQIIPQQPQQPFLLESQQPFPQQPQQPFSQPQQLIPMQPQQPFPQQSQQSQQPFPGPQQLFPELQQPIPQQPQQPFPLQPQQPFPQQSQQPFPQQPQQPFPLQPQQPFPQQPQQPFPQQPQQPFPLQPQQPFPLRPQQPFSQQPQQSQQSFPQPQPQQPQQPSILQPQQPFLQPQQQLSQQLEQTISQQPQQPFPQQPHQPQQPYPQQQPYGSSLTSIGGQ

SEQ ID NO: 5936 - protein, 198 aa, Zea mays
PEPTRPDMPSVQAEVGGGWRPKQQQYPLEIREVWADNVEREFKLIRAAIERFPYVSMDTEFPGVIHHPPPSVHHSALTPPQRYALLKSNVDALHLIQVGLAFAPSASSPPALAFQVNLREFDPRLHRHAPDSVRLLAASGLDLPAHRARGVSARAFAALLMSSGLVCNPDVAWVTFASAYDMAYLVKVLMGRKLPRAL

SEQ ID NO: 5937 - protein, 280 aa, Zea mays
MEAMPRPSVAPSLQLQLRPCPRWPRRKHCPPSSVPSRRVACSASAADADVVDLFDAAKLTVDKFVTSGMVVGLGSGPASALAIQYLGTRLRRGSLTGITAVTSQSVLSASEADKAGIRANSYQEGTQIDFAFTDAEAIEEGTLAAVIGRRKTESGEPSFMAEKAMAKSAHKLAFITGNDKYVTTGVEGSIPVLIKKVWRRPSFGTAGPLGGDHPLVTKEGHHVLDVIFTTPIQDLGQVAEKLDKVDGVVDHGIICSNQPYAVIASKGEVQVLDEKSSVIQ

SEQ ID NO: 5938 - protein, 637 aa, Zea mays
HTGDWKIDESPVDGKKFDRQALEELSKEGVTLMMSDSTNVLSPGRSISESVVAGSLLRHISEAKGRVITTQFASNIHRIGSIKAAADLTGRKMVFVGMSLRTYLEAAFKDGKAPLDPSTLQIKVEDMDAYAPKDLLVVTTGSQGEPRAALNLASYGGSHALKLSKEDVLLYSAKVIPGNETRVMKMMNRLTDLGPKIIMGKDSGLHTSGHAYREELEEVLRIVKPQHFLPVHGELLFLKEHELLGRSTGIRHTTVIKNGEMLGVSHLRNRRVLSNGFVSLGKEDLQLMYSDGDKAFGTSTDLCVDERLRIASDGIIFVSMEIFRPQKEHGLAQSGLKGKFKITTRCLWLDNGRLLDALYKAAHAALSSCPVNCPHSHMERMVAEILRKMVRKYSGKRPDVIAVATENTTAGFSEHLDTKASGNFGPSSATSHLSRSPATSLEGSYKTHPDNPEVDAEEILPETVRTTPDDATTSSNGEALFSSDLHQPKTLEHFWESFKSPTAVKIARIVNGGNKQNFGKIGIMGQDSLIQSAPAPVKSSKKNKWKPEEIKSLIQMRGEMNERFQSVKGRMVLWEEISDNMLKQGISRTPAQCKSLWTSLVQKYEESKKDAESMKTWPYFSAMDRILSQQGEMATKG

SEQ ID NO: 5939 - protein, 81 aa, Glycine max
  misc_feature (20)..(20): Xaa can be any naturally occurring amino acid
  misc_feature (23)..(23): Xaa can be any naturally occurring amino acid
  misc_feature (51)..(51): Xaa can be any naturally occurring amino acid
TAKNTAPAETTDNRAGAGRXAPXTGRKAKAGHPTRKTNNDSTTRASNGGRXQGMHFLPPVGKKKGETLSYPPDLDDAQLSK

SEQ ID NO: 5940 - protein, 234 aa, Antirrhinum majus
MGRGKIVIQRIDKSTSRQVTFSKRRSGLLKKAKELAILCDAEVGVVIFSSTGKLYEFSSTSMKSIIERHTKTKEDHHQLLNHGSEVKFWQREAATLRQQLQDLQENHRKLMGEELQGLNVEDLHRLENQLEMSLRGVRMKKVQMLTDEVHELRRKGHLIHQENNELYEKVKLLQQENKELCKKAYGTRDVSAANGTALVPFGFAIGREQFEPIQLHLSQPEPENIETSRASGSK

SEQ ID NO: 5941 - protein, 309 aa, Glycine max
  misc_feature (228)..(228): Xaa can be any naturally occurring amino acid
PRRYLFFFFLLNYFSFYNLLLYHSSGVYLQEVLLPGGHGLMVRGYLPVINTLAKGLDILLGHRVTKVVRRYNGVKVTVESGKTFFADAAVIAVPLGVLKAKKILFKPKLPDWKEAAIADLGIGLENKIILHFENVFCPNVEFLGVVADTSYGCSYFLNLHKAAGHAVLVYMPSGQLAKDVEKMSDEAAVNFAFMQLKKILPDASSPIQYLVSRWGSDINSLGSYSYDXQLGKPHELYERLRVPVDNLFFAGEATSMSYPGSVHGAFSTGMMAAEDCRMRVLERYGEVDLFQPVMGEEASLSIPLQISRL

SEQ ID NO: 5942 - protein, 416 aa, Escherichia coli
MESKVVVPAQGKKITLQNGKLNVPENPIIPYIEGDGIGVDVTPAMLKVVDAAVEKAYKGERKISWMEIYTGEKSTQVYGQDVWLPAETLDLIREYRVAIKGPLTTPVGGGIRELLVALRQELDLYICLRPVRYYQGTPSPVKHPELTDMVIFRENSEDIYAGIEWKADSADAEKVIKFLREEMGVKKIRFPDHCGIGIKPCSEEGTKRLVRAAIEYAIANDRDSVTLVHKGNIMKFTEGAFKDWGYQLAREEFGGELIDGGPWLKVKNPNTGKEIVIKDVIADAFLQQILLRPAEYDVIACMNLNGDYISDALAAQVGGIGIAPGANIGDECALFEATHGTAPKYAGQDKVNPGSIILSAEMMLRHMGWTEAADLIVKGMEGAINAKTVTYDFERLMDGAKLLKCSEFGDAIIENM

SEQ ID NO: 5943 - protein, 242 aa, Zea mays
  misc_feature (204)..(204): Xaa can be any naturally occurring amino acid
  misc_feature (211)..(211): Xaa can be any naturally occurring amino acid
LAGSCLRRLMFAWKVGPALACGNTLVPKTAEQTPLSALYISKLLHEAGLPEGVVNVVSGFGPTAGAALASHMDVDKIAFTGSTDTGKIILELAAKSNLKTVTLELGGKSPFIIMDDADVDHAVELAHFALFFNQGQCCCAGSRTFVHERVYDEFVEKAKARALKRVVGDPFRKGVEQGPQIDDEQFNKILRYIRYGVDGGATLXDGGDRLXDKGFYIQPTDFSDVQDGMKIAQEEILGPVQS

SEQ ID NO: 5944 - protein, 272 aa, Oryza rufipogon
MGRRACCAKEGMKRGAWTSKEDDVLASYIKSHGEGKWREVPQRAGLRRCGKSCRLRWLNYLRPNIKRGNIDDDEEELIVRLHTLLGNRWSLIAGRPPGRTDNEIKNYWNSTLSRKIGTAATAAAGSRGGSTPDTARATDAASSSSVVPPGQQQQPASRADTDTATAAAAAAATTTTVWAPKAVRCTRGFFFHDRETAPLAAAAPAPAGELGDGDDVDCDYYCSGSSSAATTTSSSSLPAVVEPCFSAGDDWMDDVRALASFLDTDDAWNLCA

SEQ ID NO: 5945 - protein, 416 aa, Escherichia coli
MESKVVVPAQGKKITLQNGKLNVPENPIIPYIEGDGIGVDVTPAMLKVVDAAVEKAYKGERKISWMEIYTGEKSTQVYGQDVWLPAETLDLIREYRVAIKGPLTTPVGGGIRSLLVALRQELDLYICLRPVRYYQGTPSPVKHPELTDMVIFRENSEDIYAGIEWKADSADAEKVIKFLREEMGVKKIRFPDHCGIGIKPCSEEGTKRLVRAAIEYAIANDRDSVTLVHKGNIMKFTEGAFKDWGYQLAREEFGGELIDGGPWLKVKNPNTGKEIVIKDVIADAFLQQILLRPAEYDVIACMNLNGDYISDALAAQVGGIGIAPGANIGDECALFEATHGTAPKYAGQDKVNPGSIILSAEMMLRHMGWTEAADLIVKGMEGAINAKTVTYDFERLMDGAKLLKCSEFGDAIIENM

SEQ ID NO: 5946 - protein, 275 aa, Sinorhizobium meliloti
MHAVSSNGANIPALGFGTFRMSGAEVLRILPQALKLGFRHVDTAQIYGNEAEVGEAIQKSGIPRADVFLTTKVWVDNYRHDAFIASVDESLRKLRTDHVDLLLLHWPGSDVPMAERIGALNEVRNAGKVRHIGISNFNTTQMEEAARLSDAPIATNQVEYHPYLDQTKVLQTARRLGMSLTSYYAMANGKVPADPLLTEIGGRHGKTAAQVALRWLVQQQDVIVLSKTATEARLKENFAIFDFALTREEMAAVRELARPNGRIVNPQGLAPEWDA

SEQ ID NO: 5947 - protein, 78 aa, Zea mays
MDSSSGSQDKKFRDNDRPEAKEANSTAQHLVDFTEAEEDLVSRMHRLVGNRWEIIAGRIPGRTAEEVEMFWSKKYQER

SEQ ID NO: 5948 - protein, 106 aa, Brassica napus
  misc_feature (21)..(21): Xaa can be any naturally occurring amino acid
  misc_feature (36)..(38): Xaa can be any naturally occurring amino acid
  misc_feature (40)..(40): Xaa can be any naturally occurring amino acid
  misc_feature (83)..(83): Xaa can be any naturally occurring amino acid
  misc_feature (91)..(91): Xaa can be any naturally occurring amino acid
MASVRLSSATMTSSLAHATMXAPFIGLKSSAAFPVXXXAXTEITSITSNGGRINCMKVWPPVGKKKFETLSYLPGLTDVEIAXEIDYLIRXKWTPCIEFEVEHGFV

SEQ ID NO: 5949 - protein, 183 aa, Triticum aestivum
MAGVGRNMVAPLLVLNLIMYLIVIGFASWNLNHFINGLTNRPGVGGNGATFYFLVFAILAGVVGAASKLAGVHHVRTWRGDSLATSASSALVAWAITALAFGLACKEIHIGGYRGWRLRVLEAFVIILMFTQLLYVLALHSGLFGNQFGGNHAGGYPAEHAYGAGGDPHNKGMGMGTGGVARV

SEQ ID NO: 5950 - protein, 341 aa, Nostoc sp. PCC 7120
MLAALLYGQEDLRLEQVADPSPDVGEVVIKVGAATTCGTDLKVWRRGGHAKMLKLPTLFGHEAAGEIVAVGADVTGWQIGDRVVANNSAPCMKCFFCQRQEYSLCPNLTWNNGTFAEYLKIPAPIVQHNLLQVPDELPLSLAAMTEPLACVLHGVARSHIKPQDRVVVLGDGAIGLMFVAVLADKVEVLLWGGNDQRLEIGQKLGATKTFNYHQNPDIPHVVKELTQGWGADVVIEATGVPSVWETAIACARPGAIVNLFGGCPRDTTITVNTEQLHYSELTLKGVFHNTPEYVRAALALIASRKIPFELLISEQRPLKDLEQVFYDMKARKVIKVAMVCS

SEQ ID NO: 5951 - protein, 117 aa, Nicotiana attenuata
MAKVALLVVVCMAAVAVMLTPHADAAISCGQVVASLSPCISYVRQGGAIPAPCCSGIKSLNNQATSTPDRQTACNCIKSAAAAINGINYSLAGSLPSKCGVNLPYKISPSIDCSTVH

SEQ ID NO: 5952 - protein, 166 aa, Glycine max
MAAAFASRCSRVGRSLSGGLSNSSPGLFTSSHGMTCNNLFSQQQRTFIQMRTVLKVVDNSGAKKVMCIQALKGKKGARLGDTIIASVKEAHPNGKVKKGKVVYGVVVRAAMQKGRCDGSEVKFDDNAVVLVDKQGQPIGTRVFGPVPHELRQKKHVKILTLAGHIA

SEQ ID NO: 5953 - protein, 75 aa, Zea mays
  misc_feature (32)..(32): Xaa can be any naturally occurring amino acid
KPFSDIRFYILLQATIICIDELLCMRNNHYSXNNFQAQADAVNLICSANTHSNPKNTIGVMTMAAKGDHFLNTPT

SEQ ID NO: 5954 - protein, 437 aa, Helicobacter hepaticus ATCC 51449
MLDLKALDLAHIWHPCTQMKDHETLPLIPIKSAKGVYLYDFEGKAFIDGISSWWVNLFGHCNPFINAAITKQLQQLEHIILAGFSHEGIIRYSEKLCALLPQSLQKCFYADNGSSAIEVALKMSFHSHYNAGNKDKNAFLSLSNAYHGETLGALSVGDVALYKSTYQPLLLECLSAPVPRGIWNPDDGTISGDYHMELEALEEILKHHAHRICAFILEPLLQCAGGMNMYPAAYIKEACALARKHNIHIIFDEIAVGFGRTGSMFALEQCDVTPDFLCLSKGITGGYLPLSVVVTSNNIYEGFYAPYEEQKAFLHSHSYTGNALAIAAANAVLDIFEQDDIIFSNHSLSVAIVKRWSMLAKHKKVGNLRVCGMVFAFDLQGCKLKRAGLYVYENALAKGVLLRPLGNTIYFMPPYVINLEIAEYVCNVLDAILEDDF

SEQ ID NO: 5955 - protein, 288 aa, Shigella flexneri 2a str. 301
MAEKKQWHETLHDQFGQYFAVDNVLYHEKTDHQDLIIFENAAFGRVMALDGVVQTTERDEFIYHEMMTHVPLLAHGHAKHVLIIGGGDGAMLREVTRHKNVESITMVEIDAGVVSFCRQYLPNHNAGSYDDPRFQLVIDDGVNFVNQTSQTFDVIISDCTDPIGPGESLFTSAFYEGCKRCLNPGGIFVAQNGVCFLQQEEAIDSHRKLSHYFSDVGFYQAAIPTYYGGIMTFAWATDNDALRHLSTEIIQARFLASGLKCRYYNPAIHTAAFALPQYLQDALASQPS

SEQ ID NO: 5956 - protein, 157 aa, Zea mays
  misc_feature (10)..(10): Xaa can be any naturally occurring amino acid
  misc_feature (61)..(61): Xaa can be any naturally occurring amino acid
  misc_feature (121)..(121): Xaa can be any naturally occurring amino acid
  misc_feature (130)..(130): Xaa can be any naturally occurring amino acid
RATMRHCPSXTMCIEIEIQVVRDPRSEKYSDSFRLWREWELHRSCGESGIALYEFKGIDSXLGCTYRIVVLRLCLRHLWNSSIQWFGIQREGSMKEIISASTRSVYGPDPHDVGRFIQGEXNHGGQISVXKTAGSIDPIAGSVEYVETLVMNPESDY

SEQ ID NO: 5957 - protein, 381 aa, Glycine max
MSPAAGVSVPLLGDSKGTPPPASVPGAVFNVATSIVGAGIMSIPAIMKVLGVVPAFAMILVVAVLAELSVDFLMRFTHSGETTTYAGVMREAFGSGGALAAQVCVIITNVGGLILYLIIIGDVLSGKQNGGEVHLGILQQWFGIHWWNSREFALLFTLVFVMLPLVLYKRVVAFVGICCGLAITALVQGKTQTPRLFPRLDYQTSFFDLFTAVPVVVTAFTFHFNVHPIGFELAKASQMTTAVRLALLLCAVIYLAIGLFGYMLFGDSTQSDILINFDQNAGSAVGSLLNSLVRVSYALHIMLVFPLLNFSLRTNIDEVLFPKKPMLATDNKRFMILTLVLLVFSYLAAIAIPDIWYFFQFLGSSSAVCLAFIFPGSIVLR

SEQ ID NO: 5958 - protein, 197 aa, Shigella flexneri
YQGTPSPVKHPELTDMVIFRENSEDIYAGIEWKADSADAEKVIKFLREEMGVKKIRFPEHCGIGIKPCSEEGTKRLVRAAIEYAIANDRDSVTLVHKGNIMKFTEGAFKDWGYQLAREEFGGELIDGGPWLKVKNPNTGKEIVIKDVIADAFLQQILLRPAEYDVIACMNLNGDYISDALAAQVGGIGIAPGANIGD

SEQ ID NO: 5959 - protein, 368 aa, Nostoc sp. ATCC 53789
MPLAAVMTAPNQPVEVQQLPDPVLEKGGIILETLYSEVCGTDVHLLHGRLEGVPYPIIPGHFSVGRVVETGGAVSDVNGKLIQPGAIATFLDVHETCYNCWYCLVAKASTRCPKRKVYGVTYSAKDGLLGGWSELIYLKPGVKVLTLPEEVSPKQFIAGGCALPTALHAIDRAQIQIGDVVVVQGCGPVGLSVAILALLSGAGKVIVIDKFESRLVVAKSFGVDETLAIKADDPRQHIERVLELTNGHGADVTIEATGIPIAVKEGLNMTRNGGRYVIVGHYTNTGEILINPHLEINLKHIDIRGTWGIDFSHFYRMIELLKRHSDSSKNIAWSSIISRSYTLQQINQALADVEQGSVLKAVIQPNLS

SEQ ID NO: 5960 - protein, 155 aa, Glycine max
MSSAKKITLKSSDGEAFEVEEAVALESQTIKHMIEDDCADSGIPLPNVTSKILAKVIEYCKKHVEAANPEDKPSEDDLKAWDAEFVKVDQATLFDLILAANYLNIKSLLDLTCQTVADMIKGKTPEEIRKTFNIKNDFTPEEEEEVRRENQWAFE

SEQ ID NO: 5961 - protein, 99 aa, Brassica napus
MDQEIEIPTFFLCPISLDIMKDPVIVSTGITYDRDSIEKWLFTGKKNTCPVTKQVITETDLTPNHTLRRLIQSWCTLNASHGIERIPTPKPPISKSEIE

SEQ ID NO: 5962 - protein, 479 aa, Streptomyces avermitilis MA-4680
MSTELRRLRNHIDGEFRDAADGRTTEVVNPATGEAYATAPLSGQADVDAAMAAAAAAFPAWRDQTPAERQKALLKIADAFEERAEELIAAEVENTGKPIGLTRSEEIPPMVDQIRFFAGAARMLEGRSAGEYMEGMTSIIRREPIGVCAQVAPWNYPMMMAVWKFAPALAAGNTVVLKPSDTTPASTVLIADIIGSILPKGVFNVICGDRDTGRAMVEHPTPAMASITGSVRAGMSVAESAAKDVKRVHLELGGKAPVVVFEDTDIPKAVEDISVAGFFNAGQDCTAATRVLVQESIHDEFVAALAKAAADTKTGQPDDEDVLYGPLNNPNQLKQVAGFVERLPAHAKVEAGGHQVGEKGYFYAPTVVSGLKQDDEIIQNEVFGPVITVQSFTDEAQAIEWANGVDYALASSVWTKDHGRAMRLSKSLDFGCVWINTHIPLVAEMPHGGFKKSGYGKDLSAYGFDDYTRIKHVMTSLDS

SEQ ID NO: 5963 - protein, 502 aa, Lotus corniculatus var. japonicus
MAALPECSAANLAQLIGPNATDAAAVAGFICDQFTAVGQRFSDTAFAVDSTYLLFSAYLVFSMQLGFAMLCAGSVRAKNTMNIMLTNVLDAAAGGLFYYLFGFAFAFGAPSNGFIGRHFFGLKDVPTVAFDYSYFLYQWAFAIAAAGITSGSIAERTQFVAYLIYSSFLTGFVYPVVSHWFWSGDGWASATNTGNLLFGTGVIDFAGSGVVHMVGGVAGLWGALIEGPRIGRFDHAGRAVSLRGHSASLVVLGTFMLWFGWYGFNPGSFTKILSAYDSGNYYGQWSAIGRTAVTTTLAGCTAALTTLFGKRIISGHWNVTDVCNGLLGGFAAITAGCSVVEPWAAIVCGFVAAVVLIACNMLAEKVRYDDPLEAAQLHGGCGAWGIIFTALFAKEEYVNQVYPGKPGRPYGLFMGGGGKLLGAHVIQILVIIGWVSATMGPLFFILNKMKLLRISTEDELAGMDLTRHGGFAYAYEDDESHKPGIQLRKIEPNSSSTPSAES

SEQ ID NO: 5964 - protein, 296 aa, Glycine max
  misc_feature (24)..(24): Xaa can be any naturally occurring amino acid
MAIATETQPQQHKDSSEVSGSAAXERRWTLNDFDIGKPLGRGKFGHVYLAREKTSNHIVALKVLFKSQLQQSQVVHQLRREVEIQSHLRHPHILRLYGYFYDQKRVYLILEYAPKGELYKELQKCKFFSERRAATYVASLARALIYCHGKHVIHRDIKPENLLIGAQGELKIADFGWSVHTFNRRRTMCGTLDYLPPEMVESVEHDASVDIWSLGVLCYEFLYGVPPFEAKEHSDTYRRIIQVDLKFPPKPIVSSAAKDLISQMLVKDSSQRLPLHKLLEHPWIVQNAEPSGVYRS

SEQ ID NO: 5965 - protein, 323 aa, Zea mays
LVLSVFNTQEGIAHEVLQWYLCRMEGWFATDADSISLQGWDQEVLLPGGHGLMVRGYRPVINTLAKGLDIRLNHKVVEIVRHRNRVEVTVSSGQTFVADAAVVTVPLGVLKAKTIKFEPRLPEWKEEAIRELTVGVENKIVLHFGQVFWPNVEFLGVVSSSTYGCSYFLNLHKATGHPVLVYMPAGRLARDIEKTSDEAAAQFAFSQLKKILPNAAEPINYLVSRWGSDENTLGSYTFDGVNKPRDLYEKLRIPVDNLFFAGEATSVKYTGTVHGAFSTGVMAAEECKMRVLERFRELDMLEMCHPAMGEDSPVSVPLLISRL

SEQ ID NO: 5966 - protein, 272 aa, Oryza rufipogon
MGRRACCAKEGMKRGAWTSKEDDVLASYIKSHGEGKWREVPQRAGLRRCGKSCRLRWLNYLRPNIKRGNIDDDEEELIVRLHTLHGNRWSLIAGRLPGRTDNEIKNYWNSTLSRKIGTAATAAAGSRGGSTPDTARATDAASSSSVVPPGQQLQPASRADTDTATAAAAAAATTTTVWAPKAVRCTRGFFFHDRETAPLAAAAPAPAGELGDGDDVDCDYYCSGSSSAATTTSSSSLPAVVEPCFSAGDDWMDDVRALASFLDTDDAWNLCA

SEQ ID NO: 5967 - protein, 303 aa, Zea mays
MAGLSLEHPWAFAFGLLGNVISFMTFLAPIPTFYRIYKSKSTEGFQSVPYVVALFSAMLWIFYALIKSNETFLITINAAGCVIETIYIVMYFVYAPKKAKLFTAKIMALLNGGVFGVILLLTLLLFKGSKRVVLLGWICVGFSVSVFVAPLSIMRRVIQTKSVEYMPFSLSLSLTLSAVVWFLYGLLIKDKYVALPNVLGFIFGVVQMVLYVFYMNKTPVAAAVGKDAGKLPSAADDHVLVNIAKLNPALPERTSGTMMHPVTQMAAVPARSCAAEATAPAMLPNRDVVDVFVSRHSPAVHVV

SEQ ID NO: 5968 - protein, 270 aa, Oryza glaberrima
MGRRACCAKEGMKRGAWTSKEDDMLASYIKSHGEGKWREVPQRAGLRRCGKSCRLRWLNYLRPNIKRGNIDDDEEELIVRLHTLLGNRWSLIAGRLPGRTDNEIKNYWNSTLSRKIGTAATAAAGSRGGSTPDTARATDAASSSSVVPPGQQQQPASRADTDTATAAAAATTTTVWAPKAVRCTRGFFFHDRETAPLAAAAPAPAGELGDGDDADCDYYCSGSSSAATTTSSSSFPAVVEPCFSAGDDWMDDVRALASFLDTDDAWNLCA

SEQ ID NO: 5969 - protein, 170 aa, Zea mays
  misc_feature (25)..(25): Xaa can be any naturally occurring amino acid
MAPTVMMASSATAVAPFQGLKSAAXLPVARRSTRSLGNVSNGGRIRCMQVWPAYGNKKFETLSYLPPLSTDDLLKQVDYLLRNGWIPCLEFSKVGFVYRENSTSPCYYDGRYWTMWKLPMFGCNDATQVYKELQEAIKSYPDAFHRVIGFDNIKQTQCVSFIAYKPPGSD

SEQ ID NO: 5970 - protein, 269 aa, Oryza glumipatula
MGRRACCAKEGMKRGAWTSKEDDVLASYIKSHGEGKWREVPQRAGLRRCGKSCRLRWLNYLRPNIKRGNIDDDEEELIVRLHTLLGNRWSLIAGRLPGRTDNEIKNYWNSTLSRKIGTAAAGSRGGSTPDTARATDAASSSSVVPPGQQQQPASRADTDTATAAAAAAATTTTVWAPKAVRCTRGFFFHDRETAPLAAAAPAPAGELGDGDDVDCDYYCSGSSSAATTTSSSSLPAVVEPCFSAGEDWMDDVRALASFLDTDDAWNLCA

SEQ ID NO: 5971 - protein, 460 aa, Bradyrhizobium japonicum USDA 110
MSMLPNSQEARDVAYQLHPYTNARAHQQAGPLVIERGEGPYVFDASGKRYFEAMAGLWSVGLGFNEKRLVEAAHKQMLALPFYHTFSAKSHGPSIDLAEKLVALAPVPMSKVFFTNSGSEANDTVLKLIAYRSNALGQPQRKKVISRMRAYHGVTIASASLTGLPNNHRSFDLPLPNILHTGSPHFYKDGAPGESEEAFATRRAEELDALIQKEGPDTIAAFFGEPVMGAGGVIVPPATYWDKIQAVLKKYDILLVADEVICGFGRTGKMFGCETYGIKPDAIVVSKQITSSYFPLSAILMNDRMFEPIADESNKIGVLGHGFTAGGHPVGSAIALENLKIIEERGLVAHAAELGGYMQGKLRELAGHPLVGEVRGVGMIAALELVLDKQRKTAAATPGAVGGIASRMLQERGVISRNMLDAIAICPPLIVNKTQIDELVAAISGVLEDMKAEVAKLTPA

SEQ ID NO: 5972 - protein, 433 aa, Ralstonia eutropha JMP134
MTPSEVKATLSFSDGSPSVDLPIYQGTVGPDVIDIRKLYGQTGKFTYDPGFMSTASCNSKITYIDGDKGELLYRGYPIEHLAQKCDHLETCYLLLKGELPDATQKEEFVGRVMKHTMVHEQLQFFLRGFRRDAHPMAVLTGLVGAMSAFYHDAMDIDDPHQREISAIRLIAKMPTLVAMAYKYNIGQPYIYPQNDLSYSGNFLRMMFATPCAPYTVNPVLERALDRIFILHADHEQNASTSTVRLAGSSGTNPFAAIAAGVACLWGPAHGGANEAALKMLEEIGSVDNIGEFIKQVKDKNSGVRLMGFGHRVYKNYDPRAKLMRETCHEVLNELGLHNDPLFKLAMELEKIALEDEYFVSRKLYPNVDFYSGIVQRALGIPTSLFTCIFALARTPGWISQWEEMITDPEYKIGRPRQLFNGAASRDQSEAAAS

SEQ ID NO: 5973 - protein, 352 aa, Pseudomonas aeruginosa UCBPP-PA14
MKALRWHAARDLRLSELERQAPRPGEVELEVAYCGICGSDLHEYQSGPHSIPQAEAHPLSGCRAPLTLGHEFCGVVAALGPGVEGLRIGDRVAVEPEYRCGECRYCREGRYNLCESMGFIGLMGDGGFAERARVPAYMLHRLPDAVGFRQAAVLEPAAVALHALRRSSLAPGQRCAVFGLGPIGLLLVMLARLRGIEDIAAVDVSPERLALAGEFGASRALDARDGDTAARLREGGALDCAFEAAGSQASLDAALASLRKGGELVLVSLMGEVRLDAFDLVNRELRLLGSVGYRDAYPELIALLADGRLDLARAVTRSVPLEQAVEHGFEALLRDKSQVKVLVNPNPALADA

SEQ ID NO: 5974 - protein, 329 aa, Fusobacterium nucleatum subsp. nucleatum ATCC 25586
MRVKIKKMEKKLAILTSGGDAPGMNAAIRATAKIAEYYGFEVYGIRRGYLGMLNDEIFPMTGRFVSGIIDKGGTVLLTARSEEFKEARFREIAANNLKKKGINYLVVIGGDGSYRGANLLYKEHGIKVVGIPGTIDNDICGTDFTLGFDTCLNTILDAMSKIRDTATSHERTILIQVMGRRAGDLALHACIAGGGDGIMIPEMDNPIEMLALQLKERRKNGKLHDIVLVAEGVGNVLDIEEKLKGHINSEIRSVVLGHIQRGGTPSGFDRVLASRMAAKAVEVLNKGEAGVMVGIEKNEMVTHPLEEACSVDKRKSIEKDYELALLLSK

SEQ ID NO: 5975 - protein, 165 aa, Magnaporthe grisea 70-15
MSDSPQSNPKEIEGAHTPDEEAQMNDPQDPQSAGLGYEFEVKEQDRWLPIANASEKCHQEKRKTVNGEDILFAMTSLGFENYSEALKIYLAKYREQNQSTRGEGQQNRPSSQGYGAPPGAAPGTNATAGFPGGELGQQGTEAPGDASGYLYSTQPGHNGATAGEY

SEQ ID NO: 5976 - protein, 466 aa, Oryza sativa (japonica cultivar-group)
MPEKGTVVMSRYELGRSLGHGTFSKVYQARSLVSGETVAVKVIDKEKALRAGAGMVDQIEREVAVMRLVGRHPNVVRLHEVMASRSKIYFVMELVRGGELLARLVAGGGRLGEDAARRYFHQLVAAVDFCHSRGVYHRDLKPENLLVDDDGSGGGGNLKVTDFGLSALSASRRHDGLLHTTCGTPSYVAPEIIGDKGYDGATADVWSCGVILFLLLAGYLPFFDSNLMEMYKKITNGEFKVPDWFTPDARSLISRLLDPNPTTRITIDELVKHPWFKKGHTKRPASSNTMKLNEEEKPANAAMNMKPASLNAFDIISLSQGFDLSGMFCCHGHSSRTQDQLFVTGKPATAIVSRLEEIAETEHFTVKKKQKKRQEEDGMAVKLQGWKEGRKGQLAIDAEIFEVSPSCYVVEVKKTAGDTLEYQAFCNRDLRPSLNDICWTSPATAASEKNQLPAVSEVSPLSSPRN

SEQ ID NO: 5977 - protein, 193 aa, Zea mays
  misc_feature (24)..(24): Xaa can be any naturally occurring amino acid
  misc_feature (67)..(67): Xaa can be any naturally occurring amino acid
MARMACRVALFATVLLCAAAGAAXGTKRAPIPDDLRDVIDEEEDDEWRQYRVPSSRGPGRGDGPPPXLSRMDPAALQAELLRGQTGPSFGFVKLRPGTTRSREHVVGIARRWSNVLRTGSVDARFTAVNFVTLMFTMERGRDILELKEFVLSQAEAYELRIGDQVFRRPGDPPLDQVLRKPRKKKRRKSRDEL

SEQ ID NO: 5978 - protein, 1571 aa, Lactobacillus johnsonii NCC 533
MVKENITIQSNAKEVQSKAAVTILGTDADNYPKKAGDLIGDNRYIYQILNLNGTSFVSSDNKKLILSVNRNNLSDDNLYAYVTDNSFTEILSTHTIQAGHFKNIEVVNGWHTVKFLVVNSGKSNISINGSETPVGNASTVVGSTRIEYCLGNSTSIDASSIGEIIPVYTEQSVIKYYYNQNGNLIEIPGTDKYPNVNISGWTGQGFIVDNVDQYKQLINGFYLDASKLPTGSFTGTLSQFGDGSYYKKVYYSAGDKNEGTIDQLTVDFTVVYRQIDATGKMEVLMYDGKDMTKVIESHTVEAGKSVNFSHNNYTARNPFVTDSAHEVQFVYKELGSLILVDENGKEIHPSVKFNNDKDDPTKAGLTYTPVIEGYIADIEFVTPEDPGKDIKVVYRLREDAKATITIVDLDNLENNGGKVAELNATGKVYSVINFVDLSTTLQDLIDRGYVVISNDFKPGTKFDVKDLEFKIELKHGLEEINESQSVDKIINYVDGVGNKLHDSVTQTAIFKTNGYRDKVTGKIVEVTEVEHDDGYVIAIEITNKDASLQWTSKTDVFESIKSPDIVGYTTTQKWSTADKVDQDVKHRVENIVYDKKAQVGTITFWDETSNKQLGSTINIAGNYREVINYQIIENVLNSIKDYENNNYILVSNPLTYATTFGDAEYNPGCNDFRVILKHKIAENTQNKEVNRVITYVYADGPNKDQEAANSVAQKVTFIGTGQYDSVDKAWIGDIVWTTEAGDMNYTFAPVESPKVTGYGADRGIVEAKIVSGSSDNITEEVLYYANQTGASIQYIDDVTGLVIGRDEVQGKVDHQINWKQNHENVLNLFIESGYKLVSSDYEFGKDYYYSADEAKNNFTIHLTRDLIIIDPTNPDSPAYGSEDYIKEVIQEIQYVFENGSTAAESNKQNIKFTAYGVVDKTTGKYVVLDENGKIVVDENKQPIEGTLTWKADITDPKFAEVISPTLAGYTADKTWVSGSSVTENTPNKVIVVTYTANAANAEIIYVDETTGKQLETAVVDGKYNETINYSTADKIKYYESLGYELVKDGYVGGEFGEDTKTFYVTFKHGMVVVNPETPGKPDEPINPDNPDGPKYPADSANLNKDVTNTIHYVYADGTTAKPSHTQTLTFVGSGVIDKVTGQYVEVDENGNVKLDENGNPIPGKLTWTASDGTTFVEVVSPTIVGYTPDKGVVNAVEGINQDSKNLETTVIYTANAAKAEIIYVDETTGKQLETAVVDGKYNETINYSTADKIKYYESLGYELVKDGYVGGEFGEDTKTFYVTFKHGTVTVTPDDKFTEEDPINPDNPDGPKYPFDSIALDKTITRTIKYVYADGTKAKDEVVQKLRFRGTAIIDKVTGEVIILDKNGRKISDGIKWTALDGTTFIQVISPDIAGYTPDRKEIGSLENVDNNTDDIIETVVYNKDIVDPEEPKDPVDPEEPKDPVDPEEPKDPEEPKDPVDPEEPKDPVDPEEPKDPEDPEDSKVPVQAETPTESTNDAPILPDQLSTDTTLKEVATVETKESGKVEAATTEDVSLPQTGHKHSNAGLIGLGLATIASLLGLAGTRKRKKD

SEQ ID NO: 5979 - protein, 279 aa, Bacillus anthracis str. Ames 0581
MKNLQSKAVLNNGVEMPWFGLGVFKVEEGPELVEAVKSAIKAGYRSIDTAAIYGNEKAVGEGIRAGIEATGISREDLFITSKVWNADQGYEETIAAYEESLKKLELDYLDLYLVHWPVEGKYKDTWRALETLYKEKRVRAIGVSNFQVHHLQDVMKDAEIKPMINQVEYHPRLTQKEVQAFCKEQGIQMEAWSPLMQGQLLDNETLQEIAEKHGKTTAQVILRWDLQNGVITIPKSTKEHRIIANADVFNFELTKEDMEKIDALNQNHRVGPDPDNFDF

SEQ ID NO: 5980 - protein, 337 aa, Streptococcus mutans UA159
MKRIAVLTSGGDAPGMNAAVRAVVRKAISEGMEVCGINRGYAGMVEGDIFPLDAKGVSNILSRGGTFLQSARYPEFAKLEGQLKGIEQLKKHGIEGVVVIGGDGSYHGAMRLTEHGFPAVGLPGTIDNDIVGTDYTIGFDTAVNTATDALDKIRDTSFSHGRTFVVEVMGRNAGDIALWSGIAAGADQIIIPEEPYDIKEVVANVKNGYLSKSKNHHLIVLAEGVMHGEEFAAQMKEAGDNSDLRVTNLGHILRGGAPTPRDRVIASWMGAHAVELLREGKGGLAIGIQNEELVEHPILGSAEDGALFSLTEQGEIVVNNPHKARLDFAALNRDLSN

SEQ ID NO: 5981 - protein, 204 aa, Shigella flexneri
DLYICLRPVRYYQGTPSPVKHPELTDMVIFRENSEDIYAGIEWKADSADAEKVIKFLREEMGVKKIRFPEHCGIGIKPCSEEGTKRLVRAAIEYAIANDRDSVTLVHKGNIMKFTEGAFKDWGYQLAREEFGGELIDGGPWLKVKNPNTGKEIVIKDVIADAFLQQILLRPAEYDVIACMNLNGDYISDALAAQVGGIGIAPGA

SEQ ID NO: 5982 - protein, 106 aa, Triticum aestivum
  misc_feature (82)..(82): Xaa can be any naturally occurring amino acid
  misc_feature (93)..(93): Xaa can be any naturally occurring amino acid
MAPTVMASSATSVAPFQGLKSTAGLPVSRRSNGASLGSVSNGGRIRCMQVWPIEGIKKFETLSYLPTLSKEALLKAGRLPYXLKWVPCLQFNXVGVHLPRQKRNLG

SEQ ID NO: 5983 - protein, 176 aa, Triticum aestivum
  misc_feature (100)..(100): Xaa can be any naturally occurring amino acid
MAPAVMASSATTVAPFQGLKSTAGLPISRRSGSAGLSSVSNGGRIRCMQVWPIEGIKKFETLSYLPPLSTEALLKQVDYLIRSKWVPCLEFSKVGFVFRXEHNSSPGYYDGRYWTMWKLPMFGCTDATQVLNEVEEVKKEYPDAYVRVIGFDNMRQVQCVSFIAFRPPGCEESGKA

SEQ ID NO: 5984 - protein, 363 aa, Zea mays
  misc_feature (98)..(98): Xaa can be any naturally occurring amino acid
  misc_feature (123)..(123): Xaa can be any naturally occurring amino acid
  misc_feature (291)..(291): Xaa can be any naturally occurring amino acid
LSQTAQSPRLFKPTGGHILAARAAAGNAPTSPVREGVTELDAVAGFSEIVPDTVVFDDFERFAPTAATVSSSLLLGITGLPDTKFKSAIDTALADGGXTHLEKAEDRDVLVTSPGLLQMVGAXLGQQGPWGKVPPEKKARLAYDTQGIIHRVHELLNLYNQHDVSTDRLLFKIPATWQGIEASRLLESEGIQTHLTFVYSFAQAAAAAQAGASVVQMFVGRLRDWARHHSGDPEIDEALKNGEDAGLSLAKKVYAYIHRNGYKTKLMAAAIRNKQDVFSLLGIDYIIAPIXDVKYGYVPKLTPAIGKTYNFTEEELVKWDQLSLSAAMGPAAEELLASGLEGYVNQARRVEELFGKIWPPPNV

SEQ ID NO: 5985 - protein, 199 aa, Shigella flexneri
PVRYYQGTPSPVKHPELTDMVIFRENSEDIYAGIEWKADSADAEKVIKFLREEMGVKKIRFPEHCGIGIKPCSEEGTKRLVRAAIEYAIANDRDSVTLVHKGNIMKFTEGAFKDWGYQLAREEFGGELIDGGPWLKVKNPNTGKEIVIKDVIADAFLQQILLRPAEYDVIACMNLNGDYISDALAAQVGGIGIAPGANI

SEQ ID NO: 5986 - protein, 464 aa, Haloarcula marismortui ATCC 43049
MLVSLTKCMHVFWHQRDLRIPDNRGLTAAAADDEVLPVYVLDTDLLANIGKRQKAFLLAGVRALKQAYRDHGGELLVKKGTAVDVLSNVVDEYDADRVYYNEHYRPARRNRQRRVDEALPTKSLTDLVLVDPAGLDSQYENHSRFYDDWQAHHKLPPVGSPDSGSLVDVSDPTTAPTIETEMDLPTPGYEGARQRYDDFLTGGIETYNDTRDDMQAAVERPTSAVSRMSPYLAAGMIGIREMWRDASDRHTEATGDAQRNIQKYRYELSWREQSYHLLYYNPTLLSENYKTFPNRIEWENDEDNFEAWKHGETGYPFIDAGMRQLEQEGYIHNRPRQNVASFLTKHLLVDWREGARHFRKRLVDHDPANNAASWQWTASTGTDSVDVRIFDPVAQMSKYDSGADYVTEYVPELRGVPSTKIVDWPTLSDGEREELAPDYYHPIVDRNAAYERAQRVFETALGKR

SEQ ID NO: 5987 - protein, 398 aa, Zea mays
RFAVAVQIQSQATMICVDNSEWMRNGDYPPSRFAAQAHAFAVLSGAKTEANLESTVGLVAMAGKGVSVLVPPTNDFGKVLSGMNGLEIGGEANLTAAIQVAQFALKNRQNKQLRQRIIVFVGSPVIDEKNWLEVIGKNLKKNNVALDVVNFGESDNEKPEKLEALVAAVNSGGNSHIIHIPAGRDLSDALFSSPIILSEDRGSDSAAAARGASGFEFDVDPNVDPELALVLLISMEEERLRQEAAAKKAREESSKTENEGQSSTSNGDIVMADAEPEPNSYTEDKGLHCKDEGQLLEQARKIRIEDYISFEELFDGVTSDTMSAFQEEETCTQSDAGKDFGHQPFEPSLSDVELLNDLSNKVALEWEELFIDPSKCMAEGPQGFYFASLDEKGYLFSC

SEQ ID NO: 5988 - protein, 214 aa, Aeropyrum pernix K1
MGRGPRYRVPLRRRREGKTNYYRRFRLVKSGKPRMAVRISNEYLWVQFLEARIEGDRVIAAAHSRELIKKFGWKGDGNNTCAAYLTGYLAGLRALEKGVREAVLDVGLHKPVKGSRVFAALKGALDAGVEIPHSEEILPGDERVRCEHIAQWAEALKEENAELYQRQFSRYLDRGLNPEELPGHVEEVKKAIEEAYKHVAEETAAEGEEVEVKA

SEQ ID NO: 5989 - protein, 236 aa, Shigella flexneri 2a str. 301
MGYRSIDTAAAYKNEEGVGKALKNASVNREELFITTKLWNDDHKRPREALLDSLKKLQLDYIDLYLMHWPVPAIDHYVEAWKGMIELQKEGLIKSIGVCNFQIHHLQRLIDETGVTPVINQIELHPLMQQRQLHAWNATHKIQTESWSPLAQGGKGVFDQKVIRDLADKYGKTPAQIVIRWHLDSGLVVIPKSVTPSRIAENFDVWDFRLDKDELGKIAKLDQGKRLGPDPDQFGG

SEQ ID NO: 5990 - protein, 407 aa, Pseudomonas putida KT2440
MHRPTAWHVTHWSSDPFSLGAYSALLPGGSPLHRSALGQVLHGRLVIAGEACNASAPAMTHGAWNDGLRAAEAAVSAGASKVIVIGAGCAGLAAAQRLRERGVDCTVLEARGRTGGRTHTVELGGVKADEGAAWLQHFAENPLAAVALQHGLACVETDFSCPLAAARGGALPDIDAAWDALTRRLDRQQPLSDAIDGYMATLDPALARATQFAIDANLVLEACLPVEQLSACALDEEGVGHGDRMLPGGYSELVDLLSKHLDIRLNSPVTHIDWSSARVMVNEDVCDFCICTVPVGVLKTLRFTPALPEIQQGALAHLGMGKLEKVILQFDERWWPCSPSGYLRWYDVPASWGEWLDLTDAVGKPTIAGLIAADAIERQFTGRTDEQVAMAACEALQAWAAAVGPTP

SEQ ID NO: 5991 - protein, 111 aa, Brassica napus
MARVSFKDSLKALEADIQHANTVALDYPREKDGARVQMRLSYNPAAQFLLFLVQWTDCHLAGALGLLRVLIYMPCAVPRSSISVDVSQTSMTAFCAGFAPSRSETKRRSKE

SEQ ID NO: 5992 - protein, 207 aa, Neurospora crassa
MVTGTIKYAKTNHPLSRECVVVGDGAVGKTCLLISYTTNKFPSEYVPTVFDNYAVTVMIGDEPYTLGLFDTAGQEDYDRLRPLSYPQTDVFLICFSVASPASFENVSQKWAPEVNHHCPGVPFLIVGTQKDLRSDKELRDKLAQRKQSMIEFKQGEKLAQDLDAVKYVECSALTQEGLKNVFDEAIVAALEPPQKKTSKRDKKCLIL

SEQ ID NO: 5993 - protein, 458 aa, Geobacillus stearothermophilus
MSGPNDIDEAVQAAKEAQRQWALVPAPKRAEILYKVGMLLKERKEQLARLLTMEMGKVIEEARGEVQEGIDMAFYMAGEGRRLFGDTTPSELKDKFAMSVRTPVGVVGIITPWNFPIAIATWKSFPAIVAGNAVVWKPAPETPIMAQELARIFEEAGLPPGVFHVVHGDGPTVGNALVEHPDVKVISFTGSNEVGRMIAEKCGRLLKKVSLEMGGKNAVIVMDDADLTLAVDGIIWSAFGTSGQRCTACSRVIVHERVKQEFERRLLEAVKTLKIGNGLDETVKVGPVIHEEALQKIDRYVRIGVEEGAKLLVGGYILREGDYARGFYYAPTIFTDVTPNMRIAREEIFGPVVSIISVRSLDEAIAVNNSVDYGLSSAIFTRDVNNVFRAMRDLDTGIVYVNAGTTGAEIHLPFGGTKGTGNGHRDSGVAALDVFTEWRSIYVDFSGKLQRAQIDTDD

SEQ ID NO: 5994 - protein, 202 aa, Pseudomonas putida KT2440
MCVRRYPASSRIVMREKRVMRAHWLTVPVLALLASTSSWAADCPALLQGSLPELRGKGQVDLCERFAGKPLVVVNTASYCGFAPQFEGLEATYKEYHEQGLEMLGVPSNDFKQEDADSEKTAKVCYANYGVTFTMTKTQAVRGKDAIPLFAELASQSSAPKWNFYKYVVDRKGKVIGNFSSLTKPDDPAFRAAIEKAIASQP

SEQ ID NO: 5995 - protein, 432 aa, Gibberella zeae PH-1
MSSPSGSSQGGKRKRNSLRVESTHDFAENGIQTSSRDASGEEGDTTAAESGRLHARGSAPIPKRQRSSSNRDNTIDPGEPSDTTEASIDIAERVGRKGRQALKELDEEEQRRIEAMPPPPIGNLQDPAGGYKTNPPPVGRPVRVYADGVFDLFHLGHMRQLEQAKKAFPDTTLVVGVTGDHETHKRKGLTVMSAAERAETLRHCKWVDEVIEDCPWVVTPEFLDENKLDYVAHDDLPYGADEGDDIYQPIKAAGKFLVTQRTEGVSTTGLITRIVRDYEKYIARQFKRGTSRQELNVSWLKKNELDLKRHVQDLRENITNNWSTTGQELGRELKQFWPVSRPQSPARFNSAGTAEGLRSPTTPGTSGTPKEFITGYALGLVGGVRGWMTKSRTNVADGSRPPSDDESEESDAHAKSPKESSNTPTAVAPSKL

SEQ ID NO: 5996 - protein, 464 aa, Edwardsiella tarda
  misc_feature (186)..(186): Xaa can be any naturally occurring amino acid
MKKGTDTRGGYLDSRFGSEAIRTAAEAHHFPQGEMREDIAFQVINDELFLDGNARQNLATFCQTWDDDYVHRLMDISINKNWIDKEEYPQSAAIDLRCVNMVADLWHAPRPADGQAVGTNTIGSSEACMLGGMAMKWRWRAKRLAQGKSVDKPNMVCGPVQVCWHKFARYWDVELREIPMAPGKLXMDPERMIAACDENTIGVVPTFGVTYTGNYEMPDVLHKALDDLQARTGLDIDMHVDAASGGFLAPFCAPDIVWDFRLPRVKSISASGHKFGLAPLGCGWVVWRDAASLPDDLIFKVDYLGGQVGTFAINFSRPAGRVIAQYYEFLRLGREGYTKVHTASYQVAQFLAAEIAKLGPYEFICSGDPQQGIPAVCFRIPAGKALGYSLYDLSERLRLRGWQVPAFALNGEMSDVVVMRIMCRRGFEMDFAQLLMEDFRAALAYLKAHPAVANVAHQNSFKHS

SEQ ID NO: 5997 - protein, 157 aa, Brassica napus
  misc_feature (148)..(149): Xaa can be any naturally occurring amino acid
MAQLIRPIRQLSPQCHHRLRNLRHLFSKKLPLNPPSSTPTLLLLSPSFSTARSPPRRRLRRPPEALSPPTLIAEEDGGSDESESESSRSRNQRKRDARRAVRWGMELASFSSDQIKRVMRAASLGEEVYDALMLAKRLGADVREGKRXXFNYIGKLL

SEQ ID NO: 5998 - protein, 422 aa, uncultured marine gamma proteobacterium EBAC31A08
MVLKILEIFGHLIFELKPRYNIFMKEIIKEYTNYMVPFYAPADFVVKKASGSHVWDLNNKKYIDFTAGIAVTNLGHSNKDLIKILKKQSEELWHLSNLYINEPSVTLARKLCKNSFADKVFFCNSGAESIEAAVKIARKFCSSTVNKNKNEVISFSTSFHGRTMLGIALAKAKHLTDGFAPLPRGIKNHPYNDITNLEKVFSDKTAAVILELVQWQSGITKADKKFIAKIKKLAKKHKALVIIDEVQSGIGRTGTLFAYEQFNITPDILCFAKGISNGFPLGGILTSDKVSKHMSAGSHGTTFGGGPIACAIGNEVIDTISKKSFLNKVLKKEVRFINLLNKINEKHKCFEKITSAGLWVGVEVSKDSKIQIDDLIKKSHHNGLMILKANASTVRFSPSLIIENELVDEGLKIFEKSIISLL

SEQ ID NO: 5999 - protein, 499 aa, Burkholderia fungorum LB400
MTRVRRLNDTFDTGLVWLRRDLRNTDNAALYYALKHCERVWCVFVFDTTILQPLVDAWHARHPDTQPQDRRIEFILAALGELDEALRADGGGLIVLYGNPAELVPKLADELGVDAVFANHDYEPVAIERDGTVRERLAEAGRQWLTFKDQVIFERDEVLTGQSKPFTVFTPYRNAWLRQLSAFDLKPYPVETYAKRLAALPSKFDRQLPTLEQLGFAPSNLGELNLPAGMSGAQRLLDDFMTRIDSYADRRDFPAAKGPSYLSIHLRFGTVSIRTLARLAHEMSLQPDGQGSATWLSELIWRDFYFMILAHHPRLARGASFREEYDRLRWEQGLQADEAFAAWCNGRTGYPLVDAAMLQLNRTGYMHNRLRMVTASFLVKDLGVDWRLGERYFAEQLNDFDFSANNGGWQWAASTGCDAQPYFRIFNPVTQSEKFDAEGRFIKRYLPQLAKLPSKWIHAPWLAGAERLADCGVVLGKDYPAPIVDHAEARARTLARFGK

SEQ ID NO: 6000 - protein, 294 aa, Triticum aestivum
MSAPPPPASSDDDGKPADEEGVEIREVWANNLEAEFAVIRDVVDDYPYIAMDTEFPGIVCRPLGSFRSNDEYNYATLKANVDMLSLIQLGLTLSDENGALPARGTGGRPCAWQFNFRGFDPRSDPANADSIDLLRNSGIDFDRFTTEGADTGHFAELLMSSGVLLNAELQWVTFHSGYDFGYLLKLLTGRNLPDTMPGFFDLIRIYFPVLYDIKHLMKYCGSLHGGLSKLGELLGVQRVGICPQAGSDSLLTLRCFQKLKEAYFRGSTENYAGVLYGLISDGGENRPPAALLIE

SEQ ID NO: 6001 - protein, 363 aa, Desulfitobacterium hafniense DCB-2
ADEQEIKKAYRKLARQYHPDVNPGDKDAEEKFKEATEAYDVLSDTEKRARYDQMGHSAFDPNQQGFGGFGGDFGGFGDIFDMFFGGGGGGGQRRQGPTRGNDLRYDLTITFEEAAFGTEKEIQVPRQETCTECHGSGSAPGTHPTTCSQCHGTGQVKATQRTPFGAIQTARTCPACNGSGQFISSPCKECSGKGTTRKVKTIKVTVPPGSEDGLNLRFSGNGEAGLRGGPSGDLYVVLNVKAHKFFEREGNDVYCEIPITFVQAALGSELDVPTLDGKVKMKIPEGTQTATVFRLRGHGIPYRRGNGRGDQHVRVVVATPTKLTDRQKELLREFGEVTSDQQQMGKKSFFEKVKENIRDAIDL

SEQ ID NO: 6002 - protein, 215 aa, Shigella flexneri
LDLYICLRPVRYYQGTPSPVKHPELTDMVIFRENSEDIYAGIEWKADSADAEKVIKFLREEMGVKKIRFPEHCGIGIKPCSEEGTKRLVRAAIEYAIANDRDSVTLVHKGNIMKFTEGAFKDWGYQLAREEFGGELIDGGPWLKVKNPNTGKEIVIKDVIADAFLQQILLRPAEYDVIACMNLNGDYISDALAAQVGGIGIAPGANIGDECALFE

SEQ ID NO: 6003 - protein, 293 aa, Nostoc punctiforme PCC 73102
MLSQLGATSHLSPHLTFGTISTRTVYQSTKALAEQLKTQPKAEFSLKAFRDRLRWHDSFTQRLYFHPEIAYTNRYREFDKLYTPETLSGAKQELYQAWQQGMTGFPLVDASMRQLQTMGWMNFRMRAMCATFLTINCGVSWHHGAKHYMNYLVDGDLAIDNWQWQMQAGVTNPLSDTFRIYNPSKNIAEKDPLGEFIYHWIPELRGYSLLEIEQEKYIETSNYPKVILDWSKTRKVNGKIVSDLRKQTKQRLLSQGGDEYDSAIAAKETVDKYWQHKDKEYKEYQQKLTELQE

SEQ ID NO: 6004 - protein, 250 aa, Solanum tuberosum
MGKSYPTVSEEYLKAVDKCKRKLRALIAEKNCAPIMLRLAWHSAGTYDVCSKTGGPFGTMRFKAEQAHGANNGLDIALRLLEPIREQFPTLSHADFHQLAGVVAVEVTGGPDVPFHPGREDKPEPPVEGRLPDATKGCDHLRDVFVKQMGLSDKDIVALSGAHTLGRCHKERSGFEGPWTANPLIFDNSYFTELLSGEKEGLLQLPSDKALLCDPAFRLLVEKYAADEDAFFADYAKAHLTLSELGFAEA

SEQ ID NO: 6005 - protein, 214 aa, Shigella boydii
ELDLYICLRPVRYYQGTPSPVKHPELTDMVIFRENSEDIYAGIEWKADSADAEKVIKFLREEMGVKKIRFPEHCGIGIKPCSEEGTKRLVRAAIEYAIANDRDSVTLVHKGNIMKFTEGAFKDWGYQLAREEFGGELIDGGPWLKVKNPNTGKEIVIKDVIADAFLQQILLRPAEYDVIACMNLNGDYISDALAAQVGGIGIAPGANIGDECAL

SEQ ID NO: 6006 - protein, 279 aa, Glycine max
  misc_feature (254)..(254): Xaa can be any naturally occurring amino acid
  misc_feature (256)..(256): Xaa can be any naturally occurring amino acid
SSTQLILLFLTKLLSKNSSGDSISTMSNSEHNIITGHAGYVLEDVPHLSDYIPHLTTYPNPLQDNPSYSVVKEHSVDVDDTIAQKAIVHKNSPRETHFRRAGPRQKVYFESEDVYACIVTCGGLCPGVNTVIREIVCGLYHMYGVHKVLGIEGGYRGFYSCNTIPLTPKVVNDIHKRGGTILGTSQGEGGNDTLKIVDSIQDRGINQVYILGGDGTQRGASVIFEEIRRRGLKGSVVGIPESVDNDIPVIDKSXFXFDTAGEEAQRAINAAHVEAESTE

SEQ ID NO: 6007 - protein, 212 aa, Shigella boydii
DLYICLRPVRYYQGTPSPVKHPELTDMVIFRENSEDIYAGIEWKADSADAEKVIKFLREEMGVKKIRFPEHCGIGIKPCSEEGTKRLVRAAIEYAIANDRDSVTLVHKGNIMKFTEGAFKDWGYQLAREEFGGELIDGGPWLKVKNPNTGKEIVIKDVIADAFLQQILLRPAEYDVIACMNLNGDYISDALAAQVGGIGIAPGANIGDECAL

SEQ ID NO: 6008 - protein, 199 aa, Oryza sativa
MGCSSSVPARSTGGLNNISNDNSATDSKDLRAKLVLLGDSGVGKSCIVLRFVRGQFDPTSKVTVGASFLSQTLALEDSTIVKFEIWDTAGQERYAALAPLYYRGAAAAVVVYDITSPESFSKAQYWVKELQKHGSPDIIMVLVGNKADLHKNRHVSSQEAQEYAEKNNMVFIETSAKTADNINQVFEEIAKRLPRPTAS

SEQ ID NO: 6009 - protein, 216 aa, Shigella boydii
LDLYICLRPVRYYQGTPSPVKHPELTDMVIFRENSEDIYAGIEWKADSADAEKVIKFLREEMGVKKIRFPEHCGIGIKPCSEEGTKRLVRAAIEYAIANDRDSVTLVHKGNIMKFTEGAFKDWGYQLAREEFGGELIDGGPWLKVKNPNTGKEIVIKDVIADAFLQQILLRPAEYDVIACMNLNGDYISDALAAQVGGIGIAPGANIGDECALFEA

SEQ ID NO: 6010 - protein, 412 aa, Oryza sativa
MRPQGKTLEMGKRALPRSSDGDEDRTGDLPDGILHHILGSLPARDAARTCVLARRWRHLWKFATGLRITDREMREPAPMEKLQDFVDHLLLLRGRAPLETCWLNLTRLSSDGDARRVNLWFRHAVLCEVQVLRLDLILNGFQLKLDDLPLASRCLAKLNLSGVHLMHSFPDFSCCPVLEHLDIFFCDLSDAKKITSQSMKCLNIRHCTFSQISRTRISAPNLISLRLENYWHRTPVFEVMPLIVDAFVRVHDRSGDWYSCTSGNADFEECLCEDCDFCHSNTNCVIMQALSQAKNLVLSAHEQEFIFKKELMRCPTFSNLKTLLLINCFCVAFDLHGITSILRHTPVIEKLILEFFFEVTEHDDEVEMKGSCSQMERSSAISKHLKLVIVKCNAIDGRITKILKFLSTFNIC

SEQ ID NO: 6011 - protein, 436 aa, Streptomyces kasugaensis
MSDSVLLSARQPLPPIDYSHAAGAWIHTAEGDSLLDAASGLVCVNIGHAHPHVVEQITRQARTATFASPGVLLPAVQEELAGRLTEAVNRPGDGVSLACSGTSAVELAISYARLIQRSRGQDGRHHILTARLGYHGNSALTLGLSGHRRRRPHPDDALGLAPAFDPPYPGHHRDCPHDRCRASCADAVAEAIDRRGPESVAAVLIEPVNGTTGGAYTPPPGYLAALRRACHERGVLVIHDEVLTGLGRTGLPLGADHCTDAAADIVVLSKGLSAGYLPLAAVLVNPEGVARLRSGPRPLPLMGTMSATPLQAAAGLAVLDVLGEIGALDPARVRGGDVAAAVRAVAALPVVQETRGVGYFHAVELAPGTQAAALAAARDERLLLYPFNGFHADGTGEGLIVAPPLNSTPSEVEFLAQGLRRALERTAARSEDRSHR

SEQ ID NO: 6012 - protein, 160 aa, Brassica napus
  misc_feature (15)..(15): Xaa can be any naturally occurring amino acid
  misc_feature (17)..(17): Xaa can be any naturally occurring amino acid
  misc_feature (21)..(21): Xaa can be any naturally occurring amino acid
  misc_feature (30)..(32): Xaa can be any naturally occurring amino acid
  misc_feature (34)..(34): Xaa can be any naturally occurring amino acid
MVSGLGSHRAAFPVXRXSITXITSIAATSXXXSXLKVWPPVGKKKFETLSYLPDLTDVELAKEVDYLLRNKWIPCVEFELEHGFVYREHGNTPGYYDGRYWTMWKLPLFGCTDSAQVLKEVQECKTEYPNAFIRIIGFDNNRQVQCISFIAYKPPSFTGA

SEQ ID NO: 6013 - protein, 189 aa, Bradyrhizobium japonicum USDA 110
MMNRRTMLIAALAGAVAPVTRAVAGGGMSRISAYAFSFPALSGDDIRLAAFTGKPLLVVNTASLCGYTPQYAGLQELWSEFGERGLTVIGVPSNDFGGQEPGGTSEITETAHHQYGVTFPIAAKATVIGARAHPFYKWAADARPKDVPRWNFHKYLIGRDGYIAEVFASNIEPTDTRIKTAIAKTLADT

SEQ ID NO: 6014 - protein, 362 aa, Burkholderia cepacia R18194
MATPQFHPLRIRDVRPETADAVTVSFDVPPELRDAYRFTQGQFVTLKTHIDGEETRRSYSICVGTTDYDRDGELRIGIKRVRGGRFSNFAFDSLQPGHTIDVMTPDGRFFTHLNADHGKQYVAFSGGSGITPVLAIVKTTLELEPRSTFTLIYGNRSVDAIMFAEELEDLKNRYMNRFVLYHVLSDDQQDVELFNGVLDQTKCAEFLGTLTPADAIDEAFICGPAPMMDAAEAALKAAGVPQAKVHVERFGTPLPQAGAPVVEITDQTPAADLEIVLDGKKRKLRLPYEGVSLLDVGLRAGLALPYACKGGVCCTCRAKVLEGEVRMEKNYTLEEHEVKDGFVLTCQCHPISDKVVVSYDER

SEQ ID NO: 6015 - protein, 503 aa, Glycine max
MSIPIPHRQLFIDGDWKVPVLKNRIPIINPSTQHIIGDIPAATKEDVDLAVAAAKAALSRNKGADWASASGSVRARYLRAIAAKITEKKPELAKLEAIDCGKPLDEAAWDIDDVAGCFEFYADLAEKLDAQQKAHVSLPMDTFKSYVLKEPIGVVALITPWNYPLLMATCCFVRCLVSSLLCCHVLLCAIFRTCLELAEICKEVGLPPGVLNILTGLGPEAGAPLAAHPDVDKIAFTGSSATGSKIMTAAAQLIKPVSLELGGKSPIIVFEDVDLDKAAEWTIFGCFWTNGQICSATSRLIVHESIATEFLNRIVKWVKNIKISDPLEEGCRLGPIVSEGQYEKILKFISNAKSEGATILTGGSRPEHLKKGFFVEPTVITDVTTSMQIWREEVFGPVLCVKTFSTEEEAIDLANDTVYGLGSAVISNDLERCERITKAFKAGIVWINCSQPCFTQAPWGGIKRSGFGRELGEWGLDNYLSVKQVTQYISDEPWGWYQSPSRL

SEQ ID NO: 6016 - protein, 175 aa, Triticum aestivum
MAPTVMASSATSVAPFQGLKSTAGLPVSRRSTSAGLGSVSNGGRISCMQVWPIEGIKKFETLSYLPPLTVEDLLKQIEYLLRSKWVPCLEFSKVGFVYRENHRSPGYYDGRYWTMWKLPMFGCTDATQVLKELEEAKKAYPDAFVRIIGFDNVRQVQLISFIAYKPPGCEESGGN

SEQ ID NO: 6017 - protein, 265 aa, Triticum aestivum
LRVSRAGGAGRETPPPGNGQDPCGHPLRVGKRRVSRTGGRSWAQELSLPVVGGPRLVFAPPSREEAEEATAELREAIDRVYFKETPVEVVKEHDQELSKLGADALIPAMPGHVVQAFTLLKSSPEAQSVVASLASDKNVWDAVLKNERVMEFYKSHQQTLVNTFPEGTDSTDSVESPEKFEEASPEYALPTASPLSDFVDNAKKTMMEMVDNITNFFQDLFHNPAEAEAGPGSSSKKPSFAEMAAGGSFMALAMAVILVVLFKRA

SEQ ID NO: 6018 - protein, 426 aa, Schizosaccharomyces pombe
MSNGEFIDQYLLPESGAILQDYLDDYFYTSWYTGNRNLIQLDHYGFPTASNFELNPKSTDNCGTVDFQGIPWGNKAIGKRKNFRLYRLHTYSLSCNHSDWSPEELSLDTVQVAAEDSFYEFQRFLKNPNCLRNHHHLCKSVKVVGEHSVIYVSNNSIRMENTLHDNSVQIIDLKNNILQKKAISCLDTTNAVGCLGTLYGQYCIFNFKNGSFSTRKLSDDSINHIQLFSEKKFILGCNDGAVYVEDVQRTSPILVYRCSNAVNCVQLFDETPLALVCTDSKDAMLIDIRSNSVSAKLPHSDSVLTGSWHPNGNILATGGQDTTAKVWDIRALGKSFRNLGSQMSAVTNLCFSPLGESLAVTEQADFVQLFDTKLFNTSQVIDFFGEIAGTAYSSSGDSLFIGVDDPMLGGILEFRRPLQHPLSFIF

SEQ ID NO: 6019 - protein, 571 aa, Zea mays
PAGPGLHADLLYEPWEVLDDDGFPFTMFAPFWNRCLCMPDPAAPLLPPKRINSGDLSRCPWDELIFEDESEKGSNALLARAWSPGWQNADKALTAFLDGPLVDYSANHKKADSASTSLLSPYLHFGELSVRKVFHLVRMKQLMWSNDGDRAGEESCTLFLRAIGLREYSRYLTFNHPCSLEKPLLSHLRFFPWVVDEVHFKVWRQGRTGYPLVDAGMRELWATGWVHDRIRVVVSSFFVKVLQLPWRWGMKYFWDTLLDADLESDALGWQYISGSLPDGRELDRIDNPQFEGYKFDPHGEYVRRWLPELARLPTEWIHHPWDAPESVLQAAGVELGSNYPRPIVELDAANSRLQGALSEMWELEAASRAAIENGMEEGLGDSTDEPPIDFPQELRMEVDRQPAQPAIIHTPVVAGWRREDQRVPSMTSSLIRAETELTADFGNTSEDSRPEVPSNIHLQARAEREETVDGATGNTVRVNGNHHQQNLQNNMHRVLGIAPSISEASSSWTGRDGGVVPVWSPPAASGHSDPYAADEADISSRGYLDRHPQSHTMMNWSQLSQSLTTGWEVDN

SEQ ID NO: 6020 - protein, 492 aa, Rhodobacter sphaeroides 2.4.1
MLDSVTDLRSLLKDPSLLETRAFVAGEWVDADDGATFEVTNPARGDVICTVPDLGRAETARAIAAAEEAMKEWAARTGKERAQVMRKWFDLMMANQDDLGAILTAEMGKPLAEAKGEIAYGASFIEWFGEEAKRIYGETIPGHMRDKRITVLKQPIGVVGSITPWNFPNAMITRKCGPALAAGCGFVARPAAETPLSALALAVLGERAGLPKGILSVITSSRSSDIGKEMCENPIVRKLTFTGSTEVGRILLRQAADQVMKCSMELGGNAPFIVFDDADLDAAVQGAMASKFRNNGQTCVCANRIYVQSGVYDAFAEKLAAAVKKLKVGDGLVEGTEAGPLINEKAVAKVEEHIRDVLDGGGQVLTGGKRHALGGTFFEPTVVTGVKQEMKVSTEETFGPLAPLFRFETEDEAVGYANDTIFGLASYFYARDVGRITRVQEALEYGIVGVNTGIISTEVAPFGGVKQSGLGREGSRHGIEDYLEMKYICLSI

SEQ ID NO: 6021 - protein, 175 aa, Triticum aestivum
MAPTVMASSATSVAPFQGLKSTAGLPVSRRSNGASLGSVSNGGRIRCMQVWPIEGIKKFETLSYLPPLSTEALLKQVDYLIRSKWVPCLEFSKVGFIFREHNASPGYYDGRYWTMWNLPMFGCTDATQVINEVEEVKKEYPDAYVRIIGFDNMRQVQCVSFIAFKPPGCEESGKA

SEQ ID NO: 6022 - protein, 387 aa, Oryza sativa
MPPRIRRAPARRAAPEEVPDRVSALPDEALHAVLSLLPAHDAVRTCVLARRWRHLWEHAPALRVTDVEGWNPRLRGDGLGRFIRFVDGLFVSRRRRDAPLELCDLDFDFPEDKGKDWHVNRWIMLALLRHHARVLRISLPAYITLPDVPLISQRLTRLELDGVLGNDNILDFSCCPALIALKMKCCRINAEKMSSPSVKILSLASCEFYPATRTQMSFPSVVSLELDGCSGSVPFLESMPSLVAAIVIFDDDYADRCDNSVLGDCGDDSCVDCCNYSDRSKCVCLNGLLEATHLELSAEPAMQSPILEKLTIKIPEEPKCSMDAGQQKIPEEPFVSNHLKIVEIKCKGKEVMWVCKFLKTLGTFGIPLEKINIKLTSEHCRSECELI

SEQ ID NO: 6023 - protein, 373 aa, Oryza sativa
MASGADRISDLPDDVIHHVLSLLPSRDAVRTCALARRWRDLWRSVPAVRVAGDRGWASFDALARFVDSLLRLRRGGAALDACDFDLRFDGAFPGEELQGDTWIRRALRRQVRALRFAVSTHPRVPIPLSDSPLVSHSLTTLELRGVQGNDQVLDFSSCPSLVDLKMKDCYVGGLEMWSPSLKHLSITYCVFYCDYRTRMDFPSLVTFKFNTNTGRTPLLETMPSLATAAVRLDHFCHDRCANGWYDDCGDAGCKGCHDYYRPDEYDCVFLEGLTEATDLTLLAYSKVVPKNLVGMDGSFNQLEQPFAASHLQIVEIYCREVDGIILKILKVLNANGVPLEKISIRCSGCELSMNTHASYYAVVNMCCRAKHCP

SEQ ID NO: 6024 - protein, 449 aa, Triticum aestivum
MQLEVMANRGKILMERYELGRLLGKGTFGKVHYARSLESNRSVAIKMLDKEKVLKVGLSEQIRREVTTMRLVAHKNIVQLHEVMATRNKIYFVMEYVKGGELFDKVAKSGKLTEGAAHKYFQQLISAVDYCHSQGVYHRDLKLENLLLDENENLKVSDFGLSALSESKRQDGLLHTTCGTPAYVAPEVISKTGYDGAKSDIWSCGVILFVLVAGYLPFHGSNLMDMYRKIEQGDFRCPSWFSHKLQKLLCKILDPNPSTRASIQKIKESTWFRKGPRGTLAVKERTPSENVTTNAPPTAGVRPRKNTHEDVQPLTVTNLNAFEIISFSTGFDLSGLFIQEDCRKETRFTSDKPASAIISKLEYVAKALNLRVRKKDNGVVKMQARKEGRNGAVQLDMEIFEITPSHPLIEMKQTSGDPLEYRELLEDIRPALKDIVWAWHGDDPHQQLE

SEQ ID NO: 6025 - protein, 383 aa, Zea mays
  misc_feature (258)..(258): Xaa can be any naturally occurring amino acid
  misc_feature (320)..(320): Xaa can be any naturally occurring amino acid
  misc_feature (325)..(325): Xaa can be any naturally occurring amino acid
  misc_feature (327)..(327): Xaa can be any naturally occurring amino acid
  misc_feature (339)..(340): Xaa can be any naturally occurring amino acid
  misc_feature (346)..(346): Xaa can be any naturally occurring amino acid
  misc_feature (348)..(348): Xaa can be any naturally occurring amino acid
PGYSVVEQYFVNPDDTVCQKIVVHKDGPRGNHFRRAGPRQKGGYRGFYARNTITLTPKSVNDIHKRGGTILGSSRGGHDTVKIVDSIQDRDINQVYVIGGDGTQRGAVLIFQQVRRRGLKVSVAGIPKTIDNDIPVIDKSFGFDTAVEEAQRAINAAHVEAVSAENGIGLVKLMGRHSGFIAHYATLARRDVDCCLIPESPIYLEGEGGLFRYIEKRLKDNGHMDIVVAEGAGQKLIAETMQSIGKDASGNELLLDVXLWLSQKINEHFKKNKMTINLKYIDPTYMIRAIPSNASDNVYCTLLAHSVVHGAMAGYTGLPXQVNGXTXTSIYRITEKQTXXITDRCXKXLSSTTPTPTNLRKEGHKTPTRLHKYSKGHWSTHAR

SEQ ID NO: 6026 - protein, 507 aa, Mycobacterium tuberculosis H37Rv
MTVFSRPGSAGALMSYESRYQNFIGGQWVAPVHGRYFENPTPVTGQPFCEVPRSDAADIDKALDAAHAAAPGWGKTAPAERAAILNMIADRIDKNAAALAVAEVWDNGKPVREALAADIPLAVDHFRYFAAAIRAQEGALSQIDEDTVAYHFHEPLGVVGQIIPWNFPILMAAWKLAPALAAGNTAVLKPAEQTPASVLYLMSLIGDLLPPGVVNVVNGFGAEAGKPLASSDRIAKVAFTGETTTGRLIMQYASHNLIPVTLELGGKSPNIFFADVLAAHDDFCDKALEGFTMFALNQGEVCTCPSRSLIQADIYDEFLELAAIRTKAVRQGDPLDTETMLGSQASNDQLEKVLSYIEIGKQEGAVIIAGGERAELGGDLSGGYYMQPTIFTGTNNMRIFKEEIFGPVVAVTSFTDYDDAIGIANDTLYGLGAGVWSRDGNTAYRAGRDIQAGRVWVNCYHLYPAHAAFGGYKQSGIGREGHQMMLQHYQHTKNLLVSYSDKALGFF

SEQ ID NO: 6027 - protein, 333 aa, Oryza sativa (japonica cultivar-group)
MASPGSSGRCSRTPGFPAGPLGGGGRAVPAVGLGTASLRSVGEESFRGALLAALEVGYRHIDTASVYGSERVVGEAVAGAARRGVIACREEVFVTTKVWCTQCHPDLVLPSLRESLQNLQMEYVDMYLVHWPMSVKPTKPHYPMKREDIMPMDLRGVWQAMEECHQLGLAKMIGVSNFTTKKLQELLAFAKIPPAVNQVELNPVWQQKKLMEFCKAKGIHVTAYFPLGGRHSTSTVNPVLDSDVLKEIAAAKGKSVAQISLRWIYEQGASMVTTSTKRERLKENIDIFDWQLSDEDRLKISQIPQHKTVSVLSILCPDGVSSVELSEVDVVEV

SEQ ID NO: 6028 - protein, 323 aa, Oryza sativa (japonica cultivar-group)
MAVVVPEAVLRHGDARPMPAVGMGVAEYPSTPERTRDAVLAALEAGFRHFDTASLYRTEAPLGEAIAEATRRGLLASREEAFVTTKLWCTQCHPDLVLPSLRESLRNLQMEYVDLYLIHLPISVKPGPMVFPVKKEDVVPFDFGGVWRAMEECHRLGLAKAIGVSNFTTKHIDKLLAVATILPAVNQVEMNPTWQQRTVREYCDAKGIRVTAYSPLGGQNWGGSANYVMESSVLTEIARARGKSIAQVSLRWIYEQGVTPIAKSYRKERLKENLEIFDWELTDEDRLKISQIPQRKRVTAASLFSPDGEFTSVDLPDIEIVEE

SEQ ID NO: 6029 - protein, 360 aa, Lolium perenne
MGSTAADMAASADEDVALFALQLASSSVLPMTLKNAIELGLLEILVAAGGKSLTPTEVAAKLPSAVNPEAPDMVDRILRLLASYNVVTCLVEEGKDGRLSRSYGAAPVCKFLTPNEDGVSMAALALMNQDKVLMESWYYLKDAVLDGGIPFNKAYGMSAFEYHGTDPRFNRVFNEGMKNHSIIITKKLLELYHGFQGLGTLVDVGGGVGATVAAIAAHYPAIKGVNFDLPHVISEAPQFPGVTHVGGDMFKEVPSGDAILMKWILHDWSDQHCATLLKNCYDALPANGKVVLVECILPVNPEANPSSQGVFHVDMIMLAHNPGGRERYEREFQALARGAGFTGVKSTYIYANAWAIEFTK

SEQ ID NO: 6030 - protein, 422 aa, Streptococcus mutans UA159
MLLIKNGRVLDPKSGLDRVLDVLLDGKKVVKIAENIESVDAQVIDAEGLVVAPGLVDVHVHFREPGQTHKEDIHTGALAAAAGGVTTVVMMANTTPTISDVATLTEVLESAAKENIHIKTVATITKHFDGQHLTDFETLLKAGAVGFSDDGIPLTSSKVVKEALDLAKKNDTFISLHEEDPELNGILGFNEKIAKEHFKICGATGVAEYSMIARDVMIAYDRQAHIHIQHLSKAESVKVVAFAQKLGAQVTAEAAPQHFSKTENLLLEKGANAKMNPPLRLEADRLAVIEGLKSGVISVIATDHAPHHADEKNVADVTKAPSGMTGLETSLSLGLTYLVEAGHLSLMDFLAKMTINPAQLYDFDVGYLAENGPADLVIFADKEDRLVSNHFASKAANSPFIGETLKGQVKYTICSGEVIYQA

SEQ ID NO: 6031 - protein, 464 aa, Zea mays
MARSGREADPGEEERKLVLGKYELGRLLGQGTFAKVYYARDLSAGAGTGHSCSVAIKVIDKARLRRTEGMVEQLRREISIMRMVRHPNVVGIREVLASRSRVFVVMEYARGGELFAKVARGRLDEDHARRYFQQLVAAVGFCHRRGVAHRDLKPENLLLDEAGRLKVTDFGLAALPEQLRHDGLLHTQCGTPAYVAPEVLRKRGYDGARADLWSCGVVLYVLLCGFLPFQHDNYVKLYQKIFKADYQVPPWVSGDARRLIARLLVVDPAKRASIAEIMCTPWFRKGFVPPVLSPPVTPKKQQLDEGAALFDNDDDDNSNSNHSGATSPRSCNAFQLISSMSSGFDLSGLFESEQKTATVFTARAPAATVVEKLESVARALGFEVTRGKGWKVRMEAKAEGTNGRLAATAEVLEVAVDVTVVEFVHDAGDALDFNKFCAVDVRPGLTEIVWAWQGDSPAAAVGTA

SEQ ID NO: 6032 - protein, 186 aa, Pennisetum glaucum
MAKCYPTVSAEYQEAVEKARRKLRALIAEKSCAPLMLRLAWHSAGTFDVSTKTGGPFGTMKNPAEQAHGANAGLDIAVRMLEPVKEEFPILSYADLYQLAGVVAVEVTGGPEIPFHPGREDKPQPPPEGRLPDATKGSDHLRQVFGKQMGLSDQDIVALSGGHTLGRCHKERSGFEGPWTRNPLVF

SEQ ID NO: 6033 - protein, 248 aa, Clostridium perfringens str. 13
MENVWNGFRQLEIFKIEEEAKDIKSFYLRATDGKPLKEYKCGQFLPLKIETDDEVIKKEMRRYSLSGDPKKNYYRLTIKRVPNGKVSGYFHESINVGDTILAMPPFGNFTLTEDSNKPLVLLSGGIGITPILSMLYGAKEQSRDIYFVEAVLNSDNLALNSDVQGIKKVKNFKEIKIFSEPLESDIKGKDFDEEGFITKEWIKNNLPLNGEFFFCGPTLFMKSIRNSLKDLGVKEDNINFEFFGKEEF

SEQ ID NO: 6034 - protein, 175 aa, Glycine max
MAPTVMASSATSVAPFQGLKSTAGLPVSRRSNGASLGSVSNGGRIRCMQVWPIEGIKKFETLSYLPPLSTEALLKQVDYLIRSKWVPCLEFSKVGFIFREHNASPGYYDGRYWTMWKLPMFGCTDATQVINEVEEVKKEYPDAYVRIIGFDNMRQVQCVSFIDFQPPGCEESAKA

SEQ ID NO: 6035 - protein, 344 aa, Ralstonia solanacearum GMI1000
MDALVIHAANDLRIEDIDTPEVQPDQLRVQVRFGGICGSDLHYYNHGGFGTVRVKEPMVLGHEVAGRVEEIGPGVHRHAKGDRVAISPSRPCGQCHYCQQGLQNHCLDMRYYGSAMRTPHVQGAFRREIVIDESQAHRLADTLSDQEGAMAEPLSVALHAVRRAGPLLGKRVLVTGCGPIGALIVVAARRAGAAEIIVTDMGAYPLKAAVAVGADVTINVAEQPDGLKPYTTDKGQIDVLFEASGNERALRGAIDALRPRGIIVQVGLGGEMTLPLNAIVAKELELRGAFRFHEEFAMAVELLNKGLVDVKPLISATVPYRNAAHAFALAGDRTQAMKVLLDFQ

SEQ ID NO: 6036 - protein, 111 aa, Arabidopsis thaliana
MDVRGDHNRKNTSFRGSAPAPIMGKQELFRTLSSQNSPRRLISASYFSLESMVVLVGLTASLLILPLILPPLPPPPFMLLLIPIGIMVLLMVLAFMPSSNSKHVSSSSTFM

SEQ ID NO: 6037 - protein, 280 aa, Gibberella zeae PH-1
MERSHTDTLPLANSVEIPQLGFGVYLSPPEVCVKSCLTALEAGYRHIDTAQYYGNEAEVGQAVQQSNVERKDVFLTTKILEAAGSVELSYSKCVESIGKLDPESGYVDLFLIHSPNPGAAKRKEMWQALERLYEEGKARSIGVSNFGIKHIDELKQYAKVWPPHVNQIELHPWLQQRDCVSYCEKNSIAVEAYAPLVRNQKANDKTLGSIASKHSVTPSKVLIRYCLQKNWIPLPKSDTPERIRDNADVFGFDLDDKDMKSLDNLDQGDTGAIVQAVDNY

SEQ ID NO: 6038 - protein, 143 aa, Zygosaccharomyces rouxii
MSRSGVSVADESLQAFNDLKLGKKYKFVLYGISEDKTTIVVKETSTSQSYDEFLGKLPENDCLYAIYDFEYEIGGNEGKRSKIVFFTWSPDTAPVRSKMVYASSKDALRRALTGVSSDIQGTDFSEVSFETVLERVSKSAGSH

SEQ ID NO: 6039 - protein, 162 aa, Triticum aestivum
  misc_feature (54)..(54): Xaa can be any naturally occurring amino acid
  misc_feature (88)..(88): Xaa can be any naturally occurring amino acid
  misc_feature (96)..(96): Xaa can be any naturally occurring amino acid
  misc_feature (119)..(119): Xaa can be any naturally occurring amino acid
  misc_feature (134)..(134): Xaa can be any naturally occurring amino acid
MSDTDEHHFESKADSGASKTYPQQAGAIRKGGHIVIKARPCKVVEVSTSKTGKXHGHAKCHFVAIDIFNGKRKLEDIVPSSHNCDVPXLTAKDYQXLIDITDDGYVSLLTESGNTKDDXKLPTDDVLAWQIKTXLMARTDLSVMSAMGEKQICAVKEIGGGK

SEQ ID NO: 6040 - protein, 446 aa, Aeropyrum pernix K1
MAGDSSSDDIGGARIIEIYRRYGGKIEVMPKVPVSGVEDFAIWYTPGVAEASIRINKDPDESFELTSRWNMVAIVTDATRVLGLGKLLPEAAYPVMEGKALIFKLFGGVDAVPIVHRRREPGAFASLVKDLEPSFGGVNLEDIESPKCFYLLDFLRMELEIPVWHDDQQGTAAASLAGLINAFKIVGKNLRESRIVLLGAGAANIALYRFLKAYGVNPRNIVVVDSKGVLHPEREDMDRLLFSNRYKYEIALETEGGGLAPGSSLEEALRGADALVAASRPGPGVVKKEWIRGMSRDPIVFALANPTPEIWPWEARDAGARVVATGRSDLPNQVNNALVFPGVFRGALDVRSRAITDGMAIAAAEEIARYTEEEIGIEEDRILPPITDWQVHYRVAAAVAWAASREKVARKPRTYAEELENARAIIETTRRKYGALLSAGLIERLV

SEQ ID NO: 6041 - protein, 335 aa, uncultured marine gamma proteobacterium EBAC31A08
MFQTFALKIFFYMPIWLLKIIFYRKRTVIRGHQFDAQSAALLSLLPKKDLSELLDGEIAKARITLEEARIQNKVSLTPSIQVRKVDHILPKHDLILREYKPHQEDLKKVILYFHGGGYVLNSVNTHDDMVSYMSDKIGVKFYSLDYRLSPESKYPDSLDDALDAFSWLIGQGYGPGDISVCGDSAGAHLAASLCHYLAEQNKDLPSSQLLIYPMCDPSCSSESYNLLSSGYLLTKKTMIWFWDKLRTSEVNNNDSAFNLLKFNFEKTLPPTIIVTGGFDPLCDDGEKYAYLLHKGKHNVKQLHYPTMFHGFASMTKLKAAQIAVEDFLKEYKKIL

SEQ ID NO: 6042 - protein, 1212 aa, Candida albicans SC5314
MNNQDPDSQYHNKKVYPPNLPSIPPPPQQPLSGRPATPRMLRSISGTLKSKTELAHSDKGQESNNETKNSNSPHYVPDTHTRQPPPESLKSNIQAPTAVHGNQQKGSLLPPPSIPNPNTMKPAPTPTGVDQPPAKQKPSPAPKQPQPQQQQQQQQQQQFHRKSIGDWNFVKTIGAGSMGKVKLAQHNATHEICAVKIIPRAAKLYQRAHANDPPPQTTQEAAQRHKEFEKEVARDRRTIREGALGRLLYHPFICRLYEMVPMTNHYYMLFEYIEGGQMLDYIVAHGSLKERHARKFARGIASALDYCHRNNVVHRDLKIENIMINEKGDIKIIDFGLSNLYAPKNLLKTYCGSLYFAAPELLSAKPYIGPEVDVWSFGVVLYVLVCGKVPFDDQSVSVLHEKIKKGNVEYPAFLSRECVSLLSRMLVVDPTKRASLYEVCSHPWMNKGYDYKVNNYLPRREPLRLPLDPEIIKTIANFELGTVQGVADELTSILTSVEYQMSCENWYKITETGREYASSQNAQILPDPTGGFHPLVSIYYLVDEMRKRKKAKEEALKAQRRAQVPTIAVPTPKQQQQQQPQPAQPQPQPQPEVSQPLPEPKPVPPEEIINPAVATQAQANMTAPKIVETFSETPQRTLDPSKQSVDEKPSAPGPSIAVPEQAHTTSVPSSFVKTQTSIDEDQLSIPEQQSPRTSTPQTLDPAKVVGGSSGSAISAPNAGSGAGFNSLLRRLSSKKYKGASSPKRSTSPSPNVEGLSPQPTKADPMVRRGVSMKVTAKEKQTNTRPPKSELIKKKPQHGRSSSTSNKMQGFIPVEYLPPLPTIDTNTNTIVSDGAKQQNLTVPSTARHMHPTARAKSVGGGHMRKDSYGRVSHGSQNPLPPLPTSMASQNSQEVVGKDTSEGFFDDVQLDDVGYQEVPQLTESEIIEQYNISKPNSMPSIEHCKTLFLKGFFSVQTTSAKPLPVIRYNIINVLSKLGVKFQEVKGGFVCMHTPSVQPSHSNELDEENKLYGDAFKSKSSDSFEAAEPEGSKTPSRQPSLQLPSHTPTTPSGPKSHKSSNSIGSIGGNVPRRKFSIGNAFNTYRKKNGSQVMMPPNTPATAKVIHGLYDDDDKERNGEDDDDEDDYGYDDSADSLNGYGGGSDMLISSRIEQRAKHQRTVSSSSQKASKSPLKFEIHIVKVPLVGLYGVQFKKILGNTWNYKTLASQILNEMNL

SEQ ID NO: 6043 - protein, 323 aa, Oryza sativa (japonica cultivar-group)
MAAVPEVALRHGAGRPMPAVGVGTADSAATSPETKRGAALAALEVGFRHFDTAALYGTEAPLGEAIAEATRRGLVASREEVFVTTKLWCTQCHPGLVLPSLRESLRNLQMEYVDLYLVHWPISVKPGPPMLPVKREDAVPFDFEGVWRAMEECHRLGLAKAIGVSNFTTKHLDKLLAVATIPPAVNQVEMNPVWQQRTVREYCAAKGIRVAAYSPLGGQNWIGEGNDVMESPVLADIARARGKSIAQVSLRWIHEQGVTPIPKSYNKERLKQNLEIFDWELTKEDRLKISQIPQKKIVTAARMFSPDGEFASVDLSDMEIVEE

SEQ ID NO: 6044 - protein, 128 aa, Aquifex aeolicus VF5
MATLTIDEIVEAIKNMSVLEVAELVKRLEEEFGVSAAAMVAAAPAAGAAAGAPAQAEEKTEFDVILKSPGKNKIQVIKVVREITGLGLKEAKELVDNAPKPIKEGVPKEEAEQIKKKLEEAGAEVELK

SEQ ID NO: 6045 - protein, 469 aa, Methanothermobacter thermautotrophicus str. Delta H
MTAMCAIAGFRGDDAPVKVQEMLDVLRHRGPDATGIYHDSRIVIRTATGEDVKEAPQSAEIAVGHNLLSIVGGPQPVSGDGVLVFNGEIYNQEELNWTGSDSELILDLIEGHGGDLEDALRFTVNKIDGDYAFAYTDGENLASRQDPVGVKPLYHSGEAFASEKKALWRIGLRNVETLPPGHAMINGVKVKLRGLPRAEPSDAEPEELRENLKSALRESVERRVRGLDEAALVFSGGVDSTLLAVLLDEHIDVRLYTVGLPGSSDPQFASRAAADLGMELEVLEVTEDTIREALPHVLGAIEEYNLMKIGVAMPLYLASEAASADGYRVMFSGQGADELFAGYHRYRRLLAEGRLEDALRHDLENIHHVNLERDDAVTMANSVELRVPFLDLQLIGVALTIPADLKIRGPEDELRKRILREAALEMGVPEYIAMRPKKAAQYGSGIDKVLRRKVLPGFDHETFLRRLMF

SEQ ID NO: 6046 - protein, 438 aa, Crocosphaera watsonii WH 8501
MTALLIRHPRILLPDGEFLLGDILIQQGKIVQIAPEITAPDGSNIIDATGLTLLPGVIDPQVHFREPGLEHKENLFTASCACAKGGVTSFLEMPNTKPLTTTQAPLDQKLQLASEKCLVNYGFFIGATPENLPDLLTTNPVCGIKIFMGSSHGALLVSREAEIEPIFARGDRLIAVHAEDQARILQRRQEFKGITDPAIHSQIQDETAALNATKLALKLSQKYQRRLHILHLSTGIEAEFLRENKPSWVTAEVTPQHLLLNTEAYEKIGTLAQMNPPLRSPENNQILWQALLDGVIDFIATDHAPHTLEEKAKGYPNSPSGMPGVETSLPLMLTQAMAGKCSVSQVSSWMATKPAEAYKIPNKGLIKTGYDADLVLVDLDNYRPVLREDLQTKCGWSPFEGWNLTGWPIITIVGGNIVYERGKLNTEVRGKALQFGKN

SEQ ID NO: 6047 - protein, 447 aa, Eremothecium gossypii
MASQEEFYRTQIFGTVFEITNRYADLNPVGMGAFGLVCSAVDTYTQQPVAIKKIMKPFSTAVLAKRTYRELKLLKHLRHENLICLEDIFLSPLEDIYFVTELQGTDLHRLLQTRPLEKQFLQYFLYQILRGLKYVHSAGVIHRDLKPSNILINENCDLKICDFGLARIQDPQMTGYVSTRYYRAPEIMLTWQKYNVEVDIWSAGCIFAEMIEGKPLFPGKDHVHQFSIITDLLGSPPKDVIDTICSENTLKFVTSLPHRDPVPFTERFKNLKPDAVDLLEKMLVFDPKKRITAGDALTHPYLAPYHDPTDEPVADAKFDWNFNDADLPVDTWRVMMYSEILDFHQVPDSQINPNDTFDDQVAAATAAAEAARQQQQQKQQQQKQQQQRHQGVEHGAQHVQLQHGAKQLSADPLVGDSNGGIPLNVSAANETLNNFANQAAQYATDFE

SEQ ID NO: 6048 - protein, 316 aa, Mycoplasma mycoides subsp. mycoides SC str. PG1
MSAEFNWFPGHMNKTLKDIEARIEIVDVVVEVIDSRAPYSSKNATFKKLLKDKPIVYIFSKADIADSKVTQQWVDYYIKNENSKVIVLYNRHTDIVNELINVINELTIKKREKDKAKGIKNTLINALVIGIPNVGKSTFINRVIKGKNVKVGNKPGVTRGIQLIHLNPFINLLDTPGVLPSKLESETVAVNICAINSIKDNVFPKERVAAKLMSYIYNNYDDIIEKYYKINLRLQKPISVIDSYKIFETIGIEKKWYVTEDILDMERILSSFLKDLDKGKLGKISFEKVLEVVPEEIQKAINPEDNKQDNDISSLW

SEQ ID NO: 6049 - protein, 400 aa, Streptomyces clavuligerus
MSNQEFAQRWQGVMIDSYGTPGLSFVRGEGSTLWDADGTAYTDFVSGLAVNALGHAHPAVVGAVSRQIASLGHISNFYSAEPTITLAERLIELFGRPGRVFFCNSGAEANETAFKIGRLTGRSRIVAAQSGFHGRTMGSLALTGQPAKREPFLPLPGDVTHVPYGDAEALRAAVTEDTAMVILEPIQGESGVVVPPKGYLRAAREITEATGTLLVLDEVQTGIGRTGHWFAAQAEGVEADVVTLAKGLGGGLPLGAAVAFGRAAELMTPGHHASTFGGNPVSCARTRVLDTIAADGLLDRVKQLGSAPDEWSVRDAAAIRWSPMSGAGLMLGIVLNEPLAPQVQLAAQKAGFLVNVPAPDVVRLIPPLVIEETEVDAFLQALPGLLDAVHERDREGQTGE

SEQ ID NO: 6050 - protein, 56 aa, Zea mays
  misc_feature (33)..(33): Xaa can be any naturally occurring amino acid
MSDGTATCIDIILAIILPPLGVFFKFGCGVEWXQRRVRGFFGYLPGIIYAVWAITK

SEQ ID NO: 6051 - protein, 323 aa, Oryza sativa (japonica cultivar-group)
MADEHEWWNSPCSARTGDDEAACSTADADESAVGSTPMSFGHGGQPASLSDAAASSSSSSFLLAGQHMDYWTQDFMGGRAAAAATASFDTLLQLQLQGGDAASRRLLLGDHAAAPPRHLVVPGAPYGGGGGDDTAAPPRGLSPTPYEAADNLQQQQSFPGGHHVVSNTDRLHDHHQDAGSPSPATRSSPGSPAAAKKPRIEAPSPMPTFKVRKEKLGDRITALQQLVSPFGKTDTASVLHEAIEYIKFLHDQVASLSSPYLRCGRPVQLQHQQGSHKVNGNCEGKQLDLRSRGLCLVPVASTYTVASETATEFWHPTFGGTFR

SEQ ID NO: 6052 - protein, 347 aa, Listeria innocua Clip11262
MKNAIKWIAIGFAGIILLPLVIVFFIYKKAVGKKEYDPEVLENLDEASQEFVKNTSPLSDVDSRYKYMRLATKALPSAKDIEIGDVENKKIDGPAGKIPIRIYTPKEDGPFEIIVYYHGGGFVLGGLQTHDAIARKLVQTTGARVVTVDYRLAPENPFPAAVEDAYAALLWVQNHRTSLRAKSSDIIVAGDSVGGNLATVVTQIAKAKGKPNVTAQILLYPATDIFSRDASVLYPSMDEFAEGYVLTKESLDKFFKLYIANSSDRKYDPLIAPIRSKDLAGLPKTFIATAEFDPLRDQGEAYAKKLKDAGVEVFAKRFEKVPHGFMTTTSEATDETYELISEFLEEK

SEQ ID NO: 6053 - protein, 494 aa, Burkholderia fungorum LB400
MNANPKHVADPTRLRNQNLIGGQWKAALSGQSIAVENPANEEIIAQVPRGQQEDIDEAVKVARATFESAAWRKIRPIDRGRILENIARKVEEHAEELSWLESLDTGKAISFARVIDLPSTVDVFRYMGGWCSKLGGTTPPISFDGKEYHAYTRREPVGVVGAITPWNYPLALGSWKIASALAAGCTMVLKPTELTPLSTLRLAELCLEAGLPEGALNVVNGYGHEAGEALARHPDIDKITFTGSTVVGKKIVEYALGNMKRVTLELGGKSPSIVFDDADLDQVGLGAALAVFFNSGQICFAASRLFVQASVYDRVVEAVAAVASQFKVGNGQDTDTMLGPLVSRKQQERVLGYVQSGIEQGASLIYGGQKIGDKGYFLQPTVFADADQSMKIAQEEIFGPVVSIIRFKDEVEAIRLANDTTYGLAANIWTRDIKKAHRVAHRLQAGSVWINCHGVIDPAAPFGGFKQSGWGREVSEEGLAAYTEIKTVCALLDD

SEQ ID NO: 6054 - protein, 484 aa, Agrobacterium tumefaciens str. C58
MKNLHRRDLIEDRAFVNGAWVERDQMFAIVDPAGGDHLADVASCTLNDVDFAIDAASKAFAGWRDMLPVDRGDILRNWSARMRENAHDLATIISAEQGKPLAESRGEIAYAANFLDWFASEGERSYGETIPTHLKGSNLSVRMQPIGVTVAITPWNFPSAMIARKAGAALAAGCTMIVKPAPETPLSALALARLAEESGVPPGVLQVLPGEAAPLARRLLENTEVRAFSFTGSTEVGRILLTQSAATVKKASLELGGHAPFIVFADADLTEAVKGCLGAKFATSGQDCLAANRIYVQRSLYPRFVERFAEATSRLTVGHGLETGVDIGPMTRPSVAEKCRQQVAQALSAGARLVCGGQDSPLGGNFVTPTVLADVTDDMLIAREETFGPVAAILPFDDEAEVIRRANATEMGLAAYLYTNDLGRAMRLTDQLEYGMVAVNTPKFTGAPIPFGGWKQSGLGREGSRHGLMEYLEPKYVCFGNLAA

SEQ ID NO: 6055 - protein, 273 aa, Brassica napus
MVLSQTTTESNEPVSSTFGSRYALTALPKYEIGESSIPKDAAYQIIKDELMLDGNPRLNLASFVTTWMEPECDKLIMDSINKNYVDMDEYPVTTELQNRCVNMIARLFNAPLGDTETAMGVGTVGSSEAIMLAGLAFKRNWQNKRKAEGKTYDKPNIVTGANVQVCWEKFARYFEVELKEIKLSEGYYVMDPEKAVEMVDENTICVAAILGSTLTGEFEDVKRLNHLLVKKNDATGWNTPIHVDAASGGFIAPFIYPELEWDFRLSLVKSINV

SEQ ID NO: 6056 - protein, 327 aa, Triticum aestivum
  misc_feature (239)..(239): Xaa can be any naturally occurring amino acid
QFLGQQQPFPPQQPYPQPQPFPSQQPYLQLQPFPQPQLPYSQPQPFRPQQPYPQPQPQYSQPQQPISQQQQQQQQQQQQQQQFPQQQQPLLPQQPPFSQQQPPFSQQQQQPPFSQQQQQPILLQQPPFSQHQQPVLPQQQIPSVQPSILQQLNPCKVFLQQQCSPVAMPQSLARSQTLWQSSCHVMQQQCCRQLPQIPEQSRYDAIRAIIYSIVLQEQQHGQGLNQPQQQQPQQSVQGXVSQPQQQQKQLGQCSFQQPQQQQQQQQQQQQQQQEQQILQQILQQQLIPCMGCCIAATQHSAWEITSFATKYLPAVARIVLSAPMADP

SEQ ID NO: 6057 - protein, 506 aa, Glycine max
MLSQKQGEDAIITNLNHTEHEGGSTSTREEEEQDHSMFNFKSLLWHGGSVWDAWFSCASNQVAQVLLTLPYSFAQLGMVSGILLQIFYGLIGSWTAYLVSVLYIEYRTRKEKENVSFKNHVIQWFEVLDGLLGRYWKAVGLAFNCTFLLFGSVIQLIACASNIYYINDKLYKRTWTYIFGACCAFTVFIPSFHNYRIWSFLGLGMTTYTAWYLAIAALIHGQVENVTHTGPTKLVLYFTGATNILYTFGGHAVTVEIMHAMWKPQKFKYIYLLATLYVFTLTIPSAAAVYWAFGDELLNHSNAFSLLPKNRFRDAAVILMLIHQFITFGFACTPLYFVWEKVIGMHDTKSICIRALARLPVVIPIWFLAIIFPFFGPINSAVGALLVSFTVYIIPAIAHMLTYRKASARQNAAEKPPFFMPSWTAMYVFNAFIVGWVLVVGFGLGGWASMINLINQIDTFGLFAKCYQCPDPPPPAGAPPPLTHPVVEGGVDLVEPWAPPNLLKII

SEQ ID NO: 6058 - protein, 435 aa, Bdellovibrio bacteriovorus HD100
MSKVTLFWFRRDLRLDDNAGLYHALKERSAVLPLFIFDSEILENLDDPADARVTFIYEQIQDMKQQLNAKKSDLIVRHGKPLEVLKTLSDEMAVEAIYANHDYEPAARKRDEKVAAWAAKAGIEFLTFKDQCLFEKDEILTDARKPYTVYTPYRNKVLANLSEFYLKSYPNDLYESSYAKVKKAEPLLTLKSLGFERSNIEFPPMDLSTKMLKTYHATRDFPADEKGTSHLGLHLRFGTLSVRELAREAKKYSPVWLSELIWRDFFMQILWHFPQVENQSFRPEYDKIAWRKSKADFQKWCEGRTGYPLVDAGMRELNATGYMHNRVRMVVASFLCKHLLIHWYEGERYFAKKLLDYDLSANNGNWQWAAGSGCDAAPYFRIFNPQTQFEKFDPDGKYVQKWVPEYGTDEYPQPMVDHNEARGRCLQAFTKVLKK

SEQ ID NO: 6059 - protein, 160 aa, Glycine max
MSDEEHHFDSQADAGASKTYPQQAGTIRKNGYIVIKSRPCKVVEVSTSKTGKHGHAKCHFVAIDIFNGKKLEDIVPSSHNCDVPHVNRTDYQLIDISEDGFVSLLTDNGNTKDDLKLPTDEALLAQIKDGFSEGKDLVVSVMSAMGEEQICSLKDIGPKN

SEQ ID NO: 6060 - protein, 172 aa, Zea mays
MAAGHHGQPPDGDDGRPSVVGGEQDRLLPIANVGRIMKQILPPNAKISKEAKETMQECVSEFIGFVTGEASDKCHKEKRKTVNGDDLCWAFGALGFDDYVDPMRGYLHKYREVEGDRAAAAASSSRGGGDHHPASASTSTSPPAAAPPAGHFMFGAAAIDRPDNNTSSARPF

SEQ ID NO: 6061 - protein, 275 aa, Triticum aestivum
  misc_feature (44)..(44): Xaa can be any naturally occurring amino acid
MEAETAAKRARENEGAAAADGAGEQAGISAVIPGWFSEISPMWXYQEMITHLPLCSIKDPKKVLVIGGGDGGVLREVSRHSSVEQIDICEIDKMVVDVSKQFFPHLALGFEDPRVSLHIGDGVAFLKNAPEGTYDAVIVDSSDPVGPAQELFEKPFFESVSRALRPGGVVCTQAESIWLHMHIIEDIVTNCRQVFKGSVNYAWTTVPTYPSGVIGFMLCSPEGPSVDFQHPVFSIEEDEYSPKSQGQLKFYNSEFHPASFCLPSFARRVIEAQAN

SEQ ID NO: 6062 - protein, 175 aa, Triticum aestivum
MAPAVMASSATTVAPFQGLKSTTGLPISRPSGSAGLSNVSNGGRIRCMQVWPIEGIKKFETLSYLPPLSTEALLKQVDYLIRSKWVPCLEFSKVGFVFREHNSSPGYYDGRYWTMWKLPMFGCTDATQVLNEVEEVKKEYPDAYVRVIGFDNMRQVQCVSFIAFRPPGCEESGKA

SEQ ID NO: 6063 - protein, 122 aa, Staphylococcus aureus subsp. aureus MRSA252
MANHEQIIETIKEMSVLELNDLVKAIEEEFGVTAAAPVAVAGAAGGADAAAEKTEFDVELTSAGSSKIKVVKAVKEATGLGLKDAKELVDGAPKVIKEALPKEEAEKLKEQLEEVGATVELK

SEQ ID NO: 6064 - protein, 207 aa, Vibrio vulnificus CMCP6
MSSVIAQKDENVVWHQHAVTKTQRADLKQQKPAVLWFTGLSGAGKSTVAGALENRLAEQGFHTYLLDGDNVRHGLCSDLGFSTQDRRENIRRIGELAKLMADAGLIVLTAFISPHRAERQLVRDLLPEGEFIEVFVNTSLEVCEQRDPKGLYKKARAGEIANFTGIDSEYEVPLNPEIDLPAGEKGIEALVDLLVEQLTLRGVISPR

SEQ ID NO: 6065 - protein, 361 aa, Zea mays
MAWRANPKPSQAEGKRGCERGAPSHYPAAASPHTPPSRAQGFGMEADAAAKRTRESGEDATAAGISAVIPGWFSEISPMWPGEAHSLKVEKVLFQGKSDYQNVMVFQSSTYGKVLVLDGVIQVTERDECAYQEMITHLPLCSIKDPKKVLVIGGGDGGVLREVSRHSSVEQIDICEIDKMVVDVSKQFFPHLAVGFEDPRVSLHIGDGVAFLKNAPEGTYDAVIVDSSDPIGPAQELFEKPFFQLVARALRPGGVVCTQAESIWLHIHIIEDIVVNCRQVFKGSVNYAWTTVPTYPSGVIGFMLCSTEGPAVDFQHPVFNIEEDEHPMKSKGPLKFYNSEIHTASFCLPSFAKRVIESKAN

SEQ ID NO: 6066 - protein, 439 aa, Glycine max
MDRRTGSTRNILFNKYEIGKLLGQGNFAKVYHGRNLSTNESVAIKVIKKERLQQKERLVKQIKREVSVMSLVRHPHIVELKEVMANKAKIFLVVEYVKGGELFAKVAKGKMKEDVARKYFQQLISAVDFCHSRGVTHRDLKPENLLLDENEDLKVSDFGLSALPDQRRSDGMLLTPCGTPAYVAPEVLKKKGYDGSKADIWSCGVILFALLSGYLPFQGENVMRIYSKSFKADYAFPEWISPAAKNLISNLLVVDPQKRYSIPDIMKDPWFQIGFLRPIAFSMKDDDGNSSSSNNEDGELTGAKPARPSYNAFEIISSLSNGFDLRNLFETRKRSPSMFISKFSASAVMAKLEGVAKKLNFRVTGKKEFVVRMQGATEGRKGKLAMTVEVFEVAPEVAVVEFAKSAGDTLEYIKFCEDQVRPSLKDIVWSWQGDANCHQ

SEQ ID NO: 6067 - protein, 356 aa, Triticum aestivum
MGSIAAGADEDACMYALQLVSSSILPMTLKNAIELGLLETLMAAGGKLLTPAEVAAKLPSAANPEAPDMVDRMLRLLASYNVVSCTTEEGKDGRLSRRYGAAPVCKYLTPNEDGVSMAALALMNQDKVLMESWYYLKDAVLDGGIPFNKAYGMSAFEYHGTDPRFNRVFNEGMKNHSIIITKKLLEVYKGFEGLGTIVDVGGGVGATVAAITAHYPTIKGINFDLPHVISEAPPFPGVTHVGGDMFQKVPSGDAILMKWILHDWSDEHCATLLKNCYDALPPHGKVVLVECILPVNPEATPKAQGVFHVDMIMLAHNPGGRERYEREFEALAKGAGFKAIKTTYIYANAFAIEFTK

SEQ ID NO: 6068 - protein, 509 aa, Candida albicans SC5314
MDQQEAPIYYGRSVNKVYNQEFIIDSRFKIVKELGHGAYGIVCSAKYDNGSKKVPDSNNGNASSSANASFVAIKKITNIFSKNILCKRALRELKLLQFFRGHKNITCLYDLDIIPNPMTGEFNEIYLYEELMECDMHQIIRSGQPLSDQHYQSFIYQVLCGLNFIHSADVLHRDLKPGNLLVNADCELKICDFGLARGFSENPDENAGFMTEYVATRWYRAPEIMLSFTNYTKAIDIWSVGCILAELLGGKPLFRGKDYVDQLNQILMILGTPPESTLQRIGSHRAQNYVRSLPITRKASYEELFPDANPLALDLLERMLTLDPRERITVRDALNHKYLELWHDPKEEIECQVKFDFKSFETVDGLDEMKQLIMDEVQKFREFVRKPIEEQQRIQMQLHMQKREEQRQEEEEKELLEQQRQFPAQESMDISQTPYNNLETNIGTPQVEDDYPRPQELDEFTFSNLESSSSMNLFQDMAKPSGEEYIKLEEELGFGLDGAMFNNYCNDHQ

SEQ ID NO: 6069 - protein, 275 aa, Escherichia coli O157:H7
MANPTVIKLQDGNVMPQLGLGVWQASNEEVITAIQKALEVGYRSFDTAAAYKNEEGVGKALKNASVNREELFITTKLWNDDHNRPREALLDSLKKLQLDYIDLYLMHWPVPAIDHYVEAWKGMIELQKEGLIKSIGVCNFQIHHLQRLIDETGVTPVINQIELHPLMQQRQLHAWNATHKIQTESWSPLAQGGKGVFDQKVIRDLADKYGKTPAQIVIRWHLDSGLVVIPKSVTPSRIAENFDVWDFRLDKDELGEIAKLDQGKRLGPDPDQFGG

SEQ ID NO: 6070 - protein, 365 aa, Aspergillus fumigatus
MAEFVRAQIFGTTFEITSRYNLQPVGMGAFGLVCSARDQLTGQPVAVKKIMKPFSTPVLSKRTYRELKLLKHLRHENIISLSDIFISPLEDIYFVTELLGTDLHRLLTSRPLEKQFIQYFLYQILRGLKYVHSAGVVHRDLKPSNILINENCDLKICDFGLARIQDPQMTGYVSTRYYRAPEIMLTWQKYDVEVDIWSAGCIFAEMLEGKPLFPGKDHVNQFSIITELLGTPPDDVIQTICSENTLRFVKSLPKRERQPLANKFKNADPEAVDLLERMLVFDPKKRIRAGEALAHEYLSPYHDPTDEPEAEEKFDWSFNDADLPVDTWKIMMYSEILDFHNIDQGNDAGQVLMEGGVAQAQQNYA

SEQ ID NO: 6071 - protein, 425 aa, Azoarcus sp. EbN1
MKIRIANGRVIDPANGLDDTRDMYLADGKIVAHGRVPEGFAAERTIDATGLVVAPGLIDLAARLREPGFEYRATLESEMDAAMAGGVTSLAIPPDTDPVLDEPGLVEMLCYRAKKLNRAHVYPVGALTIGLNGERLSEMAELVEAGCVAFGQANVPVVDSAVLLRAMQYAATFGFRVWLQPLAPFLSRGFAHDGEVATRLGLPGIPTAAETIALYAHIQLARATGARLHVTRLSSAEGLALIRQARADGLDVTCDVSINHLHLSEMDIGYFNSNCHLVPPLRSQRDRDALRQGLADGSIDALCSDHTPVDDNGKLTPFSESEAGATGLELLLPLTLKWAQETGLPLGQALARVTSDAARIVGITKAGHLGAGARADLCLFDPAAHTTVRRDTLRSQGKNTPFLGLELPGRVHYTLVEGQVMHEPS

SEQ ID NO: 6072 - protein, 419 aa, Zea mays
  misc_feature (263)..(263): Xaa can be any naturally occurring amino acid
MILSMLAVQPYSPVTRQQGESTTRSETTTFSTLSPSTSLITLHRPSNLKAMADLIIPPSPVMFPEDQDSWNVQLFRSIDGGACFGFPSTPEAAAQSGLVSGKNNVLDRSIHDAYIHAIRRAKHFIYIENQYFLGSSFAWKADGIKPEEIEALHLVPRELSLKIVSKIEAGEHFAVYVVLPMWPEGPPASGSIQGILDWQRRTMEMMYNDISVALDAKRIDRDPRDYLTFFCLGNREVKMDGEYEPSGRPLDGTDYARAQNARXRFMIYVHSKMMIVDDEYIIVGSANINQRSMDGGRDSEIAMGAYQPCHLNTKGQVARGQVHGFRMSLWYEHLGMLHDDFLNPGSLECVRRVNQMADRYWDLYAGDSLDADLPGHLLRYPVTVTKEGTVTELPGAKFFPDTQALVLGALSKLPPILTT

SEQ ID NO: 6073 - protein, 483 aa, Azotobacter vinelandii
MQLNDARLFRQQAYIEGRWVDADGGQTLAVNNPASNEILGGVPKMGAAETRRAIEAAERALLAWRALTAKERAGKLRCWFELLLEHQDDLARLMTLEQGKPLAEARGEIAYAASFLEWFAEEAKRIYGDTIPGHQADKRILVIKQPVGVCAAITPWNFPAAMITRKAGPSLAAGCTLVLKPASQTPFSALALAELAERAGIPAGVFNVVTGSAAEIGGELTANPIVRKLSFTGSTEIGRQLMAQCARDIKKVSLELGGNAPFIVFDDADLDAAVEGALASKYRNAGQTCVCANRLYVQDGVYDAFAEKLRAAVARLKVGNGLEEGVSIGPLIDDKAVGKVEEHIADAVSRGARVIAGGRPHALGGTFFEPTILAEVPADARVAREETFGPLAPLFRFGDDDEAIALANATEFGLAAYFYARDLSRVFRVAESLEYGIVGVNTGLISTEVAPFGGVKASGLGREGSKYGIEDYLEIKYLCLGGI

SEQ ID NO: 6074 - protein, 220 aa, Capsicum annuum
MESEHEKSETPNFKRPLKKKCENAKRFTDEQVKLLESMFKLGTKIEPREKLQLARDLGLQPRQVAIWFQNKRARWKSKQLEHEYRILQSKFDHLNTQFESLKIEKERLLIELETLNDQLGNKLARGSKSQDSRDSELHTSPENGFTDLLELKHCAGCSNSRFGHKSVNEEDDETTEETDKYFTPKEEAEFWNLDELGDNNSLEHWCVGLGSISNSKLWDF

SEQ ID NO: 6075 - protein, 445 aa, Streptomyces avermitilis MA-4680
MSDVELVLRSTRVITPEGTRPAAVAVAAGKITAVLPHDAEVPAGARLEDLGDDVLLPGLVDTHVHVNDPGRTHWEGFWTATRAAAAGGITTLVDMPLNSLPPTTTVGNLRTKRDVAADKAHIDVGFWGGALPDNVKDLRPLHDAGVFGFKAFLSPSGVDEFPELDQERLARSMAEIAGFGGLLIVHAEDPHHLAAAPQRGGPRYTDFLASRPRDAEDTAIANLLAQAKRLNARVHVLHLSSSDALPLIAGAKAEGVRVTVETCPHYLTLTAEEVPDGASEFKCCPPIREAANQDLLWQALADGTIDCVVTDHSPSTADLKTDDFATAWGGISGLQLSLPAIWTEARRRGHSLEDVVRWMSARTARLVGLAQKGAIEAGRDADFAVLAPDETFTVDPAALQHRNRVTAYAGKTLSGVVKSTWLRGERIMADGEFTEPKGRLLSREP

SEQ ID NO: 6076 - protein, 119 aa, Pennisetum glaucum
KTKKKLEDKWIADSDVIAQALEEKYPEPPLATPPDKAQLGQKYFPPFIGFLKSKDSSDGTEQALLDELTSFDNYLKDNGPFINGVTISAADLALGPKLYHMEIALGHYKNCLFQIHFHM

SEQ ID NO: 6077 - protein, 177 aa, Zea mays
MAGGGVEDVYGEDRATEEQLITPWAFSVASGYTLLRDPRHNKGLAFSEAERDAHYLRGLLPPALASQELQEKKLMQNLRRYEQPLHRYIAMMDLQERNERLFYKLLIDNVEELLPVVYTPTVGEACQKYGSIYRRPQGLYISLRDKGKILEVLKNWPERSIQVIVVTDGERILGLGD

SEQ ID NO: 6078 - protein, 398 aa, Ustilago maydis 521
MASLRTGLRVAQPLRASARNFATRPSIRSSVRHYSSPAPGSPPPPQPSSSSSTSKVLLTSVAIAAAAGGAFLAFGRDDKVSILGVGANGANKFQGSKGSVGPATTSAHSKADYQAVYNAIAEQLEANPDYDDGSYGPVLVRLAWHASGTYDKNSNTGGSNGATMRFAPESEHGANAGLGAARDFMEKIHQKFPWITYSDLWTLGGVAAIQELGGPKIPWRPGRKDATADKCTPDGRLPDGDKGPDHLRYIFYKMGFNDQEIVALSGAHALGRCHTDRSGFDGPWTFAPTSFTNEYFNLLMNEKWNIRKWNGPPQFEDKSTKSLMMLMTDMALVQDPSFKKHVQRYAKSEDEFFNDFRSAYAKLLELGVPAENFKAFETKLDGGKPFEFATSAEQENAN

SEQ ID NO: 6079 - protein, 75 aa, Brassica napus
  misc_feature (7)..(7): Xaa can be any naturally occurring amino acid
  misc_feature (45)..(45): Xaa can be any naturally occurring amino acid
  misc_feature (53)..(53): Xaa can be any naturally occurring amino acid
  misc_feature (59)..(59): Xaa can be any naturally occurring amino acid
EKEEVVXAYSMLSSAAVVTSPAQATMGAPFTGLKSSSAFPVTRKXNNDITSIXSNGGRXVPSIFASINLPSLPLP

SEQ ID NO: 6080 - protein, 126 aa, uncultured marine gamma proteobacterium EB000-45B06
MATSKEDILKAIEEMSVMDLVDLISDIEEKFGVTAAAAVAAAPAAAAGGDAEAAEEKDAFDVVLNAAGDQKVQVIKAVRAITGLGLKEAKDMVDGAPSTVKEGASKDDAEAMLKQLTEAGATAELK

SEQ ID NO: 6081 - protein, 133 aa, Brassica napus
MEGVGSRLSRTSSRYSGPAATAVFSGRVRKWKKKWVRVSTSPVGVFRASKSNGRSNNNNNSSSNSPHHLLLHKWTPLPSDANGSGETEEPPKRRFRYAPIAMFEHRERVGAKDSEVEAEETDEFDNDSPLPKA

SEQ ID NO: 6082 - protein, 230 aa, Zea mays
  misc_feature (151)..(151): Xaa can be any naturally occurring amino acid
  misc_feature (202)..(202): Xaa can be any naturally occurring amino acid
MTKNYPAVSEEYQKAIEKCKRKLRGLIAEKNCAPIMVRLAWHSAGTFDCASRTGGPFGTMRFDDELAHGANNGLHIALRLLEPIREQFPTISHADFHQLAGVVAVEVTGGPEIPFHPGREDKPQPPPEGRLPDATKGCDHLRQVFLKQMGXLTDQDIVALSGAHTLGRCHKDRSGFEGAWTSNPLIFDNSYFKELLSGEKEXLLRLSLTKPLLDDPVFRPLVEKYAADDV

SEQ ID NO: 6083 - protein, 400 aa, Magnaporthe grisea 70-15
MATTQTTQGQIQPCRYKVGKTLGAGSYSVVKECVHIDTGRYYAAKVINKRLMAGREHMVRNEIAVLKKVSMGHQNILTLVDYFETMNNLYLVTDLALGGELFDRICRKGSYYESDAVDLIRATLSAVAYLHDHGIVHRDLKPENLLFRTPEDNADLLIADFGLSRIMDEEQFHVLTTTCGTPGYMAPEIFKKTGHGKPVDIWALGVITYFLLCGYTPFDRDSDLEEMQAILNADYSFTPIEFWRGVSDSAKDFIRRCLTIDPTKRMSAHEALQHPFVAGYLADKGANLLPTVKKNFNARRTLHAAIDTVRAINKLREGQGLNGQRLMAGVKSREPNKAAAAAAAAASIPTSTGEVGTVGAATHKDSGYGSTRPDALRPGVETNKVVETSKGLWTGVGSRG

SEQ ID NO: 6084 - protein, 82 aa, Triticum aestivum
  misc_feature (54)..(54): Xaa can be any naturally occurring amino acid
  misc_feature (61)..(61): Xaa can be any naturally occurring amino acid
  misc_feature (73)..(73): Xaa can be any naturally occurring amino acid
MSNDAEHDTTFESADAGASLTYPMQCSALRKNGFVVIKGRPCKIAEMSTSKTGXKHGHAKXHLVAIDIFTGKXLEELCPSTQ

SEQ ID NO: 6085 - protein, 435 aa, Burkholderia cepacia R1808
MSRQQQALELQKQWDTDPRWTGIKRGYTADDVVRLRGSIAVEHTLAKRGAEKLWRLINEEPFVNALGALTGNQAMQQVKAGLKAIYLSGWQVAGDANVAGEMYPDQSLYPANSVPLVVKRINNTLTRADQIQWSEGKNPGDDGYVDFFAPIVADAEAGFGGVLNAFELMKAMIEAGASGVHFEDQLASVKKCGHMGGKVLVPTREAVAKLSAARLAADVMGTPTVLVARTDAEAADLITSDIDDNDKPFLTGERTVEGFFRTKPGLEQAISRGLAYAPYADLVWCETGKPDLEYAKKFAEAIHKQFPGKMLSYNCSPSFNWKKNLDDATIAKFQKELGAMGYKFQFITLAGFHALNYSMFNLAHGYARTQMSAFVELQQAEFEAADKGFTAVKHQREVGTGYFDAVTQTVEREASTTALHGSTEDEQFFDGKKVA

SEQ ID NO: 6086 - protein, 194 aa, Glycine max
  misc_feature (27)..(27): Xaa can be any naturally occurring amino acid
  misc_feature (55)..(55): Xaa can be any naturally occurring amino acid
  misc_feature (117)..(117): Xaa can be any naturally occurring amino acid
  misc_feature (129)..(129): Xaa can be any naturally occurring amino acid
  misc_feature (166)..(166): Xaa can be any naturally occurring amino acid
DTSFILARDAIGDTYLFIAWRLNGSHXTPSYLNGDYDDCEHYESFPPGHLYSIKXRALLTIAQSLHGFCDAILLSHLMITLALRHAFEMAVVKRMMTDVPSAGSLSQGSYSTLSAVXLYLYLSGSRCSXQRASKLHSLCVCLEGAPDLMASLEVTYYIGTVHHEYXYSVQEGIYTIDDEIYHIYSSWVDTIRAS

SEQ ID NO: 6087 - protein, 154 aa, Prunus persica
MALSLFGGRRSNVFDPFSLDIWDPLEGLGTLANIPPSARETTAIANTRIDWKETPEAHIFIADLPGLKKEEVKVEVDDGKVLHISGERSREQEEKNDKWHRIERSTGKFSRRFRLPDNAKIDQVKASMENGVLTVTVPKEEEKRPQVKAIDISG

SEQ ID NO: 6088 - protein, 390 aa, Oryza sativa (japonica cultivar-group)
MEGGGAGSGMERWREMFRGADIYDVIRNAILIAGADSPRELLRRRQGIIEWLFAVAPVTVPVPAPLACGRVVDGAGNRLPPAAIPDGGGHHHDDNDGNFAAAEAQTSLIDQQILEALYDEIEEDTQVINEVLRIKDILINYKEQSVDTLFDGLRRLQLMRLSISVLKSTQIAEAVAPLNKHRSPVICKIARDLAKGWKGVAADWVGPSSANADTSPDISNPSTVEDDFGLPTPPMDVGAFFLPQSAAEQYVSEFLHKADDDDDESLIPNAKNDCGFGGYKMEIAKPVANMDENILRKGKDLSRQHGPPMRQANLQMKLAQHHAIAITEQRPIAVVRKPLPDHVSKLERQATILEGCKVGIGKRNNTDIADLRLEATKRKLNDAYQEAENS

SEQ ID NO: 6089 - protein, 499 aa, Burkholderia fungorum LB400
MDASTILADLGIAHAAQAGDIAVHSPITGELIGRVASNTVAEVDTALAQAKQAYTAWRNVPAPRRGELVRLLGNRLREKKQALGSIITLETGKILQEGMGEVQEMIDICDFAVGLSRQLYGLTIASERPGHRMAETWHPVGTCVVISAFNFPAAVWSWNAALALVCGNAVIWKPSEKTPLTALAVNQILSEALQEFGDAPAGLTALINGGRDVGAKLVADPRASIVSATGSTEMGRTVGVEVAKRFGRSLLELGGNNAGIVTQTADHELAMRGILFSAVGTAGQRCTSLRRLFVHESVYDKTIERLKQLYSKVPIGNPLEKGTLMGPLIDKQSYGRMQEALQQATAEGGKVFGGERVEVKGYEGGYYVRPAIVEMPSQTSVVLKETFAPILYVLRYTDFADAVEANNAAVHGLSSCVFTTDLREAERFLSDSGSDCGIANVNIGPSGAEIGGAFGGEKETGGGRESGSDAWKAYMRRATNTVNYSSALPLAQGIDFNIG

SEQ ID NO: 6090 - protein, 429 aa, Streptomyces avermitilis MA-4680
MSDNSVVLRYGDGEYTYPVIDSTVGDKGFDIGKLRAQTGLVTLDSGYGNTAAYKSAITYLDGEQGILRYRGYPIEQLAERSTFLEVAYLLINGELPTVDELSTFKGEITQHTLLHEDVKNFYRGFPRDAHPMAMLSSVVSALSTFYQDSHNPFDEKQRNLSTIRLLAKLPTIAAYAYKKSIGHPFVYPRNDLGYVENFLRMTFSVPAQDYDLDPVVVSALDKLLILHADHEQNCSTSTVRLVGSSQANMFASISAGISALWGPLHGGANQSVLEMLEGIQTSGGDVDTFIRKVKNKEDGVKLMGFGHRVYKNFDPRAKIIKAAAHDVLSALGKSDELLDIALKLEEHALADDYFVERKLYPNVDFYTGLIYRAMGFPTEMFTVLFALGRLPGWIAQWHEMIKEPGSRIGRPRQIYTGEVLRDFVPVEGR

SEQ ID NO: 6091 - protein, 457 aa, Azotobacter vinelandii
MKDATGNPQTRHWQALGHAHHLPPFSDYRQLKEHGPRIITRASGVYLWDSEGNCILDGMAGLWCVNVGYGREELVEAASRQMRELPYYNLFFQTAHPPAVELARAIAELAPPGMHHVFFTGSGSEANDTVLRLVRHYWAIKGQPRKNVVIGRWNGYHGSTVAGASLGGMKAMHGQGDLPIPGIEHIDQPYWFGEGGGLDPEAFGIRVADQLERKILEIGEERVAAFIAEPIQGAGGVIIPPDSYWPRIREILRKYDILFAADEVVCGFGRTGEWFGSQYYGLEPDLMAIAKGLTSGYLPMGGVVVRDRIVEVLEEGGEFYHGFTYSGHPVAAALALENIRLLREEGIVERVRTRTGPYLQRRWRELAEHPLVGEVRGLGMLAALELVKDKKTRERFPADLAAGMRCREHCFANGLVMRAVGDTMIVAPPLVISEAEIDELIAKARHCLDLTASEMPG

SEQ ID NO: 6092 - protein, 131 aa, Sulfolobus acidocaldarius
MSIQYTTVGDLKVGSYVMIDGEPCRVVEITKAKTGKHGSAKANVVAIGLFTGQKRSLMAPVDQQVEVPIIEKHVGQILADKGDNLTIMDLESYETFDLEKPTENEIVSKIRPGAEIEYWSVMGRRKIVRVK

SEQ ID NO: 6093 - protein, 478 aa, Agrobacterium tumefaciens str. C58
MHTYPDIKLLIDGEWRDAVSGKTIAVSDPATDEIIGAIAHAEKEDLDLALAAAERGFKLWRDTSPYERSKIMRKAADILRERKDKIAYIMTREQGKPLAQSATEIMGAADTIDWFAEEARRTYGQVIPARATGVSQLAIKVPVGPVAAFTPWNFPLNQIVRKLSAALATGCSIIVKAPEETPASPAELIRAFVDAGVPAGVIGLVYGVPSEISEYLIPHPVIRKISFTGSTPIGKHLAALAGKHMKRATMELGGHAPVMIFDDADIEKAIEVTSLAKFRNAGQVCVAPTRFLVQDGVADRFLEGFVEATKAIKVGNGLEEGVIMGPLANERRIPALEGLINDAVSHGAELKTGGRRIGNKGNFFEPTVLANVPVTAKIMNDEPFGPVAIINRFSSFDDAITEANRLPFGLASYAFTGSVKTAHALGQQVEAGMLTINHNGLALPEVPFGGIKDSGYGTEGGSEAVQAYLETKFVSQMS

SEQ ID NO: 6094 - protein, 225 aa, Populus tomentosa
MAREKIKIKKIDNVTARQVTFSKRRRGLFKKAEELSVLCDAEVAVIIFSATGKLFEYSSSSMKGVLARYNLHSNNLDKINQPSLELQLENSNHMRLSKEVSEKSHQLRRMRGEDLQGLNIEELQQLEKALEVGLSRVLETKGERIMNEISTLERKGVQLLEENKQLKQKIATITRGKRPALVDLDTAVQEEGMSSESTTNVCSCSSGPPVEDDSSDTSLKLGLAI

SEQ ID NO: 6095 - protein, 502 aa, Arabidopsis thaliana
MVLSHAVSESDVSVHSTFASRYVRTSLPRFKMPENSIPKEAAYQIINDELMLDGNPRLNLASFVTTWMEPECDKLIMSSINKNYVDMDEYPVTTELQNRCVNMIAHLFNAPLEEAETAVGVGTVGSSEAIMLAGLAFKRKWQNKRKAEGKPVDKPNIVTGANVQVCWEKFARYFEVELKEVKLSEGYYVMDPQQAVDMVDENTICVADILGSTLNGEFEDVKLLNDLLVEKNKETGWDTPIHVDAASGGFIAPFLYPELEWDFRLPLVKSINVSGHKYGLVYAGIGWVIWRNKEDLPEELIFHINYLGADQPTFTLNFSKGSSQVIAQYYQLIRLGHEGYRNVMENCRENMIVLREGLEKTERFNIVSKDEGVPLVAFSLKDSSCHTEFEISDMLRRYGWIVPAYTMPPNAQHITVLRVVIREDFSRTLAERLVIDIEKVMRELDELPSRVIHKISLGQEKSESNSDNLMVTVKKSDIDKQRDIITGWKKFVADRKKTSGIC

SEQ ID NO: 6096 - protein, 93 aa, Triticum aestivum
  misc_feature (39)..(39): Xaa can be any naturally occurring amino acid
  misc_feature (46)..(46): Xaa can be any naturally occurring amino acid
  misc_feature (55)..(55): Xaa can be any naturally occurring amino acid
MSDTDEHHFESKADSGASKTYPQQAGAIRKGGTHRHQGXPCKVVEXPLPKTGKHXHAKCHFCCNLILWELGTFLSMPKAKFQLIYKPIISPSN

SEQ ID NO: 6097 - protein, 486 aa, Candida albicans SC5314
MTKKYSSTDLKSSKLLHRDLNSPPIVIDHANGNNLFTQDHHQLFDSVGGAAVISVGHNNKEVIDAITTQLQKVSYLHTGEFTVPIAEELAHELINNLDSSSGYSGGDVDPSKKIAKVYFANSGSEANEAAIKLVMQYFYEQGKHTKTQFISRHQSYHGNCLGGMSLSGHIARRKPYESIIDQSRFHKVDPCYEFRYKQSNDESNESSDQYVKRLLEQLENKILQIGPENVAAFFAETIVGATTGCVPATPGYFKGVREICDKYDILLVLDEIMCGSGRTGTFFAWQQEQEGEEQGGKSIIPDITTCGKAITSGYCPLSCVFFNKKILDVLSNGSSCFNCGHTYQSFPIACAAAHAVQKIIKRDNLLDNVVKMGVILQELLMMKIDPLEIVANIRGRGLFWGIEFCKNKSTLEPFNPSCNVSIKIGEYTKRNGVVVYPGKGTIDGIKGDHILIAPSFTITKEEIEFIVDIVAKSIKEFIANEVDLFK

SEQ ID NO: 6098 - protein, 191 aa, Candida albicans SC5314
MQTIKCVVVGDGAVGKTCLLISYTTSKFPADYVPTVFDNYAVTVMIGDEPFTLGLFDTAGQEDYDRLRPLSYPSTDVFLVCFSVISPASFENVKEKWFPEVHHHCPGVPIIIVGTQTDLRNDDVILQRLHRQKLSPITQEQGEKLAKELRAVKYVECSALTQRGLKTVFDEAIVAALEPPVIKKSKKCTIL

SEQ ID NO: 6099 - protein, 329 aa, Brassica napus
MSNVTADPTTDGPSTAVAVSGSAAIQASPPTDRPVRVYADGIYDLFHFGHARSLEQAKKSFPNTYLLVGCCNDETTHKYKGRTVMTAEERYESLRHCKWVDEVIPDAPWVINQEFLDNHRIDYVAHDSLPYADTSGAGKDVYEFVKKVGRFKETMRTEGISTSDIIMRIVKDYNQYVMRNLDRGYSREDLGVSFVKEKRLRVNMRLKKLQERVKEQQEKVGEKIQTVKMLRNEWVENADRWVAGFLEIFEEGCHKMGTAIRDSIQERLIRQIPRKKLENGEDDDTDDQFYEEYFDHDMGSDEDEDERYYDEEEDVEEEKSVKKDAQDNK

SEQ ID NO: 6100 - protein, 178 aa, Glycine max
  misc_feature (115)..(115): Xaa can be any naturally occurring amino acid
MASSMISSPAVTTVNRAGAGMVAPFTGLKSMAGFPTRKTNNDITSIASNGGRVQCMQVWPPIGKKKFETLSYLPDLDDAQLAKEVEYLLRKGWIPCLEFELEHGFVYREHNRSPXYYDGRYWTMWKLPMFGCTDASQVLKELQEAKTAYPNGFIRIIGFDNVRQVQCISFIAYKPPGF

SEQ ID NO: 6101 - protein, 123 aa, Zea mays
MAGCCVFLRWPSASPSRIGYRSLVDAAADDAAPPSTVTVVVGKERRAFAVDRLVLDSYPLRLLLETAARREERRAGGGAGAIFVDVDAILFEHILWLACDARSVSQILHLDLKEIIDFYAQDA

SEQ ID NO: 6102 - protein, 188 aa, Triticum aestivum
  misc_feature (30)..(30): Xaa can be any naturally occurring amino acid
IVAHAPPRGGLVGTPGGSFQGVKSTAGLPXSRRYKGGSLGSVSNGGRIRCMQVWPIEGIKKFETLFYLPPLSTEALLKQVDYLIRSKWVPCLEFSKVGFIFREHNAFPGYYDGRYWTMWKLPMFGCTDATQVINEVEEVKKEYPDAYVRIIGFDNMPQVQWVSFIAFKPPGCAPPPPGLNRSLTTGHI

SEQ ID NO: 6103 - protein, 156 aa, Methylococcus capsulatus str. Bath
MALIITSEAFPPNGEIPRKYTCDGGDVSPPLTWSGLPPGTRSLALIVDDPDAPDPRAPRMTWVHWVLYNLPPEAPGLPEAVQALPAGTLQGLNDWKRTGYGGPCPPIGRHRYFHKLYALDTVLPDLHRPDKAKLEQAMTGHVLGQAELIGIYQRAR

SEQ ID NO: 6104 - protein, 470 aa, Mycobacterium tuberculosis H37Rv
MQGQLSRTRVYTVPVPGSAQSAYACGVERLLASYRSIPATASIRLAKPTSNLFRARVKHDARGLDASGLTGVIGIDPEARTADVAGMCTYEDLIAATLHYGLSPLVVPQLRTITLGGAVTGLGIESASFRNGLPHESVLEMDILTGAGELLTVSPGQHSDLYRAFPNSYGTLGYSTRLRIQLEPVRPFVALRHIRFSSLTAMVAAMERIIDTGGLDGESVDYLDGVVFSADESYLCIGMQTSVPGPVSDYTGQDIYYRSIQHEAGIKEDRLTIHDYFWRWDTDWFWCSRSFGAQNPRLRRWWPRRYRRSSVYWRLMALDQRFGIADRFENSRGRPARERVVQDIEVPIERTCEFLEWFGENVPISPIWLCPLRLRDHAGWPLYPIRPDRSYVNIGFWSSVPVGATEGATNRKIENKVSALDGHKSLYSDSFYTREEFDELYGGETYNTVKKAYDPDSRLLDLYAKAVQRR

SEQ ID NO: 6105 - protein, 291 aa, Zea mays
MPMYSKSELIHVPPPPCSRPRYVMAPPLVFTSIGASMNAAVRDVWASNFDEELSNLSAVLPRYPCVCVDTEFPGAVHDSNLPRYMRGPRESYELVKRNVDDLKLLQVGIALSGPAGRFPIAWQFNIRGFDPALHPHAPASIAMLREQGMDFAMLNEFGIDPEDFAAGFRRSGLACGWLTWTAFSGSYDFGYLAKALTGGQPLPDTLDGFLALVRRLFGHSVFDVKHLARCCALRGGLEQVATALGVKRAAGRAHCAGSDSLLTTDVLLLMMDRFFRNVDVLAHAGTIVDLT

SEQ ID NO: 6106 - protein, 367 aa, Nicotiana tabacum
MVFPLDTQLLNPIFDGLFCEEDRFLDDDDLGEWSCTLEQVENNVKKTLPLLECDMFWEDDQLVTLLAKEKESHLGFDCLISDGDGLLVEVRKEALDWMLRVIAHYGFTAMTAVLAVNYFDRFVSGLCFQKDKPWMSQLAAVACLSIAAKVEETQVPLLLDLQVADSRFVFEAKTIQRMELLVLSTLKWKMNPVTPLSFIDHIMRRFGFMSNLHLDFLRRCERLILGIITDSRLLYYSPSVIATAVMFFVINEIEPCNAMEYQNQLMSVLKVKQDSFEECHDLILELMGTPGYNICQSLKRKHQSVPGSPSGVIDAYFSCDSSNDSWSVASSISSSPEPQYKRMKTQDQTMTLAPLSSVSVVVGSSPR

SEQ ID NO: 6107 - protein, 397 aa, Agrobacterium tumefaciens str. C58
MAGRKTGLPQNPAISGLRWRKPFWHGHCTFSGIKCHRGENMRALRFHAAKDLRIEDIAEPKRPGPGQVLVRNRFVGICGTDLHEYSYGPIFIPTEPHPFTGAHGPQILGHEFGGVVEAIGDGVTSVNVGDRVSIQPLIMPRSGDYFADRGLFHLSTQLALVGLSWDGGGMAEAALVNEYNVQKIPDEMTDEEAALVEPSAVAVYACDRGGVTAGNSVLVTGAGPIGMLTLLAARAAGATQLFVSDLNDARLELARNVIRDVITINPKRDNVGDVVRSATEGKVGCDVAIECVGNEHALKACVDAVRKQGVVVQTGLHPHENPIDWFQVTFRDLEIKGSWAYPTHYWPRVIRLIASGLLPATKIVTKRITLDTAVTEGFDALLDPAGTHLKILIDLSK

SEQ ID NO: 6108 - protein, 362 aa, Triticum aestivum
  misc_feature (161)..(161): Xaa can be any naturally occurring amino acid
MGAGDKTAAGMPRIGMGTAVQGPKADPIRRAVLRAIQIGYRHFDTAAHYETEAPIGEAAAEAVRSGAVASRDELFITSKLWCSDAHRDRVVPALRQTLRNLQMEYVDLYLVHWRPGVPETTSLSPPSSGAAMRTATGSSPPSGRRSGISRWSTWNLYLVHXPVSMKPGRFKAPFTAEDFVPFDMRAVWEAMEECHRLGLAKAIGVANFSCKKLETLLSFATIPPTVNQVEVNPVWQQRKLREFCRGKGIQLCTYSPLGAKGTHWGSDAVMDAGVLQEIAASRGKSVAQVCLRWVYEQGDCLIVKSFDEARMRENLDVDGWELTEEEHRRIAEIPQRKINLGKRYVSEHGPYKSLEELWDGEI

SEQ ID NO: 6109 - protein, 296 aa, Saccharomyces cerevisiae
MITTPLVHVASVEKGRSYEDFQKVYNAIALKLREDDEYDNYIGYGPVLVRLAWHISGTWDKHDNTGGSYGGTYRFKKEFNDPSNAGLQNGFKFLEPIHKEFPWISSGDLFSLGGVTAVQEMQGPKIPWRAGRVDTPEDTTPDNGRLPDADKDAGYVRTFFQRLNMNDREVVALMGAHALGKTHLKNSGYEGPWGCANNVFTNEFYLNLLNEDWKLEKNDANNEQWDSKSGYMMLPTDYSLIQDPKYLSIVKEYANDQDKFFKDFSKAFEKLLENGITFPKDAPSPFIFKTLEEQGL

SEQ ID NO: 6110 - protein, 195 aa, Triticum aestivum
  misc_feature (69)..(69): Xaa can be any naturally occurring amino acid
  misc_feature (82)..(82): Xaa can be any naturally occurring amino acid
  misc_feature (88)..(88): Xaa can be any naturally occurring amino acid
  misc_feature (107)..(107): Xaa can be any naturally occurring amino acid
  misc_feature (118)..(118): Xaa can be any naturally occurring amino acid
MAPTVMASSATSVAPFQGLKSTAGLPVSRRSNGASLGSVSNGGRIRCMQVWPIEGIKKFETLSYLPPLXSTEALLKQVDYLXIRSKWXVPCLEFSKVGFIFREHNAXPLGYYDGRYWXTMWKAAYVRVATDATQVINEVGKGQERSTLTRYVRIIGFDNMRQGAVPSSFNRLQGNRAAKESRQRTKTSSLTTGHI

SEQ ID NO: 6111 - protein, 496 aa, Arabidopsis thaliana
MSGAITCSAADLSALLGPNATAAADYICGQLGSVNNKFTDAAYAIDNTYLLFSAYLVFAMQLGFAMLCAGSVRAKNTMNIMLTNVLDAAAGGLFYYLFGYAFAFGESSDGFIGRHNFGLQNFPTLTSDYSFFLYQWAFAIAAAGITSGSIAERTKFVAYLIYSSFLTGFVYPVVSHWFWSPDGWASPFRSEDRLFGTGAIDFAGSGVVHMVGGIAGLWGALIEGPRIGRFPDGGHAIALRGHSASLVVLGTFLLWFGWYGFNPGSFTKILIPYNSGSNYGQWSGIGRTAVTTTLSGCTAALTTLFGKRLLSGHWNVTDVCNGLLGGFAAITAGCSVVDPWAAIVCGFVASLVLIGCNKLAELLKYDDPLEAAQLHGGCGAWGLIFVGLFAKEKYINEVYGASPGRHYGLFMGGGGKLLGAQLVQIIVIVGWVSATMGTLFFILKKLNLLRISEQHEMRGMDLAGHGGFAYIYHDNDDDSIGVPGSPVPRAPNPPAV

SEQ ID NO: 6112 - protein, 498 aa, Arabidopsis thaliana
MSGAITCSAADLATLLGPNATAAADYICGQLGTVNNKFTDAAFAIDNTYLLFSAYLVFAMQLGFAMLCAGSVRAKNTMNIMLTNVLDAAAGGLFYYLFGYAFAFGGSSEGFIGRHNFALRDFPTPTADYSFFLYQWAFAIAAAGITSGSIAERTQFVAYLIYSSFLTGFVYPVVSHWFWSPDGWASPFRSADDRLFSTGAIDFAGSGVVHMVGGIAGLWGALIEGPRRGRFEKGGRAIALRGHSASLVVLGTFLLWFGWYGFNPGSFTKILVPYNSGSNYGQWSGIGRTAVNTTLSGCTAALTTLFGKRLLSGHWNVTDVCNGLLGGFAAITAGCSVVEPWAAIVCGFMASVVLIGCNKLAELVQYDDPLEAAQLHGGCGAWGLIFVGLFAKEKYLNEVYGATPGRPYGLFMGGGGKLLGAQLVQILVIVGWVSATMGTLFFILKRLNLLRISEQHEMQGMDMTRHGGFAYIYHDNDDESHRVDPGSPFPRSATPPRV

SEQ ID NO: 6113 - protein, 270 aa, Zea mays
  misc_feature (235)..(235): Xaa can be any naturally occurring amino acid
FATASITKGGPREPWHDIHSRLEGPIAWDVLYNFEQRWRKQGGKDLLVQLRDLSDIIIPPSPVMFPEDRDTWNVQLFRSIDGGAAFGFPDTPEEAARAGLVSGKDQIIDRSIQDAYINAIRRAKDFIYIENQYFLGSSYCWKPEGIKPEEIGALHVIPKELSLKIVSKIEAGERFTVYVVVPMWPEGMPESASVQAILDWQRRTMEMMYTDITQALEAKGIEANPKEYLTFFCLXNREVKQDGEYEPQEQPELNTDYVRAQERLGRFMIY

SEQ ID NO: 6114 - protein, 280 aa, Zea mays
  misc_feature (272)..(272): Xaa can be any naturally occurring amino acid
MATANGSSKGSFEVPKVEVRFTKLFIDGKFVDAVSGKTFETRDPRTGEVIASIAEGGKADVDLAVKAAREAFDNGPWPRMTGYERGRILHRFADLIDEHVEELAALDTVDAGKLFAVGKARDIPGAAHLLRYYAGAADKVHGATLKMAQRMHGYTLKEPVGVVGHIVPWNYPTTMFFFKVGPALAAGCAVVVKPAEQTPLSALFYAHLAREAGVPAGVLNVVPGFGPTAGAAVAAHMDVDKVSFTGSTEVGRLDMRAAAESNLQPVSLELGXGKTPEIVF

SEQ ID NO: 6115 - protein, 230 aa, Dechloromonas aromatica RCB
MNTNFEIANQGSSGLALQQNRVLRNTYMLLGLSMVPTVIGALVGIQMGFSFLAGSPLMSFLLFMGIAMGFMWGIEKNKDSGLGVALLLGFTFFMGLMLSRILQVALGFSNGGSMIAMAAGGTGAVFFTMSTVAAVSKRDFTGMGKFLFVGMIVILLAAVANIFFQIPALSLTIAVAVVGIFSAYILYDISRIVQGGETNYVSATLAVYLDVYNVFVSLLQLIMAFTGERD

SEQ ID NO: 6116 - protein, 440 aa, Wolbachia endosymbiont of Drosophila melanogaster
MNDDLDSTTKQEALKYHSRGGNPGKISIMPTKPLSTQYDLSLAYSPGVAAPCLEIAKNPEVVYDYTAKSNCVAVISNGTAVLGLGNIGPLAAKPVMEGKAVLFKRFADIDAVDIEVGTENIEDFINAVRYLGPSWGGINLEDIRSPDCFIIEKRLNELMDIPVFHDDQHGTAVVVAAGIENALDIVEKKLEDVKIIMNGAGAAGIACLEILKSMGAKNIVLCDKQGVIYKGRNEDMNEWKEKYAIDTSERSLLDTIKGADVFIGLSAKDVLNEEMLKSMGKDPIIFALANPDPEVRPEFAKSVRPDAIIATGRSDYNNQVNNVMGFPYIFRGALDVHATTINDEMKIAAADAIAKLAREPVPGEISAVYGSRKMGYGREYIIPTPFDPRLISIVAPAVAKAAVDSGVARKAIQDWSKYENQLKSRLSNVLSTLNLLSSHM

SEQ ID NO: 6117 - protein, 178 aa, Glycine max
  misc_feature (115)..(115): Xaa can be any naturally occurring amino acid
  misc_feature (122)..(122): Xaa can be any naturally occurring amino acid
  misc_feature (144)..(144): Xaa can be any naturally occurring amino acid
MASSMISSPAVTTVNRAGAGMVAPFTGLKSMAGFPTRKTNNDITSIASNGGRVQCMQVWPPVGKKKFETLSYLPDLDDAQLAKEVEYLLKKGWIPCLEFELEHGFIYHKHNKSPXYYNRHYXTMWKLPMFGCTDASQVLKELQXANTAYPNSFIHIIRFDNIHQIHCISFITYKLPSF

SEQ ID NO: 6118 - protein, 118 aa, Hordeum vulgare subsp. vulgare
MARAAATQLVLVAMVAAMLLVATDAAISCGQVSSALSPCISYARGNGAKPPVACCSGVKRLAGAAQSTADKQAACRCLKSLATSIKGINMGKVSGVPGKCGVSVPFPISMSTDCNKVH

SEQ ID NO: 6119 - protein, 114 aa, Triticum aestivum
  misc_feature (14)..(14): Xaa can be any naturally occurring amino acid
  misc_feature (16)..(16): Xaa can be any naturally occurring amino acid
MGTSNAKFIYPHNXPXYKGAYCYRMIFESSFPQEFTFRSAILTVPGGPSVACSTAKAVEWDAQWSGNLDPSGRAALGVHLSAYEQEHLPATILTGTSKKPRMIEVAAPGVAIES

SEQ ID NO: 6120 - protein, 447 aa, Methanosarcina mazei Go1
MTEIGIVAVGGYNEMGRNMTAIIIGEDIVILDMGLRLDRVQIHEDVEIDKMHSLELIEMGAIPDDTIMKEINGTVRAIVCTHGHLDHIGAIPKLAHRYNAPILATPYTAAIIRQQIESERKFEVCNRVIPLQAGGTYQVTEDISIEFIRVQHSIIDCVLAAVHTPAGAVLYACDFKLDRTPTMGEAPDFDRFKSLGKEGVIAMITESTNAGRSGKTPSEQIAKDMVRDVLLGTEESGVGMIVTTFASHIARLKAIIEAAEEMGRIPVLMGRSMERYVGAARDIGYLDLPSNVEIYGTRKDVDRAFKRIMQEGKNKYLPIVTGHQGEPGSILVRVANGETPYTIDPGDRIIFSANVIPSPMTQANRYALETKLRMKGGRIYDDVHVSGHAYREDHWELLRMVNPEHVIPAHGDMEMHGHYIEMAEDAGYVLGDTVHLLRNGEVLYIEE

SEQ ID NO: 6121 - protein, 159 aa, Burkholderia cepacia R1808
MSTLYSFSAETLAGEPVSLDAYRGKVLLIVNTASECGFTPQYAGLQKLYDRYAARGFSVLGFPCNQFGKQEPGDATQIGAFCERNYGVTFPMFAKIDVKGDHAHPLYRYLTDEAPGILGLKAIKWNFTKFLIGRDGRIVKRYAPSTKPEEIAADIDKLL

SEQ ID NO: 6122 - protein, 205 aa, Schizosaccharomyces pombe
MSSCFGSKKKPIYRKIVILGDGAAGKTSLLNVFTKGYFPQVYEPTIFENYIHDIFVDGNSIELSLWDTAGQEEYDQLRSLSYSDTHVIMICFAVDSRDSLENVITKWLPEVSSNCPGVKLVLVALKCDLRGADEEQVDHSKIIDYEEGLAAAKKINAVRYLECSAKLNRGVNEAFTEAARVALAAQPRGTKDGADESHGTGCIIA

SEQ ID NO: 6123 - protein, 273 aa, Arabidopsis thaliana
MEGIQHPIPRTVEEVFSDFRGRRAGLIKALSTGQLDLSFSIYSVSFDRILDDFYVQKFYHQCDPEKENLCLYGLPNETWEVNLPVEEVPPELPEPALGINFARDGMQEKDWISLVAVHSDSWLISVAFYFGARFGFGKNERKRLFQMINDLPTIFEVVTGNAKQSKDQSANHNSSRSKSSGGKPRHSESHTKASKMSPPPRKEDESGDEDEDDEQGAVCGACGDNYGGDEFWICCDACEKWFHGKCVKITPAKAEHIKHYKCPSCTTSKKMKA

SEQ ID NO: 6124 - protein, 231 aa, Glycine max
  misc_feature (218)..(218): Xaa can be any naturally occurring amino acid
MASNDSDSQMKIVHGDAGYILEDVPHFADYIPNLPTYPNPLRSNPAYSVVKQYFVHMDDTVPQKVVVHKDSPRGVHFRRAGPRQKVYFKSDEVHACIVTCGGLCPGLNTVIREIVCGLSYMYGVNKVLGIDGGYRGFYSKNTITLTPKVVNDIHKRGGTILGTSRGGHDTGKIVDSIQDRGINQVYIIGGDGTQRGATVIYEEVRRRGLKVAIAGIPXNHDDTVIDKSFWF

SEQ ID NO: 6125 - protein, 375 aa, Zea mays
MPAASWSAPTTSFAPAPAPPWGPWRTKAAPLPIRTLPRRVLLNAVGESAMVAAGDTLLGLYEKERLGLLQYADDESKEERYWETLDADLRYWTRSLRPVQWYPGHIAKTEKELKEQLRLMDVVIEIRDARIPLSTSHPKMDSWLGNRKRIIVLNRKDMISTEDMNAWATYFGNQGIKVVFSNGQLGMGTMKLGRMAKSVASVANTKRKEKGLLPRPVRAGIVGYPNVGKSSLINRLLKRRMCPAAPRPGVTRELKWVRFGTDLELLDSPGILPMRISDQTSAIKLAICDDIGERSYDFADVAAILVQMLIRHPAVGSEAFRRRYKIDVDSECGKTFVTKLSVHLFNGDTSQAAFRILSDYRKGKFGWVALERPPT

SEQ ID NO: 6126 - protein, 81 aa, Glycine max
  misc_feature (47)..(47): Xaa can be any naturally occurring amino acid
MSALFNFHSFLTVILLGICACTYFKMQFPAILDQKTGLDGMTYMLSXRFRGFFWKAARIGERLSPWVAAGCFMMGVSIIFF

SEQ ID NO: 6127 - protein, 498 aa, Nostoc sp. PCC 7120
MAINTGKNKLMNRHIRPWQRLLVLAIGSMVFAVFAPTIVQAVDTPTLESLSETTIKLQISIDTTWVLLSGFLVFFMQTGFAMLEAGLVRQRSVVNTLLENFIDAAVTVLAWWAVGFGIAFGTSAGGLFGIDTFFLSQLPGADGSYPLGAPGSTAAINTYTLFFFQFAFAATASTITTGSMAGRTDFIGDLIYSAIMGAISYPIIVHWAWNSNGWLGKLSYHDFAGGSIVHTVGGWTALVGAYLLGPRPDRPPWGKLPPAHNLALATLGTMILWFGWYGFNPGSTLGTANPGLIGLVTINTTLAAGAGALAALIFLYVRTGKWDLVYCLNGSLAGLVAITAPCAYVAPWASVLIGLTGGIAVVLGVSLIESLHIDDPVGAFSVHGISGMMGTLSIGFLGQEELTLNQKAGLLLGGGFDLLGIQMLGIVAITVFTVAFAFLMYGGLKAMGHLRVNAEADRIGIDTYEHGASVWPDVYSVEELSKPQEHTKISENKTLEGE

SEQ ID NO: 6128 - protein, 294 aa, Glycine max
MAHANPMIFVVGILGNLVSFCCFLAPVPTFYRVCKKKTTEGFQSLPYVAALFTSMLWIFYAYIKTGEILLITINAFGCFIETVYLVIYITYCPKKARFFTFKMIFLFNVGVIFLVVLLTHVLAKERTARIELLGWICVVLSTSVFAAPLSIIKVVIRTKSVEFMPITLSLLLTVSAMMWMAYGILLRDIYVTLPNFVGITFGTIQIVLYLIYRKNKPVKDQKLPEHKDDVANDENVNTAVSGENRGANATGFVDIEIGEKKQVQEQADKKQDQQAVNARDQTEHNNNSNKTREG

SEQ ID NO: 6129 - protein, 114 aa, Glycine max
MEGVGARLGRSSTRYGPATVFTGPVRKWKKKWIHVSPSSASSNSNANNHHNHASHASHLLLYKWTPLTHSQNTATTNNANAKDSPPEPPEEPPRRKFKYVPVFKLRFSSSPIII

SEQ ID NO: 6130 - protein, 396 aa, Salmonella enterica subsp. enterica serovar Typhi Ty2
MLDAQTIATVKATIPLLVETGPKLTAHFYDRMFTHNPELKEIFNMSNQRNGDQREALFNAIAAYASNIENLPALLPAVEKIAQKHTSFQIKPEQYNIVGTHLLATLDEMFNPGQEVLDAWGKAYGVLANVFIHREAEIYHENASKDGGWEGTRPFRIVAKTPRSALITSFEFEPVDGGTVAEYRPGQYLGVWLKPEGFAHQEIRQYSLTRKPDGKGYRIAVKREDGGQVSNWLHHHANVGDVVHLAAPAGDFFMNVAADTPVSLISAGVGQTPMLAMLDTLAKEQHTAQVNWFHAAENGDVHAFADEVSELGRTLPRFTAHTWYREPTEADRAQRVFDSEGLMDLSKLEAAISDPAMQFYLCGPVGFMQFAAKQLVSLGVNNENIHYECFGPHKVL

SEQ ID NO: 6131 - protein, 317 aa, Escherichia coli
  misc_feature (132)..(132): Xaa can be any naturally occurring amino acid
MTDKLTSLRQYTTVVADTGDIAAMKLYQPQDATTNPSLILNAAQIPEYRKLIDDAVAWAKQQSNDRAQQIVDATDKLAVNIGLEILKLVPGRISTEVDARLSYDTEASIAKAKRLIKLYNDAGISNDRILIXLASTWQGIRAAEQLEKEGINCNLTLLFSFAQARACAEAGVFLISPFVGRILDWYKANTDKKEYAPAEDPGVVSVSEIYQYYKEHGYETVVMGASFRNIGEILELAGCDRLTIAPALLKELAESEGAIERKLSYTGEVKARPARITESEFLWQHNQDPMAVDKLAEGIRKFAIDQEKLEKMIGDLL

SEQ ID NO: 6132 - protein, 368 aa, Zea mays
  misc_feature (182)..(182): Xaa can be any naturally occurring amino acid
  misc_feature (220)..(220): Xaa can be any naturally occurring amino acid
  misc_feature (240)..(240): Xaa can be any naturally occurring amino acid
  misc_feature (307)..(307): Xaa can be any naturally occurring amino acid
  misc_feature (351)..(351): Xaa can be any naturally occurring amino acid
MGKGAQGSDAAAAGGEVEENMAAWLVAKNTLKIMPFKRPPVRPYDVRVRMKAVGICGSDVHYLREMRIAHFVVKEPMVIGHECAGVVEEVGAGVTHLSVGDRVALEPGVSCWRCRHCKGGRYNLCEDMKFFATPPVHGSLANQVVHPADLCFKLPDGVSLEEGAMCEPLSVGVHACRRVGVXGPETGVLVVGAGPIGLVSLLAARAFGAPRVVVVDVDDXRLAVARSLGADAAVRVSPRXEDLADEVERIRAAMGSDIDVSLDCAGFSKTMSTALEATRPGGKVCLVGMGHNEMTLPLTAAAAREVXVVGVFRYKDTWPLCIDFLRSGKVDVKPLITHRFGFSQRDVEEAXFEVSARGRDAIKVMFNL

SEQ ID NO: 6133 - protein, 149 aa, Brassica napus
MEEISERVKARLAVISAHLTSADPLESGSPAIERWTTSADINPPPHGSLKGALTVVDERTGKKYQVPVSDDGTVKAVDLKKISMGKEDKGIKLYDPGYLNTAPVRSSISYIDGDEGILRYRGYPIEEMAENSTFLEVAYLLMYGNLPLK

SEQ ID NO: 6134 - protein, 369 aa, Magnaporthe grisea 70-15
MGDQQVYPQPPYPLHDSIKDKLDPEYVEFYNKYLLNAPQVHYQPVAASRVGGKIIPVKAPLAAFPSQNPRTDKLSTQNQGGTDPVPVGKTIDKAIPRQETTGPDVRVRAFVPAGQPPSPSGWPVFLWYHGGGWVLGNIDSENSLCSSICARARCVVVTTDYRLAPEHPFPAAVHDAWEAALWVATGAAAPALGEPLDLAKVAVGGSSAGGNLAAVVTQRALRHEAFARAGLFRFQLLVVPVTDNTASVETSTTYAEYEHTAALPVDKMLWYRRHYLPDRADWASVEASPLFADADTFAKLPPALVVVAGLDVLRWEGEEYARKLRDAGVEAEVKVIEGVPHPFIVMDAVLQKGKEGVDFVCERLAAVLA

SEQ ID NO: 6135 - protein, 355 aa, Halobacterium sp. NRC-1
MTRGEARRPPQEFDRVLSSMCTTPHPAAREAAQAFLATNPGDPETYPAVAERERDAVALLGEIVGLSSPHGYIAAGGTEANLQAVRAARNRADADAVNVVAPASAHFSFQKAADVLGVELRLAPTDGDHRADVAAVADLVDGDTAVVVGVAGTTEYGRVDPIPALADIAAGVDANLHVDAAWGGFVLPFTDHDWSFADAPVNTMAIDPHKMGQAPVPAGGFLARDPETLDALAIETPYLESDTQPTLGGTRSGAGVAGALASLRALWPDGYREQYERTQGNAEYLAAELAARGYDVVDPELPLVAADMPDAEFQALREEGWRISRTASDALRVVCMPHVTREMLAAFLDDVDALA

SEQ ID NO: 6136 - protein, 372 aa, Methanopyrus kandleri AV19
MILQRDSDYSDGTVLGSMCTEPHPVAAEAFVAGLHVNLGDPYLFPNAYRAERECIGWLAETLLDHPAPEEAEGSIVSGGTEANILAAYAAREVTGGREIIVPATRHFSFEKAARMLRMKLVEAPLRSDYTVDVDAVQDLISRDTALIVGIVGTTETGSVDDIEALSDVAEDHGVPLHVDAAFGGFTAPFLREEYPLPRFGFDLEAVVSVTVDPHKMGLVPPPAGGIVFRDDEFPKAIEVYAPYLSGGGASQYTITGTRPGAPVLALYANILELGEEGYRRIAFRCYEETLKVAEKARELGLELAVDPPHLNLVNIRLPDRGTAERLLRESEREGWKISVSTKPLGVRIVMMPHLDAETVSRFLELVARVLGG

SEQ ID NO: 6137 - protein, 506 aa, Pseudomonas putida KT2440
MRYAHPGTEGAKVSFKSRYGNYIGGEFVTPVKGQYFENTSPVNGKLIAEFPRSTAEDIDKALDAAHAAADAWGRTSVQDRSNVLLKIADRIEQNLELLAITETWDNGKPIRETLNADIPLAVDHFRYFAGCIRAQEGGAAEINEGTVAYHIHEPLGVVGQIIPWNFPILMAAWKLAPALAAGNCVVLKPAEQTPLGITVLLEVIGDLLPPGVLNVVQGYGREAGEALATSKRIAKIAFTGSTPVGSHIMKCAAENIIPSTVELGGKSPNVYFEDIMQAEPSFIEKAAEGMVLAFFNQGEVCTCPSRALVQESIYPQFMEVVMKKVLQIKRGDPLDTDTMVGAQASQQQFEKILSYLQIAQEEGAELLTGGKVEKLEGSLATGYYIQPTLLKGNNKMRVFQEEIFGPVVSVTTFKDEAEALAIANDTEFGLGAGVWTRDINRAYRMGRGIKAGRVWTNCYHLYPAHAAFGGYKKSGVGRETHKMMLDHYQQTKNLLVSYDINPLGFF

SEQ ID NO: 6138 - protein, 108 aa, Glycine max
  misc_feature (85)..(85): Xaa can be any naturally occurring amino acid
AASMISSPAVTTVNRAGAGMVAPFAGLKSMGGFPTIKTNSDVAFIASYGGRVQFKLVWPPVGNKMFYTLFFLPYLYDAQLAKEVXFLHRKGWITWLEFEWEHGFLCRE

SEQ ID NO: 6139 - protein, 244 aa, Glycine max
  misc_feature (70)..(70): Xaa can be any naturally occurring amino acid
MTSASELFHSRRHRLGRSALDLGLDTELNAADSLRRHYHLRRLRHHPERASDRIDGRYRRSFASESVDSXEENVRSSLRGSDSERLPVGVSCRLLQRLRGEPLSTNFLRQYDRDSFGEDPESESSNEDPSGASLVTELTSQMARSQFLQELSTKPPGLTQEALDCLHQEVFSSNASEIGLDSRVLQDCSICLESFTDGDELIRLPCGHKFHSVCLDPWIRCCGDCPYCRRCIVVNTHSSLNEDE

SEQ ID NO: 6140 - protein, 170 aa, Campylobacter jejuni
MINSPYIIWLTGLAGSGKTTIGQALYEKLKLKYKNLIYLDGDELREILGHYAYDRQGRIDMALKRAKFAKFLNNQGMIVIVTTISMFNEIYDYNRKQLKNYYEIYIECDMHELMQRDQKGLYTKALNKEIDNVVGVDIEFDKPEADLVINNSCRNNLEEKVEFIIKKLAL

SEQ ID NO: 6141 - protein, 263 aa, Oryza sativa (japonica cultivar-group)
MVFKKNAMSSSVLFLAALLLLSSSSMSSAARWLEEEYPPHPTVPELPKPEVPPHPAVPELPKHEEPPHPVVPELPKHEEPPHPVVPELPKPELPPHPVVPELPKHEEPPHPAVVPELPKHEEPPHPAVVPEFPKHEEPPHPAVPELPHPAVPEIPHPAVPELPKHEEPPHPVVPELPKPEVPHAAVPELPKPELPPHPAVPELPKHEEPPHPVVPELPKHEEPPHPVVPELPKPEEPHHPEVPEHEQPPKPESHYPEVPMAKP

SEQ ID NO: 6142 - protein, 227 aa, Zea mays
  misc_feature (210)..(210): Xaa can be any naturally occurring amino acid
  misc_feature (221)..(221): Xaa can be any naturally occurring amino acid
VDPRVREHQPNGPVTPVDMVVDFYKFDYEFGEPPRVTSLHNTVPVATFNDFCDDVYFVADQRGYEAVVYYLAGQYLKTDDKSGKIVDPRLQLNKVVREIKYSPGGVTVKTESDLIQFKPKLPTWKVRAIYQFDMAVYTKILLKFPRKFWPEGKGREFFLYASSRRSYYGVWQEFEKQYPDANVLLVTVTDEESRRIEQQSDEQTKAEIMXVLRKMFPGIDXPDATDI

SEQ ID NO: 6143 - protein, 539 aa, Zea mays
  misc_feature (44)..(44): Xaa can be any naturally occurring amino acid
MGNCCVTPKAADDAGGGKKPKEPKQKKGKKPNPFSIEYNRSGPXSAPKLVVLRDPTGRDIAARYELGAELGRGEFGVTYLCTDRASGEALACKSISKKKLRTAVDLEDVRREVEIMRHLPKHPNVVTLRDTYEDDNAVHLVMELCEGGELFDRIVARGHYTERAAALVLRTIVEVVQMCHKHGVMHRDLKPENFLFANKKESAALKAIDFGLSVFFTPGERFSEIVGSPYYMAPEVLKRNYGPEVDVWSAGVILYILLCGVPPFWAETEQGVAQAIIRSVIDFKRDPWPRVSDNAKDLVRGMLNPDPKRRLTAHQVLGHPWLQNIKKAPNVNLGETVKARLQQFSVMNKFKKHALRVIAEHLSVEEAADIKDMFEKMDLNKDQMLSFEELKLGLHKFGHQMPDADVQTLMEAADADGNGSLNYGEFVTLFVHLRKIGNDEHLHKAFAYFDRNQSGYIEIDELRESLADDLGQNREEIINAIIRDVDTDKDGKISYDEFATMMKAGTDWRKASRQYSRERFTSLSLKLQKDGSLQMTSTR

SEQ ID NO: 6144 - protein, 193 aa, Betula pendula
LGSGYSLEVVCLSCGQAVKFVCDRRSVKHPVICSESGRAIVSHHSVLIFEAVSASAYGSQALSTSSFQHFVEGLSDEALADIGNLNAAAIKGEHETCLLYADQLKQRCVDQFKDGSLGMEQLAAVDGLCDMVSKAIGTTDPVRTYHVNLSVFTSIPDFWGIGQLFPIVPIHRHDQRPSVKGILSDLTQSTPAR

SEQ ID NO: 6145 - protein, 369 aa, Thermosynechococcus elongatus BP-1
MSSSRKRLGVFTSGGDCPGLNTAIRAIVAHATLSYGWEVLGILHATQGLIERKAIPLNAEGLGGMDVLLNMGGTILGAINKGDTLGHADEVIAGYYELGLDALIAICGDGSLRILHQLAQKGNWNFLAIPKTIDNDVALTDRAIGFDTAVNTVVEALNRITSTAASHDRVFVVEVMGRTAGHLALYSGIAGGADIILIPEIPYSIEGICQHLQKLRDRWGRQFALIVVAEGSKQLEEDANHPRHCSIGQYIADKIAQHSPIPIELRVSVLGHIQRGGAPMAMDRLLAAGMGNTAVDLAAQGTFGRMVAWQAGQVVTVPIADVVAKCPRHVDPNSFLIRTAQGLGIYVGDKPMLPYVDPTLCRDQVICAI

SEQ ID NO: 6146 - protein, 450 aa, Zea mays
MRGSMSNYYDDYDDIDEIEDDYDMDDPADDMVDEQRGVRDSDAEDNDYGQPNDKIPDTSSADARNGRDIQGIPWEQLNITRKKYRQSRLEQYKNYENVPNSGEEAMKDCKPTEKGGMYYEFRRNTRSIKSTILHFQLRNLVWATSKHDIYLVSHYSIRHWSALSGVDTELINVQGHVAPREKHAGSLSEGFYQTQVSTLAVKDNLLVAGGFQGELICKHLDQEGISFCCRTTYDDNAITNAVEIFNTSSGAVHFMASNNDSGVRYYDMERFQLFKHFQFEWPVNHASLSPDRKVVVIVGDDPDGLLIDANSGKTVHSIKGHRDYSFASAWSPDGRTFATGNQDKTCRIWDVRNLSKSVHVLRGNLGAIRSIRFTSDGQFMSMAEPADFVHIYDVKSDYNKRQELDFFGEISGTSFSPDTDTLFVGVWDRMYGSLLQFGRLYNYSYLDSLF

SEQ ID NO: 6147 - protein, 112 aa, Bartonella sp. Bi3726tl
ANEACLQMLQEIGSIKRIPKFIARAKDKNDPFRLIGFGHRVYKNYDPRAKIMQKTCHEVLKELNIQDDPLLDIAIELEKIALSDEYFIEKKLYPNVDFYSGIILKALGFPTE

SEQ ID NO: 6148 - protein, 112 aa, Bartonella sp. Rr4252tl
ANEACLKMLQEIGSIKRIPKFIARAKDKNDPFRLIGFGHRVYKNYDPRAKIMQKTCHEVLKELNIQDDPLLDIAIELEKIALSDEYFIEKKLYPNVDFYSGIILKALGFPTE

SEQ ID NO: 6149 - protein, 247 aa, Zea mays
MAMAYKMATEGMNVKEECQRWFMEMKWKKVHRFVVYKIDERSRAVLVDKVGGPGEGYEELVAALPGDDCRYAVFDFDFVSVDTCQKSKIFFIAWSPAASRIRAKILYATSKQGLRRLLDGVHYEVQATDPSEMGYRRHQRPRAMRPALRSAPIYVLTCAWACSPTTHCSVVICVRVCVCVCDRPDANWRWCAPVAIDAANLTRLRVCLLCYFRFSGEMVQAWCVDVDGWSRSSGEWQRTNETSTSAT

SEQ ID NO: 6150 - protein, 198 aa, Zea mays
TPIGRLGPSRPAVMLAQPHGSSSLKDVQVAFSNADHKDSSSKVEQPADSSLKPASLNAFDIISHSRGFDLSSLFEVDQEQKASNSRFMTQKPASAIVSKLEQIAETERFMVKKQDGLVKLQGSKQGRKGQLAIDAEIFEVTPAFHVVEVKKSAGDTLEYEMFCSKGLRPSLSDICWSSRSEENMAPSVVQPSQLEPST

SEQ ID NO: 6151 - protein, 105 aa, Bartonella sp. Bi4271tl
ANEACLKMLQEIGSIKRIPKFIARAKDKNDPFRLIGFGHRVYKNYDPRAKIMQKTCHEVLKELNIQDDPLLDIAIELEKIALSDEYFIEKKLYPNVDFYSGIILK

SEQ ID NO: 6152 - protein, 280 aa, Glycine max
MGSHNALAATFGILGNIISVMVYLAPVPTFYRIYKKKCTDGFHSLPYLLSLMSSMLWLYYAFLKIHDGVVPLITINSIGCVIELIYILTYIKYAHKDARNLTYTLFAAMNIGFLALVLSSRFALNGSHRVKVIGWICDAVSLSVFASPLSIMAKVIRTKSVQFMPFYLSFFLTLNAITWFVYGLSMQDKCIYIPNVGGFALGLVQMVLYGIYRKGSESEKEQGLGEGVINIVVVNPLGPAEVFPIAVDDNKVKDLVVVDDVTVSQQEKEKNVEAKDDCPV

SEQ ID NO: 6153 - protein, 371 aa, Malus x domestica
MGKGGMSDGDHADRCYGEAINGDVQQENMAAWLLGVKNLKIQPYKLPNLGPHDVRVRLKAVGICGSDVHHFKNMRCVDFIVKEPMVIGHECAGIIEEVGSEVEDLVPGDRVALEPGISCKRCNLCKQGRYNLCRKMKFFGSPPNNGCLANQVVHPGDLCFKLPDNVSLEEGAMCEPLSVGIHACRRANVCQETNALVVGAGPIGLVTLLAARAFGAPRIVIADVNDERLLIAKSLGADEVVKVSTNIEDVAEEVAKIQKVLENGVDVTFDCAGFNKTITTALSATRPGGKVCLVGMGQREMTLPLATREIDVIGIFRYQNTWPLCLEFLRSGKIDVKPLITHRFGFSQKEVEEAFETSARGGNAIKVMFNL

SEQ ID NO: 6154 - protein, 477 aa, Candida albicans SC5314
MSTDHHSHPVEGHQFKKIFNRLSGQPESYSRKQNYTFGKTLGAGSFGIVRYARDNSTDEEVAVKIILKKALKGNESMIIDEMQLLEQLNNPHIVGFRDWFESKDKFYLVTQLATGGELFDRIVQKGRFTEHDASLVVLQMLEALEYLHNKDIVHRDIKPENILYLTSKDDSPIVLADFGIAKRLQNPNEKLTSSAGSFGYAAPEVILGTGHGKPCDIWSLGVVTYTLLCGYSPFRSENVQDFINEVKHNNAVIFHADYWKDVSKDARRFIIKALQFNPDNRPTATELLNDPWLVSIAKEYKETDLLPNFKQGFDAKKKFRQAIELVKLNNRIKKLKEWQTDEDDDPTEINLFNEHGSVEQRANPSTNDGLTIPGTTSPRRGESPLNTWKKFNDVINSLDTNRSKASLSSFKSPYDLAHSNRGTDVSNSGATNVGKSDTASSAFVQLVHAATANKEKVANYTEDEEGKEKKQKDGDKN

SEQ ID NO: 6155 - protein, 321 aa, Thermoanaerobacter tengcongensis MB4
MKTIGILTSGGDAPGMNAAIRAVVRTGIYYGLKVKGIMRGFAGLVEDEVIDLGLSSVGDIIQKGGTILRTARCEEFKQKEVRKKAYETLQKHGIEGLVVIGGDGSFRGAQLLSEEWNVNTICIPGTIDNDIPCTDYTIGFDTACNTVIDAINKIRDTATSHERANIIEVMGRNSGYIALYAGVAGGAEMIILPEVEWSIDELCDKITYGIKRGKLHHIIVLAEGVMSAPELAKMIKERLPKLDLRYTILGHIQRGGAPTVMDRVLASQMGARAVELLLENKTKRVISIRNNQIVDDDIDEALSMKKEFNRKLYELSKILSI

SEQ ID NO: 6156 - protein, 219 aa, Lilium longiflorum
VEQFSPVPYLATLLNCMLWVVYGLPLVHPHSTLVLTINGLGLIIELTYVLLFLLYSNGRARIRVLAMLLTEIVFVGLITVIVLSTAHTLVTRSLIIGVLCVFFGTMMYAAPLSVMKLVIQTKSVEYMPLFLSVASFLNGICWTTYALIRFDLFITIPNALGTMFAVAQLILHAMYYKSTKIQMEAQKRKLEMGFEEVMAPVENTEKIRGASQTGKYPPV

SEQ ID NO: 6157 - protein, 427 aa, Streptomyces avermitilis MA-4680
MAEARTTAAEELTRRWAFDPRWQGIERTYGAADVVRLSASVREEHTLARRGAERLWRQLHELDYVHALGALTGGQAVQQVKAGLQAIYLSGWQVAADANQAGHTYPDQSLYPANSVPQVVRRINNALLRADQIATAEGGEDTTDWLAPIVADAEAGFGGPLNAFELTKAMIAAGAAGIHYEDQLASEKKCGHLGGKVLVPTSQHIRTLNAARLAADIADVPTVIIARTDALAANLLTSDVDERDAEFVTGERTAEGFYRVRGGMAPVIARGLAYAPYADLIWVETGTPDLAQAREFAEAIHAEYPDRMLAYNCSPSFNWKAALDDDQIAKFQRELGAMGYRFQFITLAGFHSLNHGMFDLARGYAEHGMTAYVDLQEREFAAQEHGFTAVRHQREVGTGYFDLVSTAVNPASSTTALAGSTEEEQFH

SEQ ID NO: 6158 - protein, 362 aa, Pseudomonas putida KT2440
MNDLSHTHMRAAVWHGRHDIRVEQVPLPADPAPGWVQIKVDWCGICGSDLHEYVAGPVFIPVEAPHPLTGIQGQCILGHEFCGHIAKLGEGVEGYAVGDPVAADACQHCGTCYYCTHGLYNICERLAFTGLMNNGAFAELVNVPANLLYRLPQGFPAEAGALIEPLAVGMHAVKKAGSLLGQTVVVVGAGTIGLCTIMCAKAAGAAQVIALEMSSARKAKAKEAGANVVLDPSQCDALAEIRALTAGLGADVSFECIGNKHTAKLAIDTIRKAGKCVLVGIFEEPSEFNFFELVSTEKQVLGALAYNGEFADVIAFIADGRLDIRPLVTGRIGLEQIVELGFEELVNNKEENVKIIVSPGVR

SEQ ID NO: 6159 - protein, 467 aa, Arabidopsis thaliana
MAEAKIEEIGCEDRISVLPEDLLVVILDLLPTKDVVATMILSKRWLSIWTMVRTLEYTDDMDDESKKSVWWFLNKSLQLHKAPVIDSLCMELGPQCPTTDDVDIGKWVAKAVDCLVMTLTIKLLWSAGPTSLPKSLYSCTSLSELTLSDQILVNVPSSAYLPSLTELELICVVYKDEDSLVSFLSSCPVLEFLFVLRKIDDNVKTFTVKVPSLLELTYKNLCSDVVDNTDRCLVVNAPAVNTCQITDYSLESFSIEDMPCLQDATIDVDEAYHPDDKFLTSFSSVLSLRMHLSDAMVSSSLISSHCNSIAASNYLLKLCLFSFQVMRCTTINFSRLIKLSIYPYGPDMLETLLRLLGNAPKLKEFLVDYPSLIASQKFVYNPEDLPWSWKQPSHVPECLSSQLEIFEWRDYGDRIIEEEFLTYVLANSKRLKTATISLRLNLEDPELIIEEIKDLPRVSTTSHLLFK

SEQ ID NO: 6160 - protein, 133 aa, Oryza sativa (japonica cultivar-group)
MASSHTKPSILLLAAALLLLSCSSIGGAARYLEEAAPAAAAAEEEEHPAHPAVPEIPKPELPELPKVPELPHPVVPELPKPELPKIPEVPHLAVPELPKPEVPEIPKAELPPLPKFELPPKPEFHFPEPEAKP

SEQ ID NO: 6161 - protein, 123 aa, Oryza sativa (japonica cultivar-group)
METDINAPPPPAPAPAGAGEGSSSAAGPSSRKPNKRFEIKKWNAVALWAWDIVVDNCAICRNHIMDLCIECQANQASATSEECTVAWGVCNHAFHFHCISRWLKTRQVCPLDNSEWEFQKYGH

SEQ ID NO: 6162 - protein, 342 aa, Oryza sativa (japonica cultivar-group)
MAARKIAMSTSSLLLLLLAAALLLTGDAARILQEAAWPPYDYPKPDQPPPLLPTPDVVPNPNQPPLQPTPGVPPLPNPDVPPMNKPDVPPMPKPDGPPIPPVQPCPDQPPQPKPDGPPLPNPNQPPQPNPNGPPKPDMPPMPKPDGLPNTYEPSRPDQPPQPISDGPPLPNPNVPPKPDQPPQPIPNGPPKPDMLPMPKPDGSPNSYAPSVPDQSTQPNPNGPSIPNQPPQPIPNGPIKPDQPPQPNPDMPPKPDQPPQPCPDGPPKPDQPPQPNPNGPPKPDQPPQPNPNGPSKPDQPPRPNPDMPPKPDQPPQPEYYEQPPKPDAPQMPPLPNGEIPFSP

SEQ ID NO: 6163 - protein, 512 aa, Escherichia coli O157:H7
MTNNPPSAQIKPGEYGFPLKLKNRYDNFIGGEWVAPADGEYYQNLTPVTGQLLCEVASSGKRDIDLALDAAHKVKDKWAHTSVQDRAAILFKIADRMEQNLELLATAEAWDNGKPIRETSAADVPLAIDHFRYFASCIRAQEGGISEVDSETVAYHFHEPLGVVGQIIPWNFPLLMASWKMAPALAAGNCVVLKPARLTPLSVLLLMEIVGDLLPPGVVNVVNGAGGEIGEYLATSKRIAKVAFTGSTEVGQQIMQYATQNIIPVTLELGGKSPNIFFADVMDEEDAFFDKALEGFALFAFNQGEVCTCPSRALVQESIYERFMERAIRRVESIRSGNPLDSVTQMGAQVSHGQLETILNYIDIGKKEGADVLTGGRRKLLEGELKDGYYLEPTILFGQNNMRVFQEEIFGPVLAVTTFKTMEEALELANDTQYGLGAGVWSRNGNLAYKMGRGIQAGRVWTNCYHAYPAHAAFGGYKQSGIGRETHKMMLEHYQQTKCLLVSYSDKPLGLF

SEQ ID NO: 6164 - protein, 150 aa, Glycine max
  misc_feature (40)..(40): Xaa can be any naturally occurring amino acid
  misc_feature (57)..(57): Xaa can be any naturally occurring amino acid
ISFGLKDIPSSSYDYSYFLYQWAFAFAAAGITSGSMVERXQGVAYLIYCSFLTGFVXEKDSHWFWAPERWAFAFNITDRLFSTGVIDFAGSGEIHMGGGIPGLWGALIESPRMGRFYHPRQAGALGGHTPPLVVLGTFLLWLGWYGSNPG

SEQ ID NO: 6165 - protein, 200 aa, Glycine max
MTFQPVPTLLLLLLLASANSHFALAGKRKVHIPDELDDVFDDEEDDAWREWGKKPEPPFPSSDISKLDPSQIQQEMMKRHAGPVIGFVKLRPGSRRTPDMVAEFAMKWTHVLRTGAVGVRFMGVDLNTIMFNLESIKDLEELKEFVLDQSEAYEIKMGDQFFRRSGDPPLDEVIEKYNSEKAKADNADSEEIDPNVKTEL

SEQ ID NO: 6166 - protein, 539 aa, Glycine max
MASSLRISRLLSRSFLSASTTTPLFSRGGSGALGAGLSKFSTAAAIEEPIKPPLKVEHTQLLIDGKFVDAATGKTFPTLDPRTGDVISHVAEGDHEDVDRAVAAARKAFDRGPWPKMTAYERQRILLRAADLFEKHNDDLAALETWDNGKPYEQSAQIEIPMLVRLFRYYAGWADKIHGLTVPADGPYHVQTLHEPIGVAGQIIPWNFPLVMFAWKVGPALACGNTIVLKTAEQTPLSALYASKLLHEAGLPPGVLNVISGFGPTAGAAIASHMDIDKLAFTGSTETGKVVLELAARSNLKPVTLELGGKSPFIVCEDADVDEAVELAHFALFFNQGQCCCAGSRTFVHERVYDEFIEKAKARALKRAVGDPFKGGIEQGPQIDSEQFQKILKYIRSGVESGATLETGGDRFGNSGFYIQPTVFSNVKDDMLIAKEEIFGPVQSILKFKDLDDVIQRANNTHYGLAAGVFTKNINTANTLTRALRAGTVWVNCFDTFDAAIPFGGYKMSGQGREKGEYSLKNYLQVKAVVTSLKNPAWL

SEQ ID NO: 6167 - protein, 374 aa, Ferroplasma acidarmanus
MAVSLGLEDVFIKYTGLTFIDGNAGVLRYRGYDINDLVQNTGFEEVCYLMTNGELPNSQQLAEFKKSVKEHYKLPDHVMELISDLPREADTLTMMETAFASLSSGDYQWNKENDRKQVPKILGENLGIISNIYRHKMGMGLQNPDPKYDYAEAFLRNCFGNADEKKISAMNAALVIYVDHEVPASTTAALVASSTLSDMYSCITAATAALKGPLHGGAAEAAYKQLLDIGNVDNVENWFKTNILDGKRRLMGFGHRVYRTYDPRMKIFKKLATTLEQTDEQKKLFEIAVKLEELGVKEFGGKGIYPNTDYYSGIVFNEIGFPIYMFTTLFGFSRVLGWLSHITEYVEEEERLIRPRAVYTGPDKRDFVKIQDRK

SEQ ID NO: 6168 - protein, 130 aa, Brassica napus
MAPVSALAKYKLVFLGDQSVGKTSIITRFMYDKFDNTYQATIGIDFLSKTMYLEDRTVRLQLWDTAGQERFRSLIPSYIRDSSVAVIVYDVASRQSFLNTTKWIDEVRTERGSDVIVVLVGNKTDLVDKR

SEQ ID NO: 6169 - protein, 365 aa, Lotus corniculatus var. japonicus
MDFSSSNGSEDTELSQAQIHLYKHVYNFVSSMALKSAMELGIADVIHSHGKPITLPELATALNLRPSKIGVLHRFLRLLTHNGFFAKTTVSRGEGAEEETAYGLTPPSKLLVKSNSTCLAPIVKGALHPSSLDMWRSSKKWFLEDNEELTLFESATGESFWEFLNKETESDTLSMFQEAMAADSHMFKLALKECKHVFEGLGSLVDVAGGRGGVTKLIREAFPHVKCTVFDQPQVVANLTGDENLNFVGGDMFKSVPPADAVLLKWVLHDWNDELSLKILKNCKEAISGRGKEGKVIIIDISIDETSDDRELTELKLDYDLVMLTMFNGKEREKKEWEKLIYDAGFSSYKITPICGFKSLIEVFP

SEQ ID NO: 6170 - protein, 138 aa, Pyrobaculum aerophilum
MVLKWVMSTKYVEAGELKEGSYVVIDGEPCRVVEIEKSKTGKHGSAKARIVAVGVFDGGKRTLSLPVDAQVEVPIIEKFTAQILSVSGDVIQLMDMRDYKTIEVPMKYVEEEAKGRLAPGAEVEVWQILDRYKIIRVK

SEQ ID NO: 6171 - protein, 79 aa, Brassica napus
  misc_feature (17)..(17): Xaa can be any naturally occurring amino acid
  misc_feature (35)..(35): Xaa can be any naturally occurring amino acid
CPKASTPPQEKLIGLDXPAKFEFVKRKLQETSHHXHDKPKKQSPIQVLEPIPKQGSSAAQKPQLKSPGMTNRSWSTGRQ

SEQ ID NO: 6172 - protein, 197 aa, Zea mays
MATSFQGTTTKRTACDKTVYLVDKLTADNRIYHKACFRCHHCKGTLKLANYNSFEGVLYCRPHFDQLFKRTGSLDKSFEGTPKVVKPERNVGNENATKVSSAFAGTREKCVGCSKTVYPTERVTVNNTMYHKSCFKCCHGGCTISPSNYIAHEGKLYCKHHHIQLIKERGTSASLRMTTRRHHRLGHWRRMNMSIDH

SEQ ID NO: 6173 - protein, 456 aa, Bordetella bronchiseptica RB50
MTTLSSAQQQDIQYQLHSYTNAVKHRDVGPRIITHGEGVYVFDDQGNRYLEGMAGLWSVAVGFGEQRLVEAAARQFQELPYYHTFTHKSHPSVIALAERLIGYTDGRMAQAFFTNSGSEANDTVVKLVWYYNNALGRRDKKKIIARQRGYHGVTVASASLTGLPGNHKDFDLPLPQIRHTACPHYYRYGLPGETEEDFATRMAGELEAMILREGPDTVAAFIGEPVMGAGGVIVPPRTYWQKIQAVCRKYDILVIADEVITGFGRLGQRFGSQVFDIEPDIMVLSKQITSSYQPLGAVLLNARVADVVAEHSGRLGTFGHGYTASGHPVATAVALENLRLIDERGLIEHAAEMGALLHLELQALSSHPLVGEVRGVGLIAGVELVADKATRQPFDPLGKAGGYAYERAHDHGLIVRGIQDTVAFCPPLIITAEQVRDMVARFARTLDDVAAHVAQG

SEQ ID NO: 6174 - protein, 454 aa, Xanthomonas campestris pv. campestris str. ATCC 33913
MSYDTVNPANGQVEHTQHTLDAAAIEARLAASAKAFPEWAALPLAERGALLRRVGEELTKRREDLQRIMTAEMGKLRREALAEIDKCAQGCAYYAEHAAEYLAPRAIPTEAQSSYVRYEPLGCVFAVMPWNFPLWQAFRFLAPGLMAGNVALLKHASNVPRCADAMKEVLDAAGIPPGVFDVLHIDNDQAAEVLRDDRIAAVTLTGSERAGRSLAANAGDQLKKCVMELGGSDAFVVLDDADLERTVQSAVQSRFDNSGQTCIAAKRFIVVDAIADQFVERFVAAAAQRVLGDPQQDATTLAPMARADLRDELHKQVQESVSKGAKVLLGGEPVAGSHAGYPATILDQVGPGMPAYEQELFGPVAAVIRVADEAEAVRVANDTTFGLGGSVWTADAKRGERVAQQLQCGAAFVNSVVKSDVRLPFGGIKRSGFGRELAEHGIHEFMNIKTIYVA

SEQ ID NO: 6175 - protein, 311 aa, Bradyrhizobium japonicum USDA 110
MPLDPLAKRLLTMMAAAGPQVRNRPSVEARRQSLAKLMQFARTDAPDVTVSDGTLPGPGGELPYRLYSPATAAERAPGFVFFHGGGLVAGSVATHDRIAAALAHATGCRLVSVDYRLAPEHKFPAAVDDAIAATEWVAREASSLGIDAGRLVVGGDSAGATLAAIVCQEALQNAGLSIVAQCLICPVLDFEETSPSREAFAEGHLIDRITIEADLADYLPGGIDAADPRISPLRATRFAGLPTAIIHTAEFDPMRDEGNAYARKLLAAGVTVEHVCHDGMVHNFHAMGAILPQAQLVLSQIGEQVRRAVEK

SEQ ID NO: 6176 - protein, 458 aa, Streptomyces coelicolor A3(2)
MATSVVLFTRDLRLHDHPPLRAALDRSDAVVPLFVRDRAVDAAGFAAPNRLALLADCLRDLDSGLRDRGGRLVVRSGDLVEEVCAVAGEAEADEVHLAADVSAHAHRREELLRSALSARGCRLHVHDAVTTVLAPGSVTPASSDHFAVFTPYFRRWSERAVREPLAAPRRVRVPDGVGSEPLPARGDLTGLSPGLPTGGERDARKRLTAWLRGGIADYADHHDDLAGDATSRLSPDLHLGALSPVELVHRARRAGGPGAEAFVRQLAWRDFHHQVLAARPHASAADYRTRHDRWRTGAAAEADAAAWRDGRTGYPVVDAAMRQLRHEGWMHNRGRLLVASFLTKTLYVDWRVGAWHFLELLVDGDVANNQLNWQWAAGTGTDTRPHRVLNPTTQARRFDPGGTYVRRWVPELAGLAGRSVHEPWRLARAARAAYDAYPDPIVDLSEGLDRFRRARGRD

SEQ ID NO: 6177 - protein, 500 aa, Gibberella zeae PH-1
MSLDIQLTAPNGRTYKQPTGLFINNEWVKSSNGEKITSINPTNEQEITSVYAGSSEDVDKAVRAARRALHNPSWRDLPGTERGKLLSRLATLVEENKEILATIETWDNGKPYTVALNDDVNEVAETLRYYGGFADKVYGQVIETTGDKFGYTIREPIGVCGQIIPWNFPLAMAAWKLGPALACGNAVILKPAEQTPLSILYLANLIVEAGFPPGVVNIINGLGTVAGAALASHMDVDKIAFTGSTPTARSIMKMASSNLKNITLETGGKSPLIVFDDADVDLAAYWAHAGIMYNQGQVCTATSRILVQESIYDKFMAAFGAQVKNISKVGDPFEESTFQGPQVTKAQYERILSFVDVGKKEGAKLALGGQPFKVGDGKGYFVEPTVFTDVTPKMRVFQEEVFGPFVVVTKFSSEDEAIHLANDTQYGLGSALFTTNLTRAHQVAKRIEAGMVWVNSSNDSDWRIPFGGVKQSGIGRELGEAGLAAYSNIKAVHVNIAAKL

SEQ ID NO: 6178 - protein, 126 aa, uncultured marine alpha proteobacterium HOT2C01
MADLQQIVDQLSDLTVIEAAELSKMLEDKWGVSAAAPVAVAAAGAAPSGDAAAAEEKDEFTIVLAAAGDKKINVIKEVRTITGLGLKEAKDLVEGAPKELKTGVSKDEANGFKEKLEAAGATVELK

SEQ ID NO: 6179 - protein, 296 aa, Saccharomyces cerevisiae
MITTPLVHVASVEKGRSYEDFQKVYNAIALKLREDDEYDNYIGYGPVLVRLAWHISGTWDKHDNTGGSYGGTYRFKKEFNDPSNAGLQNGFKFLEPIHKEFPWISSGDLFSLGGVTAVQEMQGPKIPWRCGRVDTPEDTTPDNGRLPDADKDAGYVRTFFQRLNMNDREVVALMGAHALGKTHLKNSGYEGPWGAANNVFTNEFYLNLLNEDWKLEKNDANNEQWDSKSGYMMLPTNYSLIQDPKYLSIVKEYANDQDKFFKDFSKAFEKLLENGITFPKDAPSPFIFKTLEEQGL

SEQ ID NO: 6180 - protein, 439 aa, Thermoproteus tenax
MSDYLEKIKAQIPNIQPFAGKYAEPVEGSYITYTGPGQLKVPDKVVIGYIEGDGTGPEVAYAAIKVANAAVERAYGKSRRVLWYEVLVGSKAEKILGSRLPDQSVEVLKKIRVFLKAPLETPVGGGFRSLNVTLRQIFDLYANIRPVKYFPGLPSPLKRPESVDLVIFRENTEDVYMGIEWPWNSPEAAKVREFLRRELKVDIRDDAGIGIKPISKFGTQRIARLALKFAVENKRRVVTIMHKGNIQKYTEGAFRDWAYEVAKNEFRDHVVLEEELAQYGGKVPPGKILVNDRIADNMLQQLLTRTGEYDVILAPNLNGDYVSDEAAGLVGGLGVAPGIDVGDWGMMAEPVHGTAPKYTGKNYVNPTATILALELLFRFIGWREAADLITRGVSKAYSEGYFTGDLARQMTDEERKVVKEVLGTQEFAEKVAEIIKTEL

SEQ ID NO: 6181 - protein, 170 aa, Campylobacter jejuni
MINSPYIIWLTGLAGSGKTTIGQALYEKLKLKYKNLIYLDGDELREILGHYAYDRQGRIDMALKRAKFAKFLNDQGMIVIVTTISMFNEIYDYNRKQLKNYYEIYIECDMHELMQRDQKGLYTKALNKEIDNVVGVDIEFDKPEADLVINNSCRNNLEEKVELIIKKLAL

SEQ ID NO: 6182 - protein, 410 aa, Thermoproteus tenax
MSEQTVSIRTTGKIIQSPCGPIIHGLEDVLVKITTISDIDGHTGRLWYRGYRIEDLAENTTYEEVVYLLLYGKLPSARELADIKSRLSANRELNPATIEILRALAKAHPMFALEAAVASEGAFDEDNLKLADALRAGRYKQEEKDLALRIAEKLIAKLPTIVAYHYRLSRGLELVRPRGDLAHSANFLYMFFGKEPDPLATKAIDLYLILHADHEIPASTFTALVIGATLSDLYSVIAGAIGALKGPLHGGANEAAVKSYLEIADPSKAKEIVEAATKPGGPRLMGVGHRVYKAYDPRAKIFKKLVEDYTAKFGDPQRLYAIASNIEQAVMAHPYFQQRKLYPNVDFWSGIVFYYMGIPYDYFTPLFAMSRVAGWTAHVLEYWENNRLFRPRACYVGPHDQQFIPLENRS

SEQ ID NO: 6183 - protein, 267 aa, Arabidopsis thaliana
MPVHDEQEHEVYGGEIPEEEEGEMDTEEYEEHGGEEGAAAGDEELEPGSSSRDLEDMKKRIKEIEEEAGALREMQAKAEKDMGASQDPSGGVSAAEKEEVDSRSIYVGNVDYACTPEEVQQHFQSCGTVNRVTILTDKFGQPKGFAYVEFVEVEAVQNSLILNESELHGRQIKVSAKRTNVPGMRQFRGRGRPFRPMRGFMPGVPFYPPYAYGCESSQVQTAYALQTVLIRQIGVKKVAAASPFSGKLIIINTVHRTLQLFRLTEMS

SEQ ID NO: 6184 - protein, 462 aa, Mesembryanthemum crystallinum
MGEQELLLQQQIKEDRNVSRETEMKHPALQGKYELGRVLGQGTFARVYHARNLVTGNSLAIKVVAKDKVIKVGMMEQMKREISVMKRVKHPNIVQLHEVMASKSKIYLAMDLVRGGELFSKVSKGGKLDEDVARSYFKQLISAVDFCHSRGVYHRDLKPENLLLDEHGNLKITDFGLSASFENEDHHQTLLRTSCGTPHYVAPEVISRKGQQGYHGAKSDIWSCGIILFVLLAGFLPFHDDNIIRMYRKVFKGDFTCPSWLSSQARDLITRLLDINPATRITVSEIMQSDWYCMDTSSMTAVTTDEFDLDHNNNNNNNSNYNNIHHHKKEPEMLNAFHIISLSQGFDLSPLFEEKHREERQDMRFATTKSASTVVSRLEEVAAKAGKFIVKKFCGDSVVRLQGQERGRKGKLAIAAEIMSVSPSLLVVEVKKDNGDTLEYNQFCTKQLRPALKDIVWTCPSS

SEQ ID NO: 6185 - protein, 122 aa, Zea mays
  misc_feature (48)..(48): Xaa can be any naturally occurring amino acid
  misc_feature (68)..(68): Xaa can be any naturally occurring amino acid
  misc_feature (74)..(74): Xaa can be any naturally occurring amino acid
  misc_feature (79)..(79): Xaa can be any naturally occurring amino acid
  misc_feature (113)..(113): Xaa can be any naturally occurring amino acid
TDKAIERLLSQLRKESLKIIPVNASSEVDALYSFKTEFSVNEDLHLIXLYSEKGISKDRILIKIAATXEDIKAXEILQXDHGINTNLTLMVSLIQAIGAAEAAAYLISPFVGXILDWFKPLP

SEQ ID NO: 6186 - protein, 452 aa, Arabidopsis thaliana
MNRPKVQRRVGKYEVGKTLGQGTFAKVRCAVNTETGERVALKILDKEKVLKHKMAEQIRREICTMKLINHPNVVRLYEVLASKTKIYIVLEFGTGGELFDKIVHDGRLKEENARKYFQQLINAVDYCHSRGVYHRDLKPENLLLDAQGNLKVSDFGLSALSRQVRGDGLLHTACGTPNYAAPEVLNDQGYDGATADLWSCGVILFVLLAGYLPFEDSNLMTLYKKIIAGEYHCPPWLSPGAKNLIVRILDPNPMTRITIPEVLGDAWFKKNYKPAVFEEKEEANLDDVDAVFKDSEEHHVTEKKEEQPTSMNAFELISMSRALDLGNLFEEEESIPFNLQGFKRETRFAAKGAANDLVQKIEEASKPLGFDIQKKNYKRYLCTQMRLENVTAGRKGNLRVATEIFQVSPSLHMIEVRKTKGDTLEFHKFYKKLSTSLNDVVWKSGESSGLSK

SEQ ID NO: 6187 - protein, 420 aa, Listeria innocua Clip11262
MSQKIQVENGVLKTPNNPVIPFIEGDGTGPDIWAAAKRVLDAAVKKAYNGEKEIAWKEVLAGEKAFKQTGEWLPQETLDTIDEYLIAIKGPLTTPIGGGIRSLNVALRQELDLYVCLRPVRYFKGVPSPVKRPEDTDMVIFRENTEDIYAGIEFKEGSAESKKLIDFLKSEFGVDKIRFPETSGIGIKPISKEGTERLVRSAIEYAIKEGRKSLTLVHKGNIMKFTEGAFKNWGYDLCEREYGDKVFTWNEYDRIKEAEGTEAADAKQKEELAAGKILVKDSIADIFLQQILTRPAEFDVVATMNLNGDYISDALAAQVGGIGIAPGANINYLTGHAIFEATHGTAPKYAGLDKVNPSSVILSGTLLLEHIGWGEAAALINHSMEKTIAAKTVTYDFARLMDGATEVKCSEFADELIKNF

SEQ ID NO: 6188 - protein, 444 aa, Zea mays
MDEFELEDNLEFILQSIQELMEDPGDNNAFGDANQNELFASIVNYDQENMLPDVSAADVAAGKDIQGIPWEKMLFGRDKYREMKMKNYRNYQNLSYAREDALQECKQVKKDSPYYDFHYNTRRARPSIVHFQLRNLVWATTKHDVYTMHDQSVTHWSSLEQTSTELINADDCIVPKQRGHGSQSVAMVQVTTMAVDSNLLVVGGFQGEIICKRLDDEGVVYSTRVTDDENAITNSLEMYQDPSGSRRLVAANNDCSIRIFDTEYFDLLKHYVFPWSVNSVSVSPNGKLFAVLGDHEDGCVVDPKCGKAIGSLRGHLDYSFASAWHPDGNIVATGSQDTTCRLWDIRNLSQSVAVLGGRMGSIRCVKFSPDGRFLATAEPVDFVHMYDAYADYSRSHEIDLFGEIGGLAFSPDTEAFYVGLADQTYGGMIEFSKRHQHHYFNSLW

SEQ ID NO: 6189 - protein, 317 aa, Pichia guilliermondii
MSIKLNSGYDMPSVGFGCWKVDNATCADTIYNAIKVGYRLFDGAEDYGNEKEVGDGINRALDEGLVARDELFVVSKLWNSFHDPKNVEKALDKTLSDLKVDYLDLFLIHFPIAFKFVPFEEKYPPGFYCGDGDKFHYEDVPLIDTWRALEKLVEKGKIRSIGISNFSGALIQDLLRSAKIKPAVLQIEHHPYLQQPRLVEYVQSQGIAITAYSSFGPQSFVELDHPRVKDVKPLFEHDVIKSVAGKVKKTPAQVLLRWATQRGLAVIPKSNNPDRLLSNLKVNDFDLSQEDFQEISKLDIELRFNNPWDWDKIPTFI

SEQ ID NO: 6190 - protein, 155 aa, Lilium longiflorum
MGSKLTREEYDTLLAAFHKLTVRLEVASVPKDATPADIKNLPDAYLYFIDMPGVRTGEIKVEVEDDSALVIIGERKREEEEKYQMMERWTGKRMRKFELPENADTKAVSAVWKNGVLAVTVRKLPAWEVAGISFNIERLPVPLPTKTKSIEVKIA

SEQ ID NO: 6191 - protein, 203 aa, Lilium longiflorum
QSSQSMESAMITLDLPVIAAYRQLMEIPGETSNSLGDPSQSYALDAPTLTYALDAPTRSYVLDAPTLSYAHDAPTLTYALGAPASTYALDAGAMASTAADVKDLPAAYVFVVDMPGVGSGDLKVKVEGDNVLLISGERKREEEGVYLCIERRVGKLTKMFVLPENANTEAVSAVCKDGVLTVTVEKRPPQEPKKPKVIEVKVA

SEQ ID NO: 6192 - protein, 199 aa, Candida albicans SC5314
MSVPKTKSSSNGYTSVPQGENQADNLSNSETLTNNNQERSTDEYELQTLNSLDYEVENGPEEQQEEEQTGSSTMKMAFMNMANSILGAGIIGQPYAFRNSGLIGGILIMILLTVLIDWTLRLIIKNSILSQTKSYQDTVNYCFGVWGKIVLLVSICSFAYGGCMAFCVIIGDTIPHVLKAFIPESITRSDGSIWVGLVA

SEQ ID NO: 6193 - protein, 512 aa, Streptomyces clavuligerus
MVTAAISGTDEIRARAEQALTRCGVDLTAVKGDALTARTPLTGADLFGLRAQTPEDVDRAVEAAHTAFLTWRTTPAPVRGALVKRFGELLTEHKQDLADLVTIEAGKIRSEALGEVQEMIDICDFAVGLSRQLYGRTMPSERPGHRLMETWHPLGVVGVISAFNFPVAVWAWNAAVALVCGDTVVWKPSELTPLTALACAALLDLAIADAGAPKGLNQVVVGAADVGERLVDSPRVPLVSATGSTRMGRAVGPRVAARFGRTILELGGNNAAVVTPSADLDLTVNAAVFAAAGTAGQRCTTLRRLIVHEDIADTVVERLTAAFERLPIGDPFQDTTLVGPLVNEAAFGRMREAVERATAEGGTLCAGGERQFPDAAPGAYYVRPALVRMPAQTAVVREETFAPILYVLTYRDLDEAIRLNNEVPQGLSAGIFTADQSEAERFLAPDGADCGIANVNIGTSGAEIGGAFGGEKETGGGRESGSDAWRAYMRRATNTVNYSGRVALAQGVDFSQ

SEQ ID NO: 6194 - protein, 460 aa, Xanthomonas campestris pv. campestris str. ATCC 33913
MSERVVDPSVLRSLQQLDAAHHLHPFNDNAALASKGTRILTRGEGVYVWDADGNKLLDAFAGLWCVNLGYGRAELAQAAARQMEQLAYYNSFFQCTTEPTVHLAAKLAELAPGDLNHAFFANSGSEANDTILRLVRHFWAVQGQPQKHIFIGRHDGYHGTTMGGASLGGMRGMHRQGGLPIPGIEHIAPPNHFGEGGEMDPDDYGLLAARRLEEKILQLGPDTVAAFIGEPIMGAIGVYIPPRSYWPEIERICRRYDVLLVADEVICGFGRTGAWFGAEYFGFQPDVMTLAKGITSGYIPLAAAMFNDRVAGVLKRQGGELAHGGTYAGHPVCAAVALENLRLLQDEGIVDTARTQIAPYLAQRWAELGAHRLVGEARIAGLVGALELVPDKRRRGVYFPERGRVGALCRDFALRRGLILRATYDAMLLSPPLIITCEQVDELFDKTWAALDDTAQALGK

SEQ ID NO: 6195 - protein, 382 aa, Saccharomyces cerevisiae
MRALAYFKKGDIHFTNDIPRPEIQTDDEVIIDVSWCGICGSDLHEYLDGPIFMPKDGECHKLSNAALPLAMGHEMSGIVSKVGPKVTKVKVGDHVVVDAASSCADLHCWPHSKFYNSKPCDACQRGSENLCTHAGFVGLGVISGGFAEQVVVSQHHIIPVPKEIPLDVAALVEPLSVTWHAVKISGFKKGSSALVLGAGPIGLCTILVLKGMGASKIVVSEIAERRIEMAKKLGVEVFNPSKHGHKSIEILRGLTKSHDGFDYSYDCSGIQVTFETSLKALTFKGTATNIAVWGPKPVPFQPMDVTLQEKVMTGSIGYVVEDFEEVVRAIHNGDIAMEDCKQLITGKQRIEDGWEKGFQELMDHKESNVKILLTPNNHGEMK

SEQ ID NO: 6196 - protein, 429 aa, Rhizobium tropici
MTEQSAKLTWGEKTVDLPVKTGTIGPSVIDIGALYKNTSTFTYDPGFTSTASCESSITFIDGDEGVLLHRGYPIEQLAEHGDFLEVCYLLLYGELPTAAQKKDFDYRVVHHTMVHEQMSRFFTGFRRDAHPMAVMCGCVGALSAFYHDSTDITDPHQRMVASLRMIAKMPTLAAMAYKYHIGQPFVYPKNDLDYASNFLRMCFAVPCEEYVVNPVLARAMDRIFILHADHEQNASTSTVRLAGSSGANPFACIAAGIACLWGPAHGGANEAALNMLTEIGTVDRIPEYIARAKDKNDPFRLMGFGHRVYKNYDPRAKIMQKTAHEVLGELGIKDDPLLDIAIELERIALTDDYFIEKKLYPNVDFYSGITLKALGFPTTMFTVLFALARTVGWIAQWNEMIEDPDQRIGRPRHVYTGAPLREYVPVSKR

SEQ ID NO: 6197 - protein, 319 aa, Bartonella grahamii
DGDKGILLYRGYPIDQLAEKGDFLESCYLLLYGELPTQQEKNEFDRCIMQHTMVHEQFARFFHGFRRDSHPMAVMVACLGAMSAFYHDSIDITDPHQRMIASVRLISKVPTLAAMAYKYSIGQAFVYPRNDLSYAANFLRMCFAVPCEEYKTNPVLARAMDQIFILHADHEQNASTSTVRLAGSSGANPFACIAAGVACLWGPAHGGANEACLKMLQEIGSIERIPEFIARAKDKNDPFRLMGFGHRVYKNYDPRAKIMQKTCHEVLKELNIQDDPLLDIAIELEKIALSDEYFIEKKLYPNVDFYSGITLKALGFPTE

SEQ ID NO: 6198 - protein, 215 aa, Aspergillus oryzae
MSSTSPSKEPEVEPEVQSGEEQEQMDKEQQDQAQNQGEFEVKEQDRWLPIANVARIMKLALPDNAKIAKEAKECMQECVSEFISFITSEASEKCQQEKRKTVNGEDILFAMTSLGFENYAEALKIYLSKYRETQSARGEHQNRPTSSGYASGGPVGGVSSAPGGRPATAGGFPDAADNTNSIMNPSLDPTEQDPSAYGYPPMVGQPHNGTAGDSY

SEQ ID NO: 6199 - protein, 373 aa, Listeria innocua Clip11262
MTLSKGLENVYVAETSISSIIDDMLTYVGYGIDDLMENNASFEEVIYLLWHLRLPNKEEFKKFKLEIQENMAVSETIITSLRMQNHQKLHPMSVLRTTVSMLGVFDTEAELDDGEAVYRKGLRLQAKMPTIVAAFSRIRRGLDPIPPREDLNMAANFLYMITGEEADELSVEAMNKALVLHADHEFNASTFTARVCVATLSDVYSGVTSAIGALKGPLHGGANERVFDMLEEIDAAGDVRNYIQEKIDTKQKIMGFGHRVYRGGDPRAKHLREMSRKLTAEKGEEKWFDISLQVEEAVWELKHLKPNVDFYSASVYHALGIDRDLFTLVFSVSRVSGWLAHIFEQYRDNRLIRPRAIYVGPENRSYLPVEERI

SEQ ID NO: 6200 - protein, 229 aa, Streptococcus agalactiae NEM316
MNDNVIYTQSDSGLNQFFAKIYGLVGIGVGLSAAVSAIMLYMFPQNMIAIMQKMPGLYFGAIILELVLVFVASGAARRNTPAALPLFLIYSALNGFTLSFIIARYTQTTVLQAFITSAAVFFAMALIGAKTKKDLSGMRKALMAALIGILIASLVNLFIGSGGMSYIISIVCVIIFSGLIAYDNQMIKYVYNSQGGQVADGWAVSMALSLYLDFINLFLNILRLFARND

SEQ ID NO: 6201 - protein, 211 aa, Thermosynechococcus elongatus BP-1
MSANFLIQTVSNTPENILWHQSTVTRARREQLNGHKSYVLWFTGLSGAGKSRLAHTVEERLHRLGCRTFVLDGDNVRHGLCSDLDFSEVGRKENIRRIGEVAKLMMEVGLIVMTAFISPFRADREAVRNRMPYGDFLEIYCQVSLEACEARDVKGLYKKARAGQIKNYTGIDSAYEAPLKPELVVNTECLTLEESVSAVLRMLHERGMVVQ

SEQ ID NO: 6202 - protein, 119 aa, Arabis alpina subsp. caucasica
PGSFNKILISYESGTVNGQWSAVGRTAVTTTLAGCTAALTTLFGKRLLSGHWNVTDVCNGLLGGFAAITGGCSVVEPWAAIICGFVAACVLLGCNKLAEKLRYDDPLEAAQLHGGCGAW

SEQ ID NO: 6203 - protein, 121 aa, Clostridium perfringens
MTKEQIIGALKEMSVLELNEVVKACEEEFGVSAAAPVAVVGGAAAGAAAEEKSEFDVVLTNAGANKIKVIKAVRELTGLGLKEAKEIVDGAPKTLKEAVAKEEAEDMKAKLAEVGAEVELK

SEQ ID NO: 6204 - protein, 319 aa, Listeria innocua Clip11262
MKRIAILTSGGDAPGMNAATRAVVRKAIYEGLEVYGINYGFLGLVNGDIRKLELGSVGDLLHRGGTFLYSARYPEFATEEGQLKGIEQLKKHQIDGLVVIGGDGSYHGAEALTKRGFPTIGIPGTIDNDISGTDFTIGFDTALNTVLDALDKIRDTATSHERTFIIEVMGRDAGDIALWSGLAGGAEAIIVPEESFNMDDVVDRLNKGRERGKKHSIIVVAEGVMSGNEFAKQLAEYGDYHARVTVLGHVQRGGSPTAFDRVLASRLGARSVELLLENRGGLAVGIRENRIVENNIGEILKEKHTLDQKLFDLASILSI

SEQ ID NO: 6205 - protein, 130 aa, Nostoc sp. PCC 7120
MSAATDQILDQLKSLSLLEAAELVKQIEEAFGVSAAAPAGGMMMMAAPGAAAAAEPVEEQTEFDVVLESVPADKKIAVLKIVREITGLGLKEAKDLVEAAPKAVKEAIAKDAAEDAKKRIEEAGGKVTVK

SEQ ID NO: 6206 - protein, 506 aa, Oceanobacillus iheyensis HTE831
MRYANPNKQDAIVNFEKRYDNFIGGKYQPPINGNYFENVSPVTGEVFCEIARSTKEDVDAAIDAAHAAKDAWGKTSVAERAVILNKIADRIEENLEKLAVAETWDNGKAVRETLAADIPLAVDHFRYFAGVIRAQEGTLSQIDEDTVAYHFHEPLGVVGQIIPWNFPILMATWKLAPALAAGNCVVLKPAEQTPASIHVLLDLIKDLLPDGVLNVVNGFGVEAGKPLASNSRIAKIAFTGETTTGRLIMQYASENIIPVTLELGGKSPNIFFEDVMDKDDAFVDKAIEGMVMFALNQGEVCTCPSRALVHESIYDRFMEKVIQRVNQIKIGHPLDTDTMMGAQASQEQMEKIKSYLDIGKQEGAEVLTGGNVNALEGELAAGYYVEPTIFKGNNKMRIFQEEIFGPVLSVTTFKDKDEAMEVANDTLYGLGAGIWTRDINTAYRFGRGIEAGRVWTNCYHQYPAHAAFGGYKKSGIGRENHLMMLGHYQQTKNLLISYGEGTAGLF

SEQ ID NO: 6207 - protein, 197 aa, Bacillus cereus ATCC 14579
MDTNITWHTASVSKDERRVKNGHHSFVIWFTGLSASGKSTVANAVARKLFEKNIGNYVLDGDNIRHGLNKDLGFSESDRMENIRRIGEVAKLFVDQGAVVLTAFISPFRVVRKQVRDLLAADEFIEIFVKCPIEECEKRDPKGLYKKARKGDIKDFTGIDSPYEEPEQAELIVETHKYSIEECAEQIVKYLQERSFI

SEQ ID NO: 6208 - protein, 164 aa, Cleisostoma racemiferum
IENKINRQVTFAKRRNGLLKKAYELSVLCDAEVALIIFSNRGKLYEFCSSTSMLKTLEKYQKCNFGSPESTIISRETQSSQQEYLKLKSRVEALQRSQRNLLGEDLGPLGSKELEQLERQLDSSLKQIRSTRTQFMLDQLADLQRREHMLCEANKALKRRFEES

SEQ ID NO: 6209 - protein, 495 aa, Escherichia coli
SYYHHHHHHLESTSLYKKAGLMQHKLLINGELVSGEGEKQPVYNPATGDVLLEIAEASAEQVDAAVRAADAAFAEWGQTTPKVRAECLLKLADVIEENGQVFAELESRNCGKPLHSAFNDEIPAIVDVFRFFAGAARCLNGLAAGEYLEGHTSMIRRDPLGVVASIAPWNYPLMMAAWKLAPALAAGNCVVLKPSEITPLTALKLAELAKDIFPAGVVNILFGRGKTVGDPLTGHPKVRMVSLTGSIATGEHIISHTASSIKRTHMELGGKAPVIVFDDADIEAVVEGVRTFGYYNAGQDCTAACRIYAQKGIYDTLVEKLGAAVATLKSGAPDDESTELGPLSSLAHLERVGKAVEEAKATGHIKVITGGEKRKGNGYYYAPTLLAGALQDDAIVQKEVFGPVVSVTPFDNEEQVVNWANDSQYGLASSVWTKDVGRAHRVSARLQYGCTWVNTHFMLVSEMPHGGQKLSGYGKDMSLYGLEDYTVVRHVMVKH

SEQ ID NO: 6210 - protein, 177 aa, Triticum aestivum
  misc_feature (27)..(27): Xaa can be any naturally occurring amino acid
  misc_feature (67)..(67): Xaa can be any naturally occurring amino acid
MAPTVMASSATSVAPFQGLKSTAGPPXSARRSNGASLGSVSNGGRIRCMQVWPIEGIKKFETLSYLXPPLSTEALLKQVDYLIRSKWVPCLEFSKVGFIFREHNASPGYYDGRYWTMWKLPMFGCTDATQVINEVEEVKKEYPDAYVRIIGFDNMRQVQCVSFIAFKPPGCEESGKA

SEQ ID NO: 6211 - protein, 330 aa, Methanococcus maripaludis S2
MHKICVIEGDGIGKEVVPAAVEVLKATGVEFEFNHALAGDEVFEKTGVALPEETIAAAKAADAILFGAAGETAADVIVKLRKILDTYANIRPVKSYNGINCLKTGIDYIIVRENTEGLYKGIEAEIADGVTVATRVITKDASERIFKHAFEMAKDRKKQGTAGKVTCAHKANVLKITDGLFKKTFYEVSNDYKDIQTEDFYVDAMNMFIISRPETFDIVVTSNLFGDILSDGAVGMVGGLGMAPSGNVGDKYGLFEPIHGSAPDIAGKGLANPTATILTAVMMLRYLKENEAAEKVEKALEEVLSLGLTTPDLGGTLSTSEMGQEVAKRV

SEQ ID NO: 6212 - protein, 303 aa, Triticum aestivum
MGGGVMRTAAKVGLAGGAAAAAGRFRNVAPSFATAPAAEAAAAAPLLSAAGEIPAVAPAGSQWASWEVDDWEFADWRSESASEADVAVVGGPRLVFAPPSREEAEEATAELREAIDRVYFKETPVEVVKEHDQELSKLGADALIPAMPGHVVQAFTLLKSSPEAQSVVASLASDKNVWDAVLKNERVMEFYKSHQQTLVNTFPEGTDSTDSVESPEKFEEASPEYALPTASPLSDFVDNAKKTMMEMVDNITNFFQDLFHNPAEAEAGPGSSSKKPSFAEMAAGGSFMALAMAVILVVLFKRA

SEQ ID NO: 6213 - protein, 108 aa, Triticum aestivum
MEHGSVADSSASTFSVMEEDHTLANSVRFVLNQDPRVAFCGYSIPHPADNKVNIRVQTTGDQAKDVMKDALQDLMVMGQHVRGTFDKAVADFKSKMPAEQMDVDLNQQ

SEQ ID NO: 6214 - protein, 151 aa, Picea abies
MAMDPLLSTVQQLLGVPDDLERILHAPTRSYMRDTEATASTPVDVKEYPNSYVFIVDMPGLKSNDIKVQVEDENVLNISGERKRNEKEEGAVKYIRMERRVAKFMRKFTLPADCNLEAISAACQDGVLTVTVPKLPPPEPKKPKTIAVKIG

SEQ ID NO: 6215 - protein, 502 aa, Atriplex hortensis
MAFPIPARQLFIDGEWREPLLKNRIPIINPSTEEIIGDIPAATAEDVEVAVVAARKAFKRNKGRDWAALWSHRAKYLRAIAAKITEKKDHFVKLETLDSGKPRDEAVLDIDDVATCFEYFEYFAGQAEALDAKQKAPVTLPMERFKSHVLRQPIGVVGLISPWNYPLLMDTWKIAPALAAGCTTVLKPSELASVTCLEFGEVCNEVGLPPGVLNILTGLGPDAGAPIVSHPDIDKVAFTGSSATGSKIMASAAQLVKPVTLELGGKSPVIMFEDIDIETAVEWTLFGVFWTNGQICSATSRLLVHESIAAEFVDRMVKWTKNIKISDPFEEGCRLGPVISKGQYDKIMKFISTAKSEGATILCGGSRPEHLKKGYYIEPTIITDITTSMQIWKEEVFGPVICVKTFKTEDEAIELANDTEYGLAGAVFSKDLERCERVTKALEVGAVWVNCSQPCFVHAPWGGVKRSGFGRELGEWGIENYLNIKQVTSDISDEPWGWYKSP

SEQ ID NO: 6216 - protein, 267 aa, Humulus lupulus
MADANMGAGGGQFPDFPSVLTHGGQYVQFDIFGNFFEITTKYRPPIMPIGRGAYGIVCSVLNTELNEMVAVKKIANAFDIYMDAKRTLREIKLLRHLDHENVIGLRDVIPPPLRREFSDVYIATELMDTDLHQIIRSNQGLSEDHCQYFMYQLLRGLKYIHSANVLHRDLKPSNLLLNANCDLKICDFGLARPNIENENMTEYVVTRWYRAPELLLNSSDYTAAIDVWSVGCIFMELMNRKPLFAGKDHVHQIRLLTELLGTPTESN

SEQ ID NO: 6217 - protein, 119 aa, Barbarea verna
PGSFNKIAVTYATGTYNGQWSAVGRTAVTTTLAGCTAALTTLFGKRLLSGHWNVTDVCNGLLGGFAAITGGCSVVEPWAAIICGFVAALVLLGCNKLAEKLKYDDPLEAAQLHGGCGAW

SEQ ID NO: 6218 - protein, 321 aa, Bartonella sp.
YIDGDKGILLYRGYPIDQLAEKGDFLESCYLLLYGELPTQQEKNDFDRCIMQHTMVHEQFSRFFHGFRRDSHPMAVMVACLGAMSAFYHDSIDITDPHQRMIASVRLISKVPTLAAMAYKYSIGQAFVYPRNDLSYAANFLRMCFAVPCEEYKINPVLARAMDQIFILHADHEQNASTSTVRLAGSSGANPFACIAAGVACLWGPAHGGANEACLKMLQEIGSIKRIPEFIARAKDKNDPFRLMGFGHRVYKNYDPRAKIMQKTCHEVLKELNIQDDPLLDIAIELEKIALSDEYFIEKKLYPNVDFYSGITLKALGFPTE

SEQ ID NO: 6219 - protein, 119 aa, Crambe cordifolia
PGSFNKILVTYESGSMNGQWSAVGRTAVTTTLSGCTAALTTLFGKRLLSGHWNVTDVCNGLLGGFAAITGGCSVVEPWAAIICGFIAALVLLGCNKLAERLRYDDPLEAAQLHGGCGAW

SEQ ID NO: 6220 - protein, 482 aa, Ralstonia eutropha JMP134
MLKLQDPSLLRQQCYIDGRWTDGERRIDVTNPATGELVAQVPQFGVAETRHAIEAANRALPAWRARLAKERSALLRKWFELILANQDDLARIMTAEQGKPFAEAKGEIAYAASFIEWFAEEGKRVYGETIPAPVSSQRIVVTKEPIGVCAAITPWNFPAAMITRKAGPALAAGCTMVVKPASQTPLTALALAVLAERAGIPAGVLSVVTGSAGAIGGELSSNPLVRKLTFTGSTEVGRVLMAQTASTIKKVSMELGGNAPFIVFDDADLDAAVEGAIISKYRNAGQTCVCANRIYVQDKVYDAFAQKLVAAVAQLKVGNGMEDGVRIGPLIDEKAVAKVEEHIADALGKGARVLEGGHRHGLGHTFFQPTVLADVAPNMLVAREETFGPLAPLFRFKTEDDVVAMANDTEFGLASYFYARDLGRVWRVSERLEYGMVGVNTGLISNEVAPFGGVKQSGVGREGSHYGIEDYLVIKYTCMAGI

SEQ ID NO: 6221 - protein, 288 aa, Bacillus sp. KSM-K16
MKTIQWYPGHMAKARREIKEKLKLIDVVIELVDARLPQSSRNPLIDELAQQKPRLMLLNKADLADPAETERWRAFFKRTGAEVLAINAQTGAGVKNIAPACKTLASALYQKWEQKGMKPRPLRAIILGIPNVGKSTLINRLVNKRQAKVGDRPGVTKQQQWIKVKQELELLDTPGILWPKFDDQEVGLRLAATGAIKDELLDYGDVAAYALRYLAAEYPDLLEARYGIERNSEEDDVVPLFEAIGKKRGCIVRGGLVDFDKTAELILRELRSGTIGKVTLEKAEHEAL

SEQ ID NO: 6222 - protein, 362 aa, Pseudomonas putida
MNDLSHTHMRAAVWHGRNDIRVEQVPLPADPAPGWVQIKVDWCGICGSDLHEYVAGPVFIPVEAPHPLTGIQGQCILGHEFCGQIAKLGEGVEGFAVGDPVAADACQHCGTCYYCTHGLYNICERLAFTGLMNNGAFAELVNVPANLLYRLPQGFPPEAGALIEPLAVGMHAVKKAGSLLGQTVVVVGAGTIGLCTIMCAKAAGAAQVIALEMSSARKAKAKEVGATVVLDPSQCDALAQIRALTFGLGADVSFECIGNKHTAKLAIDTIRKAGKCVLVGIFEEPSEFNFFELVSTEKQVLGALAYNGEFADVIAFIADGRLDIRPLVTGRIGLEQIVELGFEELVNNKEENVKIIVSPGVR

SEQ ID NO: 6223 - protein, 450 aa, Xanthomonas campestris pv. campestris str. ATCC 33913
MHDHPSSDAAHAMQTPAAMEAFWMPFTANRQFKARPRLLASAAGMYYRDVEGRQILDGTAGLWCCNAGHARERIVAAIRAQAGTLDFAPTFQMGSPLPFALAERLAALAPPGLGHVFFTNSGSEAVDSAMKIVLAYHRLRGEGQRTRFIGREKAYHGVGFGGMSIGGLPNNRKWFGPLLAGTDHLRHTLDLQRNAYSRGLPAFGVELADDLERLITLHDASTIAAVFVEPVSGSAGVILPPEGYLQRLRAICDRHGIVLVFDEVITGFGRVGEAFAAQRFGVTPDLITAAKGLTSGTVPMGAVLVADAIHDAFMHGPQAAIELFHGYTYSGHPLACAAALATLDTYAEEQLFTRAITLGPQWEEALHSLRGLPHVIDIRNIGLIGAIELAPREGAPGARGYEVFERCFHEGGLLVRVTGDVIALSPPLIVTPDQIGQMVETLAAILRKVD

SEQ ID NO: 6224 - protein, 296 aa, Saccharomyces cerevisiae
MITTPLVHVASVEKGRSYEDFQKVYNAIALKLREDDEYDNYIGYGPVLVRLAWHISGTWDKHDNTGGSYGGTYRFKKEFNDPSNAGLQNGFKFLEPIHKEFPWISSGDLFSLGGVTAVQEMQGPKIPWRCGRVDTPEDTTPDNGRLPDADKDAGYVRTFFQRLNMNDREVVALMGAHALGKTHLKNSGYEGPFGAANNVFTNEFYLNLLNEDWKLEKNDANNEQWDSKSGYMMLPTDYSLIQDPKYLSIVKEYANDQDKFFKDFSKAFEKLLENGITFPKDAPSPFIFKTLEEQGL

SEQ ID NO: 6225 - protein, 476 aa, Saccharopolyspora spinosa
MPAQAAVIDGKLVEGPETLDVLDPSTGTLLDRTLRGTGEHVDAAVAAARAASREWAHTPYSERSAILRRIGELIRRDRGEFALLESQDTGKPLAQACADTDVAARYFEYYANTMEAFFGHSLPPNGDFVAYTRHVPFGVTGHIIPWNYPLQIGCRTIAPAIAVGNCAVVKPAEEAPLSVLKVARTALEAGLPAGVLNVVPGLGAQAGAALAGHAGIDHLSFTGSVPVGAAVAHAAAENVIPVVLELGGKSPNIVFPDADLDAAIPVIVKSMLQNAGQTCSAGSRLLVHEEVRDEVLARIDEALRGVRIGPGPQDLDLGPLISAKQRDRVTQMVQRAADSGARQLGGPGQVELPEGGFYFPPTVFTDVDPAQEIAQEEVFGPVLAAMSFGTVDEAIQLANGTQYGLIAAAWTRNLDVAHVMAEEIRAGQVYLNTYGGGGGVEYTFGGFGKSGYGREKGFEALKGFCQTKTIVTKVTR

SEQ ID NO: 6226 - protein, 306 aa, Sporothrix schenckii
MDGKRQLNSFQQLEKLGEGTYATVFKGRNRHTGEFVALKEIHLDSEEGTPSTAIREISLMKELKHENIVALHDVIHTESKLMLVFEYMDGDLKKYMDTNGERGALKPMLIKSFMYQLLKGIDFCHQNRVLHRDLKPQNLLINGKGQLKLGDFGLARAFGIPVNTFSNEVVTLWYRAPDVLLGSRTYNTSIDIWSVGCIMAEMYTGRPLFPGTTNEDQMLRIFRIMGTPTEHNWPGISQFPEYKATAPRYATQDLRQILPQIDATGIDLLQRLLQLRPELRISAHDALQHPWFHDILQYQHCQQAAG

SEQ ID NO: 6227 - protein, 460 aa, Zea mays
MVNGERRADAECTRASLLGRYEIGRTLGEGNFGKVKYARHIASGGHFAIKILDRSKILSLRIDDQIRREIGTLKLLKHPNVVRLHEVAASKTKIYMVLEFVNGGELFDKIAIKGKLSEHEGRRLFQQLIDGVSYCHDRGVYHRDLKPENVLVDRKGTIKISDFGLSALPQHLGSDGLLHTTCGSPNYIAPEVLQNRGYDGSLSDLWSCGVILYVMLVGCLPFDDRNLVVLYQKIFKGDCQIPKWLSPAAQDLLKRILQPNPMKRINVAGIREHEWFKKDYVPAVPHDDDEDVLPSPAPSIKPIDEPAQEKCSPINAFQLIGMASSLDLSGFFEEEDAAQRKIRFTSTHPPKDLFDKIESVVMEMGFKVHRGAGKLKVLRNSKCSRNPSSLLVCTEVFELGPSLYVVELRKSHGDSTLYRQLCERLSDELGACKTDQIARTESSSDDLSSVDGEAFPLSGF

SEQ ID NO: 6228 - protein, 432 aa, Rhodospirillum rubrum
MSLRSPGRVAYVNARLLDPASGLDQTGALLADGEHIVEVHPGAFTAPEDAEIIDCQGACLAPGLVDMRVQLREPGEEHKESMRSAGQAAVAGGITSMVCLPNTNPPMDDEATLEFVARRARLAGLAKVYCYGACTKGLRGEDLAELGIMAEAGALAFTDGVKAIANAQMMRRVLAYAATFDLLVMQHPEEPTLAGGVMNAGDLATRMGLSGIPREAEIILLERDLRLVAMTGGRYHAAHISTGESVALIRRAKDQGLRVSCDTAPFYFALNELAVGDYRTFAKLSPPLRGESDRRAIIEGLKDGVIDAIASDHSPQDQDTKRLPFAQAAFGAVGLETLLSISLELHHNGHLSLLEVLKRLTVAPAGLLGLDAGRLRPGGKADLLVFDPYRAGKVDATRFLSKSKNSPFDDRPVQGRVLRTVVDGRTVFPANG

SEQ ID NO: 6229 - protein, 109 aa, Zea mays
  misc_feature (73)..(73): Xaa can be any naturally occurring amino acid
  misc_feature (85)..(85): Xaa can be any naturally occurring amino acid
  misc_feature (94)..(94): Xaa can be any naturally occurring amino acid
MICSCADIYMPTDSNHTENIQDLDQLNRKLNQIDDEVAIFHHMQAKVHKYIHERDPYFISSDATRSCIHQALXVGNIDYAFTPQXVHHHFQACXTINKVTILTDKFFIQ

SEQ ID NO: 6230 - protein, 186 aa, Zea mays
  misc_feature (112)..(112): Xaa can be any naturally occurring amino acid
MTASQSSMSGGGEPGVRTVVWFRRDLRVEDNPALAAAARTAGEVVPAYVWSPEEDGPYYPGRVSRWWLSQSLKHLDASLRRLGAWRLVTRRSSDAVVALIDLVRSTGATHLXFFNRLYDPLSLVRDHRVKEQLSAEGITVQSFNADLLYEPWEVLDDDGFPFTMFAPFWNRCLCMPDPAAPLLPPK

SEQ ID NO: 6231 - protein, 580 aa, Glycine max
  misc_feature (249)..(249): Xaa can be any naturally occurring amino acid
FGSSDLTLGELLKYKSEEGVRVLLLVWDDKTSHDKVFLKTAGVMGTHDEETRKFFKHSSVMCVLSPRYASNKMSFLKQQVVGTVFTHHQKCVIVDTQAAGNNRKITAFIGGLDLCDGRYDTPEHRLFRNLDDVFDGDFHNPTFSAGTRVPRQPWHDLHCRIDGPAAYDVLINFEQRWRKATKWKEFAILFKKSSQWHDDALIRIERISWILSPSGAATLKDKSDDYTVPEDDPLVWVSSEDDPENWHVXGSLKGFPKRVDVALSQNLICAKNLVIDKSIQTAYIQAIRSAQHFIYIENQYFIGSSYAWPAYKDAGADNLIPMELALKIASKIRAKERFAVYIVLPMWPEGDPKTGAMQEILFWQGQTMQMMYDAVARELKSMQLTDVHPQDYLNFYCLGNREHFNEDSSSTNGAQVSTAYKYRRFMIYVHAKGMIVDDEYVIIGSANINQRSMAGTKDTEIAMGAYQPHYTWSAKKRHPHGQIYGYRMSLWGEHLGMLDETFEEPERLECVHKVNKIADNNWKLFASEDFSLLQGHLLKYPVQVDSDGKIRSLPDCENFPDAGGKILGAHSTTIPDILTT

SEQ ID NO: 6232 - protein, 115 aa, Malus x domestica
MASSAVTKLALVVALCMAVSVAHAITCGQVTSSLAPCIGYVRSGGAVPPACCNGIRTINGLARTTADRQTACNCLKNLAGSISGVNPNNAAGLPGKCGVNVPYKISTSTNCATVK

SEQ ID NO: 6233 - protein, 436 aa, Glycine max
MSPAAGVSVPLLGDSKGTPPPASVPGAVFNVATSIVGAGIMSIPAIMKVLGVVPAFAMILVVAVLAELSVDFLMRFTHSGETTTYAGVMREAFGSGGALAAQVCVIITNVGGLILYLIIIGDVLSGKQNGGEVHLGILQQWFGIHWWNSREFALLFTLVFVMLPLVLYKRVESLKYSSAVSTLLAVAFVGICCGLAITALVQGKTQTPRLFPRLDYQTSFFDLFTAVPVVVTAFTFHFNVHPIGFELAKASQMTTAVRLALLLCAVIYLAIGLFGYMLFGDSTQSDILINFDQNAGSAVGSLLNSLVRVSYALHIMLVFPLLNFSLRTNIDEVLFPKKPMLATDNKRFMILTLVLLVFSYLAAIAIPDIWYFFQFLGSSSAVCLAFIFPGSIVLRDVKGISTRRDKIIALIMIILAVVTSVLAISTNIYNAFSSKS

SEQ ID NO: 6234 - protein, 460 aa, Kurthia sp. 538-KA26
MNSHDLEKWDKEYVWHPFTQMKTYRESKPLIIERGEGSYLFDIEGNRYLDGYASLWVNVHGHNEPELNNALIEQVEKVAHSTLLGSANVPSILLAKKLAEITPGHLSKVFYSDTGSAAVEISLKVAYQYWKNIDPVKYQHKNKFVSLNEAYHGDTVGAVSVGGMDLFHRIFKPLLFERIPTPSPYTYRMAKHGDQEAVKNYCIDELEKLLQDQAEEIAGLIIEPLVQGAAGIITHPPGFLKAVEQLCKKYNILLICDEVAVGFGRTGTLFACEQEDVVPDIMCIGKGITGGYMPLAATIMNEQIFNSFLGEPDEHKTFYHGHTYTGNQLACALALKNIELIERRDLVKDIQKKSKQLSEKLQSLYELPIVGDIRQRGLMIGIEIVKDRQTKEPFTIQENIVSSIIQNARENGLIIRELGPVITMMPILSMSEKELNTMVETVYRSIQDVSVHNGLIPAAN

SEQ ID NO: 6235 - protein, 117 aa, Glycine max
  misc_feature (88)..(88): Xaa can be any naturally occurring amino acid
  misc_feature (110)..(110): Xaa can be any naturally occurring amino acid
VFCHLLFAQQYHDMYQREERMRMSREERARTPYVDYLRPIIADGDTGFGGPTTTVKLCTLYEERGAGGIHIEDQSSATKKCGHIYPKXLDAISEHINRLDAGRLQFDGMXAETVLAA

SEQ ID NO: 6236 - protein, 166 aa, Zea mays
MADDGGSHEGSGGGGGVREQDRFLPIANISRIMKKAVPANGKIAKDAKETLQECVSEFISFVTSEASDKCQKEKRKTINGDDLLWAMATLGFEEYVEPLKIYLQKYKEMEGDSKLSTKAGEGSVKKDAISPHGGTSSSSNQLVQHGVYNQGMGYMQPQVIYRTVIC

SEQ ID NO: 6237 - protein, 535 aa, Glycine max
  misc_feature (204)..(204): Xaa can be any naturally occurring amino acid
  misc_feature (206)..(206): Xaa can be any naturally occurring amino acid
MGNCCATPSTDETANKKGKKGKKENPFAIDYGFNAAAAANGSKLTVLKSPTGREIEARYELGRELGRGEFGITYLCTDKETGEELACKSISKKKLRTAIDIDDVRREVEIMRHLPQHPNIVTLKDTYEDDNAVHLVMELCEGGELFDRIVARGHYTERAAAAVTKTIVEVVQMCHKQGVMHRDLKPENFLFANKKETAALKAIXFXLSVFFKPRERFNEIVGSPYYMAPEVLKRNYGPEVDIWSAGVILYILLCGVPPFWAETEQGVAQAIIRSVVDFKRDPWPKVSDNAKDLVKKMLDPDPRRRLTAQEVLDHPWLQNAKKAPNVSLGETVRARLKQFSVMNKLKKRALRVIAEHLTVEEAAGLKEGFQLMDTNNRGKINIDELRVGLHKLGHQVPESDVQALMEAGDVDGDGHLDYGEFVAISVHLRKMGNDEHLRKAFQFFDQNKSEYIEIEELRSALSDDLDTNSEEVISAIMHDVDTDKDGRISYDEFATMMKAGTDWRKASRQYSRERFASLSLTLMRDGSLHLNNEKQ

SEQ ID NO: 6238 - protein, 316 aa, Triticum aestivum
  misc_feature (43)..(43): Xaa can be any naturally occurring amino acid
  misc_feature (63)..(63): Xaa can be any naturally occurring amino acid
  misc_feature (68)..(68): Xaa can be any naturally occurring amino acid
  misc_feature (89)..(89): Xaa can be any naturally occurring amino acid
  misc_feature (99)..(99): Xaa can be any naturally occurring amino acid
  misc_feature (109)..(109): Xaa can be any naturally occurring amino acid
  misc_feature (116)..(116): Xaa can be any naturally occurring amino acid
  misc_feature (124)..(124): Xaa can be any naturally occurring amino acid
  misc_feature (152)..(152): Xaa can be any naturally occurring amino acid
HAHCPQQYIRFAPQSTARALSVFNDDIQGTASVVLAGPLGGLXRMIGGGLVDQTYLFLGAGEXAGTGXIAELIALGDVENTLNLPVDDXHKKIWLVDSXKGLLVESRKXSLQHFKXPFAHEHEXLKTLLEAVQSIKPTVLIGASGVGKTFTXEVIEAMASFNEKPVIFSLSNPTSHSECTAEEAYTWSKGTAVFASGSPFDPVEYEGKTFVPGQSNNAYVFPGFGLGVVISGAIRVHDDMLLAASEALAEEATQENFDKGLIFPPFTNIRKISASIAAKVAAKAYDLGLASRLPRPDDLVKYAESCMYTPLYRSYR

SEQ ID NO: 6239 - protein, 115 aa, Malus x domestica
MASSAVTKLALVVALCMAVSVAHAITCGQVTSSLAPCIGYVRNGGAVPPACCNGIRTINSLARTTADRQTACNCLKNLAGSISGVNPNNAAGLPGKCGVNVPYKISTSTNCATVK

SEQ ID NO: 6240 - protein, 151 aa, Picea glauca
MAMDPLLSTVQQLLGVPDDLERILHAPTRSYTRDTEATASTPVDVKEYPNSYVFIVDMPGLKSNDIKVQVEDENVLNISGERKRNEKEEGEVKYIRMERRVAKFMRKFSLPADCNLEAISAACQDGVLTVTVPKLPPPEPKKPKTIAVKIG

SEQ ID NO: 6241 - protein, 312 aa, Medicago sativa
MGSVEIPTKVLTNTSSQLKMPVVGMGSAPDFTCKKDTKDAIIEAIKQGYRHFDTAAAYGSEQALGEALKEAIELGLVTRDELFVTSKLWVTENHPHLVIPALQKSLKTLQLDYLDLYLIHWPLSSQPGKFSFPIDVADLLPFDVKGVWESMEESLKLGLTKAIGVSNFSVKKLENLLSVATVLPAVNQVEMNLAWQQKKLREFCNAHGIVLTAFSPLRKGASRGPNEVMENDMLKEIADAHGKSVAQISLRWLYEQGVTFVPKSYDKERMNQNLRIFDWSLTKEDHEKIAQIKQNRLIPGPTKPGLNDLYDD

SEQ ID NO: 6242 - protein, 179 aa, Chrysanthemum x morifolium
MASISSSAVATVNRTTSAQASMVAPFTGLKSNVAFPVTKKSNDFSSLPSNGGRVQCMKVWPPLGLKKYETLSYLPPLTETQLAKEVEYLLRNKWVPCLEFELEHGFPYRENNRSPGYYDGRYWTMWKLPMFGCNDASQVLKELNECKKEYPQSWVRIIGFDNVRQVQCISFIAHKPDGY

SEQ ID NO: 6243 - protein, 312 aa, Medicago sativa
MDSVEIPTKVLTNTSSQLKMPVVGMGSAPDFTCKKDTKDAIIEAIKQGYRHFDTAAAYGSEQALGEALKEAIELGLVTREELFVTSKLWVTENHPHLVIPALQKSLKTLQLDYLDLYLIHWPLSSQPGKFSFPIDVADLLPFDVKGVWESMEESLKLGLTKAIGVSNFSVKKLENLLSVATVLPAVNQVEMNLAWQQKKLREFCNANGIVLTAFSPLRKGASRGPNEVMENDMLKEIADAHGKSVAQISLRWLYEQGVTFVPKSYDKERMNQNLCIFDWSLTKEDHEKIDQIKQNRLIPGPTKPGLNDLYDD

SEQ ID NO: 6244 - protein, 318 aa, Bartonella sp.
ITYIDGDKGVLLYRGYPIDQLAEKGDFLESCYLLLYGELPTKQEKNDFDRCIMQHTMVHEQFARFFHGFRRDSHPMAVMVACLGAMSAFYHDSIDITDPQQRMIASVRLISKVPTLAAMAYKYSIGQAFVYPRNDLSYAANFLRMCFSVPCEEYKTNPVLTRAMDRIFILHADHEQNASTSTVRLAGSSGANPFACIAAGVACLWGPAHGGANEACLKMLQEIGSVKRIPEFIARAKDRNDPFRLMGFGHRVYKNYDPRAKIMQKTCHEVLKELNIQDDPLLDIAIELEKIALNDEYFVEKKLYPNVDFYSGITLKAL

SEQ ID NO: 6245 - protein, 480 aa, Saccharomyces cerevisiae
MSELGEYSKLENKELRTEFELTNFPFPGTTDNDSDDGSQGQNSLNIITPDMDDTLVNDVLRENDKKSSMRMAFMNLANSILGAGIITQPFAIKNAGILGGLLSYVALGFIVDWTLRLIVINLTLAGKRTYQGTVEHVMGKKGKLLILFTNGLFAFGGCIGYCIIIGDTIPHVLRAIFSQNDGNVHFWLRRNVIIVMVTTFISFPLSMKRNIEALSKASFLAVISMIIIVLTVVIRGPMLPYDWKGHSLKLSDFFMKATIFRSLSVISFALVCHHNTSFIFFSMRNRSVAKFTRLTHISIIISVICCALMGYSGFAVFKEKTKGNVLNSFPGTDTAINIARLCFGFNMLTTFPMEIFVLRDVVGNLLHECNLIKNYDEHTQLSGKQHVVITSSLVFITMGISLTTCNLGALFELIGATTASTMAYILPPYTNLLLTSKKKSWKERLPFYLCICFGFMIMIISSTQTIIDAVNGSDGQHCQI

SEQ ID NO: 6246 - protein, 128 aa, Triticum aestivum
MAPTVMASSATSVAPFQGLKSTAGLPVSRRSNGASLGSVSNGGRIRCMQVWPIEGIKKFETLSYLPPLSTEALLKQVDYLIRSKWVPCLEFSKVGFIFREHNASPGYYDGRYWTMWKLPMFGCTDATQ

SEQ ID NO: 6247 - protein, 494 aa, Rubrobacter xylanophilus DSM 9941
MNVEREGRVETRMIERLFVGGEWVGEASTGRTFEVENPASGRVIAVLPDGGGGEMRRAVEAAVAAQPGWEEATAYERASVLWRAAGLMRERAEHLARVMTLEQGKPLAESRGEISYAASFVEWFAEEGKRVYGESVPSSFRDKRILVLKRPVGVAAAITPWNFPAAMITRKLAPALAAGCAMVVKPSELTPLSALELAKIFEEAGLPRGLLSVVVGTDPGDITAPLMEDGRVRKLSFTGSTEVGKHLMRQAAKTMKRLSLELGGHAPFIVFEDADLEAAVEGALVSKMRNMGQTCVCANRIFVQKSVLEPFAERLVERMGRMKVGDGLQEGVSVGPLIEERALRKVERHVEDARQKGARVLLGGSRLSSGGGYFFAPTVLCGADESMLVFREETFGPVAALASFESEQEVVERANATPYGLAGYYYTRDVGRVMRLAEKLRYGILGANDGLPSTAQAPFGGLKESGFGREGGHWGIEEYLDVKYLSLGGLGSSS

SEQ ID NO: 6248 - protein, 140 aa, Brassica napus
KPGDKFKDLVGSAYYVAPEVLKRNYGPEADIWSAGVILFILISGVPPFWGENETGIFDAILKGELDFSADPWPTVSAGAKDLVKKMLKYDPKDRLTASEVLNHPWIKEDGEASDKPLDNAVLSRMKQFRAMNKLKKMALN

SEQ ID NO: 6249 - protein, 505 aa, Glycine max
MASLSCSANDLAPLFNDTAAANYLCAQFDSISRKLNVTTYAVDNTYLLFSAYLVFAMQLGFAMLCAGSVRAKNTMNIMLTNVLDAAAGGLSYYLFGFAFAFGGPSNGFIGRHFFGLRKFPKDSPPSGDYSFFLYHWAFAIAAAGITSGSIAERTQFVAYLIYSSFLTGFVYPIVSHWFWSSDGWASATRSHGNVLFGSGVIDFAGSGVVHMVGGIAGLWGALIEGPRIGRFDRSGRSVALRGHSASLVVLGTFLLWFGWYGFNPGSFLTIAKGYESGGYYGQWSAIGRTAVTTTLAGSTAALTTLFSKRLLAGHWNVIDVCNGLLGGFAAITSGCAVVEPWAAIVCGFVAAWVLIGLNKLAAKVEYDDPLEAAQLHGGCGAWGVFFTGLFAKKVYVEEIYGVGRPFGALMGGGGRLLAAQVIQILVVCGWVTATMAPLFYGLHKMKLLRISRDDETAGMDLTRHGGFAYAYHDDEDGSSRGVGFMLRRIEPAASTTPSPPAAPQV

SEQ ID NO: 6250 - protein, 161 aa, Antirrhinum majus
LKTKKITLRSSDGEVFEVEESLALESQTIKHMIEDDCADNVIPLPNVTGKILSKVIEYCKRHVDAAAAKADDKLASTGTSDDELKAFDADFVKVDQATLFDLILAANYLNIKTLLDLTCQTVADMIKGKTPEEIRKTFNIKNDFTPEEEEEVRRENQWAFE

SEQ ID NO: 6251 - protein, 384 aa, Synechocystis sp. PCC 6803
MGTKRIGILTSGGDCPGLNAVIRAVVKASALKGWEVYGIPYGTDGFVEVAHGKYQAEDLLLTKHGYALPGMLKGLDVLQFLSGSVLGSLSKGHPEQPAIAEAILKGYAILDLEALIVIGGDGSLDIIYDLAQKGNWHIIAIPKTIDNDVPFTDLAVGFSTAVDIVTQALYDLTFTAASHERIIIVQVMGRDAGHLTLHAGIAGGADIILIPEITPCLTSEIIRNCCYQLMNLRKSGRHFALIVISEGVHDQNNKKNKHIADYLAEEISETSQHLCDIKDPAFCDLISLDIRATTLGHLQRSGTPLSFDRLLATVFGIRAVELIEQEIYDQVVIWRSGKVEHADLKPIISIIKECHQENRCPFPVDRDGFMVKTAKSLGIYLGED

SEQ ID NO: 6252 - protein, 177 aa, Glycine max
  misc_feature (110)..(110): Xaa can be any naturally occurring amino acid
MSGWVSGKVKWFNDQKGFGFITPDDGSEELFVHQSQIKSDGFRSLAEGESVEFAIESESDGRAKAVDVTGPDGASVQGTRRGGDGGRSYGGGQGGGGGGYGGGGACYNCXESGHLAWDCSQGGGGDRYGGGGGGGGRYGGGGGGRYGGGGGGGGGGGSCYSCGESGHFARDCPSSAR

SEQ ID NO: 6253 - protein, 169 aa, Bacillus anthracis str. A2012
MIVKRGAKTMTVYDFSAKTITGEEKSLKDYEGKVLLIVNVASKCGFTPQYKGLQEVYDKYKEQGLEILGFPCNQFGGQEPGTEADITSFCELNYGVNFPMFAKIDVKGDKAHPLYTYMTEQAPGLLGMKAVKWNFTKFLIGKDGKVVGRFAPQTKPVDLEVEIEKVLGE

SEQ ID NO: 6254 - protein, 293 aa, Saccharomyces cerevisiae
TPLVHVASVEKGRSYEDFQKVYNAIALKLREDDEYDNYIGYGPVLVRLAFHISGTWDKHDNTGGSYGGTYRFKKEFNDPSNAGLQNGFKFLEPIHKEFPWISSGDLFSLGGVTAVQEMQGPKIPWRCGRVDTPEDTTPDNGRLPDADKDAGYVRTFFQRLNMNDREVVALMGAHALGKTHLKNSGYEGPWGAANNVFTNEFYLNLLNEDWKLEKNDANNEQWDSKSGYMMLPTDYSLIQDPKYLSIVKEYANDQDKFFKDFSKAFEKLLENGITFPKDAPSPFIFKTLEEQGL

SEQ ID NO: 6255 - protein, 94 aa, Glycine max
MASFARGAASLTRIGLSSSKTPLQLIHRRGLADHHGPPKVACWKDPMSPSKWKEEHFVIVSLTGWGLLIYGGFKLATGGKGKKEEVLAKASTEA

SEQ ID NO: 6256 - protein, 384 aa, Listeria innocua Clip11262
MKHVFPTYNRFPVDIVKGNGTVVKDATGKTYLDFTSGIAVCNLGHCPENVTEAIQSQLANIWHTSNLYECALQDSVAELITDGTDKLVFFCNSGTEANEAALKLARKYTGKEKIITFEKSFHGRTFGSMSATGQAKIHQGFGRLVPGFTYVPYNDIESFKTELDENTAAVMLEVIQGEGGVIPGNAAWLMEVQMLCKKAGALLIIDEVQTGLGRTGTLFGFQQTFLDPDIFTLAKGLGNGLPIGAMVGKEHLSSAFGPGSHGSTFGGNKLALAAAKEILLTMKQTGFLEEVNAKAAYFRNLLEEHFEQLENVVAIRGEGFLIGIELGSSAAPVVTELRDKGLLILTAGPNILRILPPLTVSYAEIDQAISILKSVLEKQLIGSE

SEQ ID NO: 6257 - protein, 68 aa, Brassica napus
  misc_feature (9)..(9): Xaa can be any naturally occurring amino acid
  misc_feature (37)..(37): Xaa can be any naturally occurring amino acid
  misc_feature (49)..(49): Xaa can be any naturally occurring amino acid
  misc_feature (52)..(52): Xaa can be any naturally occurring amino acid
  misc_feature (56)..(56): Xaa can be any naturally occurring amino acid
  misc_feature (61)..(63): Xaa can be any naturally occurring amino acid
  misc_feature (65)..(67): Xaa can be any naturally occurring amino acid
MAYSMLSSXAVVTSPAQATMVAPFTGLKSSSAFPVTXARPNNDITSIVXNGXKRLXACRWXXXNXXXN

SEQ ID NO: 6258 - protein, 147 aa, Funaria hygrometrica
MDFPLFQILSFPDELEKSLNPQSQKYVRDTKAMVSTAVDVKELPDAYIFVADMPGLKSADMKVQLENDNVLVIGGTRKREEPDPKVKYIRMERNSGSFMRKFTLPQNSNLDKIAASCVDGILTVTVPKIPPPEPAKPRTIEVTMGNQ

SEQ ID NO: 6259 - protein, 496 aa, Triticum aestivum
  misc_feature (169)..(169): Xaa can be any naturally occurring amino acid
MVLSHAASAGSSDDSVHSTFASRYVRASLPRFRMPENSIPKEAAYQIINDELMLDGNPRLNLASFVTTWMEPECNKLMMDSINKNYVDMDEYPVTTELQNRCVNMIAHLFNAPLGETETAVGVGTVGSSEAIMLAGLAFKRRWQNKMKAAGKPCDKPNIVTGANVQVCXWEKFARYFEVELKEVKLSEGYYVMDPEKAVEMVDENTICVAAILGSTLNGEFEDVKMLNDLLVKKNEETGWDTPIHVDAASGGFIAPFLYPELEWDFRLPLVKSINVSGHKYGLVYAGIGWCIWRSKEDLPDELIFHINYLGADQPTFTLNFSKGSSQVIAQYYQLIRLGFEGYRNIMDNCQENAMVLKEGLERTGRFNIVSKDQGVPLVAFSLKDSSRHDEFEISEFLRRFGWIVPAYTMPPDAQHVTVLRVVIREDFSRTFAERLVIDIEKVLHELDALPSRSSGPALQHPNGDTVSEKDLARQREVVSVWKRAVAARKKTQGVC

SEQ ID NO: 6260 - protein, 262 aa, Glycine max
  misc_feature (238)..(238): Xaa can be any naturally occurring amino acid
  misc_feature (259)..(259): Xaa can be any naturally occurring amino acid
KALNTGTAFSMTERDRLDLRGLLPPNVMSPDLQIERFMVDLKRLEVQARDGPSDPNALAKWRILNRLHDRNETMYYKVLIAKIEEYAPIVYTPTVGLVCQNYSGLFRRPRGMYFSAEDRGEMMSMVYNWPAEQVDMIVVTDGSRILGLGDLGVHGIGIAIGKLDLYVAAAGINPQRVLPVMIDVGTNNEKLLEDPLYLGLQQHRLDGDDYLAVVDEFMEAVFTRWPNVIVQFEDFQSXWAFKLLPAYRNTYRMFNDDVXGTS

SEQ ID NO: 6261 - protein, 349 aa, Flaveria brownii
EFYIGLRQRRATGQEYAELMNEFMSAVKQNYGEKVLIQFEDFANHNAFDLLEKYRTTHLVFNDDIQGTASVVLAGLISALKLVGGSLADHKFLFLGAGEAGTGIAELIALEISKQTNIPLEESRKKVWLVDSKGLIVRSRLDSLQHFKKPWAHDHEPVDKFLDAIKTIRPTVLIGSSGTGQTFTKEVVETMSSLNEKPIILALSNPTSQSECTAEQAYTWSEGRAIFASGSPFGPVEYNGKLYMSGQANNAYIFPGFGLGLIISGAIRVHDDMLLAASEALAEQVTEEHFDNGLIYPPFTNIRKISAHIAAKVAAKAYELGLASRLPQPENLVAYAESCMYSPKYRSYR

SEQ ID NO: 6262 - protein, 177 aa, Zea mays
  misc_feature (23)..(23): Xaa can be any naturally occurring amino acid
  misc_feature (30)..(30): Xaa can be any naturally occurring amino acid
  misc_feature (58)..(58): Xaa can be any naturally occurring amino acid
  misc_feature (76)..(76): Xaa can be any naturally occurring amino acid
  misc_feature (146)..(146): Xaa can be any naturally occurring amino acid
AVLDCSDCLLAKMARILACSRKXKHRGPDXCVTVHSTRCNFLMPQRLAAVSPLSVDRXLFNVDRTDVVPAIGEIYXHKNGRKHITGTHNFSTSSDCEVIMPLYDKYGENFGYMLDGELAFVLYYTRDRTYVASRDAIGVNPLYIGXSSDGSDWIASEMKALNEDCVRFEIFPSSHLY

SEQ ID NO: 6263 - protein, 165 aa, Antirrhinum majus
SSSDNASKKITLRSSDGEVFEVDEAIALLSQTIKHMIEDDCADNVIPLPNVTGKILSKVIEYCKRHVDADAAKSEEKVAAAAAGDDDLKAFDADFVKVDQATLFDLILAANYLNIKTLLDLTCQTVADMIKGKTPEEIRKTFNIKNDFTPEEEEEVRRENQWAFE

SEQ ID NO: 6264 - protein, 486 aa, Pseudomonas putida
MKEIKHFINGAFVDSASGRTFEDINPVNGQVIGRVHEAGRAEVDAAVRAARAALKGPWGKMTVAERAEILHRVADGVTARFDEFLEAECLDTGKPKSLASHIDIPRGAANFKVFADLIKNVPTEAFEMATPDGAGALNYGVRRPKGVIGVISPWNLPLLLMTWKVGPALACGNCVVVKPSEETPLTATLLGEVMQAAGVPAGVYNVVHGFGGDSAGAFLTEHPDVDAYTFTGETGTGETIMRAAAKGVRQGSLELGGKNAGIVFADCDLDKAIEGTLRSAFANCGQVCLGTERVYVERPIFDAFVARLKAGAEALKIGEPNDPEANFGPLISHKHREKVLSYYQQAVDDGATVVTGGGVPEMPAHLAGGAWVQPTIWTGLTDDSAVVTEEIFGPCCHIRPFDSEEEAIELANSLPYGLASAIWTENASRAHRVAGQIEAGIVWVNSWFLRDLRTAFGGSKQSGIGREGGVHSLEFYTELKNICVKL

SEQ ID NO: 6265 - protein, 119 aa, Antirrhinum majus
TIIPVPNVTSKILAKVIEYCKRHVEAAAKTDADDGQGDRDALKVFDAEFVKVDQGTLFDLILAANYLNIKSLLDLTCQTVADMIKGKTPEEIRKTFNIKNDFTPDEEEEVRRENAWAFE

SEQ ID NO: 6266 - protein, 387 aa, Ustilago maydis 521
MNALRQLNRAAAPALKQATKSGLVLPNVPQLLRPATTLAAGTPKISKGPTKYGGVYTVTLIPGDGVGVEITDSVKEIFEVMNVPVEWEQFNVSGETHGSESLFKEAMESLKRNKVGLKGILFTPIETGSHNSWNVAMRQQLDIYASLVICKSLPGYPTRHKDVDFAIIRENTEGEYSGLEHSSYPGVVESLKVSTRAKAERISRFAFDFALKNGRKRVTCVHKANIMKLGDGLFLNTFRRVAEEYKSSGIESNDMIVDNTSMQLVSRPQQFDVMVMPNLYGNIVSNIGAALVGGPGTVPGCNIGREFALYEPGCRHVAKDIMGTNAANPAAMILSATMMLRHLGLDTQANQIAESVYKVIADGKVRTADMGGKSKTHEFTQAVLSNL

SEQ ID NO: 6267 - protein, 140 aa, Magnetospirillum magnetotacticum MS-1
MLYPTYLRRSDPFALMRSMMRDLDRGFWPPARAAFPAVNVWQGPEAVGVTAELPGIEPGDIEISVKDNVLTLSGERKAPEVLDGARWHRNERSFGRFSRTIRLPFAASDDKVEARMTNGVLRIVISRPEEEKPKKIEGIL

SEQ ID NO: 6268 - protein, 319 aa, Bartonella vinsonii subsp. vinsonii
DGNKGILLYRGYPIEQLAEKGDFLESCYLLLYGELPTQQEKSDFDRCIMQHTMVHEQFARFFHGFRRDSHPMAVMVACLGAMSAFYHDSIDITDPQQRMIASVRLISKVPTLAAMAYKYSIGQAFVYPRNDLSYAANFLRMCFSVPCEEYKTNPVLTRAMDRIFILHADHEQNASTSTVRLAGSSGANPFACIAAGVACLWGPAHGGANEACLKMLQEIGSVKRIPEFIARAKDKNDPFRLMGFGHRVYKNYDPRAKIMQKTCHEVLKELNIQDDPLLDIAIELEKIALNDEYFVEKKLYPNVDFYSGITLKALGFPTE

SEQ ID NO: 6269 - protein, 191 aa, Chlorobium tepidum TLS
MMSRSIQNPLAALVALLMLMPVMLRAGQKGEAMTFELTSTAFRNMGAIPALYTCEGKNISPPLTWKNIPKGTKSLVLIVDDPDAPDPAAPKFTWVHWVLYNIPPGKTGFAEGAGNHPAETEMQEGFNSWNRGGYGGPCPPIGTHRYFFKLYALDTVIDDLLSPLKADVEAAMQGHILGETVLIGTYKKRGK

SEQ ID NO: 6270 - protein, 365 aa, Vanilla planifolia
MATWVEHQQQQNGSKDVDEEACMYAMQLSSMVVLPMTLRVAVELGILEQIQAGGPDSYLTAEDLAARLGNSNPLAPVMIERILRLLTSYSILNFTDTVDGEGRTVRSYGAAHVCKYLTPNQDGVSMAPLVLMNTDKVLMESWYHMKDAVTNGGIPFNLAYGMTAFEYHGKDLRFNKVFNEGMKNNSIIITKKILERYKRFEDVNVLIDVGGGIGGTISMITAKYPHIHGINFDLPHVVSEAPPFQGVEHVGGNMFESVPIGDAIFIKWILHDWSDEHCLKLLRNCAKSLPDKGKVIVVECILPDAPLVTPEAEGVFHLDMIMLAHNPGGKERTKKEFKELAMLSGFSNFKALFSYANVWVMEFNK

SEQ ID NO: 6271 - protein, 348 aa, Glycine max
VSYGVEFEGAGASKESKVNGDGGRDVNLGDSNYSFGEAEALSDEMEEESRYVAEILRIRDVLLNPEDESEAVLFDSLRRLQMMELTEDCLKATEIGKAVNSATSAPPHTYASTLHLLNGWKEMVDEWVKATTTTAITGSEEGTPDSVNPSVVDDDEEEGLPSPPLDEGAFFVTQAGSMELSQFFDGMDDDGNPRPTGPFSKNHENGRKPAFDSHSQQQAKENKAAVMPVRPNKPVTADSGPGRPPKSNVQRKSNMEPKMQQKMENNSITRRPPTAQLDKSKRSDDDAVQVKLEATKRKLQESYQQAEKAKRQRTIQVMEINDLPKQGLHRNTHFKPGYHSRHWANGRR

SEQ ID NO: 6272 - protein, 349 aa, Bradyrhizobium japonicum USDA 110
MTSTALAATLFGPEDLRMIEHPLDKLASGMVRIRFGAGGICGSDMHYFRHARTGDFVVKSPLVLGHEISGEVVEISGSAANLKVGDRVAVNPSRWCGHCVACREGRPNLCENIYFMGSASKTPHMQGGFANYFDAIPAQCVKIPDHVSYQAAALAEPLAVCLHAVARAGNIEGKRGIIFGAGPIGLLTMLAAHRAGMADITVADIAPAPLAFASRLGASHVENVSGGEEGLKAQAAARPYDVAFEVSGTAAGLASAIGIVRRGGVVVQIGNLPGGQIPTPSNAVMAKEIDLRGSFRFGFEFMTAVELISAGSVDVLSLVTAERPLSTAPDALRLALDRSQSVKVVLTAN

SEQ ID NO: 6273 - protein, 457 aa, Zea mays
MSHYHSADFEEMEDEYDMNEPVDDMEGEDEYQELVIRDSDAEDEDDADQLHKLSDTSAADARSGKDIQGIPWETIEVTRETYRQARLEQYKNYENIPNSGVAAMMVQFVNQPKKACKSTEKGRTYYEFRRNTRSVKSTISHFQLRNLVWATSKHDVYLLLHYSVLHWSALNGVDTEIMDVHGHVAPSEKHPGSLLEGFLHTQISTMAVKDNLLVAGGFQGELICKHLDREGISFCCRTTYDDNAITNALEIFNTSSGALHFIASNNDCGVREYDMERYQLFKHFRFDWPVNHTSLSPDGKLVIIVGDDTDALLIDANSGKTIHSMKGHLDFSFASAWSPDGLTFATGNQDKTCRIWDARNLTESVHVLRGNVGAIRSIRFTSDGHFLSMAEAADFVHIFDIKSDYNKRQELDFFGEVSGMSFSPDTDTLYVGISDRTYGSLLQFGRLYNYSYLDSLL

SEQ ID NO: 6274 - protein, 405 aa, Halobacterium sp. NRC-1
MGPMETYVVTEPALVERLLVSDAAEFRKPEFQADAIDDLLGDGLLLSEGESWREQRGRANPAFSMARVAGFDADIAAHAADRVDDWPVGDTVDVEAAMTHITLDVILDVMLGVSLPEARVDAIGDALEPVGARFEPDPVRFAVPEWLPMPDDREYAAAVATLDDLVDDIVAAREGTASGGDGDDPMDLLSVLLRARDRGEQSLDRLRDEVMTTLLAGHDTTALTLTYTWFLLSEHPDVEARLHAELDGALDDGAQPTVAQLQDLDYLEWVLQESMRLYPPVYNVFRTPIEPVELAGSEVPAGAPIMLPQWAIHRSPDHWDDPEAFDPERWRPERRADRPRFAYFPFGGGPRHCIGKQLALLEAKLIVATVASDYRLRYEGDTPLSFVPSLTIHPEQEMRMRVEPR

SEQ ID NO: 6275 - protein, 492 aa, Oryza sativa (japonica cultivar-group)
MVTKNVYSSLPDPPVSLHAPLAFAAAAWPPRDGVDRISALPVDILRDILSRLPARDAARTSALSTRWRRLWRSAPLVLADAHLKHTGRAPGPAAHPGPFRSVHITCTPMDAHRSELALWLQLLAARGVQELVFVNRASKFDTDVPFPATLFRCSSLTRLYIGFLRFPAVATVPRAASFPHLRELGLCSLIMGQRELAFLLDRCPVLENFEIVCHRELLRLRVASHSLRCVEVCMSIVEEITVEHAARLERLMFWETCGTGGVIDNVGGIIDMRTRVKIGHAPNLRVLGFLVPVMHELSIGNTDIRAGTKPTRRTMVPSVQMLGIQLKLFDNNQVRMLPSFLRCFPNVETLYIQSETTLSGNTTGKLNPKLLQETSPIECLQKHIKKVIMREFRMQRSELDFLKFIAGRGQVLEKVVVVLTHTCSSSADRLRASLSTFMASTRLANEDCKLIVYESPFPIDATAWCFQGAFNMSKDPFDVSKCFKDGASCRAD

SEQ ID NO: 6276 - protein, 189 aa, Zea mays
MSLCTIARRLCLSKPSSGGRLSAIWAHLYSTEVAKDMGAKKYKYPDVYDPYGPMPPPSEKVVELADRIAALPPEEIKQIAPALLLRLNQEPPQAVSGQGFGAQDGSGAGSGKAEKKAEKTVFDVRLEKFDAAAKIKIIKEIRTFTDLGLKEAKELVEKAPVVLKQSLTKEEAEAIIAKIKAAGGVAVME

SEQ ID NO: 6277 - protein, 357 aa, Thermococcus kodakaraensis
MKARKAWRVVREVVDEADIVVEVVDARDPIGTRNRKLERLILEEGKPLLIVMNKADLVPKEWAEEYKRKSEVPVVFISARERKGTGILRKEIKKLAKPLLDEKEKVKVALIGYPNVGKSTIINTLKGKRAVGTAPIPGYTKGKQLIRLSKKIWLLDSPGVIPIDDFDELVIRGGFPADKIEEPVKPAVKLIGRILETRKEAITEKFGITEFESEEDILRKIGERRGLIKAGGEVDIEETARWFLREWQTGRFTLFGSEEEGKRDFIWDFEDVLNGVEKDLLLDPRRILWKYGDELREKLDGQKRAGVREIEGITVGIATGFKKCDSAVKFLEELTGKHALASECFGKKWKGVVAVLD

SEQ ID NO: 6278 - protein, 402 aa, Bacillus cereus ATCC 14579
MLSAKTIEIVKSTVPLLQEKGVEITTRFYQILFSEHPELLNIFNHTNQKKGRQQQALANAVYAAATYIDNLEAIIPVVKQIGHKHRSLGIKAEHYPIVGTCLLRAIKEVAGAPDEVLNAWGEAYGVIADAFISIEAEMYEEAAHKEGGWKDFRNFVIVKKVKESDVITSFYLKPEDGGKVSSFIPGQYVTIQINIEGETYTHNRQYSLSDAPGKEYYRISVKKEKGVDTPDGKVSNYLHGHVKEGDVLPVSAPAGDFVLNMDSTLPVVLISGGVGITPMMSMLNTLIEQDSKRNVYFVHAAINSNTHAMKEHVKAVENEYEQVKAYTCYSAPTEKDLEMKNFDKEGFIESEWLKTIIPTTEAEFYFCGPVAFMKHINAALTDLSVKQEHIHYEFFGPATSLQ

SEQ ID NO: 6279 - protein, 482 aa, Arabidopsis thaliana
MASRTTPSRSTPSRSTPSGSSSGGRTRVGKYELGRTLGEGTFAKVKFARNVENGDNVAIKVIDKEKVLKNKMIAQIKREISTMKLIKHPNVIRMFEVMASKTKIYFVLEFVTGGELFDKISSNGRLKEDEARKYFQQLINAVDYCHSRGVYHRDLKPENLLLDANGALKVSDFGLSALPQQVREDGLLHTTCGTPNYVAPEVINNKGYDGAKADLWSCGVILFVLMAGYLPFEDSNLTSLYKKIFKAEFTCPPWFSASAKKLIKRILDPNPATRITFAEVIENEWFKKGYKAPKFENADVSLDDVDAIFDDSGESKNLVVERREEGLKTPVTMNAFELISTSQGLNLGSLFEKQMGLVKRKTRFTSKSSANEIVTKIEAAAAPMGFDVKTNNYKMKLTGEKSGRKGQLAVATEVFQVAPSLYMVEMRKSGGDTLEFHKFYKNLTTGLKDIVWKTIDEEKEEGTDGGGTNGAMANRTIAKQST

SEQ ID NO: 6280 - protein, 375 aa, Arabidopsis lyrata
MALSLQSPPCATLSASIQKGRWKTLAAGFSATPLPAVNFSIRRSIPRILASASSSSSPSSSSLEAGENNELNAVSAFSEIVPDTVVFDDFERFPPTAATVSSSLLLGICGLPDTIFRNAVDMALADSSCAGLETTESRLSCFFNKAIVNVGGDLVKLVPGRVSTEVDARLAYDTNGIIRKVHDLLRLYNEIDVPHDRLLFKIPATWQGIEAARLLESEGIQTHMTFVYSFAQAAAAAQAGASVIQIFVGRLRDWARNHSGDTEIESAIKSGEDPGLALVKRSYNYIHKYGYKSKLMAAAVRNKQDLFSLLGVDYVIAPLKVLQSLKDSPAIPGDEKYSFVRKLTPETATHYHFTNKELIKWDQLSLASAMGPASV

SEQ ID NO: 6281 - protein, 195 aa, Petunia x hybrida
MTFAGTTQKCSACDKTVYLVDRLAADNRVYHKACFRCYHCKSTLKLSNFNSFEGVIYCRHHFDQLFKRTGSLDKSFEGTPKFTKPEKPVDNENGSGNKVSSLFGGTRDKCVGCSKTVYPIEKVSVNGAAYHKACFKCTHGGCTISPSNYIAHEGRLYCKHHHIQLFKEKGNYSQLESENEPESALPTPLQIAAES

SEQ ID NO: 6282 - protein, 115 aa, Pisum sativum
MSKVVLISVMTACMLISSSYGKATLTCEQVTIWLTPCIPYGTLGGSVLPLCCQGVHSLNAAYKNGDDRRLACHCVQDRAALIPLIDYTRINQIGDLCGSKCPFKVYPSTDCDKVK

SEQ ID NO: 6283 - protein, 265 aa, Glycine max
MEHFNNDDLEYVVDEYYDVPDFAVEDTSSDIVPELTSDVDSDFEDEFPTSNAKTDTTASEARNGKDIQGIPWERLNYSRDKYRETRLKQYKNYQNFSRSRHDLRKECLEVQKGETFYDFFFNTRLVKSTIVHFQLRNLLWATSKHDVYFMQNYSVMHWSALLRRGKEVLNVAKPIIPTLKRPGFLAQPVSRVQISTMTVKENLMVAGGFQGELICKNLKHPGVLFCGKITTDDNAITHAVDVYSNPAGSLRVITANNDFQGRVFD

SEQ ID NO: 6284 - protein, 531 aa, Zea mays
  misc_feature (263)..(263): Xaa can be any naturally occurring amino acid
  misc_feature (452)..(452): Xaa can be any naturally occurring amino acid
MEAVGVTPAPVAAPEKKKLLDLKDPFPAAANGGAKASPAAKWAMKKKLVGGDAGYVLEDVPHLTDYMPQLPTYPNPLQDNPAYSVVKQYFVNPDDTVTQKIVVHKTSARGTHFRRAGPRQRVYFQSDEVNAAIVTCGGLCPGLNTVIRELVCGLYDMYGVSSVVGIEGGYKGFYSKNTVALTPKSVNDIHKRGGTVLGTSRGGHDTAKIVDCLQDRGINQVYIIGGDGTQKGASVIYEEVRRRGLKCSVVGVPKTIDNDIAVXDKSFGFDTAVEEAQRAINAAHVEAESAENGIGVVKLMGRNSGFIAMYATLASRDVDCCLIPESPFYLEGKGGLLEFVERRLKDNGHMVIVVAEGAGQDLIARSMNFVDTQDASGNKLLLDVGLWLSQKIKDHFKKKPSFPITLKYIDPTYMIRAVRSNASDNVYCTLLAHSALHGAMAGYTGFTVAPVXGRHAYIPFYRITEKQNKVVITDRMWARVLCSTNQPCFLSHEDVENMKHDDDEHHHMHNTQLLEGGSSPVSKCNGSAAAV

SEQ ID NO: 6285 - protein, 299 aa, Arabidopsis thaliana
MEDQSAARSIGKVSWFSDGKGYGFITPDDGGEELFVHQSSIVSDGFRSLTLGESVEYEIALGSDGKTKAIEVTAPGGGSLNKKENSSRGSGGNCFNCGEVGHMAKDCDGGSGGKSFGGGGGRRSGGEGECYMCGDVGHFARDCRQSGGGNSGGGGGGGRPCYSCGEVGHLAKDCRGGSGGNRYGGGGGRGSGGDGCYMCGGVGHFARDCRQNGGGNVGGGGSTCYTCGGVGHIAKVCTSKIPSGGGGGGRACYECGGTGHLARDCDRRGSGSSGGGGGSNKCFICGKEGHFARECTSVA

SEQ ID NO: 6286 - protein, 154 aa, Triticum aestivum
  misc_feature (91)..(91): Xaa can be any naturally occurring amino acid
  misc_feature (106)..(106): Xaa can be any naturally occurring amino acid
  misc_feature (110)..(110): Xaa can be any naturally occurring amino acid
  misc_feature (113)..(113): Xaa can be any naturally occurring amino acid
  misc_feature (119)..(119): Xaa can be any naturally occurring amino acid
  misc_feature (124)..(124): Xaa can be any naturally occurring amino acid
SATSVAPFQGLKSTAGLPVSRRSNGASLGSVSNGGRIRCMQVWPIEGIKKFETLSYLPPLSTEALLKQVDYLIRSKWVPCLEFSKLGSSSXEHNASPGYYDGRYWXTMWXLPXFGCTDXTQVIXRLEGVKEGYPDPKSDHRQMVSACVTSSPTT

SEQ ID NO: 6287 - protein, 230 aa, Helicobacter pylori 26695
MALYDRANSRNAYAEDSLLRESELVSFVKTTYKFFAGSLLLATIGALLGLMNFQAVVQYKWVFFIAEIAAFFGLMFSKSKPGLNLFMLFAFTSLSGVTLVPLLGMVIAKAGLGAIWQALGMTTIVFGLMSVYALKTKNDLANMGKMLFIALIVVVVCSLINLFLGSPMFQVVIAGASAILFSLYIAYDTQNIVKGMYDSPIDAAVSLYLDFLNVFISILQIIGIFSDRDT

SEQ ID NO: 6288 - protein, 214 aa, Synechococcus sp. WH 8102
MSASPTYGELTNQGASTNIAWHQASVDRAARAEQRGHRSAILWFTGLSGSGKSTLANAVNAALFQRGLATYVLDGDNVRHGLCKDLGFSDADREENIRRIGEVAKLFLDSGVIVLTAFVSPFRADRDKARALVDDGDFIEIHCAADLEVCESRDPKGLYAKARAGQIKEFTGISSPYEAPQAAELKIDTGSQELAESVDLVIKALQERGVIPAA

SEQ ID NO: 6289 - protein, 115 aa, Malus x domestica
MASSAVIKLALVVALCMAVSVAHAITCGQVSSNLVPCFDYVRSGGPVPPACCNGIRTINGLAKTTPDRQAACNCLKSLAGSVSGVNPGNAESLPGKCGVNVPYKISTSTNCATVK

SEQ ID NO: 6290 - protein, 182 aa, Triticum aestivum
MSDEAASPPGGGGGGGGGGSDDGGGGGGFGGVREQDRFLPIANISRIMKKAIPANGKIAKDAKETVQECVSEFISFITSEASDKCQREKRKTINGDDLLWAMATLGFEEYIEPLKVYLQKYRETEGDSKLAGKSGDVSVKKDALGPHGGASGTSAQGMGQQVAYNPGMVYMQPQYHNGDISN

SEQ ID NO: 6291 - protein, 370 aa, Lactococcus lactis subsp. lactis Il1403
MPETTTILYRGGVFMRAARFYDRGDIRIDEINEPIVKAGQVGIDVAWCGICGTDLHEFLDGPIFCPSAEHPNPITGEVPPVTLGHEMSGVVNFIGEGVSGLKVGDHVVVEPYIVPEGTDTSETGHYNLSEGSNFIGLGGNGGGLAEKISVDERWVHKIPDNLPLDEAALIEPLSVGYHAVERANLSEKSTVLVVGAGPIGLLTAAVAKAQGHTVIISEPSGLRRKKAQEAQVADYFFNPIEDDIQAKVHEINEKGVDAAFECTSVQPGFDACLDAIRMGGTVVIVAIWGKPASVDMAKLVIKEANLLGTIAYNNTHPKTIDLVSTGKIKLDQFITAKIGLDDLIDKGFDTLIHHNETAVKILVSPTGKGL

SEQ ID NO: 6292 - protein, 507 aa, Isatis indigotica
MTSVNVKLLYHYVITNFFNLCFFPLTAIVAGKASRLTTNDLHYFYYSHLQHNLLTITLLFAFTAFGSVLYILTRPKPVYLVDYSCYLPPPHLKSSVSKVMDIFYQVRKADPLPNVACDDSSWLDFLRKIQERSGLGDETYGPEGLLQVPPRKTFAAAREETEQVIIGALENLFENTKVNPKEIGILVVNSSMFNPTPSLSAMVVNTFKLRSNIRSFNLGGMGCSAGVIAIDLAKDLLHVHKNTYALVVSTENITYNIYAGDNRSMMVSNCLFRVGGAAILLSNKPGDRRRSKYELVHTVRTHTGADDKSFRCVQQEDDESGKTGVSLSKDITGVAGRTVKKNIATLGPLVLPLSEKFLFFVTFMAKNLLKDKIKHYYVPDFKLAIDHFCIHAGGRAVIDVLESNLGLAPIDVEASRSTLHRFGNTSSSSIWYELAYIEAKGRMKKGNKVWQIALGSGFKCNSAVWVALRNVKASTNSPWEHCIDRYPVKIDSDSAKTSETRVQNGRS

SEQ ID NO: 6293 - protein, 350 aa, Synechococcus elongatus PCC 6301
MTDQPCPRGIPRKFAEDESMDASLLLRQITTGYWGSQALYVAAKLGIADQLVNGPRSCEDLAIVVGAKPEVLYRLLRALASLGIFTEVSDRQFALTPAAELLRSGTAGSLRNLVMMFGEEHYVAWGELLHSIQTGENAFEHHYGAPVFAYYAQHPASADIFNGAMSDMSRPDTAAVLSSYDFQGIRCLVDVGGGHGQLLSQILAAYPDLTGILYDQPAVVAGADSVLADVSDRCEVVGGDFFASVPAGGDAYLLKHIIHDWDDADSLKILANCRQVMQPGDRLLLLEQVVRAGNEPNLAKWLDLNMLVMTQGGRERTQAEFATLLADAGFQLSQIHGTASEVCIIEGRAI

SEQ ID NO: 6294 - protein, 506 aa, Sinapis alba
MTSVNVKLLYHYVITNLFNLCFFPLTAIVAGKASRLTIDDLHHLYYSYLQHNLITIAPLFAFTVFGSVLYIVTRPKPVYLVEYSCYLPPTHCRSSISKVMDIFYQVRKADPSRNGTCDDSSWLEFLRKIQERSGLGDETHGPEGLLQVPPLKTFAAAREETEQVIIGALENLFENTKVNPKEIGILVVNSSMFNPTPSLSAMVVNTFKLRSNVRSFNLGGMGCSAGVIAIDLAKDLLHVHKNTYALVVSTENITYNIYAGDNKSMMVSNCLFRVGGAAILLSNKPRDRRRSKYELVHTVRTHTGADDKSFRCVQQGDDESGKTGVSLSKDITDVAGRTVKKNIATLGPLILPLSEKLLFFVTFIAKKLFKDKVKHYYVPDFKLAIDHFCIHAGGRAVIDVLEKNLALAPIDVEASRSTLHRFGNTSSSSIWYELAYIEAKGRMKKGNKVWQIALGSGFKCNSAVWVALSNVKASTNSPWEHCIDRYPVQIDSDSAKSETRVQNGRS

SEQ ID NO: 6295 - protein, 409 aa, Haemophilus ducreyi 35000HP
MDNNFIFGIIAFTALVLVLAVIILFAKSKLVDSGDITISINDDPEKGITLPAGGKLLGALASKGIFVSSACGGGGSCGQCKVQVNSGGGEILPTELSHISKKEAKEGWRLACQVNVKSSMDVELPEEIFGVKKWECTVISNDNKATFIKELKLQIPEGEEVPFRAGGYIQIEAEPHTVNYKDFDIPKEYHEDWDKFNLWRYVSKVDEHIIRAYSMASYPEEKGIIMLNVRIATPPPRQPDAPPGQMSSYIWSLKAGDKVTISGPFGEFFAKETDNEMVFIGGGAGMAPMRSHIFDQLKRLKSKRKMSFWYGARSKREMFYVEDFDQLQAENDNFKWHVALSDPLPEDNWDGYTGFIHNVLYENYLKNHEAPEDCEYYMCGPPVMNAAVIGMLKSLGVEDENILLDDFGG

SEQ ID NO: 6296 - protein, 506 aa, Sinapis arvensis
MTSVNVKLLYHYVITNFFNLCFFPLTAIVAGKASRLTIDDLHHLYYSYLQHNLITIVPLFAFTVFGSVLYIATRPKPVYLVEYSCYLPPTHCRSSISKVMDTFYQVRKADPFRNGTCDDSSWLDFLKKIQERSGLGDETHGPEGLLQVPPRKTFAAAREETEQVIIGAVENLFKNTKVNPKDIGILVVNSSMFNPTPSLSAMVVNTFKLRSNVRSFNLGGMGCSAGVIAIDLAKDLLHVHKNTYALVVSTENITSSIYAGDNRSMMVSNCLFRVGGAAILLSNKPRDRRRSKYELVHTVRTHTGADDKSYRCVQQGDDENGKTGVSLSKDITDVAGRTVKKNIATLGPLILPLSEKLLFFITFMAKKLFKDKVKHYYVPDFKLAVDHFCIHAGGRVVIDVLEKNLGLAQIDVEASRSTLHRFGNTSSSSIWYELAYIEAKGRMKKGNKVWQIALGSGFKCNSAVWVALSNVKASTNSPWEHCIDRYPVKIDYDSAKSEVRVQNGRS

SEQ ID NO: 6297 - protein, 463 aa, Corynebacterium diphtheriae NCTC 13129
MAYATTNPYTGEVVKEFPTATAQEVEQAITRAHDTFTQWSRKPVAERVEVLARAADILETKKREYAEIITLEMGKLIAEAEAEIDICVDMLRYYVANGEAQLAPRYLPAKGFGEHDVQLVNEPLGVLYAVEPWNFPYYQVIRIGAPQFTAGNTIVLKHASNVPQSALKMVELFREAGAPEGLLVNIFADHNATETILSDPRVRGVALTGSEGAGAAVSATASKYLKKSTLELGGADAFIVLNDAELDKAVDWAVFGRHWNAGQVCCSSKRIIVEDSLYDAFLTQYTQKVAALTAGDPMDPNTQLAPLSSQTAADDLGKLVDKARAEGATVTEVGIDLPEHGAFYQPTILTDIPLDSDTAHSEFFGPVSQIYRARDIDHAVEIANSSPFGLGGSVFSQDEAKAKDIARRLDTGMVYINQPTGVKADIPFGGTKRSGFGRELIDLGLHEFVNQKVVVVTDIDGSF

SEQ ID NO: 6298 - protein, 181 aa, Arabidopsis thaliana
MIIYLSVYTPLYQHIYIYIAHTLHGFLILIKINKLIFEYPKKNLASSNFFKYIITSTMSGVWVFNKNGVMRLVENPYNQSAGDSSESSSSGGNQQQRMRRKILVHLPSSEVVSSYGSLEKILKNLGWERYYSGDNTDHLLQFHKRTSIDLISLPRDFSKFNSIHMYDIVVKNPNVFHVRDM

SEQ ID NO: 6299 - protein, 429 aa, Brucella suis 1330
MTDFYSLIPSAPKGRFDGIERAHTAEDVKRLRGSVEIKYSLAEMGANRLWKLIHEEDFVNALGALSGNQAMQMVRAGLKAIYLSGWQVAADANTASAMYPDQSLYPANAGPELAKRINRTLQRADQIETAEGKGLSVDTWFAPIVADAEAGFGGPLNAFEIMKAYIEAGAAGVHFEDQLASEKKCGHLGGKVLIPTAAHIRNLNAARLAADVMGTPTLIVARTDAEAAKLLTSDIDERDQPFVDYEAGRTAEGFYQVKNGIEPCIARAIAYAPYCDLIWMETSKPDLAQARRFAEAVHKAHPGKLLAYNCSPSFNWKKNLDDATIAKFQCELGAMGYKFQFITLAGFHQLNYGMFELARGYKDRQMAAYSELQQAEFAAEADGYTATKHQREVGTGYFDAMSLAITGGQSSTTAMKESTETAQFKPAAE

SEQ ID NO: 6300 - protein, 384 aa, Pyrococcus abyssi GE5
MSKFPEKGLPREEVLNLLEDKTKVDLTFSSGKILGSMCTMPHELAIEVFARYIDRNLGDPGLHPGTRKIEEEVIEMLSDLLHLEKGYGHIVSGGTEANILAVRAFRNISDAERPELILPKSAHFSFIKAGEMLGVKLVWAELKQDYAVDVKDVEAKISDNTIGIVGIAGTTGLGVVDDIPALSDLAREYGIPLHVDAAFGGFVIPFAKSLGYDLPDFDFKLKGVESITIDPHKMGMAPIPAGGIIFRRKKYLKAISVLAPYLAGGKVWQATITGTRPGASVLAVWALIKHLGFEGYREIVRKAMELSRWFAEEIKKLNNAWLVREPMLNIVSFQTKNLRKVERELKRRGWGISAHRGYIRIVFMPHVTKEMVEEFLRDLREVLK

SEQ ID NO: 6301 - protein, 278 aa, Chloroflexus aurantiacus
MPALGTTVQVSRFMGPYAAQELLAHYAHEIGVTMIPFTELVYLKREGRYVTIDEVPPGAEISSISGTQVRDEYLAKGRLLPEWFTRPETAEILRQMYPPRHRQGFCVWFTGLSGAGKSTIAAILNVLLLERGRTPTVLDGDVVRTHLSKGLGFSREDRDTNILRIGFVASAVVKAGGAVICAAVSPYRAARNECRTMIGSDQFIEVFVDTPLEVCEQRDVKGLYAKARRGELRGFTGIDDPYEPPVNPELTLTTTDVTPEENARKIIRYLEEKGFLEG

SEQ ID NO: 6302 - protein, 303 aa, Brassica napus
  misc_feature (142)..(142): Xaa can be any naturally occurring amino acid
MVFVKPSKSNAYFKRYQVKFRRRRDGKTDYRARIRLINQDKNKYNTPKYRFVVRFTNKDIVAQIVSASIAGDIVKASAYAHELPQYGLTVGLTNYAAAYCTGLLLARRVLKMLEMDEEYEGNLEATGEDFSVEPTESRRPFXRALLDVGLIRTTTGNRVFGALKGALDGGLDIPHSDKRFAGFNKENKQLDAEIHRNYIYGGHVSNYMKMLNEDEPEKFQTHFSQYLKKGVDAESMEELYKKVHAAIRADPNPKKTKKPAPKTHKRYNLKKLTYEERKNKLIERVKALNGAAGGDDDDEDDEE

SEQ ID NO: 6303 - protein, 228 aa, Vicia faba
PVYISIGCNLPAIPHPTFSRDPVPFSLAPRLSNQIGLEAAVEAAAEFLNKAVKPVLVGGPKLRVAKASDAFVELADASGYALAVMPSAKGMVPEHHPHFIGTYWGAVSTAFCAEIVESADAYLFAGPIFNDYSSVGYSLLLKKEKAIIVQPDRVVIANGPAFGCVLMNDFLKALAKRLKHNNVAYENYHRIFVPDGKPLKCVPKEPLRVNVMFQHIQKMLSSETAVIA

SEQ ID NO: 6304 - protein, 548 aa, Zea mays
MEAATAATAAMMWFRKGLRVHDNPALDAARRHGVGAASARLYPVFVLDPRYLRPDPVAASPGSARAGVARIRFLLESLSDLDARLRRLGSRLLLLRARDDVADAVCAALKDWNIGKLCFESDTEPYALARDKKVTDFALASGIEVLTPVSHTLSDPEEIIKKNGGRPPLTYQSFVSIAGEPPAPAMEEYSELPPLGDTGEYELLPVPTVEGLGYGDISQEEIPPFHGGETEALRRMKESLQNKEWVAKFEKPKGDPSAFVKPSTTVLSPYLKFGCLSSRYFYHCIQDVHRSVRNHTKPPVSLTGQLLWRDFFYTVSYGTPNFDRMKGNKICKQIPWSENEDLFVAWRDGQTGYPWIDAIMIQLRKWGWMHHLARHSVACFLTRGDMFIHWEKGRDVFERLLIDSDWAINNGNWLWLSCSSFFYQYHRIYSPITFGKKYDPNGNYIRHFIPVLKDMPREYIYEPWTAPTSIQKKANCIIGKDYPKPVVDHETASKECRKRMGEAYASSRVDAKPSKGKTLNSRRKMLHGDRDTSNSTIAKRLKRNSRVE

SEQ ID NO: 6305 - protein, 316 aa, Zea mays; identical to SEQ ID NO: 330

SEQ ID NO: 6306 - protein, 426 aa, Arabidopsis thaliana
MESPYPKSPEKITGTVLLGKYELGRRLGSGSFAKVHVARSISTGELVAIKIIDKQKTIDSGMEPRIIREIEAMRRLHNHPNVLKIHEVMATKSKIYLVVEYAAGGELFTKLIRFGRLNESAARRYFQQLASALSFCHRDGIAHRDVKPQNLLLDKQGNLKVSDFGLSALPEHRSNNGLLHTACGTPAYTAPEVIAQRGYDGAKADAWSCGVFLFVLLAGYVPFDDANIVAMYRKIHKRDYRFPSWISKPARSIIYKLLDPNPETRMSIEAVMGTVWFQKSLEISEFQSSVFELDRFLEKEAKSSNAITAFDLISLSSGLDLSGLFERRKRKEKRFTARVSAERVVEKAGMIGEKLGFRVEKKEETKVVGLGKGRTAVVVEVVEFAEGLVVADVKVVVEGEEEEEEVESHWSELIVELEEIVLSWHN

SEQ ID NO: 6307 - protein, 115 aa, Malus x domestica
MASSAVINLALVVALCMAVSVAHAITCGQVSSNLVPCFDYVRSGGPVPPACCNGIRTINGLAKTTPDRQAACNCLKSLAGSVSGVNPGNAESLPGKCGVNVPYKISTSTNCATVK

SEQ ID NO: 6308 - protein, 729 aa, Zea mays
MPAWWPRSKLRSRSKAKPGAGSVSAASSPRKSADLESPSPSPSPTPTPTPRDRKAHSLDFPGAAAARGRPAGAAPGHGSVGYKLPTPVEAVEPVGTLYGLLLAAAAAAAAGDGCSSAEESSVCSAASLDEPHYQHGFRPMDPVAFARERNMPSDSDRILNEDKRFMSCSMPREHQKFFDVPAASVRELHLQSDGPSTSEANCSRGRMISGDLFAPRTRSLSPIPKGHAFAVSNGNSREFGFSPRSPVRKMDGLRSPPHPLPLPPASGACSPLHPASGACSPLHPASGACSPLLPTHSFCSPLPSSPSSCPPLPASPTNCSQSQSQWKKGKLLGSGTFGQVYLGFNSENGQFCAIKEVQVIMDDPHSKERLKQLNQEIDMLRQLSHPNIVQYHGSELSDESLSICLEYVSGGSIHKLLREYGSFKEPVIRNYTGQILAGLAYLHGRNTVHRDIKGANILVGPNGEVKLADFGMAKHISSFAEIRSFKGSPYWMAPEVIMNCKGYSLSVDIWSLGCTIIEMATARPPWHQYEGVAAIFKIANSKDIPEIPDSFSEEGKSFLQLCLKRNPASRASAVQLMDHPFVQDHPAVRAAKSSVLRNTPSSPADGRHTMSNRELPSRKIITPLKDIGLGMRDFTGFSTTVPSPHSPIPGRANMSTPVSPCSSPLRQFKQSNVRGMRSPPHPMLSPGLGNTVSYTQNQTRRNPAPAISDPWMDVGQMKLQSPNISPRRF

SEQ ID NO: 6309 - protein, 337 aa, Thermococcus kodakaraensis
MTEPKDIVLKESEEVEGIPIEGPWLDDVSSLEEVLDYYERIGFQATHLGKAIEIWKKVEKRRAEGKEVRVFLGYTSNIISSGLRELVAWLVKEGKIDVIVTTAGGIEEDFIKALKPFILGDWHVNDALMREKGINRIGNIFVPNDRYIEFEKYMIPFFERVLEIEKERGKPLTASEFIYELGRYMDEKLGKEKERSVIYWAYKRNVPIFCPAITDGSIGDMLYFFKEERGDRELIIDIANDIVKLNNLAVTAKETASIILGGSLPKHAIINANLFRGGTDYAIYITTAVPWDGSLSGAPPSEGVSWGKIRAKADYVEIWADATLVFPLLVWKVMKAP

SEQ ID NO: 6310 - protein, 115 aa, Malus x domestica
MASSAVINLALVVALCMAVSVAHAITCGQVSSNLVPCFDYVRSDGPVPPACCNGIRTINGLAKTTPDRQAACNCLKSLAGSVSGVNPGNAESLPGKCGVNVPYKISTSTNCATVK

SEQ ID NO: 6311 - protein, 217 aa, Mesorhizobium sp. BNC1
MKFFVDTADVNEIRELSETGLLDGVTTNPSLIMKSGRPILEVTREICEIVDGPVSAEVTAVDFKEMMREADILSKIADNIAIKVPLTMDGLKACKALTSSGRMVNVTLCFSANQALLAAKAGATFISPFIGRIDDMGIDGMELIAEIRTIYDNYDFDTEILAASIRSVNHVKQAAIIGADVATVPPAVLKSLVKHPLTDKGLEAFLADWAKTGQKIG

SEQ ID NO: 6312 - protein, 257 aa, Medicago sativa
MEGMAQHPVPRTVEEVFSDYKGRRAGLIKALTTDVEKFYQLVDPEKENLCLYGFPNETWEVNLPVEEVPPELPEPALGINFARDGMQEKDWLSLVAVHSDSWLLAVAFYFGARFGFGKNDRKRLFQMINDLPTVFELATGTAKQSKDQLTAHNNGSNSKYKSSGKSRQSESQTKGVKMSAPVKEEVDSGEEEEEDDDEQGATCGACGDNYGTDEFWICCDMCEKWFHGKCVKITPAKAEHIKQYKCPGCSIKKPRIG

SEQ ID NO: 6313 - protein, 506 aa, Orychophragmus violaceus
MTSVNVKLLYHYIITNFFTLCFFPLTAIVAGKASRLTTNDLHHFYYSHLQHSLITITLLFAFTVFGSVLYIITRPKPVYLVDYSCYLPPPHQKASVSKVMDIFYHLRKADPLRNVACDDSSWLEFLRKIQERSGMGDETYVPAGLLEVPPRKTFSASREESEQVINGAIENLFKNTKVNPKEIGLLVVNSSIFNPTPSLSAMVVNTFKLRSNIRSFNLGGMGCSAGAIAIDLAKDLLHVHKNTYALVVSTENITDHIYAGDNRSMMVSNCLFRVGGAAILLSNKPRDRRRSKYELVHTVRTHTGADDKCYRCVQQGDDESGKNGVSLSKDITAVAGKAIKINISTLGPLVLPLSEKILVFVSFIGKKLLKDKIKNLYVPDFKLVIDHFCIHAGGRAVIDVLEKNLGLEPVDVEPSRSTLHRFGNTSSSSIWYELAYIEAKGRMKKGNKVWQIALGSGFKCNSAVWVALRNVKASTNSPWEHCIDRYPVNIDSDSAESVTRVQNGRS

SEQ ID NO: 6314 - protein, 316 aa, Salmonella typhimurium LT2
MNQLDGIKQFTTVVADSGDIESIRHYQPQDATTNPSLLLKAAGLEQYGHLIEDAIAWGKKHGGTQEQQVAAASDKLAVNFGAEILKSIPGRVSTEVDARLSFDKEKSIEKARHLVDLYQQQGVDKSRILIKLAATWEGIRAAGQLEKEGINCNLTLLFSFAQARACAEAGVYLISPFVGRIYDWYQARSPLEPYVVEEDPGVKSVRNIYDYFKQHRYETIVMGASFRRTEQILALTGCDRLTISPNLLKELKEKEEPVIRKLVPSSQMFHRPTPMTEAEFRWEHNQDAMAVEKLSEGIRLFAVDQRKLEDLLAAKL

SEQ ID NO: 6315 - protein, 506 aa, Brassica napus
MTSVNVKLLYHYVITNLFNLCFFPLTAIVAGKAYRLTIDDLHHLYYSYLQHNLITIAPLFAFTVFGSVLYIATRPKPVYLVEYSCYLPPTHCRSSISKVMDIFYQVRKADPSRNGTCDDSSWLDFLRKIQERSGLGDETHGPEGLLQVPPRKTFAAAREETEQVIIGALENLFKNTNVNPKDIGILVVNSSMFNPTPSLSAMVVNTFKLRSNVRSFNLGGMGCSAGVIAIDLAKDLLHVHKNTYALVVSTENITYNIYAGDNRSMMVSNCLFRVGGAAILLFNKPGDRRRSKYELVHTVRTHTGADDKSFRCVQQGDDENGKIGVSLSKDITDVAGRTVKKNIATLGPLILPLSEKLLFFVTFMGKKLFKDKIKHYYVPDFKLAIDHFCIHAGGRAVIDVLEKNLALAPIDVEASRSTLHRFGNTSSSSIWYELAYIEAKGRMKKGNKVWQIALGSGFKCNSAVWVALNNVKASTNSPWEHCIDRYPVKIDSDSGKSETRVQNGRS

SEQ ID NO: 6316 - protein, 279 aa, Lactobacillus gasseri
MATIQWYPGHMNKAKNQLEDNLDLIDVLIEVLDARLPVSSRNPMIGQLTKKKPHIIILNKSDLADPIQTKKWTRYFQDEGNFVISMDAQHNTNMTSLFKIIKLAGKKKTEKLIAKGASNPMIRVAIAGIPNCGKSTIINRMVGRNAAIVGDKPGVTRGQSWLKTKTNVQILDTPGILWPKFSDQEVGYKLAACGAIKADVFHPDDVALFVIEFLKQNYKKDLTKFAQATNEELENMSNPDLLLAMTNKYGMRDDYDKFSLFMLQRLRKGKLGRITFDLR

SEQ ID NO: 6317 - protein, 442 aa, Synechococcus elongatus PCC 6301
MSDLWIRNARVLLPTGEWQLADVEVRAGKIVAIADQLPAASDDTPEVQAEGLALLPGVIDPQVHFRDPGLTHKEDLHTASRACARGGVTSFMEMPNTKPLTTTQAILTEKLAIAAEKSLVNYAFFIGATPENHPDLHTATPTCGIKIFMGASHSPLMVPTEPELEPIFAAGRRLIAVHAEDQPRILARREFMLAGPHVPDLHSAIQDNEAALLATRLALKLSKKYQRRLHILHLSTGDEALLLRQDKPAWVTTEVTPQHLLLNRDAYYEIGSLAQMNPPLRTRWDNEVLWQALLDGVIDCIATDHAPHTLEEKAQPYPNCPSGMPGVETSLPLMLTEAQKGRCTVAQVAQWMSTNVAKIFGIANKGKIEPGYDADLVLVDLDRYQLVRREDLQTKCGWSPFEGWNLTGWPQVTIVGGQIVYDRGQFNESVRGQALQFDESGW

SEQ ID NO: 6318 - protein, 256 aa, Arabidopsis thaliana
MEGITHPIPRTVEEVFSDFRGRRAGLIKALTNDMVKFYQTCDPEKENLCLYGLPNETWEVNLPVEEVPPELPEPALGINFARDGMQEKDWVSLVAVHSDSWLLSVAFYFGARFGFGKNERKRLFQMINELPTIFEVVSGNAKQSKDLSVNNNNSKSKPSGVKSRQSESLTKVAKMSSPPPKEEEEEEDESEDESEDDEQGAVCGACGDNYGTDEFWICCDACEKWFHGKCVKITPAKAEHIKHYKCPTCSNKRARP

SEQ ID NO: 6319 - protein, 287 aa, Glycine max; identical to SEQ ID NO: 254

SEQ ID NO: 6320 - protein, 317 aa, Erwinia carotovora subsp. atroseptica SCRI1043
MTDKLTSLRQVTTVVADTGDIAAMKLYQPQDATTNPSLILNAAQIPEYRKLIDEAIAWAREQSSDRKQQVVDATDKLAVNIGLEILKLIPGRISTEVDARLSYDTEASVAKAKHLIKLYNDAGISNERILIKLASTWQGICAAEQLEKEGINCNLTLLFSFAQARACAEAGVFLISPFVGRILDWYKANGDKKEFAPHEDPGVVSVSEIYDYYKEHGYETVVMGASFRNVGEILELAGCDRLTIAPALLKELSESEGEVVRKLSYVGDVKVRPARMTEAEFYWQHNQDPMAIDKLADGIRKFAIDQEKLEKMIADLL

SEQ ID NO: 6321 - protein, 222 aa, Zea mays
  misc_feature (210)..(210): Xaa can be any naturally occurring amino acid
MDRAGVLAVVDSRTGKRYEVKVSEDGTVRATDFKKITAGKDDKGLKTYDPGYLNTAPVRSSICYIDGDEGILRYRGYPIEEVAESSSFVEVAYLLMYGNLPSQSQLAAWGFAISQHSAVPQGLLDIIQSMPHDAHPMGVLASAMSTLSVFHPDANPALRGQDLYNSKQVRDKQIVRVLGKAPAIAAAAYLRLAGRPAVLPSKNLSYSQNXLDMLDSLGDQKY

SEQ ID NO: 6322 - protein, 123 aa, Oryza sativa (japonica cultivar-group)
MIQPQTLLNVADNTGARKLMCIRVIGAASSQRYARIGDVIVAVIKDVVPQMPLERSEVIRAVIVRTCKEFKCEDGIIIRYDDNAAVIIDQKGNPKGTRVFGAIAEELRELNFTKIVSLAPEVL

SEQ ID NO: 6323 - protein, 178 aa, Triticum aestivum
  misc_feature (143)..(143): Xaa can be any naturally occurring amino acid
MAPTVMASSATSVAPFQGLKSTAGLPVSRRSNGASLGSVSNGGRIRCMQVWPIEGIKKFETLSYLPPLSTEALLKQVDYLIRSKWVPCLEFSKVGFIFREHNASPGYYDGRYWTMWKLPMFGCTDATQVINEVEEVKKEYLTXVVRIIGFTTSQVQCVSHRKQRAARSGRLNSHHTAH

SEQ ID NO: 6324 - protein, 416 aa, Escherichia coli O157:H7 EDL933
MESKVVVPAQGKKITLQNGKLNVPENPIIPYIEGDGIGVDVTPAMLKVVDAAVEKAYKGERKISWMEIYTGEKSTQVYGQDVWLPAETLDLIREYRVAIKGPLTTPVGGGIRSLNVALRQELDLYICLRPVRYYQGTPSPVKHPELTDMVIFRENSEDIYAGIEWKADSADAEKVIKFLREEMGVKKIRFPEHCGIGIKPCSEEGTKRLVRAAIEYAIANDRDSVTLVHKGNIMKFTEGAFKDWGYELAREEFGGELIDGGPWLKVKNPNTGKEIVIKDVIADAFLQQILLRPAEYDVIACMNLNGDYISDALAAQVGGIGIAPGANIGDECALFEATHGTAPKYAGQDKVNPGSIILSAEMMLRHMGWTEAADLIVKGMEGAINAKTVTYDFERLMEGAKLLKCSEFGDAIIKNM

SEQ ID NO: 6325 - protein, 277 aa, Desulfitobacterium hafniense DCB-2
SCLAEGPITLRFGEVHSYIIDEGEMVPVPGRLIYRGYDITDLARGFMEDNRFGFEETAYLLLFGRLPNRQELIDFHNLLDIYQKLPDNFARDMILNVPSKDIMNGMARSVLGFYCYDTNPDDTSIRNVLKQCIRLIAAFPALAVYCYQAYTHYHGNKSLVIHSPQPELSLAENILYMLRPNHKYTELEARLLDLALVLHAEHGGGNNSSFVTHVVTSTGTDTYSAVAAALGSLRGPKHGGANHKVIQMFQDIKEKISDWQDEDELSAYLDKFFLGCL

SEQ ID NO: 6326 - protein, 85 aa, Brassica napus
MAPVSALAKYKLVFLGDQSVGKTSIITRFMYDKFDNTYQATIGIDFLSKTMYLEDRTVRLQLWDTAGQERFRSLIPSYIRDSSVA

SEQ ID NO: 6327 - protein, 352 aa, Vibrio parahaemolyticus RIMD 2210633
MQQMNSIVMQDGSVRLKQVEIPKPAAGQVLVRSLACGICGSDLHITRHADEVFDVFHQLGLMPDEAGEHAQVMLGHEFCAEIVEYGSDTQQTLAVGSRVTSVPMLLSQNGAGVGVTPGTYGAYSEYFLLDEALLLPVPDGMPSEAAALTEPLAVGLHAVNRSEIETEETALVVGCGPIGLAVIAALKQRGVSNILAVDLQEEKLQLASEFGANRLISPTKEDEIAVGEQYAMNSRLVIYECVGKHTLIDDFLRRAPARARIVISGIHTTPAIINYAYATVKELDLRFSYYYQPHEFEQCLQAIAEHKLPWQKMLTAKVGIDGVEDAFRQLMTPNDHIKVVIEPWRCGALEVI

SEQ ID NO: 6328 - protein, 115 aa, Malus x domestica
MASSAVINLALVVALCMAVSVAHAITCGQVSSNLVPCFDYVRSGGPVPPACCNGIRTINGLAKTTPDRQAACNCLKSLAGSVSGVNPGNVESLPGKCGVNVPYKISTSTNCATVK

SEQ ID NO: 6329 - protein, 401 aa, Triticum aestivum
  misc_feature (155)..(155): Xaa can be any naturally occurring amino acid
  misc_feature (203)..(203): Xaa can be any naturally occurring amino acid
  misc_feature (210)..(210): Xaa can be any naturally occurring amino acid
  misc_feature (237)..(237): Xaa can be any naturally occurring amino acid
IEQVCTKKQAGTGPEFPGYRRPTRPISYTLFDKDGRQIPQEIVTKVGEIFEQILKETVKVRDEYANDMPLVQAISMVLDRNPHLKLEGLQYEVLQWCICRLEAWFATDVDNISLKNWDQEHVLTGGHGLMVNGYDPVIKALSRDLDVHLNHGLQXIQRYNKVIVCVEEVQFVAMRYITVSRCIRLYSGRTSSTVDPELPDWKXSAISDLXVGLETRIALRFNTVFWPNVEVLGRVAXTSNACGYFLNLHKATGHPVLVCMVAGRFAYEMEKLSDEESVNFVMSQLRRMLPGATEPVQYLVSRWGTDPNSLGSYSCDLVGKPADLYERFCARVGNLFFAGEAACIDHSGSVHGAYSSGIDAAEDCRRRLSTQLGISDLFQVGKIVMREEMTEVMVPLQISRL

SEQ ID NO: 6330 - protein, 501 aa, Chromobacterium violaceum ATCC 12472
MQSLKPGFELKSRYANYIGGRWVPPVNGRYFENVTPITGKPLCEIPRSDEQDVELALDAAHAARYAWGHTPVTERAIALNRIADRMEANLALLAEVETWDNGKPIRETRAADIPLAIDHFRYFASCVRAQEGSLGEIDANTVSYHFHEPLGVVGQIIPWNFPILMAAWKLAPALAAGNCVVLKPAEQTPLSILVLMELIGDLLPPGVLNVVNGFGVEAGKPLASSKRIAKIAFTGETGTGRLIMQYASQNLIPVTLELGGKSPNIFFGDVAAKDDAFLDKAIEGFVMFALNQGEVCTCPSRALIHESIYDRFMEKALARVAAIKQGNPLDPATMIGAQASQEQMDKIQSYLAIGRDEGAKVLAGGARAQLDGDLAGGFYIQPTVFHGHNKMRIFQEEIFGPVVSVTTFQDRDEALAIANDTLYGLGAGVWTRDMNTAFFMGRHIEAGRVWTNCYHAYPAHAAFGGYKQSGIGRETHKMMLEHYQQTKNLLVSYAEDKLGFF

SEQ ID NO: 6331 - protein, 231 aa, Zea mays
MCPTKKGMTGEPSSPCSSASASTLPEHHQTVWTSPPKRPAGRTKFRETRHPVFRGVRRRGSAGRWVCEVRVPGRRGCRLWLGTFDTAEAAARAHDAAMLALAGAGACCLNFADSAWLLAVPASCASLAEVRHAVADAVDDFLRHQLVPEDDALAATPSSPSSEDGNTSDGGESSSDSSPPTGASPFEFDVFNDMSWDLHYASLAQGLLVEPPSAVTAFMDEGFADVPLWSY

SEQ ID NO: 6332 - protein, 199 aa, Zea mays
  misc_feature (136)..(136): Xaa can be any naturally occurring amino acid
  misc_feature (186)..(186): Xaa can be any naturally occurring amino acid
MKTRGKTLTERYEMGKLLGKGAFGKVHYARDLESNQGVAIKIMDKERVLKAGLSEQVKREITTMRLVEHKNIVRLHEVMATRNKIYIIMEYAKGGELLDKVKRSGRLTEADTHRYFQQLIGALDHCHSRGVYHRDXKPENLLLNENGDLKVTDFALSAFSESRRTNGVLHTVCGTPVYIAPEVIKXTGFDRAKSDIWSC

SEQ ID NO: 6333 - protein, 325 aa, Mycoplasma mobile 163K
MAKKIAILTSGGDSPGMNNAIRTIVKTSKIHGIEVFLVYNGYKGLVEKTIKNANEINVDQYIGSGGTFIGSARYLEFKKLEVRQKAVQNLKEMGIDSLVVIGGDGSYAGAQLLHELGVKTIGLPGTIDNDIASTEYTIGLDTALNTIVENVDRLRDTMNSMNMVALVEVMGHGAGDLAMLSGLATGAEIIVTNAHRKSIDEMIEIVKDQMIAKTKRSVIGIVSEFIYDDLKKVAKEIEDKTGIRTRAIILAHTQRGGNPKAYERINASFLGIAAVESLLKNESGVALGFKGNKIISTPIPEALKAQNSAKNENELVTKINKINQS

SEQ ID NO: 6334 - protein, 207 aa, Glycine max
FGSRAMCEPLSVGVHACRRANIGPETYVLIMGAGPIGLVTMLAARAFGAPRTVIVDVDDYRLSVAKSLGADDIVKVSTNIQDVAEEVVQIQKVMGADIDVTFDCAGFDKTMSTALSATQPGGKVCLVGMGHSEMTVPLTPAAAREVDVLGVFRYMNTWPLCLEFLRSGKIDVKPLITHRFGFSQKEVEEAFETSARGGNAIKVMFNL

SEQ ID NO: 6335 - protein, 267 aa, Ralstonia metallidurans CH34
MSIPSFGVGTFRLTGQVVVDSVRNALDVGYRAIDTAQIYGNEADVGQAIAESGVERGELFVTTKIWTANYAADKLVPSLRESLDKLRTDYVDLTLIHWPAPGNGVALSEYMAALAEAKALGLTRQIGVSNFNIELTRQAIEAVGKGEIATNQIELSPYLQSRKLTAFLKEQGIAVTSYMTLAYGKVLKDPVLGQIAAKHHATVAQVALAWALQLGYAVIPSSTKRENLASNLLARDLKLDADDMALIASLERNGREVSPEGLAPVWD

SEQ ID NO: 6336 - protein, 212 aa, Zea mays
MDEEEHEVYGQEIPEDGDMDGADVDMAASGDDAAKLQELDEMKRRLKEMEEEAAALRDMQAKVAKEMQGGDPSASTAEAKEQVDARSVYVGNVDYACTPEEVQQHFQACGTVNRVTILTDKFGQPKGFAYVEFLEQEGVQEALNLNESELHGRQIKVAPKRTNVPGMKQRPPRGYNPYHGYPYRSYGAPYFPPYGYGRAPRFRRPMRYRPYF

SEQ ID NO: 6337 - protein, 591 aa, Zea mays
  misc_feature (429)..(429): Xaa can be any naturally occurring amino acid
  misc_feature (534)..(534): Xaa can be any naturally occurring amino acid
MCGILAVLGVAEVSLAKRSRIIELSRRLRHRGPDWSGLHCHEDCYLAHQRLAIIDPTSGDQPLYNEDKTVVVTVNGEIYNHEELKAKLKTHEFQTGSDCEVIAHLYEEYGEEFVDMLDGMFSFVLLDTRDKSFIAARDAIGICPLYMGWGLDGSVWFSSEMKALSDDCERFITFPPGHLYSSKTGGLRRWYNPPWFSETVPSTPYNALFLREMFEKAVIKRLMTDVPFGVLLSGGLDSSLVASVASRHLNETKVDRQWGNKLHTFCIGLKGSPDLKAAREVADYLSTVHHEFHFTVQEGIDALEEVIYHIETYDVTTIRASTPMFLMSRKIKSLGVKMVISGEGSDEIFGGYLYFHKAPNKKEFHEETCRKIKALHLYDCLRANKATSAWGVEARVPFLDKSFISVAMDIDPEWKMIKRDLGRIEKWVXRNAFDDEERPYLPKHILYRQKEQFSDGVGYSWIDGLKDHASQHVSDSMMMNAGFVYPENTPTTKEGYYYRMIFEKFFPKPAARSTVPGGPSVACSTAKAVEWDAXWSKNLDPSGRAALGVHDAAYEDTAGKTPASADPVSDKGLRPAIGESLGTPVASATAV

SEQ ID NO: 6338 - protein, 276 aa, Oryza sativa (japonica cultivar-group)
MASAAVAAAAAPLRRSLLPSLNPSCLFSSLASSSHRLSLPRALRPAGPLPSDVEDSDDSNAGDGAGEALRKSRNDLKREARRAVQWGMDLAKFSPPQIKRILRAASLDREVFDALMLVKRFGSDVREGKRRQFNYIGRLLRGAQPELMDTLIQYSKDGDDNRLLALMSENTFLMEDEEIEDLPCNEEEGDKEHIEIADRWFEGLLSKDISVTNEIYAIHNVEFDRQELRKLVRTVHMVQDNIENEHEEESTMKLLGAKKQLLCFLRSIAKEAYVKS

SEQ ID NO: 6339 - protein, 120 aa, Zea mays
  misc_feature (82)..(82): Xaa can be any naturally occurring amino acid
TVSFGYDSTKLQELDEMNLLLREMEDESAALREMHAKVGKDMLDPNATTSENRDEMDSLSVFVGNVDYACTPEEVQPHFNSXGTSYRVTILTDKSVQPKGSAYVEFVEDEAAQEAIKLNE

SEQ ID NO: 6340 - protein, 428 aa, Pasteurella multocida subsp. multocida str. Pm70
MSELTAKLTLSDGREYDLPVHKGSLGYDAIDVQSLVKNKLFTFDPGFMSTACCRSEITYIDGDNGVLLHRGYPIAELAKNADYLEVAHLLLFGERPSPEEYKNFTQLVRRHTLVHEQISRFFHGFRRDSHPMAIMCGVSGALAAFYHDSLDINDITHREITAIRLLAKMPTLAAMCYKYSIGQPFMFPQNHLSYSGNFLYMMFATPCEPYIVNPVLERAMDRIFILHADHEQNASTSTVRTAASSGANPFACIAAGIASLWGPAHGGANEACINMLEEIGTVDRIPEFIARAKDKNDPFRLMGFGHRVYKNYDPRAKVMRQTCHEVLKELNIQNPLFDVAMELERIALSDPYFIDHKLYPNVDFYSGIILKAIGIPTSMFTVMFALARTVGWIAHWKEMFKPGNMKIVRPRQLYMGEKERSFEAMDKS

SEQ ID NO: 6341 - protein, 368 aa, Arabidopsis thaliana
MEDDRVFSSVHSTVFKESESLEGKCDKIEGYDFNQGVDYPKLMRSMLTTGFQASNLGEAIDVVNQMLDWRLADETTVAEDCSEEEKNPSFRESVKCKIFLGFTSNLVSSGVRDTIRYLVQHHMVDVIVTTTGGVEEDLIKCLAPTFKGDFSLPGAYLRSKGLNRIGNLLVPNDNYCKFEDWIIPIFDEMLKEQKEENVLWTPSKLLARLGKEINNESSYLYWAYKMNIPVFCPGLTDGSLGDMLYFHSFRTSGLIIDVVQDIRAMNGEAVHANPKKTGMIILGGGLPKHHICNANMMRNGADYAVFINTGQEFDGSDSGARPDEAVSWGKIRGSAKTVKVYCDATIAFPLLVAETFATKRDQTCESKT

SEQ ID NO: 6342 - protein, 54 aa, Triticum aestivum
MGSATVLEVILAIILPPVGVFLRYKLGVEFWICLLLTILGYIPGIIYAVYVLVV

SEQ ID NO: 6343 - protein, 232 aa, Brucella suis 1330
MDEARKLKIAAAAEALTYVKDGMRLGIGTGSTAEEFVRLLAEKVKGGFRVIGVPTSERTAKLCEELGVALTTLEETPHLDLTIDGADEVDGELSLIKGGGGALLREKIVAAASDSMIVIADQSKVVETLGRFPLPIEVNRFGLGATIRAIEAAAVKCGLAGPLNLRLKDGSPFLTDGGHYIVDASFGRIPDPKTLSDALFAIPGVVEHGLFIGLARAAIIAGTDGIRTMNRS

SEQ ID NO: 6344 - protein, 438 aa, Aspergillus nidulans FGSC A4
MVPPMTSAVLHRDTRFVPKKAVGGKGSYLLLEDGTKFLDSTGGAAVSCLGHGHEKIIQAITEQFTKVEYCHTAFFGTEASENLASLLVDSTGGKLSKLFVVSSGSEAVEAALKLARQYFLELPTPQPQRTRFIARKPSYHGTTLGALGVGGHALRRQPFEPILSQNVSHVSPCYAYRGKNDGESDADYVARLAGELDAEFRRVGPDTVCAFIAEPIVGAALGCVPAVPGYFAAMKTICEKHGALFILDEIMCGMGRCGTLHAWEQEDVTPDLQTIGKALGGGYAPVSGLLISDKVVQTVDKGTGAFRHGQTYQGHPISCAAALAVQTVIVEEQLLDNVKSMGEYLEKRLRGTLEGMQYVGDIRGKGLFWGVEFVKNKATKEPFSSETALAFKIQETGTVNGTRGDHIILAPAYNVTKEEIDIIVDTTAKVLAEVFAQL

SEQ ID NO: 6345 - protein, 292 aa, Oryza sativa (japonica cultivar-group)
MAIATESRCEEEKASPHSQEVKRWVLSDFDIGKPLGRGKFGHVYLAREKRSNHIVALKVLFKSQLKQSQVEHQLRREVEIQSHLRHPNILRLYGYFYDQTRVYLILEYALKGELYKELQRCKHFSERRSATYIASLAHALIYLHGKHVIHRDIKPENLLIGSQGELKIADFGWSVHTFNRRRTMCGTLDYLPPEMVEKTEHDYHVDIWSLGILCYEFLYGVPPFEAKEHSETYRRIVKVDLKFPLKPFVSPAAKDLISQMLVKNSAHRLPLHKLLEHPWIVQNADPSGVYRG

SEQ ID NO: 6346 - protein, 370 aa, Pneumocystis carinii
MDSKHSVFNVMGQEFVLQKGYEVIKGLGKGSYGVVCSAKNIEVEDNNKVAIKKITNIFSKKMLAKRALREIMLLQHFRNHKNITTLYDMDIVDPSKFNELYLYEELMQANLNSIIRSDQPLTDAHFQSFIYQILCGLKYIHSANVLHRDLKPSNLLINADCKLKICDFGLSRGISVNQGQGTEYMTEYVTTRWYRAPEVMLSFQSYSKAIDLWSVGCILAELLGRKPFFKGSNYVDQLNQIFCILGTPNENIISKIKSASAQSYIRSLPTLPKMPYSKIFPYANPDALDLLNCLLTFDPYDRISCEEALEHPYLIIWHDPNKEPVCSEQFDFGFEAIDSIEEIRQMIINEVSRFKGLTGNQKLYHSISNT

SEQ ID NO: 6347 - protein, 312 aa, Glycine max
KATNVIVVLGWLENIDDAPSPDASLLQRVMRVMVRRKIFSAEQSETGETLYGLTRASKWILRDTKMTLAPMLLLENHPIHLNPAHYISEIIREGTKNGTAFFKCHGHEQFEMTGLDPEYNRLFNEGMVCTARVVSKAVITGYKDGFNQIKSLVDVGGGIGGSLSEIVRAYPHINAINFDLPHVVATAPKYDGITHVGGDMFVSIPDADAIYMKWILHDWSDEHCVKILKNCRKAIPEKTGKVIIVDHVLRPEGNELFTDVGIAFDMMLLAHNAGGKERTEENWKWLFKETGFARYNIIKINALPSIIEAFPI

SEQ ID NO: 6348 - protein, 341 aa, Anabaena variabilis ATCC 29413
MLAALLYGQEDLRLEQLADPSPEVGEVVIKVGAATTCGTDLKVWRRGGHAKMLKLPTLFGHEAAGEIVAVGAGVTGWQIGDRVVANNSAPCMKCFFCQRQEYSLCPNLTWNNGTFAEYLKIPAPIVQHNLLQIPDELPLPLAAMTEPLACVLHGVARSQIKPQDKVVVLGDGAIGLMFVATLADNVEVLLWGGNDQRLEIGQKLGAAKTFNYHQNPDIPGTVKDLTQGWGADVVIEATGVPKVWETALACARPGAIVNLFGGCPRDTTITVNTEQMHYSELTLKGVFHNTPEYVRAALALIASRKIPFELLISEQRPLKDLEQVFDDMKARKVIKVAMVSS

SEQ ID NO: 6349 - protein, 166 aa, Pirellula sp. 1
MDETNQIILVGISFPIHFKITDSKSTLDMTPEQVTLVKESWEKVKPISEQAAELFYGRLFTLDPSLRSLFKGDMSEQGKKLMSTITLAVTSLDRLETILPTVQALGRKHAVEYEVPDSSYATVGEALIWTLGQGLGDDFTEDVKEAWLLTYTTLSGAMLSGKSTAA

SEQ ID NO: 6350 - protein, 355 aa, Sclerotinia sclerotiorum
MASRAPNPSSGSRKISFNVSEQYDIQDVVGEGAYGVVCSALHKPSGQKVAIKKITPFDHSMFCLRTLREMKLLRYFNHENIISILDIQKPRNYESFTEVYPIQELMETDMHRVIRTQDLSDDHCQYFIYQTLRALKAMHSANVLHRDLKPSNLLLNANCDLKVCDFGLARSAASQEDNSGFMTEYVATRWYRAPEIMLTFKEYTKAIDVWSVGCILAEMLSGKPLFPGKDYHHQLTLILDVLGTPTMEDYYGIKSRRAREYIRSLPFKKKVPFKTMFPKTSDLALDLLEKLLAFNPVKRITVEEALKHPYLEPYHDPEDEPTANPIPEEFFDFDKNKDNLTKEQLKQLIYHEIMR

SEQ ID NO: 6351 - protein, 174 aa, Zea mays
MEDEEHEVYGQEIPVDGEDVDMSAGDDATKELDEMKRRLKEMEEEAAALREMQAKVAKDMQDPNATTSENKEEMDSRSVFVGNHVDYACTPEEVQQHFNSCGTVNRVTILTDKFGHPKGFAYVEFVEVEPVQEAIKLNESELHGRQLKVAPKRTNVLGMKHPPGGGFNPSRPKG

SEQ ID NO: 6352 - protein, 370 aa, Methanocaldococcus jannaschii DSM 2661
MRDIKDNPIRRGIAEQSEAMHPGYTNRAKPYGCKRDPKDIVLKESEDIEGIAIEGPWLEDDISLEEIIKKYYLKIGFQASHIGKAIKIWKHIEEKRKKGDEITVFFGYTSNIVSSGLREIIAYLVKHKKIDIIVTTAGGVEEDFIKCLKPFILGDWEVDGKMLREKGINRIGNIFVPNDRYIAFEEYMMEFFEEILNLQRETGKIITASEFCYKLGEFMDKKLKSKEKEKSILYWAYKNNIPIFCPAITDGSIGDMLYFFKKYNKDEELKIDVANDIVKLNDIAINSKETACIVLGGSLPKHSIINANLFREGTDYAIYVTTALPWDGSLSGAPPEEGVSWGKIGAKADYVEIWGDATIIFPLLVYCVMK

SEQ ID NO: 6353 - protein, 336 aa, Sulfolobus tokodaii
GFTVALIQGDGIGPEIVSKSKRILAKINELYSLPIEYIEVEAGDRALARYGEALPKDSLKIIDKADIILKGPVGESAADVVVKLRQIYDMYANIRPAKSIPGIDTKYGNVDILIVRENTEDLYKGFEHIVSDGVAVGMKIITRFASERIAKVGLNFALRRRKKVTCVHKANVMRITDGLFAEACRSVLKGKVEYSEMYVDAAAANLVRNPQMFDVIVTENVYGDILSDEASQIAGSLGIAPSANIGDKKALFEPVHGAAFDIAGKNIGNPTAFLLSVSMMYERMYELSNDDRYIKASRALENAIYLVYKERKALTPDVGGNATTDDLINEIYNKLG

SEQ ID NO: 6354 - protein, 344 aa, Streptomyces coelicolor A3(2)
MTGGMSAVVWAGVNDVRVEEVPMPEVPPGWALVRVACTGICGTDLGIVHGKHPRARQGLILGHEISGWVEVTAPGGPPEGALVVAEPLISCKDCRACREGHSHVCARLGLFGIDAPGGAAQFVALPTSTLHQVPSRVEPTQAALTEPLAVAVHAVSRSGMEAGDVVAVFGAGPIGILTALVARHEGASHVVVAEPNARRRAVASDMGLIAVPDGAQLRDMVAELSQGDGADTTFDSAAHPAVAAELADVTRVLGRVVIVGVYKEPAAVDLQAVCFKEQSVVGVRVYTREDFRTAIDLVAQNALGLDRFPVSVYGFDRISDAFDAAATGSGGLKVLISTHRDEAT

SEQ ID NO: 6355 - protein, 384 aa, Xanthomonas axonopodis pv. citri str. 306
MNDTATPGFKPKKSVALSGTAAGNTALCTVGRSGNDLHYRGYDILDLATTSEFEEIAYLLVHGKLPNRGELRGYKAKLRSLRGVPAAVKTALEQLPPSAHPMDVMRTGVSVLGCLQPEKDDHNHPGARDIADKLMASLGSMLLYWYHYSHNGKRIEVETEDDSIGGHFLHLLHGFAPKDSWVRAMHTSLILYAEHEFNASTFASRVIAGTGSDMYSAIAGGIGALRGPKHGGANEVAFEVQKRYDTPDEAEADIKARVERKEVVIGFGHPVYTVSDPRNKVIKVVARELSDEQGSRKMYDIAERLESVMWDIKKMFPNLDWFSAVSYHMMGVPTAMFTPLFVLARTAGWSAHIIEQRVDGKIIRPSANYTGPEDQVFVPLDQRS

SEQ ID NO: 6356 - protein, 270 aa, Nicotiana langsdorffii x Nicotiana sanderae
MTMSLLSYLSLLIFLSSLCAASVDVQKKFLQCLSVSDQKFPIYTTNNKNYSSVLQFSIQNLRFNTTKTPKPLVIVTPVSEAEIQRVILCAKESSIHVRVRSGGHDYEGLSYVSEDPFVLIDLVGHRNITINVDDKTAWVETGSTIGELYYKISKKSKTLGFPAGLCPTVGVGGHISGGGTGVMLRKYGLAADNVIDARLMDANGRILDRKSMGEDLFWAIRGGGGNTFGLVLAWKIKLVDVPEKVIVFTIDKTLEQNATKLVHKWQYVSS

SEQ ID NO: 6357 - protein, 418 aa, Nicotiana langsdorffii x Nicotiana sanderae
YEGLSYVSEDPFVLIDLVGHRNITINLDDKTAWVETGSTIGELYYKISKKSKTLGFPAGLCPTVGVGGHISGGGTGVMLRKYGLAADNVIDARLMDANGRILDRKSMGEDLFWAIRGGGGNTFGLVLAWKIKLVDVPEKVIVFTIDKTLEQNATKLVHKWQYVSSKLHQDLYIRIFIHKDEQNIFLASFVSIFLGDIDRLLLIMQENFPELGLVRENCIEMSWIESTLYFAGFPRGESLDVLRSRGLPPTLYSEAKADYVQKPISVQQLEGIWDFFNAGEAKFEQMIFTPYGGRMDEISEYELPFPHRPGNLYEIQYLMFWDEEGVEEAERHMRWMRRLYAHMEPLVSTSPRAAYINYRDLDIGVNNKKGNTSYAQAKVWGIKYFKNNFDRLVQVKTKVDPSNVFRNEQSIPPLVEQE

SEQ ID NO: 6358 - protein, 174 aa, Triticum aestivum
MAPAVMASSATTVAPFQGLKSTAGLPVSRRSSASLGSVSNGGRIRCMQVWPIEGIKKFETLSYLPPLSTEALLKQVDYLIRSKWVPCLEFSKVGFVFREHNSSPGYYDGRYWTMWKLPMFGCTDATQVLNEVEEVKKEYPDAYVRVIGFDNLRQVQCVSFIAFRPPGCEESGKA

SEQ ID NO: 6359 - protein, 250 aa, Nicotiana tabacum
MGKCYPTVSEEYLKAVDKCKRKLRGLIAEKNCAPLMLRLAWHSAGTYDVCSKTGGPFGTMRFKAEQGHGANNGIDIAIRLLEPIKEQFPILSYGDFYQLAGVVAVEVTGGPDVPFHPGREDKTEPPVEGRLPDATKGSDHLRDVFVKQMGLSDKDIVALSGGHTLGRCHKERSGFEGPWTTNPLIFDNSYFTELLSGEKEGLLQLPSDKALLSDPAFRPLVEKYAADEDAFFADYAEAHLKLSELGFAEV

SEQ ID NO: 6360 - protein, 370 aa, Agrobacterium tumefaciens str. C58
MTVRSLFLLPGDGIGPEAMTEVRKLIEYMNSAHNAGFTVSEGLVGGSAYDAHGVAISDADMEKALAADAILFGAVGGPKWDGVPYEHRPEAGLLRLRKDLELFANLRPAICYPALAAASSLKPELVEGLDILIVRELTGGVYFGEPKQIIDLGNGQKRGIDTQIYDTFEIERIASVAFELARSRDNRVCSMEKRNVMKSGVLWNQVVTETHAAKYKDVQLEHMLADAGGMQLVRKPKQFDVIVTDNLFGDMLSDVAAMLTGSLGMLPSASLGAPDAKTGKRKAMYEPVHGSAPDIAGKSIANPIAMIASFAMCLRYSFNMVDEATKLEAAIANVLDKGIRTADIMADGCRQVGTSDMGDAVLAEFKALSA

SEQ ID NO: 6361 - protein, 427 aa, Nitrosomonas europaea ATCC 19718
MPPQNVATLSPGKGKQEIELPIVSGNEGPDVVDIRSLYAQSGMFTYDPGFVSTASCKSAITFIDGDKGVLLYRGYPIEQLATRCDFMEVSYLLLNGELPTPDQKAKFVDNIKNHTMLHEQLIKFLSGFRRDAHPMAVMVGVVGALSAFYHDAMDVSDAQHREQSAFRLIAKLPTITAIAYKYNIGQPFIYPHNDLGFTENFLHMMFATPAEQYTPNPVIVRALDRILILHADHEQNASTSTVRLAGSSGANPFACISAGITCLWGPAHGGANEACLNMLEQIGDVSRINEYIARAKDKNDPFRLMGFGHRVYKNFDPRATLMRETCHEVLDELGLHNDRLFKLALELEKIALEDDYFITKKLYPNVDFYSGIVQRALGIPTSMFTAIFATARTVGWVAQWNEMISDPEQKIGRPRQLYVGAPRRDVP

SEQ ID NO: 6362 - protein, 208 aa, Arabidopsis thaliana
MTSSVVVAGAGDKNNGIVVQQQPPCVAREQDQYMPIANVIRIMRKTLPSHAKISDDAKETIQECVSEYISFVTGEANERCQREQRKTITAEDILWAMSKLGFDNYVDPLTVFINRYREIETDRGSALRGEPPSLRQTYGGNGIGFHGPSHGLPPPGPYGYGMLDQSMVMGGGRYYQNGSSGQDESSVGGGSSSSINGMPAFDHYGQYK

SEQ ID NO: 6363 - protein, 119 aa, Triticum aestivum
MAETAAIAPPPQPMAPPQPVEENATAAPSQPMAPPQPMAENATAAPPQPMAESATVVVVVPPPPPDGTTTFLCLILAFFIPPLGVFLKYKCEIEFWICLILTFLAYAPGIIQAVRVIVK

SEQ ID NO: 6364 - protein, 292 aa, Arabidopsis thaliana
MGVIINHHFLAFIFGILGNVISFLVFLAPVPTFYRIYKRKSTESFQSLPYQVSLFSCMLWLYYALIKKDAFLLITINSFGCVVETLYIAMFFAYATREKRISAMKLFIAMNVAFFSLILMVTHFVVKTPPLQVSVLGWICVAISVSVFAAPLMIVARVIKTKSVEYMPFTLSFFLTISAVMWFAYGLFLNDICIAIPNVVGFVLGLLQMVLYLVYRNSNEKPEKINSSEEQLKSIVVMSPLGVSEVHPVVTESVDPLSEAVHHEDLSKVTKVEEPSIENGKCYVEATRPETV

SEQ ID NO: 6365 - protein, 435 aa, Chromobacterium violaceum ATCC 12472
MTGSIAVETNRKVTLSYNEGKETLDLPVLGGTLGPDVVDIRGFGKTGMFTFDPGFLATASCESKITFIDGDLGHLYYRGYPIEQLAEKSDYLEVCYLLLNGELPTAAQRKEFERGVMRHNMLHDQLMSLFKGFRRDAHPMAVMVGVVGALSAFYHDSLDISNPEHRRISAHRLIAKLPTIAAQAYRYNKGLPFSYPKNGLTYAENFLHMMFSTPCEEYKVNPVLARALDRIFTLHADHEQNASTSTVRLAGSSGANPFACIAACIACLWGPSHGGANEAVLKMLDEIGSVDNVADFMQGVKDKRYKLMGFGHRVYKNMDPRAAIMKQTCDEVLNELGLHNDPKFKLAMELEKIALSDPYFIERKLYPNVDFYSGIVLSAIGIPVSMFTPIFALARTVGWIAHWNEMIGDPGMKIGRPRQLYTGAARRDFVEVAKR

SEQ ID NO: 6366 - protein, 454 aa, Bacteroides thetaiotaomicron VPI-5482
MPEYELIKVIGQGGMGSVYEGRSGDGKRVAIKMMNSKATMNPEFKELFYIEAAALKKMRHPSVVGIVDNPFSDEHGNMYLPMEYVDGETIEHHVEMAGPYTEFTAKDLMGKILDAMAYIHRMGCIHRDIKPSNIMVRPDGSICIIDFGIAKDMKTSTGKTIGRIIGTDGYMSPEQAKGDSIDYRTDIYSLGCLLHYMLTGSHAIKKRSNDYDTICSILNDEFPRAKTFNPHLSDQTQEAILKAVDKNMLRRFQTVMEFKSGLFRETVVDPNRVKVSVGRRECDITIPSDYISGHHLEIEYREERCTGSIHRYLLFTDSSTNGTSVDGKYLRHGSIKIPFSFENPSPLPNVWLAGRSEYLLDWDEVIQKLRDKGGRTVIMEEVVGDILPPTPPTPSVKEDKLGIGYGILSVVCPIVGWVLWAQWKKETPRRARAAAICGWIGFVVGFIINILSSI

SEQ ID NO: 6367 - protein, 101 aa, Glycine max
  misc_feature (61)..(61): Xaa can be any naturally occurring amino acid
  misc_feature (92)..(93): Xaa can be any naturally occurring amino acid
  misc_feature (95)..(95): Xaa can be any naturally occurring amino acid
STENQVNGEIYNHEELRKQLPNHTFRTGSDCDVIAHLYEEHGENFMDMLDGYFHLFCWISXNSFIVARDAIGVTSLTLGGGLDGSVWISSEXXGXNDDANF

SEQ ID NO: 6368 - protein, 132 aa, Chlorobium tepidum TLS
MLMKIAKDPMRLFDDIWSGSQMAVAPSFKVDISEDENAYHLDAELPGIAKEQIALNIEDDVLTIKAERTHKEEEKKKNYHRVERTYGSFSRSFNIGEIIDQEHIGATYDNGVLHVTLPKTQPAKKTKEIPIN

SEQ ID NO: 6369 - protein, 503 aa, Pisum sativum
MDIPIPTRQLFINGDWKAPVLNKRIPVINPATQNIIGDIPAATKEDVDVAVAAAKTALTRNKGADWATASGAVRARYLRAIAAKVTEKKPELAKLESIDCGKPLDEAAWDIDDVAGCFEYYADLAEKLDARQKAPVSLPMDTFKSHVLREPIGVVGLITPWNYPMLMATWKVAPALAAGCAAILKPSELASLTCLELGEICKEVGLPRSVLNIVTGLGHEAGAPLASHPDVDKISFTGSSATGSKIMTTAAQLVKPVSLELGGKSPLVVFEDVDLDKAAEWAIFGCFWTNGQICSATSRLILHESIATEFLNRIVKWIKNIKISDPLEEGCRLGPVVSEGQYEKILKFVSNAKSEGATILTGGSRPEHLKKGFFIEPTIITDVTTNMQIWREEVFGPVLCVKTFSTEEEAIDLANDTVYGLGAAVISNDLERCERVTKAFKAGIVWVNCSQPCFTQAPWGGVKRSGFGRELGEWGLDNYLSVKQVTQYISEEPWGWYQPPAKL

SEQ ID NO: 6370 - protein, 526 aa, Glycine max
  misc_feature (146)..(147): Xaa can be any naturally occurring amino acid
  misc_feature (157)..(157): Xaa can be any naturally occurring amino acid
MVSPISHLPLIIVLLLSFSLANSASLQESFVQCLNLNSDRTFPFYSSIYTPSNPSFTSILDSSAQNLRLLVPSAPKPEFIFTPSRDSHVQAAVICSKKLGIHIRVRSGGHDYEGISYVSEIETPFIVVDLVKLRGINVDVKSNTAXXVQAGATTGEXVYYRIYEKSSVHGFPAGLCTSLGIGGHITGGAYGSMMRKYGLGADNVLDAKIVDANGRILDRKAMGEDLFWALRGGGGGSFGILLWWKVKLVPVPPTVTVFTVKKTLEQGATKLLHRWQEVAPFLDENLFIRVRIQRAQSTVTTSYEGLFLGGARKLLKIMKTSFPELGVTRKDCMETSWIKSVLYIAGFPSGTPPEVLLKGKPIAKFFFKGKSDFVRKPIPETGLEGLRQRLLVEDSPLILWSPYGGRMNQFSESDTPFPYRNGTLFISLYISLWQEGEKNVAKHIDWIGNLHNYMGAYVPSFPRGQYVNYRDLDLGINTKNNTGNIQESAWGYRYFKNNFDRLVKIKTKVDPQNVFRHEQSIPPLPK

SEQ ID NO: 6371 - protein, 170 aa, Escherichia coli
  misc_feature (1)..(1): Xaa can be any naturally occurring amino acid
  misc_feature (25)..(25): Xaa can be any naturally occurring amino acid
  misc_feature (89)..(89): Xaa can be any naturally occurring amino acid
  misc_feature (140)..(140): Xaa can be any naturally occurring amino acid
  misc_feature (158)..(158): Xaa can be any naturally occurring amino acid
XSLKLISNDLRDGDKLPHRHVFNGXGYDGDNISPHLAWDDVPAGTKSFVVTCYDPDAPTGSGWWHWVVVNLPADTRVLPQGFGSGLVAXPDGVLQTRTDFGKTGYDGAAPPKGETHRYIFTVHALDIERIDVDEGASGAXVGFNVHFHSLASASITAXFSEGGSHHHHHH

SEQ ID NO: 6372 - protein, 240 aa, Arabidopsis thaliana
MGRGKIAIKRINNSTSRQVTFSKRRNGLLKKAKELAILCDAEVGVIIFSSTGRLYDFSSSSMKSVIERYSDAKGETSSENDPASEIQFWQKEAAILKRQLHNLQENHRQMMGEELSGLSVEALQNLENQLELSLRGVRMKKDQMLIEEIQVLNREGNLVHQENLDLHKKVNLMHQQNMELHEKVSEVEGVKIANKNSLLTNGLDMRDTSNEHVHLQLSQPQHDHETHSKAIQLNYFSFIA

SEQ ID NO: 6373 - protein, 331 aa, Zea mays
  misc_feature (34)..(34): Xaa can be any naturally occurring amino acid
RTRGLRELEALTNEIDEESQIVGEVLRIKELLLXREDHSDATLFDSLRRLQLMQLSVSTLKATEIGRAVNRLRKHNSRKIRHLVCTLIEGWKVLVDEWVSTTNAALTENSPGSSNPSVVDEEEEGLPSPPLDEGAFFATQTTSIQLSEFFDEMDEDGNLRHSNDPSLAKQEGQANPQTLQSSSLQAKPHGALNKQSNNPSSYESGPGRPVKAAQQRPFGDMKPKQTREHVAIERKPMASQTDKSRPGARPSAGAKLELAKPKVYDDGLDNNRKLEAAKRRLQERYQEAENAKRQRTIQVMELGDIPKPKNQNRQPVVKSRNSLRNWANGRR

SEQ ID NO: 6374 - protein, 347 aa, Sinorhizobium meliloti
MKAVRLESVGNISVRNVGIPEPGPDDLLVKVEACGICGTDRHLLHGEFPSTPPVTLGHEFCGIVVEAGSAVRDIAPGARITGDPNISCGRCPQCQAGRVNLCRNLRAIGIHRDGGFAEYVLVPRKQAFEIPLTLDPVHGAFCEPLACCLHGVDLSGIKAGSTVAILGGGVIGLLTVQLARLAGATTVILSTRQATKRRLAEEVGATATVDPSAGDVVEAIAGPVGLVPGGVDVVIECAGVAETVKQSTRLAKAGGTVVILGVLPQGEKVEIEPFDILFRELRVLGSFINPFVHRRAADLVATGAIEIDRMISRRISLDEAPDVISNPAAAGEVKVLVIPSAERVAQQ

SEQ ID NO: 6375 - protein, 482 aa, Chloroflexus aurantiacus
MLPLYIVEPSLIHAPDFAARHWTFIRGCLVELRANLARLGQPLVVRVGEAVEVLDHLVSTWPIEAIWAHEETGNLLSYARDRAVRRWARARGIPFHELPQNGVVRRLPSRDEWQARWEERMAAAQAQPPSALPPLAIDPGTIPTADELSLPPDTLSEHQPAGETAALQTLTDFIHRRSQQYHRALASPLTAWEGCSRLSAYLAWGALSIRTVVQATRHRISELAFDPSPATRGWVRALNAFESRLHWHCHFIQKLEDEPEIEVRNLVRAYDGMREENHRPDLLVAWASGRTGYPFVDACMRALTATGWLNFRMRAMLVSFVAYDLWQHWREPALILARRWIDYEPGIHYSQMQMQAGTSGNRTIRIYNPVKQGIDHDPEGIFIRRWVPELAHVPTPYIHTPWLLDRHGQERAGCRIGRDYPAPIVDHEAAYRRARAAIAAVRARPETAQEAAAVHQRHGSRTWRPQRRPSKTVSSRQLRLDL

SEQ ID NO: 6376 - protein, 492 aa, Streptomyces coelicolor A3(2)
MTHELFDSKGLLGSAPAAFVAGEYELDSSHGTLPVINPANGQLVAEVPSSSSSTVDRAVTAAVAAQREWGRRSHVARAAVLEAVRDAIAVHADELARIVSVEQGKPLSDARGETEGACAFFDFAISQKYRAVGSMMASEPGRSLGVREEPIGVVAAILPWNFPVAIFARKVAPALMAGNAVVLKPSELTPLSALALARLCRLAGVPDGLLSVVCGEGKDTGRALVTHPGVGMVTMTGSTRGGREILAQVADQIIPVSLELGGKAPFIVFEDADLDAAVEAAADARLWNTGQVCTCNEVTYVHADLHDEFVRRVVDRFASVTPLDPFAAGSRLGPLVAERERTRVQGMVDAAVAAGARVRTGGGRPDGEQYQSGAWFAPTVLTNVRPEMDIARREVFGPVLPIIPFDAEAEVVSAANSTAYGLTAYVYTRDLSRAMRMIDALEFGEVYVNQAGPEQVQGFHTGWKSSGLGGDDGPHGYEKYLRRKTVYVRHAV

SEQ ID NO: 6377 - protein, 221 aa, Triticum aestivum
  misc_feature (190)..(190): Xaa can be any naturally occurring amino acid
  misc_feature (213)..(213): Xaa can be any naturally occurring amino acid
MVLEAVMVVVDNSESSRNSDYQPTRFDSQVDAVNITFQSITQGNPESSVGLMSMGGKGPEVLVTLTTEQGKILEGLHRTKKKIGGSSHLKTGIQVATLALKHRQNRSQRQRIIVFVCSPVEESEKELTTLAKKMKKANISVDFVLFGDLDDDSTKNKLQLFIDTVKTNEGCHLVVIPPSSKLLSDQLVSXPILLGENAGGSGGAGGAGGGNDXVEFGFDPA

SEQ ID NO: 6378 - protein, 503 aa, Burkholderia cepacia R1808
MQFNDILAALDIDLAQWKGNALTARSPVDGATLATLAVDSPADAERKIDAAHAAFLKWRTVPAPVRGELVRVFGNVLREHKAELGRLVTLEAGKITSEGLGEVQEMIDICDFAVGLSRQLYGLTIASERPGHRMMETWHPIGVCGVISAFNFPVAVWAWNAALAFVCGDPVVWKPSEKTPLTAIACHQLLAKALREFDRTHPGVAPEGLHQLVLGMRDVGEVLTSSKKVPVISATGSVRMGQEVAKVLSQRLARGILELGGNNGMIVAPSADLDLVVRAVTFAAVGTAGQRCTTLRRLIVHRSIVDQLLPRIEKAYASVKVGSPLEEGTLVGPLVDRAAFDAMQKALADAREQGGEVKGGERVDVGHADAYYVRPALVRMPKQSAVVERETFAPILYVLVYDDFEQAIDVHNAVPQGLSSAIFTNDMREAEQFMSAAGSDCGIVNVNIGTSGAEIGGAFGGEKETGGGRESGSDAWKAYMRRATNTINYSRQLPLAQGVKFDV

SEQ ID NO: 6379 - protein, 432 aa, Wolinella succinogenes
MDNKTLAQEDLRYLWHPCTQMKDHEQFPLIPIARGKGVYLYDFEGNAYIDGVSSWWVNLFGHSHDYINSQIVEQMGRLEHVILAGFTHEPIIKLSKRLVEMTPHGLEKCFYADNGSSAIEVALKMSFHRHKIEGKKRALFLSLSNSYHGETIGALSVGDVALYKETYGEILLATLQTPVPRDLTQEATQEALEALEVILENRGEEISAFVLEPLVQCAGGMHMYSADYVKGASQLCRARGIHLIFDEIAVGFGRTGTLLALEQCGVVPDFLCLSKGITGGYLPLSVVMMSQETYDCFYAPYHENRAFLHSHSYTGNALACAAANATLDLLEDGSVLKNNRLLGERIDTHLKRLALHPRIGNARRTGMIAALDLLGFDPKERVGLRVYSEALKRGILLRPLGNVIYFMPPYVITLTEIDQVFEALEEVLGRIL

SEQ ID NO: 6380 - protein, 168 aa, Zea mays
MAAASSATSVHDFTVKDASGKDVDLSVYKGKVLLIVNVASQCGLTNSNYTELSQLYPKYKDQGFEILAFPCNQFGGQEPGTNDEIVQFACTRFKAEYPIFDKVDVNGSNVSPLYKFLKSSKGGLFGDSIKWNFSKFLVDKEGRVVDRYAPTTSPLSIEKDIKKLLGSS

SEQ ID NO: 6381 - protein, 409 aa, Sulfolobus tokodaii str. 7
MLYKEPEDGEKIKFDKGKWIVPNKPVILYIEGDGIGPEITNAAIKVINKAVERAYGSSREIKWLEVYAGEKAEKLVNDRFPKETQEMLLKYRVVLKGPLETPIGKGWKSVNVAIRLMLDLYANIRPVKYIEGLESPLKHPEKVDMIIFRENTDDLYRGIEYPFNSEEAKKIRDFLRKELKVEIEDDTGIGIKVMSKYKTQRITRLAIQYAIEHKRKKVTIMHKGNVMKYTEGAFREWAYEVALKEYRDFIVTEEEINQGKPDQGKIILNDRIADNMFQQIIIRPEEYDIILAPNVNGDYISDAAGALIGNIGMLGGANIGDEGGMFEAIHGTAPKYAGKNVANPTGIIKAGELMLRWMGWNEAADLIEKAINMAIRDKKVTQDIARFMGVKALGTKEYADELIKIMDTI

SEQ ID NO: 6382 - protein, 347 aa, Sulfolobus solfataricus
MRAVRLVEIGKPLSLQEIGVPKPKGPQVLIKVEAAGVCHSDVHMRQGRFGNLRIVEDLGVKLPVTLGHEIAGKIEEVGDEVVGYSKGDLVAVNPWQGEGNCYYCRIGEEHLCDSPRWLGINFDGAYAEYVIVPHYKYMYKLRRLNAVEAAPLTCSGITTYRAVRKASLDPTKTLLVVGAGGGLGTMAVQIAKAVSGATIIGVDVREEAVEAAKRAGADYVINASMQDPLAEIRRITESKGVDAVIDLNYSEKTLSVYPKALAKQGKYVMVGLFGADLHYHAPLITLSEIQFVGSLVGNQSDFLGIMRLAEAGKVKPMITKTMKLEEANEAIDNLENFKAIGRQVLIP

SEQ ID NO: 6383 - protein, 470 aa, Arabidopsis thaliana
MNIYTYTKSYVFPQMDQEEEEIEIPNYFICPISLEIMKDPVTTVSGITYDRQNIVKWLEKVPSCPVTKQPLPLDSDLTPNHMLRRLIQHWCVENETRGVVRISTPRVPPGKLNVVEEIKNLKKFGQEALGREETLQKLEVLAMDGNNRRLMCECGVHKSLILFVVKCTSEDEDGRRRIKGLDESLRLLHLIGIPSNDAKTILMENDRVMESLTWVLHQEDFLSKAYTIVLLRNLTEYTSSHIVERLNPEIFKGIIGFLKDVVNSVNRTSPTVRETVQSSSRPSLGKTEPSKLDHSLVIKQAVTAALMILLETSSWSRNRSLLVDLGAVSELIELEISYTGEKRITELMLGVLSRLCCCANGRAEILAHRGGIAVVTKRLLRVSPAADDRAISILTTVSKFSPENMVVEEMVNVGTVEKLCSVLGMDCGLNLKEKAKEILKDHFDEWKKFPCIDITLLTKLLSISPKGPKI

SEQ ID NO: 6384 - protein, 108 aa, Zea mays
MEDEEHEVYGQEIPVDGEDVDMAAGDDATKLQELDDMKRRLKEMEEEAAALREMQAKVAKEMQGVDPNATTSENKEEMDSRSVFIGNVDYAWCLRYQVVFLGQKKKKK

SEQ ID NO: 6385 - protein, 384 aa, Rickettsia bellii
DISKVYSEADCFTYDPGFMSTASCRSTITYIDGDQGILRHRGYDIKDLAEKSDFLEVAYLLIYGELPNNKLYNDFTKKVAHHALVNERLHYLFQTFCSSSHPMAIMLAAVGSLSAFYPDLLNFFKEADYELTAIRMIAKIPTIAAMSYKYSIGQPFVYPDNSLDFTENFLHMMFATPCEKYKVNPVIKNALNKIFILHADHEQNASTSTVRIAGSSGANPFACVSTGIASLWGPAHGGANEAVINMLKEIGSVENIPKYIAKAKDKNDNFRLMGFGHRVYKNYDPRAAVLKETCKEVLKELGQLDNNPLLQIAIELEAIALKDEYFIERKLYPNVDFYSGIIYKAMGIPPQMFTVLFATARTVGWMAQWKEMHEDPEQKISRPR

SEQ ID NO: 6386 - protein, 194 aa, Mirabilis jalapa
MMKNDMNKSGGGVIAKDVNDNTKVNGANNNADLAKPPAKAQVVGWPPVRSYRKNMLAVQKSTGAPESESEKPAANGGLVKVSMDGAPYLRKVDLKLYKSYQDLSDALGKMFSSFTLGNYGSQGMIDFMNESKLMDLINGSDYVPTYEDKDGDWMLVGDVPWEMFVESCKRLRIMKGKEAAGLAPRAMEKCKNRI

SEQ ID NO: 6387 - protein, 601 aa, Zea mays
GQPPRPSVVTCAAKQTLSGCCPLSSPRRAVGMEGGGVGDAYGEDRATEEQLITPWAFSVASGYTLLRDPRHNKGLAFSEAERDAHYLRGLLPPALASQELQEKKLMHNLRQYERPLHRYIAMMDLQERNERLFYKLLIDNVEELLPVVYTPTVGEACQKYGSIYRRPQGLYISLKDKGKILEVLKNWPERSIQVIVVTDGERILGLGDLGCQGMGIPVGKLSLYTALGGVRPSACLPITIDVGTNNEALLNDDFYIGLRQRRATGEEYHELLEEFMTAVKQNYGEKVLTQFEDFANHNAFDLLEKYRESHLVFNDDIQGTASVVLAGLLAALKVVGGTLADHTYLFLGAGEAGTGIAELIALEMSKHTGSPIEECRPKIWLMDSRGLIVASRKESLQAFKKPWAHEHGAVETLLEAVRSLKPTVLIGTSGKGGTFTKDVVEAMASQNERPVVFALSNPTSHSECTAEQAYTWTEGRAVFASGSPFPAVELDGRALVPGQSNNAYIFPGFGLGVVISGAIRVRDDMLLAASEALAEQVTEAHYAKGLIFPPFTNIRAISARIAAKVAAKAYELGLASRLPRPDDLVSYAESCMYTPTYRSYR

SEQ ID NO: 6388 - protein, 408 aa, Nicotiana tabacum
MDEATCSTNALPPFLTKTYEMVDDPSSDAIVSWSSSNKSFVVWNPPDFARDLLPRYFKHNNFSSFIRQLNTYGFRKVDPEKWEFANEDNFFRGQPHLLKNIHRRKPVHSHSAQNLHGLSSPLTESERQGYKEDIQKLKHENESLHLDLQRHQQDRQGLELQMQVFTERVQHVEHRQKTMLSALARMLDKPVTDLSRMPQLQVNDRKRRLPGNSCLYNETDLEDTRAISSRALTWENMNPSSLLTINAELLNQLDSSLTFWENVLQDVDQAWIQQNCSLELDESTSCADSPAISYTQLNVDVGPKASDIDMNSEPNANTNPEVAAPEDQAAVAGTTTNVPTGVNDIFWEQFLTENPGSVDASEVQSERKDIGNKKNESKPVDSGKFWWNMKSVNSLAEQLGHLTPAEKT

SEQ ID NO: 6389 - protein, 57 aa, Glycine max
MADDSTATCIDILLAIILPPLGVFLKYGCKVEFWICLVLTLFGYIPGIIYAVYAITK

SEQ ID NO: 6390 - protein, 233 aa, Ralstonia solanacearum
MSSPSLAAPALARARDRLARRRTAGVLSRHHLLIIAIAIVIAIIALLLPRTCHAAAGAQAAPAPQPAAAGPCPTALDFRVRRLQDDAPQNLCQYAGRVVLVVNTASYCGYTYQYEGLEALYARFRDKGLTVLGFPSNDFEQEPGTGKQIADFCYNTYGVKFPMFSKTSVVGPAASPLYHWLAQQTGQPPKWNFHKYLLDRSGRVVAVYPSKVEPGDPALIKRIDALLAEPAPR

SEQ ID NO: 6391 - protein, 301 aa, Aspergillus nidulans FGSC A4
MAPYSKTVKSSAYYSRYQTKYRRRREGKTDYYARKRLITQAKNKYNAPKYRLVVRFTNRDIVTQIVYSEITGDKVFASAYSHELKRYGITNGLTNWAAAYATGLLLARRTLKKLGLDEDFTGVEEPDGEFSLTEAAETEEGTRRPFKAFLDVGLARTSTGARVFGAMKGASDGGIFIPHSESRFPGYDIEAEELDAETLRSYIFGGHVAEYMEGLADDDEERFRGQFHKYTENEIDAGDIEELYAEAHKAIRADPFKKDESEGPKKTKEEWKAESKKYRKTKLSHEEKKARVEAKIRELAA

SEQ ID NO: 6392 - protein, 321 aa, Rhodococcus sp. X309
AAAGGKIDATADANKLALDVIGLAGFGYDFASFDGDEHPFVGAMSRVLEHVNRTSNDIPFLRKLRGNGADLQYEKDIAFVRTVVDDVITERQAKPGEHQDDLLDLMLNNIDDETGEKLDPVNIRNQVLTFLVAGNETTAGAIAFALYFLSRHPEIADAARAEVADITGGETPAFEDVARMRYLRRVVDETLRLWPSAPGYFRKVRTDTTLGGRYAMPKGSWVFVLLPQLHRDPVWGENPDSFDPDRFKPENVKKRPAHAYRPFGTGPRSCIGRQFALHEAVLSLATILQRYSFQSDPEYKLDVREALTLKPVGLELSLQRL

SEQ ID NO: 6393 - protein, 393 aa, Azotobacter vinelandii
MLTEQQRAIVKATVPLLETGGEALTSHFYRIMLAEHPEVRPLFNQAHQASGEQPRALANAVLMYARHIDRLEALGPLVAQIVNKHVSLQVLPEHYPIVGACLLRAIREVLGAETATDAVLDAWGAAYGMLAELLIGAEEAAYAAGAAVPGGWRGARAFRVARRVVESEEIVSLHLRPEDGGALPAFRPGQYIGLRLVLDGEEVRRNYSLSAAPNGEEYRISVKRHATGRVSRHLHEQVREGDRLELFPPAGEFVLNDSDKPLVLIGAGVGVTPLLAMLEAALPGGRPIRFIHCARHAGVQAFRQQVEALAGRHPQLEAFFCYSAPRAGDRADANGRLDAQRLAAWLPAERDLDAYFLGPKSFMAQVKRQLRELGVPQEQCHYEFFGPAQALEA

SEQ ID NO: 6394 - protein, 266 aa, Zea mays
TTTASVEPEGRRRRKKLGTRFPAARIKKIMQADEDVGKIALAVPVLVSRSLELFLQDLIDRTYEITLQSGAKTLNSFHLKQCVKRYSSFDFLTEVVSKVPDLGGADSCGDERVLPRRRKSNGSDPENDESRSSKMAIRNANISPRGRGRGRGRGRGRPPTKRKEVGYVQFEDESSMFAEQGEPLPGEETVQEINGNETMPQSTQPPVEAPPTALAQATTSSKAEEANTDHQSDWPMPDAIGSIGVVPSGFGHLTVQVEDEDYDNED

SEQ ID NO: 6395 - protein, 158 aa, Xanthomonas axonopodis pv. citri str. 306
MNIVRYPQFPTHALQNEIKHVFDRFFEQNGDTDESAVVTAQWVPRVDIKEEVNHFVLYADLPGIDPSQIEVQMDKGILSIRGERKSESSTETERFSRIERRYGSFHRRFALPDSADADGITAAGRNGVLEIRIPKRPAATPRRIQVGNGQNTSGSTVQ

SEQ ID NO: 6396 - protein, 371 aa, Zea mays
MDPFHGIVKEEFDLDFDFTCASAAAAAAASWAVALPEMPRPMEGLGEVGPTPFLTKTYDVVDDPNTDTIVSWGFAGTSFVVWDANAFALVILPRYFKHSNFSSFVRQLNTYGFRKVDPDRWEFANEGFQRGQRELLRTIKRRRPPSSPSAQQGQAPSACLEVGQFGLDGEVHRLQRDRGILLAEVVKLRQEQQATRAQMQAMEKRITTAEQKQQQMTVFLARAMKNPSFIRMLVDREGLGGCRRELEDALSRKRRRPIEYLPRDGERSGTATESAVSDYISGLPVGVNGVAEADDDERRWERRGGGGGGEDTESFWAKLLNLGLEEKHREGRCDGEEGNGADVDNDVDDDVDVLVQSIYHLNPNPGSPGGK

SEQ ID NO: 6397 - protein, 284 aa, Thermoplasma acidophilum
MNGMQTAEFDGTGRKVSVIGVGTWSLEGSRSENVRSIRYALDHGVNFIDTAEMYGTEDIVGEAIKGYRREDLFIATKVWPTHFAYHDVLKSCEESLKKLGTDYVDLYQLHWPNPSVSIKETMSAMEKLVDEGRIRYIGISNFSVKEMKEAMSALAKYRIVSNQLEYNVATREIEDEGIYDFCRKNGMAIIAYSPLSHGKIFGNEMILETLTDIGKKYGKRPAQVALNWIIRKGAFPIPKASKPIHMAENIESTDFTLSDEDMKTLDSLYQRHPIRSIASRYKGH

SEQ ID NO: 6398 - protein, 193 aa, Zea mays
MSAVNITNVAVLDNPTAFLNPFQFEISYECLVPLDDDLEWKLIYVGSAEDENYDQQLESVLVGPVNVGTYRFVLQADPPDPSKIREEDIIGVTVLLLTCSYMGQEFMRVGYYVNNDYDDEQLREEPPAKVLIDRVQRNILADKPRVTKFPINFHPEPSTGTGRQQQQQEPQTASPEKHAGSGEGNGSKPEADQ

SEQ ID NO: 6399 - protein, 360 aa, Pisum sativum
MDFSTNGSEESELYHAQIHLYKHVYNFVSSMALKSAMELGIADAIHNHGKPMTLPELSSSLKLHPSKVNILYRFLRLLTHNGFFAKTTVKSNEGEEETAYVLTPSSKLLVSGKSTCLSSLVKGALHPSSLDMWGVSKKWFHEDKEQTLFECATGENYWDFLNKDSDSLSMFQDAMAADSRLFKLAIQENKHVFEGLESLVDVAGGTGGVAKLIHEAFPHIKCTVFDQPQVVGNLTGNENLNFVGGDMFKSVPSADAVLLKWVLHDWNDELSLKILKNSKEAISHKGKDGKVIIIDISIDENSDDRGLTELQLEYDVVMLTMFLGKERTKKEWEKLIYDAGFSRYKITPICGFKSLIEVYP

SEQ ID NO: 6400 - protein, 440 aa, Rhodobacter sphaeroides 2.4.1
MAKLGKSAQPVLTHAEGIYVHTEDGRRLIDGPAGMWCAQVGYGRREIVDAMAHQAMVLPYASPWYMATSPAARLAEKIATLTPGDLNRIFFTTGGSTAVDSALRFSEFYNNVLGRPQKKRIIVRYDGYHGSTALTAACTGRTGNWPNFDIAQDRISFLSSPNPRHAGNRSQEAFLDDLVQEFEDRIESLGPDTIAAFLAEPILASGGVIIPPAGYHARFKAICEKHDILYISDEVVTGFGRCGEWFASEKVFGVVPDIITFAKGVTSGYVPLGGLAISEAVLARISGENAKGSWFTNGYTYSNQPVACAAALANIELMEREGIVDQAREMADYFAAALASLRDLPGVAETRSVGLVGCVQCLLDPTRADGTAEDKAFTLKIDERCFELGLIVRPLGDLCVISPPLIISRAQIDEMVAIMRQAITEVSAAHGLTAKEPAAV

SEQ ID NO: 6401 - protein, 503 aa, Glycine max
MAISIPSRQLFIDGEWKVPLLNNRFPIINPATEDIIGHIPAATKEDVDLAVDAAKRAFSHNKGKDWSSAPGSVRARYLRAIASKITEKKDELGKLEAIDCGKPLDEALADLDDVIGCFNYYAELAEGLDAKQNAPVSLPMETFKSYVLKEPIGVVALITPWNYPLLMATWKVAPALAAGCTAILKPSELASVTCLELAEICREVGLPPGVLNIVTGLGNEAGAPLSSHPDVDKISFTGSSATGSRIMTAAAQLTKPVSLELGGKSPIIVFEDVDLDKTAEWTIFGCFFTNGQICSATSRLIVHESIATEFVNRLVQWAKNIKISDPFEEGCRLGPIVSEGQYKKVLNCISTAKSEGATILIGGSRPEHLKKGYFVEPTIITDVTTSMQIWREEVFGPVLCVKTFSTEEEAIELANDTHYGLGSAVMSKDLERCERISKAIQAGIVWINCAQPSFIQAPWGGVKRSGFGRELGEWGLENYLSVKQVTKYISDEPWGWYQSPSKL

SEQ ID NO: 6402 - protein, 103 aa, Triticum turgidum subsp. durum
AVVAAMLLAVTEAAVSCGQVSSALSPCISYARGNGASPSAACCSGVRSLASSARSTADKQAACKCIKSAAAGLNAGKAAGIPTKCGVSVPYAISSSVDCSKIR

SEQ ID NO: 6403 - protein, 388 aa, Zea mays
MAGKGGSSNGGGGGRESKKPALLLGRYEVGKLLGQGNFAKVYHARSVRTGEEVAIKVMEKEKILKSGLMAHIKREIAVLRRVRHPHIVQLYEVMATKLRIYFVMEYVRGGELFARVARGRLREDDARRYFQQLVSSVAFCHARGVYHRDIKPENLLLDDAGELKVTDFGLSAVAEQMRHDGLFHTFCGTPAYVAPEVLSRRGYDAAKADLWSCGVVLFVLAAGYLPFRDRNLVAMYRKIHRGEFRCPRWFSPGLTRLLRRVLDTSPPRRATAAEIMGDEWFKVGFRRFSFRVEDDRSFTRFDLDDDASTSPPEPDTPRADAAAAGREKPRRVAAGLTSCASAPSLLQTPSLHISYNLARVITRGPSHPMHVLNVLKTHSNVSTVSSPS

SEQ ID NO: 6404 - protein, 159 aa, Glycine max
MDFRVMGLESPLFHTLQHMMDMSEDGAGDNKTHNAPTWSYVRDAKAMAATPADVKEYPNSYVFEIDMPGLKSGDIKVQVEDDNLLLICGERKRDEEKEGAKYLRMERRVGKLMRKFVLPENANTDAISAVCQDGVLSVTVQKLPPPEPKKPRTIQVKVA

SEQ ID NO: 6405 - protein, 383 aa, Rickettsia amblyommii
DISRVSAEADCFTYDPGFMSTASCQSTITYIDGDQGILRHRGYDIKDLAEKSDFLDVAYLLIYGELPSGEQYNNFTKQVAHHSLVNERLHYLFQTFCSSSHPMAIMLAAVGSLSAFYPDLLNFKEADYELTAIRMIAKIPTIAAMSYKYSIGQPFIYPDNSLDFTENFLHMMFATPCTKYKVNPIIKNALNKIFILHADHEQNASTSTVRIAGSSGANPFACISTGIASLWGPAHGGANEAVINMLKEIGSSEYIPKYIAKAKDKNDPFRLMGFGHRVYKNYDPRAAVLKETCKEVLKELGQLDNNPLLQIAIELEAIALKDEYFIERKLYPNVDFYSGIIYKAMGIPSQMFTVLFAIARTVGWMAQWKEMYEDPEQKISRPR

SEQ ID NO: 6406 - protein, 558 aa, Triticum aestivum
  misc_feature (88)..(88): Xaa can be any naturally occurring amino acid
  misc_feature (330)..(330): Xaa can be any naturally occurring amino acid
  misc_feature (343)..(343): Xaa can be any naturally occurring amino acid
  misc_feature (352)..(352): Xaa can be any naturally occurring amino acid
  misc_feature (369)..(369): Xaa can be any naturally occurring amino acid
  misc_feature (428)..(428): Xaa can be any naturally occurring amino acid
  misc_feature (515)..(515): Xaa can be any naturally occurring amino acid
  misc_feature (529)..(529): Xaa can be any naturally occurring amino acid
  misc_feature (540)..(540): Xaa can be any naturally occurring amino acid
MAAAAVASNGGAAPVPGRLASVYSEVQTSRIAHALPLPSVLRSHFTLADGPASTAAGSPDEIAKLFPCLYGQPSAAVVPSAEAGRDEXLKIGVVLSGGQAPGGHNVICGIFDYLQERAKGSTMYGFKGGPAGVMKGKYVELTTDFVYPYRNQGGFDMICSGRDKIETPEQFQQAEDTVNRLDLDGLVVIGGDDSNTNACLLGEYFRGRNLKTRVIGCPKTIDGDLKCKEVPTSFGFDTACKIYSEMIGNVMTDARSTGKYYHFVRLMGRAASHITLECALQTHPNVALIGEEVAEKKETLKNVTDYITDVVCKRAKLGYNYGVVLIPEGXIDSIPEIQKLIAXLNECYAIVXDEGGAWKASKLEPASRXFDFLPKTIQEQLLLERDPHGNVQVAKIETEKMLIAMVETELEKRRAAGKYSAHFRGQSXTHFFGYEGRCGLPTNFDSSYCYALGYGAGALLQFGKTGLISSVGNLAAPVEEWTVGGTALTALMDVERRHGKNKPVIKKAMVELDAXPFKKFASLRDEWAXKNRYISPGPIXFSGPGSDASNHTLMLSWR

SEQ ID NO: 6407 - protein, 297 aa, Triticum aestivum
MGDRPKLPARYEQVKLLGEGNFAKVYLARHMDTKEEVAIKVMDKEKLIKLGAVQQIKREIAVMRRLRHPNIVQLHKVMACKSRIFVVMEYVRGGPLYRHIPANSGLKEDETRRIFQQLVSALTFCHAQGVYHRDIKPDNLLVDEHGNLKVADFGLSAHADTARREALLHTVCGTPLYVPPEVFARRGYDGAKADAWSCGIVLFVLAAGRKPFRDDDFITLYRTICRGDYRCPRTFSPELVRIVRRLLQPNPAHRITLLQIKETDWFKKGFKEISFYIDNKDCLRSLDGSEELISVTL

SEQ ID NO: 6408 - protein, 336 aa, Agrobacterium tumefaciens str. C58
MLAIFCDTPGQLTAKDLPNPVRGEGEVLVRIRRIGVCGTDLHIFTGNQPYLSYPRIMGHELSGTVEEAPAGSHLSAGDVVTIIPYMSCGKCNACLKGKSNCCRNIGVLGVHRDGGMVEYLSVPQQFVLKAEGLSLDQAAMTEFLAIGAHAVRRGAVEKGQKVLIVGAGPIGMAVAVFAVLDGTEVTMIDGRTDRLDFCKDHLGVAHTVALGDGDKDRLSDITGGNFFDAVFDATGNPKAMERGFSFVGHGGSYVLVSIVASDISFNDPEFHKRETTLLGSRNATADDFERVLRALREGKVPEALITHRMTLADVPSKFAGLTDPKAGVIKGMVEVA

SEQ ID NO: 6409 - protein, 420 aa, Lotus corniculatus var. japonicus
MVLSNTASSGSESDLSIHSTFASRYVRTSLPRFKMPQESIPKEAAYQIINDELMLDGNPRLNLASFVTTWMEPECDKLIMASINKNYVDMDEYPVTTELQNRCVNMIAHLFNAPLGDSDTVGTVGSSEAIMLAGLAFKRTWQNRRKAEGKPHDKPNIVTGANVQVCWEKFARYFEVELKEVKLSEGYYVMDPQKAVDLVDENTICVAAILGSTLNGEFEDVKRLNDLLIEKNKETGWDTPIHVDAASGGFIAPFIYPELEWDFRLPLVKSINVSGHKYGLVYAGIGWVIWRNKEDLPEELIFHINYLGADQPTFTLNFSKGSSQIIAQYYQLIRLGYEGYKHVMENCRDNMLVLKEGLQKTGRFEIVSKDNGVPLVAFTLKDHTHYNEFQISDSLALRVDSAGIQHAPKYSARDRGPCSH

SEQ ID NO: 6410 - protein, 452 aa, Arabidopsis thaliana
MIDKPNQIMEEEGRFEAEVAEVQTWWSSERFKLTRRPYTARDVVALRGHLKQGYASNEMAKKLWRTLKSHQANGTASRTFGALDPVQVTMMAKHLDTIYVSGWQCSSTHTSTNEPGPDLADYPYDTVPNKVEHLFFAQQYHDRKQREARMSMSREERTKTPFVDYLKPIIADGDTGFGGTTATVKLCKLFVERGAAGVHIEDQSSVTKKCGHMAGKVLVAVSEHINRLVAARLQFDVMGTETVLVARTDAVAATLIQSNIDARDHQFILGATNPSLRGKSLSSLLAEGMTVGKNGPALQSIEDQWLGSAGLMTFSEAVVQAIKRMNLNENEKNQRLSEWLTHARYENCLSNEQGRVLAAKLGVTDLFWDWDLPRTREGFYRFQGSVAAAVVRGWAFAQIADIIWMETASPDLNECTQFAEGIKSKTPEVMLAYNLSPSFNWDASGMTDPLTC

SEQ ID NO: 6411 - protein, 75 aa, Glycine max
  misc_feature (66)..(66): Xaa can be any naturally occurring amino acid
MAFSMISSPAVTTVNRAGAGMVAPFTGLKFMAGFATRKTNFDFTCIASNGGRVQCTHVRPPVAKKXFATLSYLSD

SEQ ID NO: 6412 - protein, 146 aa, Vitreoscilla stercoraria
MLDQQTVDTSKATVPVLKEHGVTITTTFYQNLFAKHPEVRPLFDMGRQASLEQPKALAMTVGAAAQNIENLPAILPAVQKIAVKHCQAGVAARHYPIVGQELLGAIKELLGDAATDDILDAWGKAYGVIADVFIQVEADLYAQDAE

SEQ ID NO: 6413 - protein, 487 aa, Zea mays
RPPAQGRRLPVVNPTTEAHIGEIPAGTAEDVDAAVAAARAALKRNRGRDWARAPGAVRAKYLRAIAAKVIERKQELAKLEALDCGKPYDEAAWDMDDVAGCFEYFADQAEALDKRQNSPVSLPMETFKCHLRREPIGVVGLITPWNYPLLMATWKVAPALAAGCAAVLKPSELASVTCLELADICKEVGLPPGVLNIVTGLGPDAGAPLSAHPDVDKVAFTGSFETGKKIMAAAAPMVKPVTLELGGKSPIVVFDDVDIDKAVEWTLFGCFWTNGQICSATSRLLVHTKIAKKFNERMVAWAKNIKVSDPLEEGCRLGPVVSEGQYEKIKKFILNAKSEGATILTGGVRPAHLEKGFFIEPTIITDITTSMEIWREEVFGPVLCVKEFSTEDEAIELANDTQYGLAGAVISGDRERCQRLSEEIDAGIIWVNCSQPCFCQAPWGGNKRSGFGRELGEGGIDNYLSVKQVTEYISDEPWGWYRSPSKL

SEQ ID NO: 6414 - protein, 290 aa, Triticum aestivum
  misc_feature (215)..(215): Xaa can be any naturally occurring amino acid
MAISTDSRGEEKPSQHSQEEKRWVLSDFDVGKALGRGKFGHVYLAREKRSSQIVALKVLFKSQLKQSQVEHQLRREVEIQSHLRHPNILRLYGYFYDQTRVYLILEHAAKGELYKELQRCKHFSERRSATYIAYRKTLLVGVQGELKIADFGWSVHSFGVQGELKIADFGWSVHTFNRRRTMCGTLDYLPPEMVEKTEHDYHVDIWSLGILCYEXLYGRPRFDAKEHSETYRRIVKVDLKFPLKPFVSPAAKDLISQMLVKNSAHRLPLHKVLEHPWIVQNADPSGVYRG

SEQ ID NO: 6415 - protein, 258 aa, Pyrobaculum aerophilum str. IM2
MKETWRLVRRVVEDGDIVLEVLDARDPEATRSVEVEKIAEELGKRLLVVLNKADLVEREIAEQWKSYLESRGMNVVYISAKYRLGTRKLITHIRALAPRIPATVVVVGYPNVGKSTIINYLKGRHVAPTSPKPGWTRGEQLVKAKSWLTVLDTPGIVRTKSTGDLALDVIRGLVDPGTVDDPVPYAYALLKRVVKHNPDALKEAYGIESDIDNALVEIGKVKRRLLKGGRINIEEAARIVLKDWIVGKLRYALPPPNV

SEQ ID NO: 6416 - protein, 335 aa, Xylella fastidiosa Ann-1
MTQTITVIRGDGIGPEIMDATLSVLNALQANLNYEFADAGLSALEKHGDLLPEATLNSISKNKIALKSPLTTPVGEGFSSINVALRRKFDLYANVRPAKSFPNTKSRFSDNVDLITVRENTEGAYLSEGQTISPDGEVATSRARVTRKGSERIVRYAFDLARTTGRKKVTAVHKANIIKSTSGLFLKTARDVASQYPEIDFQEMIVDNTCMQLVMRPEQFDIIVTTNLFGDILSDLCAGLVGGLGLAPGANIGNEQAIFEAVHGSAPDIAGQGKANPCALLLGAVQMLDHIGQPQNAERLRNAIVATLNAKDSLTPDLGGNGNTMGFAKAIASRL

SEQ ID NO: 6417 - protein, 346 aa, Bacillus sp. KSM-K16
MRASVLKALKTIELEERTKPKPGAGEVLIQMKAVGICGSDLHYYEHGRIGERVAKPPFVLGHECAGVVTKVGPEVADLNVGDHVVIEPGLPCGECSSCRVGHYNLCPKVLFLSSPPNDGVLMEYICHPAKFTYKMPEGLSFELASLAEPLSVGLYTAQKTSIQPGSNIVIMGMGPVGLCMILAAKWYGASNIVVTDIEPYRLEIAKKIGAMDTIQVNHEADRAGLLAEADRLGGFDMVIDTSGAEAAFDMAVNLLKRGGTIGGIGFPGGAKSTIPLLKMMQREIVYQPIYRYRHTFKHALALLEKEQEAAQLLLTDFFPMSQISAAFDYAASNKDKSIKVIIHPDK

SEQ ID NO: 6418 - protein, 318 aa, Anabaena variabilis ATCC 29413
MKGLWLENNQLQLLTDIPIPEPAPEEALVRVLRAGICNTDLELLRGYYPYTGILGHEFVGVVEQGPENLLNQRVVGEINAVCGYCRFCRRGQPTHCENRTVLGIVNRHGAFAEYLCLPVKNLHPVPENVATEVATFTEPLAAALEIQQQVILSKDDRVLVVGDGKLGQLVAQTLALTGCELLVVGRHQEKLANLKVRGIQTGLVDAVQDRAFDIVVECTGNPEGFAIARRALRPRGTLVLKSTYAGNLSLDASSLVVDEITLIGSRCGSFPPALELLATGKVDVEPLIHAHYPLSQGLLAFEEAQRRGVLKVLLEIGN

SEQ ID NO: 6419 - protein, 273 aa, Lactobacillus gasseri
MKQLTLNNDVKIPIFGFGTYEISPDQTKQAVLSAFEEGYRLIDTAQYYQNEQQVGEAVKASGLNRDEVFITTKTMTDGYEDTKIGLDESLRRIGLDYFDLVLIHWPMGHDIDTWHALEAAYKAGKTRAIGISNFNSRQTLDLIHQSSVRPMVDQIETHLFLQQWKMHEFLEKENIVHESYSPLGNGQQNLISNPVLKEISEKYGKSPIQVILRYLVQNDVVTIPRSTNPAHIKSNIDIFDFELDNDDLKRLRVLDERKPIDGWPAEMREDEDY

SEQ ID NO: 6420 - protein, 505 aa, Synechococcus elongatus PCC 6301
MLSKELFQMPRGVAPAFAGRKPKGWAWASTAVPDFQGGFKRLINRFQGSKLWLACVPLAATIAVFWGVAANAQGSADPVPSAQFLVNNLWLMVATVLVIFMNAGFAMVETGLCRQKNAVNVLAKNLIVFTLAATAYWFIGYSLMYGSPVVDGFLYFGKGGPLGFFFDPTVSAETIKNDGLISSLDFLFQAAFAGTAATIVSGSVAERIKFVDFIIFSLILTAVIYPIAGSWQWNVGSGWLNKAGFIDFAGSTVVHSVGGWAALIGAITLGPRMGKFQDGRPGALPGHNLAIATLGALILWIGWYGFNGGSVLAFNTAVPYVAVTTTLGGAAGGISATITSWSTSGKPDLSMVINGILAGLVGVTAGCDGFGMGGSFIVGLIAGVLVVFSVYTFENLKIDDPVGACSVHLVCGIWGTLAVGLFNLEKGLFYGGGFGQLGSQILGIISYGVWTVVASVIIWNILKALLGLRVSPEEELQGLDIGEHGMEAYSGFAKDASNALSSISE

SEQ ID NO: 6421 - protein, 110 aa, Populus tomentosa
MDTDVTMVPAGEASSSSSRKPKRFEIKKWNAVALWAWDIVVDNCAICRNHIMDLCIECQANQASATSEECTVAWGVCNHAFHFHCISRWLKTRQVCPLDNSEWEFQKYGH

SEQ ID NO: 6422 - protein, 270 aa, Aspergillus nidulans FGSC A4
MATNARYEPAPQRDSFEDQHYTQAPPSYQATAQEPTPRSEDDNVPDDFKFGGTVAEGTLPIRMQFIRKVYAILTVQLLLTTVMSSISFFSPSYCEWIRSNVWLMMVSVFGAFGFLLVTYWKRKSYPANLLFLSAFTILEAYSISVVTSYYQPRIVVQALILTLGLFVGLTLFACQTKYDFTNWMPYLFGALWFLILFGFVAAFVPHGSTMELIYGSLAALIFSGYILVDTQLIMRHYHVEEEIAASISLYLDILNLFLAILRILNNQNNN

SEQ ID NO: 6423 - protein, 192 aa, Zea mays
MSLCTIARRLCLSKPSSVNRLSVIWAHLYSTEAAKDTGAKKYKYPDVYDPYGPMSLPSEKVVDLADRIAALPPEEIKQIAPALLFRLNQEPPQAISGQGFSFGAQGGAGVGAGKAEEKKAEKTVFDVKLEKFDAAAKIKIIKEIRTFTDLGLKEAKELVEKAPVILKQSLTKDEAEAIIGKIKAAGGVAVME

SEQ ID NO: 6424 - protein, 160 aa, Glycine max
  misc_feature (111)..(111): Xaa can be any naturally occurring amino acid
  misc_feature (114)..(114): Xaa can be any naturally occurring amino acid
MEPMDIVGKSKEDASLPKATMTKIIKEMLPPDVRVARDAQDLLIECCVEFINLVSSESNEVCNREDKRTIAPEHVLKALQVLGFGEYIEEVYAAYEQHKLETMQDSLRGGXWWXKWNNGAEMTEEEALAEQQRMFAEARARMNGGAIASKQPDADQSLDS

SEQ ID NO: 6425 - protein, 625 aa, Zea mays
MAGPEKTVVWFRRDLRIQDNPALAAAAKGGSVLPIFIWCPSDYGQYYPGRCSRWWLKQSLVHLGKSLELLGCPLVLIRAEDSTLAALLECVRSISATRVVYNRLYDPISLVLDNKIKNELPAHGISIQSFNGDLLYEPWDVYDENGQAFTTFNKYWEKCMSLPIEISQYLAPTRLVAAPGLANVRCCSIDDLGLESSKDVESSNALLSRAWSPGWRNAENMLEEFVSYGLLEYSEHGMKVGGSTTSLLSPYLHFGELSVRMIYQLVKMRQVKWQNEGKSEAEESVRLFLRSIGFREYSRYLCFNYPFTHERSFLGNLKHYPWLLDEGRFKSWRQGMTGYPLVDAGMRELWATGWTHNRIRVIVSSFAVKFLQIPWIWGMKYFWDVLLDADLESDILGWQYISGSLPDGHELSRLDNPEVQGQKYDPDGEYVRTWIPELARMPTEWIHSPWAAPNSILQVAGVELGFNYPKPIVELHMARECLDDAISTMWQLDTAAKLAELDGEVVDDNLNNIRNFDIPKVVLNKKLSPSTSSMEHRVLSTNGKDEKSQPTEVKALYKQIIRDDMMNDSNMDDTCSTANLKVTRKRSSSDSYFQKTADRDGTSKVEDNDSEDSGTSISRPSKKAA

SEQ ID NO: 6426 - protein, 355 aa, Blumeria graminis
MSTRAPNATTGSRKISFNVSEQYDIQDVVGEGAYGVVCSALHKPTGQKVAIKKITPFDHSMFCLRTLREMKLLRYFNHENIISILDIQKPRSFDSFTEVYLIQELMETDMHRVIRTQDLSDDHCQYFIYQTLRALKAMHSANVLHRDLKPSNLLINANCDLKVCDFGLARSAASQEDCSGFMTEYVATRWYRAPEIMLTFKEYTKAIDVWSVGCILAEMLSGKPLFPGKDYHHQLTLILDVLGTPTMEDYYGIKSRRAREYIRSLPFKKKIPFKQMFPKTSDLALDLLEKLLAFNPVKRITVDEALQHPYLEPYHDPEDEPTADPIPEEFFDFDKNKDNLSKEQLKELIFQEIMR

SEQ ID NO: 6427 - protein, 433 aa, Pseudomonas syringae
MSGMAGWVDLRHGVGQQANLPHSKVTKVILDMIAAMAGRGPDGQAVWLGPDLALGHCSTVASRYDFNEQPWIGEIRGATVAIMYTGQIYNMWQLQQELASFGPAPDRWSYAEIIRARLWRGYGTARSALRACSLLPLDGQKRELLLARDRLGLQPLYYTLTDGGIIFASVPTAIQAHPQFTAKLDRSALAIVLQPRMAMPGETPLKGLHELPPANVLSFSKRGHTQVRYWQLESAPHTDNFEQTSDHVRALLEGVVARQFEDQVPSAAMLSGGIDSTSVAALVMKQLATRGAGPALDTFCLKFDTDEDAFTSSELRPDIDAPFAALAAEYMGTRHTTLSATMQDLLNVIPATRTARGLPGWGQFDASMYLLFERMRDNFSVALTGEAADEIFGGYPYYFKPDLLARAQFPWLGDGPKLADYLSPALITAQQVA

SEQ ID NO: 6428 - protein, 495 aa, Shigella flexneri 2a str. 2457T
MNFHHLAYWQDKALSLAIENRLFINGEYTAAAENETFETVEPVTQAPLAKIARGKSVDIDRAVSAARGVFERGDWSLSSPAKRKAVLNKLADLMEAHAEELALLETLDTGKPIRHSLRDDIPGAARAIRWYAEAIDKVYGEVATTSSHELAMIVREPVGVIAAIVPWNFPLLLTCWKLGPALAAGNSVILKPSEKSPLSAIRLAGLAKEAGLPDGVLNVVTGFGHEAGQALSRHNDIDAIAFTGSTRTGKQLLKDAGDSNMKRVWLEAGGKSANIVFADCPDLQKAASATAAGIFYNQGQVRIAGTRLLLEESIADEFLALLKQQAQNWQPGHPLDPATTMGTLIDSAHADSVHTFIREGEGKGQLLLDGRNAGLAAAIGPTIFVDVDPNASLSREEIFGPVLVVTRFTSEDQALQLANDSQYGLGAAVWTRDLSRAHRMSRRLKAGSVFVNNYNDGDMTVPFGGYKQSGNGRDKSLHALEKFTELKTIWISLEA

SEQ ID NO: 6429 - protein, 443 aa, Photorhabdus luminescens subsp. laumondii TTO1
MSKTHYSESLNLKSHWMPFSANRSFQRDPRLIVAAEGQWLKDDKGRQIYDSLSGLWTCGAGHTRTEIQQAVAAQLSTLDYSPGFQFGHPLSFQLAEKIANLTPGDLNHVFFTSSGSESVDTAVKMVRAYWRVKGQPEKTKLIGRALGYHGVNIAGTSLGGIGGNRKMFGQLMDVDHLPHTLQTDMAFTPGMAETGGAELANEMLKLIELHDASNIAAVIVEPVSGSAGAIIPPKGYLQRLREICDQHNILLIFDEVITGFGRMGRWTGAEYFGVTPDLLNFAKQITNGAIPLGGVVASSEIYEAFMSQSLPEHSVEFSHGYTYSAHPVACAAGLATLDLLDKNHLIQRSAELAPHFETALHALRNCPNVTDIRNCGLVGAIELAARDGDTAVRPFDASMALWKAGFYVRFGGDTLQFGPMFNAERADLDRLFDAVGEVLHHID

SEQ ID NO: 6430 - protein, 348 aa, Actinosynnema pretiosum subsp. auranticum
MTLTDDEHTAHRHDEGAAAFQALATAAAGWGALRAAVELRLPDLLPDAPTAVPDLAALAGVAPTRLAQLVAVLADVGVLALDERAHVRHTPLSRALRSTDGLALTRLLTAGWADEAWRGLAEGVRTDTSPLELVHGRPLFDLLAADPAAAAVFHDAVATGPGDPFDEAIRSALDLTGAARVVDVGGGRGRLLAALLREHPVLSGVLFDLPEAVRDAVPELRGDDRVQIRAGDLFADRVGAADVYVLRTVLHVLDDAQAVRALANVRADAPAHARVVVVEALSDDEANRTYAAHSSLRLFVLCGGRERSTAEFAELFDRAGLELRSVTPTGTPYHLLEGAPRLSPRTDG

SEQ ID NO: 6431 - protein, 1148 aa, Photorhabdus luminescens subsp. laumondii TTO1
MKSEFKEGYCTLCRSRCGTVNEVRNDTLIKIQQNPKHPTGNAMCMKGKAAPELAHSPNRILHPLRRTNPKGDADPGWEKITWDEALTYVAEKLAFYKAESGAESVAFSVTSPSGTPLSDSLEWIERFIRNFGSPNVCYSTEVCNWHKDEAHKFTFGCSIPVADYRNAELIILWGHNPTNTWLAQAEALGAGRNAGAKLIVVDPRHTALAKESDNWLNINPGTDAALALGLINIIINRRGYDQAFVARWTNASLLVRNDNGLFLREKDINISAKKNRYVVWNNITQSPLPYDIHENVPCDENDHYALLGEFSINSAEDVNKKIPCKSAFQRLLNECQPYTPEYVEKITGITKEKLLYAADLIISSKRIAYHSWTGVAQHTNATQSERAIAVLYALTGCFDTQGSNRVYNKHPVNPVNARRLMPKEQQEKALGFKERPLGPPLDGWITSHDLYQAILHKRPYPIRAMMAFGTNMLSSHADTKIGIDALKQLEFHVHCDLFETPTAHYADILLPVNTPWEREGLRVGFEISAKAEELVQLRQKMISPRGESRSDNEIVFDLACRLGMNDLFFNGSVEAGWNYILEPIGLTVEALREKPAGISMPLIQHDRKYAGIDPVKNTVKGFDTETGVVEIYSEKLWRHGYPPLPIYDEPKENLNSESHFPYRLTSVKNGFYCHSQQRSLTRLRKKSPYPKLEINSRLAEKKGINNGDWVEVITRNGEARFKASLDDNIAYDTIIAEFGWWQACPDYGKEGFPAIGKNSSNYNALISDDSCDPISGASPLRSFRCDIKLAEDINPERRPWQGRKAFRVVDTKPEAKGVKTVIFESQDGTMLPDYEPGQHITVQVSIPGQDAPVIRAYSLTGTATLEGRKSYSISVRHQKSITSDGETFEGVMSSYINKTLVAGAEVNLTPPGGNFIIPLNAKQPVVMLAGGIGITPFISYLESLPANGEKPELLLLYANQNSNTHTFSKRLKEIESKIKQLKVINYYSNPLPVDIEGINYQYHGYITADAVPETLIKQQARFYMCGPAPMMKTFEEGLLTLGVPPFDIYKEMFRSLTPVKIKDGKSFAVKFEKSGVPLEWSPDKGTLLNFGEKSGIKMASGCRVGQCESCAVKLKSGEVQHLNGVEPSEQGMCLTCQCIPISDISIDA

SEQ ID NO: 6432 - protein, 496 aa, Synechococcus sp. WH 8102
MTSSGKVRIYELSKDLGLENKDVLDAAEKLSIAAKSHSSSISDAEAGQIRSLLKSKGNGSKASAPAPAKPAPGKAILSVKKAAPAKPAPAQAKPATPAKPAASASKPAAPAKPAAPAAPARPAPARAAAPAAPAKPVPRPAAAPPPRPQPAKPEVVSKPKPATPATASAPSKPTAPPARPTVVKPTVAKPTVAKPTVAKPTVAKPAPAKPAAAKPAPARPAPARPAPARPSADQPKPRPAAAPSRPTPGAGQKPQIVSRPGSAPRPGAPTRPGAPAPARPGAPVKAGPPTRPTPRPELVGKPVPRRPGTGAPTRSGAGAPQRPGTGVPQRPGSPGRPTRPGAPARSGGNTLELVGKPIRRDGSSTGSGGRPAPPTRPGAGSPQRPGMPSGMRKPVAPGELMQLQKPVGRPAAPAPRRPDAPTKAGDGAGTATPPVARPTPPTAPRRPGGFRPGAPGGQRRLDVRTGMTAPSWKPCAAVRHRSSARRSTSSARTTMR

SEQ ID NO: 6433 - protein, 223 aa, Oryza sativa (japonica cultivar-group)
MAWIGLCVLQKSPFLLCCGPCLEAPGRSGGGGGRRRGGDDGSAGRGGGKLGRSRAEQRGGRSGRSRAAEVAGGGGRRRDGELADPELTPAAAAAAAVAALAREGASSRTRPTAPLPWICSCFLFLFLKILTANTSLFGMSEFLLIYTVEHLFFAQLYDDRKQREACMSMSRAEHAHESYVDYLKPIIADVPSLRELLERIPAPEVERLRTGCGSGKKRGARRR

SEQ ID NO: 6434 - protein, 323 aa, Candida shehatae
MSPSPIPAFKLNNGLEMPSIGFGCWKLDKSTAADQVYNAIKAGYRLFDGAEDYGNEQEVGEGVKRAIDEGIVTREEIFLTSKLWNNYHDPKNVETALNKTLKDLKVDYVDLFLIHFPIAFKFVPIEEKYPPGFYCGDGDNFVYEDVPILETWKALEKLVKAGKIRSIGVSNFPGALLLDLFRGATIKPAVLQVEHHPYLQQPKLIEYAQKVGITVTAYSSFGPQSFVEMNQGRALNTPTLFEHDVIKAIAAKHNKVPAEVLLRWSAQRGIAVIPKSNLPERLVQNRSFNDFELTKEDFEEISKLDINLRFNDPWDWDNIPIFV

SEQ ID NO: 6435 - protein, 306 aa, Photorhabdus luminescens subsp. laumondii TTO1
MPLDKNVEKWLASTPEIAIGEDSPLEQLRIVLEHALIQQQGEWNDATYNSSFTVLAEDGFPIPVRMYVPYGKEKMSDKPALVYAHGGGWCLGSLDAWDRPCRKLAESMGCVIFSVDYRLAPENPFPVPLTDFYAALCYVTDNAEKFGINRQQIAVGGDSAGGNLAVAACLMSRNQEGPAICYQLLFYPALDASMETDSYDKYGEGYVLTKQMMAFFWQAYINEHNSRTNPLISPSHLTHFEGLPDATILLCEYDPLRSEGEAYAQQLRDAGVSVQIETIEGMIHGAMHMTAVTPSVEAFYKKFCFC

SEQ ID NO: 6436 - protein, 479 aa, Streptomyces coelicolor A3(2)
MSTELRRLRNYIDGEFRDAADGRTTEVVNPATGEAYATAPLSGQADVDAAMAAAAAAFPAWRDLVPAERQKALLKIADAFEERAEELIAAEVENTGKPIGLTRSEEIPPMVDQIRFFAGAARMLEGRGAGEYMEGLTSFVRREPIGVCAQVAPWNYPMMMAVWKFAPALAAGNTVVLKPSDTTPASTALMADIIGSIVPKGVFNVVCGDRDTGRLMVEHETPAMASITGSVRAGMSVAESASKDLKRVHLELGGKAPVVVFEDTDIPKAVEGISEAGYFNAGQDCTAATRVLVHESVHDEFVSALAKAASEIKTGQPDDEDVMYGPLNNPNQLKQVSGFIERLPAHAKVEAGGHRVGDKGYFYAPTVVSGLKQDDEIIQREVFGPVITVQAFRDEDQAVEWANGVEYALASSVWTKDHGRAMRMSKKLDFGCVWINTHIPLVAEMPHGGFKKSGYGKDLSGYGFEDYTRIKHVMTSLDM

SEQ ID NO: 6437 - protein, 299 aa, Arabidopsis thaliana
MFSTLETLILKYLALVDVPSPVCMKSLRTLHLDCVNFKHNESFSNLISGCPNLEDLFMYQYYPLDVVMNFIIVAPSLKRLVIIDYREAGGYVINAPTLKYLKIKGLSHCGFCLIENAPVLVEAKIRNLFYIYKEKILGSLKSAKRLSLDLSPLECPIDSIFYQLVHLEIYTCKEEWWNLLKLMLDSSPKLQVLKLIGKNLDFKKVGMVGGKWNEPKNVPECLLSQLKMFVWTSYHWESEVEKEVATYILKNARQLKNVSFSTRPIHSKEHNKLEEKCKMLKELDGVVRASSSCHLVFIE

SEQ ID NO: 6438 - protein, 493 aa, Zea mays
MDQPPNGFAAGGFFTHIDGQNRSPPSIIVIGGGISGIAAARALSTASFNVTLLESRDRLGGRVHTDYSFGCPIDMGASWLHGVCNENSLAPLIRMLGLRLYRTSGDNSVLYDHDLESYALFDKHGQQVPQEIVSKVGETFERILKETVIVRDEHANDMPLFQAIGIVFDRNPHMKLQGLEYEVLQWCICRLEAWFATDMDNISLKTWDQEHMLTGGHGLMVNGYDPVIRAPAQGLDIHLNHRVTKIIQRYNKVIVCVEDGASFVADAAIVTVPLGVLKANIIKFEPELPKEKLSAIADLGVGIENKIALKFDTVFWPDVEVIGRVAPTSNACGYFLNLNKATGNPVLVCMVAGRFAYEIEKLSDEESVNFVMSQLRNMLPQATDPVQYLVSRWGSDPNSLGSYSCDLVGKPADLYERFCAPVGSLFFAGEAACIDHSGSVHGAYSSGIAAAEDCRRRLSAQLGISAGLFQVGKAAMREEMTAEAMVPFQISRL

SEQ ID NO: 6439 - protein, 193 aa, Zea mays
  misc_feature (156)..(156): Xaa can be any naturally occurring amino acid
MDAVMFGLETPLMAALQHLLDVPDGDAGAGGDSDNKTGGGATRTYVRDARAMAATPADVKELPGAYAFVVDMPGLGTGDIRVQVEDERVLVVSGERRREEREDDAKYLRMERRMGKFMRKFVLPDNADVDKVAAVCRDGVLTVTVEKLPPPEPKKXPKTIEVKVAFREQAVAVLLKLCVFQFASFFGITNHPI

SEQ ID NO: 6440 - protein, 294 aa, Aspergillus nidulans FGSC A4
MVPTSIPTTQLKDGTSIPVIGYGTGTAWFKKKGDTSINRDLVESIKTAIRLGYHHLDSAEVYGTERELGVAIKECGVPREQLFVTTKVNQNIANVPKALEDSLEKLQLSYVDLYLIHQPFFAESPTELQDAWAAMEKVKEAGKARAIGVSNFLESHLETILDSARIPPAINQIEYHPYLQHGSLVPYHERKGIAVASYGPLTPVTRAKGGPLDPLLSELAGKYGVGEGEILLRWSLYRGAVAITTSGKESRLSTYLNVFKFQLTHEEVLKISRIGDQKHYRGFWSDKFAADDRS

SEQ ID NO: 6441 - protein, 404 aa, Oryza sativa (japonica cultivar-group)
GPFNHGNAKDLFGDGIFAIDGEKWKQQRKIASYDFSTRALRDFSCAVFKRNAAKLAGIVSNHAASNQSMDFQGLMLRATMDSIFTIAFGTDLNTLDGSGEGSRFAAAFDDASEFTMLRYISPLWKLARLLNVGVEAMLKERIKVVDEFVYRLIRARSDELSNSHDSGSRQDILSRFLQATTSDSVVDYKYLRDIILNIVIAGKDTTAGALAWFLYMVCKHPEVQEKICHEAMVATSAGDTASVDEFLQSLTDQALNNMHYLHAALTETLRLYPSVPMENKQCFSDDVLPNGFNVSKGDIVFFIPYAMGRMESLWGKDAEYFRPERWLDENGVFQQESPFKFTAFQAGPRICLGKEFAYRQMKIFAAVLLRFFVLKLRDEKEIVSYRTTLTLAIDQGLHLTATAR

SEQ ID NO: 6442 - protein, 353 aa, Burkholderia cepacia R18194
MSDSRFHRLTVAEVIAESDDACSFVFDVPAALRDAFAYRPGQFLTLNVPCADATVARCYSLSSAPGIDAAPKITVKRVRDGRASNWLCDRVKAGDALDVLPPAGVFTPRTLDGDLLLFAGGSGITPVLSILKSALVHGRGMLTLIYANRDERSVIFRAELQQLAQRHPGRVRVIHWLDSVQGIPQQRHLEELARPFSQQETFICGPALFMENALAAMLGLGLPRARVHVERFASLPDAPAQAPAASDTTASSVAAAASASGDGAAIETVLDGDAFAFDSAPGETLLDAMLRAGVPAPNSCRMGQCGACMCRIERGEVALDSNHVLDEDEIAAGWTLACCARPASDALRVVFPD

SEQ ID NO: 6443 - protein, 327 aa, Triticum aestivum
RSGIFGSTHASGKTIVLKTAEQTPLSALYVSKLLHEAGLPEGVLNIVSGFGPTAGAALASHMDVDKIAFTGSTDTGKVILELSARSNLKPVTLELGGKSPFIVMDDADIDQAVELAHFALFFNQGQCCCAGSRTFVHERVYDEFVEKSKARALKRVVGDPFRKGVEQGPQIDDEQFKKILRYIKSGVDSGATLVTGGDKLGDKGYYIQPTIFSDVQDGMKIAQEEIFGPVQSIFKFNDLNEVIKRANASQYGLAAGVFTNNLDTANTLTRALRAGTVWVNCFDIFDAAIPFGGYKMSGIGREKGIDSLKNYLQVKAVVTALKNPAWL

SEQ ID NO: 6444 - protein, 277 aa, Staphylococcus aureus subsp. aureus MRSA252
MEVKTFYNGNTMPQIGLGTFRVENDENCMESVKYAIEQGYRSIDTAKVYGNEEQVGAGIRAGLESTGIAREDLFITSKLYFEDFGRENVAAAYEASLSRLGLKYLDLYLVHWPGTNEAVMVDTWKGMEDLYKNNKVKNIGVSNFEPEHLEALLAQVSIKPVINQVEYHPYLTQHKLKLYLAAQHIVMESWSPLMNAQFLNDETIKDIAQELGKSPAQVVLRWNVQHGVVTIPKSVTPNRISENFRIFDFELSDEQMTRIDGLNQDKRIGPDPKTFEG

SEQ ID NO: 6445 - protein, 471 aa, Chloroflexus aurantiacus
MKLAWRTKIGLGLGFGLGLWLVGTGRAFAQEGPTTAELAVAMNTFFLIVAAALVFFMQAGFAMLTAGLTRSKNTTNILFKNLMDFVMCSIAFWAVGWGIAYGTSAGGFIGTDQFFLSPVTAEGEVPVMASWFFQVVFAGTAATIVAGAMAERTKFAAYLIYSFIISLFIYPVVVHWVWSGAGWLNTYSGSTEGNWGFTDFAGSTVVHSVGGWASLVGAMILGPRLGRFGPDGKPRVIPGHNMSLAALGTFILWLGWFGFNPGSQLAIASQANADAVALVAVTTNLAAAAGALGALFTAWLRYGKPDLGQTLNGVLGGLVAITAGCAYVDPLSSIIIGFIAGPIVVFSAELLEKLKIDDPVGAVPVHLVNGIWGTLAVGLFASVPGNTGTTGLFYGGGLTLLISQFVGVVAIGLWTVATAALMFFAIKATIGLRVSKAEEEAGLDIGEHGMVAYPDLSGAPAGGEVSGALAR

SEQ ID NO: 6446 - protein, 488 aa, Methanosarcina barkeri str. fusaro
MCGIAGAAGTPDTNEEVKRMLAALGHRGPDACGTYQAKGLSIGNTLLKITGDMLQPLVGKGALVLNGEIFNFRELAAEQGIKTNSDTEVLFALIETKIKEGETPTNAIFSVLSRVNGDYALAYVLGNKLVLARDPVGVKPLFYSLEKEGKKPKLAFASEKKAFSSQKDQIKSFPPGRVMAFDIRNGRLEEKSLTIDPPQERISEEHEASSRLKAALEKAVEIRLTKTSGIAFSGGIDSTFLAALAKNIDPSISLYAVGLPDSHDLVQAQRAAEVAGMSDSLKTHTLSPEEIEAAIPNVIYSTESTDPMKIAIGLPLYFVAKTAKEDGKRVLLTGQGADELFGGYNRHKALLEHGPKVLDRAIYTDLKNISTINLERDDMVTMANSVELRVPFLDKEVIKTGLAISPELKVLKRDSLYIRKYILRKAADGLLPSELLWKEKKAIQYGTGVQKVLDRLAREAGFSKREGNHIEKYLKKVAENQGFDFIFR

SEQ ID NO: 6447 - protein, 509 aa, Camptotheca acuminata
MAVLLLFLPLIFIFLAYKLYQRLRFKLPPGPRPLPFVGNLYSVKPVKFRCFAEWAQVYGPIMSVWFGSTLNVVISNSELAKEVLKENDQHLADRERNRSSNSFSRGGKDLIWADYGPHYVKVRKLCTVELFTPKRLEALRPIREDEVTAMVDSIFKDSANPDNYGKSLLVKQYIGAVAFNNITRLVFGKRFMNSEGVMDEQGKEFRGIVANGVKIGGLRFIGEHIPWLRCMFPQEEEILVKHEARRDRLTRAIMEEHTLARKHSGGAKQHFVDALLTLQKEYELSDDTVIGLLWDMITAGMDTTSISVEWAMAELIKNPRVQQKAQEELDRVIGYERIMSETDFPNLPYLQCVAKEALRLHPPTPLMLPHKANSNVKIGGYDIPKGSIVHVNVWAIARDPATWKDPHEFRPERFLEEDVDMKGHDFRLLPFGAGRRICPGAQIAINLITSMLGHLLHHFSWAPPEGVKPEEIDMTENPGLVTFMKTPVQAVAKPRLPSHLYKRVAVGAV

SEQ ID NO: 6448 - protein, 343 aa, Escherichia coli CFT073
MQVKTQSCVVAGKKTVAVTEQTIDWNNNGTLVQITRGGICGSDLHYYQEGKVGNFMIKAPMVLGHEVIGKVIHSDSSKLHEGQTVAINPSKPCGHCKYCIEHNENQCTEMRFFGSAMYFPHVDGGFTRYKMVETSQCVPYPAKADEKVMAFAEPLAVAIHAAHQAGELQGKRVFISGVGPIGCLIVSAVKTLGAAEIVCADVSPRSLSLGKEMGADVLVNPQNDDMDHWKAEKGYFDVSFEVSGHPSSVNTCLEVTRARGVMVQVGMGGAMAEFPMMTLIGKEISLKGSFRFTSEFNTAVSWLANGVINPLPLLSAEYPFTDLEEALRFAGDKTQAAKVQLVF

SEQ ID NO: 6449 - protein, 227 aa, Glycine max
VIVFDDADVDKAAELALLGILFNKGEICVAGSRVLVQEGIYDEFEKKLVEKAKAWVVGDPFDPKVQQGPQVDKKQFEKILSYIEQGKKEGATLLTGGKRVGNKGYYIEPTIFSNVKEDMLIVQDEIFGPVMALMKFKTIEDAIKIANNTRYGLASGIVTKSLDTANTVSRSIRAGIVWINCYFAFGNDIPYGGYKMSGFGRDFGMEALHKYLQVKSVVTPIYNSPWL

SEQ ID NO: 6450 - protein, 202 aa, Glycine max
MEGVGARLGRSSTRYGPATVFTGPVRKWKKKWIHVSPSSASSNSNANNHHNHASHASHLLLYKWTPLTHSQNTATTNNANAKDSPPEPPEEPPRRKFKYVPVALLEEQKNEGAESEGTEKVDEESKPIDADSGAAEATHKNETLDEKPDINDVPMEESQSQYKNQVVRQDLNESTLDLSLGLTSHDDEHDSDSKTNQTRDGQ

SEQ ID NO: 6451 - protein, 180 aa, Gibberella zeae PH-1
MAMSCRYAAQSCARQLRSARTARAPAQLVRIPATSRRWNSTEAAPVNPKIEAIVDQISQLTLLETADLVSSLKNKLNIPDMPIGGFAAAPAAAPAAVEEAEEAAPAAAEKTLFTLKLQGFDAPSKAKVIKEVKNMLGLSLVDSKKFVESAPKMMKENVPKEDAEKIINTMKELGATVVME

SEQ ID NO: 6452 - protein, 208 aa, Azospirillum brasilense
MKLAEALLRALKDRGAQAMFGIPGDSACPSLGGGGNADPAAPHAEHEPPVGFAADAAARYSSTLGVAAVTYGSGAFNMVNAVAGAYAEKSPVVVISGAPGTTEGNPGLLLHHQDRTLDTQFQVFKEITVAQARLDDPAKAPAEIARVLGAARALSRPVYLEIPRNMVNAEVEPVGDDPAWPVDRDALAACADEVLAAMRSATSPVQMV

SEQ ID NO: 6453 - protein, 238 aa, Arabidopsis thaliana
MERGAPFSHYQLPKSISELNLDQHSNNPTPMTSSVVVAGAGDKNNGIVVQQQPPCVAREQDQYMPIANVIRIMRKTLPSHAKISDDAKETIQECVSEYISFVTGEANERCQREQRKTITAEDILWAMSKLGFDNYVDPLTVFINRYREIETDRGSALRGEPPSLRQTYGGNGIGFHGPSHGLPPPGPYGYGMLDQSMVMGGGRYYQNGSSGQDESSVGGGSSSSINGMPAFDHYGQYK

SEQ ID NO: 6454 - protein, 123 aa, Coxiella burnetii
ELTGVSIVTYQHIKVPSQGEKITVNKAVLEVPDRPIIPFIEGDGIGIDITPVMKNVVDAAVEKSYAGKRKIEWMEIYAGEKATKVYGKDNWLPDETLEAIKEYQVAIKGPLTTPVGGGIRSLN

SEQ ID NO: 6455 - protein, 301 aa, Arabidopsis thaliana
  misc_feature (249)..(249): Xaa can be any naturally occurring amino acid
  misc_feature (252)..(252): Xaa can be any naturally occurring amino acid
MVFVKSTKSNAYFKRYQVKFRRRRDGKTDYRARIRLINQDKNKYNTPKYRFVVRFTNKDIVAQIVSASIAGDIVKASAYAHELPQYGLTVGLTNYAAAYCTGLLLARRVLKMLEMDDEYEGNVEATGEDFSVEPTDSRRPFRALLDVGLIRTTTGNRVFGALKGALDGGLDIPHSDKRFAGFHKENKQLDAEIHRNYIYGGHVSNYMKLLGEDEPEKLQTHFSAYIKKGVEAESIEELYKKVHAAIRAXPNXRKTVKPAPKQHKRYNLKKLTYEERKNKLIERVKALNGAGGDDDDEDDEZ

SEQ ID NO: 6456 - protein, 371 aa, Treponema denticola ATCC 35405
MIDSHVHLRDGLLSDKETIAHALALACPAGFTAFFDMPNTNPPLTNAEAVLERFALAEKSIKQAGVSAFYGIYGGLTSDIAQIEKMVLFYKKYFPKIVGFKMFAGHSTGNMGIVEKEDQRKVYAALKKFDYRGILAVHCEKESLMNNSIFDIENPITHSLARPPIAETESIKDQIELMQSEDFKGHLHVCHISTKEGIRLVAEAKKSGLSISCGATAHHALLNIDSYKKSGIFVKMNPPLREKEEQEAVFNALISGGIDWIESDHAPHTYEDKKKGASGIPGFAGSLILLKELRKAGCSEKRLDELCGKAVNHIFKLDLSYKVPSNTEIDASLPSLRSGYPFDAFEFFGISKFSFLNFIVTLTICTIAYIL

SEQ ID NO: 6457 - protein, 287 aa, Mesembryanthemum crystallinum
MAMPPVVDSVYLKEIDKARRDLRALISNRSCAPIMLRLAWHDAGTYCAKTKTGGANGSIRNEEEYAHGANNGLKKAIDWCEEVKAKYPKITYADLYQLAGVVAVEVTGGPTIEFVPGRKDSKVSTNEGRLPDAKKGPPHLRDIFYRMGLTDKDIVALSGAHTLGRAHPERSGFDGPWTQEPLKFDNSYFVELLKGESEGLLQLPTDKALVEDPAFRPYVELYAKDEDAFFRDYAVSHKKLSELGFTPSGSKSGPKDSTILAQGAVGVAVAAAVVILSYIFEVRKRLK

SEQ ID NO: 6458 - protein, 324 aa, Yersinia pestis KIM
MTVQPQAELAMILPPIFHGCYCEGEAPNMSQKELWYETLHANFGQYFSVENVLFREKTEHQDLVIFENPELGRVMALDGVVQTTERDEFIYHEMMTHVPLLAHGQAKKVLIIGGGDGAMLREVSRHKNIEQITMVEIDAGVVEFCRQYLPNHSAGAYDDPRFKLVIDDGVNFVNQTTEKFDVIISDCTDPIGPGESLFTSVFYEGCARSLNEGGIFVAQNGVCFLQQDEAVNSHNKLSHYFSDVSFYQAAIPTYYGGIMTFAWATQNPALRQLDLATLQNRFAQAGLACRYYNPAIHVGSFALPQYLLDALTTIPKVIGVDSSE

SEQ ID NO: 6459 - protein, 222 aa, Chlorobium tepidum TLS
MKFFIDTASLDEIKAANELGVLDGVTTNPSLIAKIVKDSTNFTYADFKAHIAKICEIVDGPVSAEVTTLKAGEMIAQGEELAAIHKNIVVKCPLTVDGLKAIKHFSSNGIKTNATLVFSPTQALLAAKAGADFVSPFVGRLDDISTSGMELVRQIVTIYDNYGYLTEVIVASVRNPLHVVESAMVGADIATIPYSVIKQLANHPLTDKGLEKFMEDAAVMKP

SEQ ID NO: 6460 - protein, 350 aa, Chlorobium tepidum TLS
MEERSMQKAGFLKEPIKHIGITKHNVVPMVEEMADMAFQARNLARAAFIVDLMQKDKECAVILTLAGSLISAGLKQVIIDMLEHNMVDVIVSTGANIVDQDFFEALGFKHWKGSQFVDDSELRELAIDRIYDTYIDEDELRVCDDTIAIIANSMQPGAYSSREFIVEMGKYIEEKGLDKNSIVYKAYEKGVPIFCPAFSDCSAGFGLVHHQWHNPDQHVSIDSVKDFRELTKIKIENDKTGIFMIGGGVPKNFTQDIVVAAEVLGYENVSMHTYAVQITVADERDGALSGSTLKEASSWGKVDTVYEQMVFAEATVAMPLIAGYAYHKRNWEGRPARNFNAMLDAKPVNA

SEQ ID NO: 6461 - protein, 145 aa, Triticum aestivum
  misc_feature (2)..(2): Xaa can be any naturally occurring amino acid
  misc_feature (17)..(17): Xaa can be any naturally occurring amino acid
  misc_feature (22)..(22): Xaa can be any naturally occurring amino acid
  misc_feature (28)..(28): Xaa can be any naturally occurring amino acid
  misc_feature (33)..(33): Xaa can be any naturally occurring amino acid
  misc_feature (37)..(37): Xaa can be any naturally occurring amino acid
  misc_feature (40)..(40): Xaa can be any naturally occurring amino acid
  misc_feature (44)..(44): Xaa can be any naturally occurring amino acid
  misc_feature (55)..(55): Xaa can be any naturally occurring amino acid
  misc_feature (58)..(58): Xaa can be any naturally occurring amino acid
  misc_feature (91)..(91): Xaa can be any naturally occurring amino acid
  misc_feature (96)..(96): Xaa can be any naturally occurring amino acid
  misc_feature (104)..(104): Xaa can be any naturally occurring amino acid
  misc_feature (114)..(114): Xaa can be any naturally occurring amino acid
  misc_feature (120)..(120): Xaa can be any naturally occurring amino acid
  misc_feature (135)..(135): Xaa can be any naturally occurring amino acid
MXPNVMGSSGTSVAPFXGLKSXAGLPVXRRSNXANLXSVXSNGXRIRCMQVWAIXGIXKFETLSYLPTLNTEALLKQVDYLIRSKWVPCLXEFNKXGFIFREHXNASPGYYDGXRYWTMXETAYVPGCTDPHKVXKPSGRSKKEP

SEQ ID NO: 6462 - protein, 306 aa, Oryza sativa (japonica cultivar-group)
MPASTAWAARLAEGGEEGTESIVRCGSPLATTTTSPMPPPPHRGGGGGRDTSAFFAATLVLWAVSVGFEIGARGRRELAPVAAGFAFFQAASAAVRAAVSRDPLFVNTAVSLLHSSLTSASVIFVLVNRWHNKDLKNMFEHEELFGGSWVGAYSALCFSCGYFAYDQLDMLRYRLYSGRIPGILMHHLILLICFTLALYRNVTINYLILTLVCERKLRRMAGFRDYNRKIVKLEWVLNWTTFVSARVACHILITYKLIIDAHKFDSGIELPLALFGMAGMNLLNIFLGLDLLKAYTLERNQQTHQD

SEQ ID NO: 6463 - protein, 316 aa, Triticum aestivum
MKTLLILTILAMAITISTANMQVDPSGQVQWPQQQLVPQPQQPLSQQPQQAFAQPQQTFPHQPQQQVPQPQQPQQPFLQPQQPFSQQPQQIFPQPQQTFPHQPQQAFPQPQQTFPHQPQQQFPQPQQPQQPFPQQPQQQFPQPQQPQQPFPQQPQQQFPQPQQPQQPFPQPQQPQLPFPQQPQQPFPQPQQPQQPFPQLQQPQQPLPQPQQPQQPFPQQQQPLIQPYLQQQQQQQQQQQGMHILLPLSQQQQLGQGTLVQGQGIIQPQQLAQLEAIRSLVLQTLPTMCNVYVPPECSIIRAPFASIRASSGHHLPA

SEQ ID NO: 6464 - protein, 287 aa, Synechococcus elongatus PCC 6301
MSAPQIQWYPGHIAKAERQLQEQLKRVDVVLEVRDARIPLATDHPRLKSWLGSRERLLILNRLDMIPAPARQAWIDWFRSQGDRVLLTDAHAGTGVAQLSQAAQAAGAAMNARRKQRGMLPRAVRAVVIGFPNVGKSALINRLVKKKVVESARRAGVTRSLRWVRVSEHLDLLDAPGVLPSRLDDQTAALKLALCDDIGEAAYDNQRVAAALVDCLQALEAQPLSGVTPTLFFDRYGLSVDDTGEAYLAALADHRCQGDRERTALMLLNDFRRGSLGPIALELPPTA

SEQ ID NO: 6465 - protein, 204 aa, Zea mays
MASSMLSSAAVATSPAQATMVAPFTGLKSSAAFPVTRKSNTDITSIASNGGRVSCMKVWPPVGKKKFETLSYLPDLTDVELAKEVDYLLRNKWIPCVEFELEHGFVYREHGSTPGYYDGRYWTMWKLPLFGCTDSAQVLKEVQECKTEYPNAFIRIIGFDNNRQVQCISFIAYKPPSFTGCLISFQKQPKKNPNPFPFPMAGFT

SEQ ID NO: 6466 - protein, 177 aa, Streptomyces sp. AM-7161
MTGATIWLTGLPSAGKTTIAYELAGRLRDEGHAVEILDGDEIREFLSAGLGFTREDRHTNVQRIGFVAELLASHGVKVLVPVIAPYNDSREAVRKRHQAEGTAFVEVHVATPVDVCSVRDVKGLYAKQAAGEISGLTGVDDPYEAPENPDLRIESQNQTVQESAAQLHALLTERGLL

SEQ ID NO: 6467 - protein, 225 aa, Zea mays
  misc_feature (71)..(71): Xaa can be any naturally occurring amino acid
RYYLKDAVLDGGVPFNKAYGMTAFEYHGTDARFNRVFNEGMKNHSVIITKKLLDFYTGFEGVSTLVDVGGXGVGATLHAITSRHPHISGVNFDLPHVISEAPPFPGVRHVGGDMFASVPAGDAILMKWILHDWSDAHCATLLKNCYDALPENGKVIVVECVLPVNTEATPKAQGVFHVDMVMLAHNPGGKERYEREFRELAKGAGFSGFKATYIYANAWAIEFIK

SEQ ID NO: 6468 - protein, 186 aa, Physcomitrella patens
MSTSRFIKCVTVGDGAVGKTCMLISYTSNTFPTDYVPTVFDNFSANVVVDGNTVNLGLWDTAGQEDYNRLRPLSYRGADVFLLAFSLISKASYENISKKWIPELRHYAPSVPIILVGTKLDLRDDKQFFADHPGAAPITTSQGEELRKSIGAASYIECSSKTQQNVKAVFDAAIKVVLQPPKQKKK

SEQ ID NO: 6469 - protein, 321 aa, Zea mays
  misc_feature (14)..(14): Xaa can be any naturally occurring amino acid
  misc_feature (90)..(90): Xaa can be any naturally occurring amino acid
  misc_feature (112)..(112): Xaa can be any naturally occurring amino acid
  misc_feature (117)..(117): Xaa can be any naturally occurring amino acid
  misc_feature (132)..(132): Xaa can be any naturally occurring amino acid
  misc_feature (146)..(146): Xaa can be any naturally occurring amino acid
  misc_feature (167)..(167): Xaa can be any naturally occurring amino acid
  misc_feature (210)..(210): Xaa can be any naturally occurring amino acid
  misc_feature (215)..(215): Xaa can be any naturally occurring amino acid
  misc_feature (248)..(248): Xaa can be any naturally occurring amino acid
  misc_feature (271)..(274): Xaa can be any naturally occurring amino acid
  misc_feature (283)..(283): Xaa can be any naturally occurring amino acid
  misc_feature (304)..(304): Xaa can be any naturally occurring amino acid
SRDTLLDADLESDXLGWQYISGSLPDGRELDRIDNPQFEGYKFDPHGEYVRRWLPELARLPTEWIHHPWDAPESVLQAAGVELGSNYPRXIVELDAANSRLQDALSEMWELXAASRXAAMENGMEEGLGDSXSDEPPIDFPQELRXEVDRQPVQPAIHAPGVTGRRXEDQMVPSMTSSFIRAETELTADFGHTSEDSRPEVPSNIHHLQXRPERXETVDGGTGNAVRVHGNHHQQNLQNNMHRVLGIXPSISEASSSWTGRDGGVVPVWSXXXXASGHSDSYXADEADISSRGYLDRHPQSHTXMNWSQLSQSLTTGWVDN

SEQ ID NO: 6470 - protein, 160 aa, Triticum aestivum
MSDSEDHHFESKADAGASKTFPMQAGAIRKGGYLVIKNRPCKVVEVSTSKTGKHGHAKCHFVALDIFNGKKLEDIVPSSHNCDVPHVDRTEYQLIDISEDGFVSLLTDNGSTKDDLKLPTDDAILTQLKDGFAEGKDLALTVMSAMGEEQICAVKDVGPR

SEQ ID NO: 6471 - protein, 313 aa, Brassica napus
MEISARPKARLAVLTAHLAVSDPVGSIQVLPPAIEPWCTSSALPPHGSLKGSLTIVDERTGKKYQVPVSEDGTVKSVDLKKITTGKDDKGLKLYDPGYLNTAPVRSSISYIDGDEGILRYRGYPIEELAESSTFIEVSYLLMYGNLPSQSQLADWEFTISQHSAVPQGVLEIIQSMPHDAHPMGVLVSAMSALSIFHPDANPALSGQDIYKSKQIRDKQIVRILGKAPTIAAAAYLRMAGRPPVLPSGHLSYAENFLYMLDSMGNRSYKPNPRLARVLDILFILHAEHEMNCSTAAARHLASSGVDVYTAVAG

SEQ ID NO: 6472 - protein, 290 aa, Triticum aestivum
  misc_feature (206)..(206): Xaa can be any naturally occurring amino acid
MGGLSMEHPWAFAFGLLGNVISFSSLLAPIPTFYRIFKSKSTEGFQSVPYVVALFSAMLWIFYALVKTGEGLLISINAAGCVIETVYIVMYLVYAPRKAKIFTAKIVVLLNIAGFGLIFLLTLFAFHGETRVVSLGWICVGFSVCVFVAPLSIIGRVIKTKSVEYMPFTLSLTLTLSAIVWFLYGLLIKDKYVALPNVLGFTFGVXQMVLYVFYMNKTPVASEVKEGKEAWKVPAEDHVVVINVGKADKSSCAEVRPVTEMAGAVDVPRRCAAEAAAAPGMDFARSVDVV

SEQ ID NO: 6473 - protein, 124 aa, Zea mays
  misc_feature (11)..(11): Xaa can be any naturally occurring amino acid
  misc_feature (18)..(18): Xaa can be any naturally occurring amino acid
  misc_feature (40)..(41): Xaa can be any naturally occurring amino acid
MAYSMLSSAAXCYLPGSXHMVAPFTGLKSSSAFPVTGRAXXDLTLLVSNGEKVNWMEGGPQLGKKNFETLFLTFRDLYPKFKLGGGEGEKLFSPKKGGVPLGGEEIPRGGEHPFFFFGPRGETQ

SEQ ID NO: 6474 - protein, 196 aa, Glycine max
MAFAGTTQKCMACDKTVYLVDKLTADNRVYHKACFRCHHCKGTLKLSNYNSFEGVLYCRPHFDQLFKRTGSLDKSFEGTPKIAKPEKTGEEKPAATKVSSMFGGTRDKCAGCQKTVYPTEKVTVNGTPYHKSCFKCTHGGCVISPSNYIAHEGKLYCKHHHIQLIKEKGNLSQLEGDHEKSTEEEKINGEVVAAET

SEQ ID NO: 6475 - protein, 382 aa, Pinus radiata
MDSNMNGLAKSNGCEISRDGFFESEEEELQGQAEAWKCTFAFAESLAVKCVVLLGIPDMIAREGSRATLSLGEIVAKLPTESPDAACLFRIMRFLVAKGIFRASKSAREGGAFETRYGLTPASKWLVKGRELSMAPMLLMQNDETTLAPWHHFNECVLEGGVAFQKANGAEIWSYASDHPDFNNLFNNAMACNARIVMKGILSKYQGFHSLNSLVDVGGGTGTAVAEIVRAYPFITGINYDLPHVVATASSLSGVQHVGGDMFETVPTGDAIFMKWIMHDWNDEDCIKILKNCRKAIPDTGKVIIVDVVLDADQGDNTDKKRKKAVDPIVGTVFDLVMVAHSSGGKERSEKEWKRILLEGGFSRYNIIEIPALQSVIEAFPR

SEQ ID NO: 6476 - protein, 477 aa, Vibrio parahaemolyticus RIMD 2210633
MQQIKNETLKEVFKQWASDDGVVVINPATEQELIRLKPSSIEELDCLIEACSAEQVRWAKLSAKERSSCLKNWHQLLMEHAEDIATIITLEQGKPLSESRGEVSYGASFVEWFAEEARRAYGEVIPAPAIDRRLSTIKQPVGVCAAITPWNFPIAMITRKAAPALAAGCGMIIKPSELTPLTALAVVELAYQAGIPKPLLPVVISEQAAEFGQVLSMDPRIKKISFTGSTRVGKILMKQASETVKAVSMELGGNAPFIVFEDADLESAADGLIASKFRNAGQTCVCTNRLYVHQNAKERFMEKVLAKMTELNVGNGLESGVTVGPVITMASKHRLEAVIDQALQEGATIANRPQKLAGRFMEPVILDNVDQGMAIVQQELFGPVLPVLTFEDDEQVLAMANDTEYGLACYFYTDSLKRIIKFTEGLEYGMVGVNEGIISTEVAPFGGIKESGVGREGAKQGLDEYLETKYICLGGLN

SEQ ID NO: 6477 - protein, 392 aa, Thermobifida fusca
MTSDRSSRLDDDPAFALHRGGKLEVRSTVEVNDQKSLSLAYTPGVARVCTAIADTPELADTYTWKNNVVAVVTDGTAVLGLGDIGPEASLPVMEGKSLLFKQFAGIDSVPIALACTDVDEIVETVVRMAPSFGGINLEDISAPRCFEIEQRLRERLDIPVFHDDQHGTAIVALAAIRNAARVTGRELSDLRAVVSGAGASGIAVSRMLIRGGIGDIAVADSKGLIYEGRPGLNKYKAELAAISNKAGLQGSIESALAGADVFVGLSAGEVPEEVVATMADNAIICAMANPNPEVHPDVARKYAAVVATGRSDFPNQINNVLAFPGVFRGALDVRATQITENMKLAAATALADLVGDDLAPDYIIPKPFDERVVPAVAAAVADQARKDGVARA

SEQ ID NO: 6478 - protein, 148 aa, Triticum aestivum
  misc_feature (73)..(73): Xaa can be any naturally occurring amino acid
  misc_feature (100)..(100): Xaa can be any naturally occurring amino acid
MSDTDEHHFESKADSGASKTYPQQAGAIRKGGHIVIKARPCKVVEVSTSKTGKHGHAKCHFVAIDIFNGKKLXEDIVPSSTNCDVPHVDRQDYQLIDINXWMGYVSLLTESGNTKDDLKLPTDDVLLGQIKTGFADGKDLILSGCPPG

SEQ ID NO: 6479 - protein, 604 aa, Glycine max
  misc_feature (76)..(76): Xaa can be any naturally occurring amino acid
  misc_feature (285)..(285): Xaa can be any naturally occurring amino acid
LKYKSEEGVRVLLLVWDDKTSHDKVFLKTAGVMGTHDEETRKFFKHSSVMCVLSPRYASSKMSFLKQQEIGFFVSXFSVESNVKCPVFCGLSSKQWVVGTVFTHHQKCVIVDTQAAGNNRKITAFIGGLDLCDGRYDTPEHRLFRNLDDVFDGDFHNPTFPAGTRVPRQPWHDLHCRIDGPAAYDVLINFEQRWRKATKWKEFAILFKKTSQWHDDALIRIERISWILSPSGAATLKDKSDDYTVPEDDPLVWVSSEDDPENWHVQIFRSIDSGSLKGFPKRVDXALSQNLICAKNLVIDKSIQTAYIQAIRSAQHFIYIENQYFIGSSYAWPAYKDAGADNLIPMELALKIASKIRAKERFAVYIVLPMWPEGDPKTGAMQEILFWQGQTMQMMYDAVARELKSMQLTDVHPQDYLNFYCLGNREHFNEDSSSTNGAQVSTAYKYRRFMIYVHAKGMIVDDEYVIIGSANINQRSMAGTKDTEIAMGAYQPHYTWSAKKRHPHGQIYGYRMSLWGEHLGMLDETFEEPGRLECVEKVNEIAENNWKLFASEDFSLLQGHLLKYPVQVDSDGKIRSLPDCENFPDAGGKILGAHSTTIPDILTT

SEQ ID NO: 6480 - protein, 274 aa, Listeria innocua Clip11262
MNLKDTVKLANGVEMPRLGFGVWKVQDGDEAVNSVKWAIEAGYISIDTAAAYKNEEGVGQAIKESGVKREDLFVTTKLWNAEQGYESTLAAFDESLRKLELDYVDLYLIHWPVEGKFKDTWRAFEKLYKDKRVRAIGVCNFHEHHLKELMEDAEIAPMVNQIELHPQLTQEPLRKFCAENNIVVEAWSPLGNGKLLANPEIKAIADAHGKSVAQVILRWDLQIGVVTIPKSVHQERIIQNADIFDFELSDEEVAKISGLNKDERTGPDPDNFNF

SEQ ID NO: 6481 - protein, 448 aa, Methanocaldococcus jannaschii DSM 2661
MKLEIIAIGGYEEVGRNMTAVNVDGEIIILDMGIRLDRVLIHEDTDISKLHSLELIEKGIIPNDTVMKNIEGEVKAIVLSHGHLDHIGAVPKLAHRYNAPIIGTPYTIELVKREILSEKKFDVRNPLIVLNAGESIDLTPNITLEFIRITHSIPDSVLPVLHTPYGSIVYGNDFKFDNFPVVGERPDYRAIKKVGKNGVLCFISETTRINHEGKTPPEIIASGLLKNDLLAADNDKHGIIVTTFSSHIARIKSITDIAEKMGRTPVLLGRSMMRFCGIAQDIGLVKFPEDLRIYGDPSSIEMALKNIVKEGKEKYLIIATGHQGEEGAVLSRMATNKTPYKFEKYDCVVFSADPIPNPMNAAQRYMLESRLKLLGVRIFKGAHVSGHAAKEDHRDMLRWLNPEHIIPSHGDFNLTAEYTKLAEEEGYRLGEDVHLLRNGQCLSFERII

SEQ ID NO: 6482 - protein, 180 aa, Zea mays
  misc_feature (139)..(139): Xaa can be any naturally occurring amino acid
MEVGDARNGSAAAALTKGGADDAARKPLPPCCVKAKARVPETEANCHDTVVSGWFTEPRSRFGEAHSLKVEKILFQGKSPYQEILVFESSTYGNVLVLDGIVQLTDKDECAYQEMVTHLPLCSIPAPKNVLVVGGGDGXGVLREIARHDSVETIDICEIDQLVIDVSKEFFPNLSIGSKI

SEQ ID NO: 6483 - protein, 381 aa, Cicer arietinum
WRSLRRACATKIFSPQQLDSTQFHRKRKVQDLLNYVQKCCEKGEALDFGEVVLATVMNSISETFISMDLFHYCDPSNDDDNKKSREFKEMVFGIMEEVGRPNVVDFFPFLKLFDPQGVRTRMRNHFEKLLAFFYEVMKERMRLRASGESKEYKDVLDSFLDLLNEENSQLCRHDVLHLFTDLFVAGIDTTSTTMEWAMAELLHNPSKLARLRKELEQIHGKFGQIEESDASKLPYLRAVVKEILRLHPSVPFLVPHKSKDDGELGGFMVPKNAQILVNVWSIGRNSSIWDNQIHLNLKDFWRVKLISKGRDFELVPFGAGRRICPGLPLASRSIHYIMASLLHHFNFKLADDLKPDDMDMSHKFGVTLHKAQPLRVVPIKA

SEQ ID NO: 6484 - protein, 345 aa, Methanosarcina acetivorans C2A
MHHNVFTNNPTVPIDVKNRSVSELMDGMLKTGFQGRKLAESVQAWNNMLKEKNTTVFMGLSGAMVPAGMRRIISHMIRERMIDCLVSTGANLFHDCHEALGRKHYVGSHLANDEKLFEQGVDRIYDIFAVEEEFRTADNLIADFAQEIGEITCSSREFMYLLGKELGRRGAAEDSIVVSAYRHNVPIFVPALSDSSIGIGLTIARRRGLKLEIDQIKDVDEITQIVEKSERTGVVYVGGGVPKNFIQQTEVIASILGMDIGGHDYAIQYTSDSPHWGGLSGCTFDEAVSWGKIAPQAKKVQVFVDATIALPIVAHALHEKTHDLKRIAPVFFWDGPEGLAIDYKE

SEQ ID NO: 6485 - protein, 460 aa, Haloarcula marismortui ATCC 43049
MPAAGFPLGATTMEVEIATIGGYEAVGRQMTAVRAGDDVVIFDMGLNLSKVLIHDNVETERMHSLDLIDMGAIPDDRVMSDLEGDVKAIVPTHGHLDHIGAISKLAHRYDAPIVATPFTIELVKQQIKSEEKFGVQNDLVKMDAGETMSIGERNELEFVNVTHSIIDAINPVLHTPEGSVVYGLDKRMDHSPVIGDPIDMKRFREIGREGEGVLCYIEDCTNAGKKGRTPSESVARRHLKDVMDSVADYDGGIVATTFSSHIARVKSLVEFADDIGRQPVLLGRSMEKYSGTAERLDFVDFPEDLGMYGHRKSVDRTFKRIMNEGKENFLPIVTGHQGEPRAMLTRMGRGETPYELDDGDKVLFSARVIPEPTNEGQRYQSEKLLGMQGARIYDDIHVSGHLREEGHYEMIDALQPKNIIPAHQSLEGFAPYVDLAENMGYKAGRDLHITRNGNMIKLTE

SEQ ID NO: 6486 - protein, 315 aa, Digitalis purpurea
MAEEIRFFKLNTGAKIPSVGLGTWQSSPGDAAQAVEVAIKCGYRHIDGARLYENEKEIGVVLKKLFDDGVVKREDLFITSKLWSTDHAPEDVPVALDKTLEDLQLDYIDLYLIHWPVRLKKGSVGLDPENFIPTDIPGTWKAMEALYDSGKARAIGVSNFTLKKLSDLLDVARIPPAVNQVGCHPSCAQTKLRAFCKSKGVHLSGYSPLGSPGTPWVKHDVLENPILVDVAEKLGKTPAQVAIRWGLQMGHSVLPKSVHESRIKENIDVFSWCIPDDLFAKFSEIEQVSPGKPEFPVHPEISQYKTVEEMWDGGI

SEQ ID NO: 6487 - protein, 1005 aa, Actinosynnema pretiosum subsp. auranticum
MVATGTRIPGPKPLPLVGNLLDVLTSDLDTDVDFLDRCHREHGGIVALTFAGQRQVFASSHELVARMCSDPSWGKAVHPALEQVRDFAGDGLFTARGDEPNWGKAHRLLMPAFGPTAMRDHFPAMLDIAEQMLVRWRRFGPDHRIDVADDMTRLTLDTIALCAFGARFNSFYRDRAHPFVDAMVRSLVEAGERAERLPGVQPFLVGRNQRYRDDIATMNRIADGIVAARAALPAGERPDDLLERMLTCADPVTGERLSARNVRYQLATFLIAGHETTSGLLSFAVHRLLAHPEVLRKAKDAVDGVLGDRVPAFEDLARLDYLGQVLRETLRLHPTAPAFALAPDEPAELGGHAIGAGEPVLVMLPTLHRDPAVWRDPDVFDPERFAPERMDEIPACAWMPFGHGARACIGRPFALQEATLVLALVLQRFDLALADPDHRLTIKQTLTLKPDSLVVRARPRADRPGATATVETVVPHQVPATHRHGTPLHVFYGSNGGSGEGLARTIAGDGAARGWATSVAPLDDAVRALPASGPVVIVSSSYNGAPPDNAAHFVRWLTQDGPDLSGVDYLVLGCGNLDWSATYQRVPTLIDEAMAAAGARRLRERGATDARADFFGDWERWYEPLWPLLSAECGVEVGEIGPRFRVVESDAADGLGDLASAVVLENRELVRGPDAGSKRHLELRLPDGTSYRTGDYLSVLPQNHPDLVRRAVARLGTRAERVVTVESSAPTGLVPVGRALRVDELLTRCVDLSAPAGAGVVARLAERCPCPPERAELAATTGATLLELLERFPSCAVDLALALELLPAPRTRLYSISSAAEEQRAEVALTVSVTGVTSGYLSRVRPGDRVAVGIASPPESFRPPADNTVPVVLIAAGTGIAPFRGFLRARAALGGEPGPALLLFGCRGPELDDLYAEEFAALGDWLEVDRAYSRHPDGEVRHVQHRLWQRRDRVRELVDAGARVYLCGDATRVGPAVEEVLGRIGPGAGWLDALRAGGRYATDVF

SEQ ID NO: 6488 - protein, 334 aa, Triticum aestivum
  misc_feature (301)..(301): Xaa can be any naturally occurring amino acid
MYKRLLSGMEFRRIRPEIIAGSLAYYARKYIPGLSRRNSMGTMPLAGTLSDVEQRNLLEEIDRLLPVQKGLVPTKLLLGLLKTSMILKASSTCIANLEKRVGMQLDQASLEDLLLPNYSYTMETLYNVECVHRILEHFLAMDQANGGCSPCIDDMMASPSMIPITAVAKLLDGYLAEVAPDVNLKPPKFQALASALPEYARPLDDGLYRAIDVYLKAHSWLSEAEREQLCRLMDCQKLSLEACTHAAQNERLPLRVVVQVLFFEQLQLRTSIAGCLLVSDNLEGSSRPLRSGCVAMSGEAXGWSAAVRENQVLKVGMDNMRMRLAELEKECSDM

SEQ ID NO: 6489 - protein, 296 aa, Arabidopsis thaliana
MTEEFEIAGISTGAWWSSPTNTAAVFSGYSLPCSTEISPDVTNFGWQNFDNKINDHNDGCMNMHNSFFEGLLIDPNDQLLPDPWSKSTIPNAKSELLENFPFLDNMFLVDSEAESLLDHEIRNHKSSKEQITQDYKNLTSKAQLEENSDEYSPRLLKRPRLETLSPLPSFKVRKEKLGDRITALQQLVSPFGKTDTASVLNEAVEYIKFLQEQVTVLSNPEQNTIGSVQQQQCSNKKSINTQGEVEEDECSPRRYVDLSSRGLCLMPISASYPVAAAAASAAEMNVHLVSGIFHSL

SEQ ID NO: 6490 - protein, 315 aa, Digitalis purpurea
MAEEIRFFELNTGAKIPSVGLGTWQSSPGDAAQAVEVAIKCGYRHIDGARLYENEKEIGVVLKKLFDDGVVKREDLFITSKLWSTDHAPEDVPVALDKTLEDLQLDYIDLYLIHWPVRLKKGSVGLDPENFVPTDIPGTWKAMEALYDSGKARAIGVSNFTLKKLSDLLDVARIPPAVNQVGCHPSCAQTKLRAFCKSKGIHLSGYSPLGSPGTPWVKHDVLENPILVDVAEKLGKTPAQVALRWGLQMGHSVLPKSVHESRIKENIDVFSWCIPDVLFAKFSEIEQVSPGKPEFPVHPEISQYKTVEEMWDGGI

SEQ ID NO: 6491 - protein, 107 aa, Oryza sativa (japonica cultivar-group)
MESSGGSQLGKNSKTSDGRETKATSSLLLLITAIHFVALCPKGENEDARKEVNSTAQNFVHFTEEEEDIVFRMHRLVGNRWELIAGRIPGRTAEEVEKFWAIKHQAT

SEQ ID NO: 6492 - protein, 471 aa, Exiguobacterium sp. 255-15
MIEQNVINGVWYDTEETIPVFNPATKELLGHVPSSTADDAQRAVDAASTAFVDWSERTADDRADKIDAWYRLIQEHRDELADIMTREQGKPFIEARGEIDYGNQYVRWYAEEARRIYGETIPASVPGKRLFVEKEPVGVVAAITPWNFPAAMITRKLAPALAAGCTVVLKPSEETPYTALRLVELAIEAGIPAGAINVLTGDAATISGVWQADSRVRKITFTGSTAVGKLIMRQAADTMKKLSLELGGHAPFIVTENADLDKAVQGAIRSKFRNGGQACVATNRFYVQASVLDTFTEKFVAEVKRLKVGNGLDADSTIGPLINAKAVAKVKAHIDDAVAKGATILTGGTIDDSVGYFVEPTVLGNVTEDMICMQEETFGPLAPISVFETLDEVIERANNTPYGLAAYAFSEKIDEALRLGKKLEYGIVGLNDGAPSAAQAPFGGYKESGLGREGGVYGIEDYLEVKYLSLG

SEQ ID NO: 6493 - protein, 309 aa, Pseudomonas syringae pv. tomato str. DC3000
MTSKLDQLKKFTTVVADTGDFGAIKSLKPQDATTNPSLLLKAASSESNDQMLADAFSGAKGDIGLACDRFAVAIGQEILKVVPGRVSTEVDARLSFDTDALIERSERIIGLYDTAGISRDRVLIKLAATWEGIRAAEKLEKDGIQTNLTLLFSFAQAVACAEAGVFLISPFVGRIYDWYKKSSGTDYVGADDPGVQSVTRIYNYYKANDFKTVVMGASFRNLNQIEQLAGCDRLTISTELLKQLAEDTGTLEQKLAPGNAGEARQSLTESQFRWASNEDAMATEKLAEGIRQFARDQEKLEALLSAKKS

SEQ ID NO: 6494 - protein, 498 aa, Glycine max
  misc_feature (51)..(51): Xaa can be any naturally occurring amino acid
  misc_feature (260)..(260): Xaa can be any naturally occurring amino acid
MASLSCSANDLAPLFNDTAAANYLCAQFDSISRKLNVTTYAVDNTYLLFSXYLVFAMQLGFAMLCAGSVRAKNTMNIMLTNVLDAAAGGLSYYLFGFAFAFGGPSNGFIGRHFFGLRKFPKDSPPSGDYSFFLYHWAFAIAAAGITSGSIAERTQFVAYLIYSSFLTGFVYPIVSHWFWSSDGWASATRSHGNVLFGSGVIDFAGSGVVHMVGGIAGLWGALIEGPRIGRFDRSGRSVALRGHSASLVVLGTFLLWFGCXGFNPGSFLTIAKGYESGGYYGQWSAIGRTAATTTLAGSTAALTTLFSKRLLAGHWNVIDVCNGLLGGFAAITSGCAVVEPRAATVCGFVAAWVLIGLNKLAAKVDDDDPLEAAQLHGGCGAWGVIFTALFAKKEYVSQVYGEGRAHGLFMRGGGKLLAAHVIQILVIVGWVSATMGPLFWGLNKLKLLRISSEDELAGMDLTRHGGFAYAYEDDESHKHGIQLRKVGPNASSTPTTDE

SEQ ID NO: 6495 - protein, 506 aa, Pseudomonas aeruginosa
MIYAAPGTPGAVVTFKPRYGNYIGGEFVPPVKGQYFTNTSPVNGQPIAEFPRSTAEDIDKALDAAHAAADAWGRTSVQERSNILLKIADRIEQNLELLAVTETWDNGKAVRETLNADIPLAADHFRYFAGCIRAQEGSAAEINDSTVAYHIHEPLGVVGQIIPWNFPLLMAAWKLAPALAAGNCVVLKPAEQTPLGICVLLELIGDLLPPGVLNVVQGFGREAGEALATSKRIAKIAFTGSTPVGSHILKCAAESIIPSTVELGGKSPNIYFEDIMQAEPAFIEKAAEGLVLAFFNQGEVCTCPSRALVQESIYPAFMEEVLKKVRAIKRGDPLDTETMVGAQASQQQYEKILSYLDIAQQEGAELLAGGSVEKLEGNLASGYYIQPTLLKGHNGMRVFQEEIFGPVVGVTTFKDEAEALAIANDTEYGLGAGLWTRDINRAYRMGRGIKAGRVWTNCYHLYPAHAAFGGYKKSGVGRETHKMMLDHYQQTKNLLVSYDIDPLGFF

SEQ ID NO: 6496 - protein, 475 aa, Rickettsia conorii str. Malish 7
MNLLKNITGKNYINGEFIEFGKQISVINPATLKEIATVPNLGLSEINSAINNTVTSFSLWSQSSFEARIAILRRWYNLVIENIEELSYILTLEQGKVLAESKKEILYGASFIDWYTYAIHNIHSTIKPGNSNTHKIVTQYEPVGPSAAITPWNFPNAMITRKVVPAIAAGCSVILKPSSLTPLSALVLAKFASDAGLPAGVFNVITGSSDIIGKAFCEDFRLRKLSFTGATNVGKILYQNAANTLKRLSLELGGNAPFIITADNNLEKVVSDLVIAKTRNSGQSCTSPNRIFIEESIYEKFIEILKAKFTKLKAGDGFDKESDIGPLINSAAIEKIQKLLADAQSKGAKLICGGKTVDNFIEPTIIIDCLDNMDIFRIEIFGPVVACYKFKDLDEVIEHANNTEYGLQGYVYSNNISVAQMIASKLDFGMVSINDPLPANAKAPFAGRKASGFGVEGSFEGIFEYLNTKYINLQN

SEQ ID NO: 6497 - protein, 214 aa, Zea mays
MGLFSWWRGGRPWWVLPAPRSAAVSAALVPAAVSLFFNPPAGLSSPLLTQLTSARSPFPSLSFPLLSYPCALELESETQPAMSYYGDRRAESSIVEAFTLSPLPYPVILVLLMVTLLLGASWFFTYDDFIEEASQQLSWALLGVPIALVLLIRWISSVDSFEGYLGFYPRESRWKGRYERGPAEGSSPWGVALLVLLLLVLASFHSTIHDMWGP

SEQ ID NO: 6498 - protein, 272 aa, Triticum aestivum
  misc_feature (50)..(50): Xaa can be any naturally occurring amino acid
KPPRGEIPQVLAKTLEAQFAVIPEILDDYPYLPMDTEFPGFVFRPFGTFXSKREFHYATLKANVDMLKLIQLGLTFSDERGGLPALGPDARPCVWQFNFRGFDPRTDVAAADSIDLLRRSGIDFARHATEGADSRRFAELLMSSGVVLNAEIHWVTFHSGYDFGYLLKLLTGSNLPDTSSGFFDLIRIYFPVIYDIKHLMRFCNSLHGGLNKLAELLDVERVGICHQAGSDSLLTALSFNKLKESYFGGLTEKYAGVLYGLGTEGGETTSVH

SEQ ID NO: 6499 - protein, 127 aa, Rickettsia sp. TwKM01
PAHGGANEVVINMLKEIGSSEHIPKYIAKAKDRNDPFRLMGFGHRIYKNYDPRAAVLKETCKEVLKELGQLDNNPLLQIAIELEAIALKDEYFIERKLYPNVDFYSGIIYKAMGIPSQMFTVLFAIA

SEQ ID NO: 6500 - protein, 185 aa, Dechloromonas aromatica RCB
MFSSLKRCFGIAALITVGVVPVAAAAECPPLLNHSFASLQDGKPMPLCQYAGKVILVVNTASYCGFTSQYDGLEKLYARLKDKGLVVLGFPSNDFGEQEPGSEKEIADFCRLTYGVEFPMVSKTVVKGKGAHPFYLKLAEITGSKPKWNFHKYLINRDATQVVAYTSFTKPDDKDLLKKIDEFLK

SEQ ID NO: 6501 - protein, 510 aa, Gossypium hirsutum
MPSFDTILLRDLVAAACLFFITRYFIRRLLSNPKRTLPPGPKGWPIVGALPLLGSMPHVELAKLAKKYGPVMYLKMGTCNMVVASTPDAARAFLKTLDLNFSNRPSNAGATHIAYNSQDMVFAEYGPRWKLLRKLSNLHMLGGKALEDWSQVRAVELGHMLRAMCESSRKGEPVVVPEMLTYAMANMIGQVILSRRVFVTKGSESNEFKDMVVELMTSAGLFNIGDFIPSIAWMDLQGIEGEMKKLHNRWDVLLTKMMKEHEETAYERKGKPDFLDIIMDNRENSAGERLSLTNVKALLLNLFTAGTDTSSSIIEWALAEILKNPKILNKAHEEMDKVIGRNRRLEESDIPKLPYLQAICKETFRKHPSTPLNLPRVSTQACEINGYYIPKNTRLSVNIWAIGRDPDVWGNPLDFTPERFLSGRFAKIDPRGNDFELIPFGAGRRICAGTRMGIVLVEYILGTLLHSFDWMLPPGTGELNMDEAFGLALQKAVPLSAMVRPRLAPTAYVS

SEQ ID NO: 6502 - protein, 423 aa, Pseudomonas aeruginosa UCBPP-PA14
MTISIRGARVIDPASGLDQVGDLHIEAGKIVAIGAAPAGFSAQKTLDGAGLVAAPGLVDLSVALREPGYGRKGNVESETRAAAAGGTTSLCCPPYTRPVLDTPAVAELILDRAREAGNAKVYPIGALTRGFGGEQLSELVALRDTGCVAFTNGLHGFASNRILRRALEYAATFDLTVIFTSQDTDLAEGGLAHEGPTASFLGLAGIPETAETVALARNLLLVEQSGVRAHFSQLTSARGIELVAQAQARGLPVTCDVALYQLILTDEALVGFSSLYHVQPPLRTKADREALREAVKNGVVQAIASHHQPHEADAKNAPFAATEPGISGAELLLPLAMTLVQDGLLDLPTLLARLSHGPAQALRLPAGRLAVGQAADLVLFDPQGSTLAGESWYSKGQNSPFVGHCLPGRVRYTLVDGHLTHEG

SEQ ID NO: 6503 - protein, 119 aa, Bacillus cereus ATCC 14579
MTKEQIIEAVKSMTVLELNDLVKAIEEEFGVTAAAPVAVAGGAGEAAAEKTEFDVELTSAGAQKIKVIKVVREITGLGLKEAKELVDNTPKVIKEAAAKEEAEEIKAKLEEVGAAVEVK

SEQ ID NO: 6504 - protein, 1234 aa, Magnaporthe grisea 70-15
MTVDHWESIVQIRRSPIVAEHPAGRNPIRSFAWLLRVFMVIVVIAVSLVCLPYDGHSSPSREGYHANLQQPSSNVATQRSSRRPSSHDHQNQHQPQEHSPPIASQSNSPMSSRAAIASPVAVAPAGAPEYYQPTSSDRRRHHAPIAPPRTSSSHQTSAPVNGAQTSRRPVSASHQPQNSSSRRAPDHHGSSADQQTDQSSSSRRRDRHHAPATGDYPPQRQGSTRDPRTATTTTMPIRTNTGGSATASSSKQPSREASEILNSMLVSQPEVDIEREKERLALAQPTSSAHDASEVASPPVVPTQRSRQDHSSKREKHTKFGEYILGNTIGEGEFGKVKLGWKSEGGVQVAIKLIKKDALGSNPNRMQKIMREVSILKQLTHPNIVRLHKMEESERHFGIILEYASGGELFDYILNNRYLKDNAARRLFAQLVSGVGYLHKKGIVHRDLKLENLLLDRNRNIIITDFGFANTFDPALELTEEEEAGLSNREFVKRLGLDKIGANGSRKGDLMQTSCGSPCYAAPELVVSDSLYTGRKVDVWSCGVILYAMLAGYLPFDDDPANPEGDNINLLYKYIVSTPLTFPEYVTPHAKDLLRRILVPDPRRRADLFEVARHSWLSEYAHVVEFITSSTTTHTEIQNTTVPAEDSENPNLARSASVREASRRTPVSPTIGGLASKQGGIDQETEYAARQQKDNKRRTVQVEYVAPTTQTQRGEPAQQQATSGKTRARSGSEGPVEVDPRLSSDKPLPRDPPVSKESYSKPSVRGDPRKPPSSHRNQPSISRPPQSGRVPSDSYVTTMAPGSRPGTSGSMNTAGARPVAGASRSSYGQPLPPTVAGTNVHGRIQQPTDQQSEFGRPSAGGVPSKFAHVPGVAGHDQPDSREGSAKGHRRSNTLGEITGKMFGRSGSIFGNKNRKSSKVDQPQTPTEAKNRDSRKYPPVSMSAAPNPNGEYEPRKSVDSKRSRRSFSFGLGPRKKSGSIHNGSQTSVDKQNKRFSFIPGSISLKAIGIGKETPPGSTQGGGNDSQVDLGYQQEHLREPYRPDSQQQHQRQQSHYVDQRVNEQDLEAAGMDGMYAQLHSPSAPTFSTQQPHQQQQQQHYPAHYTSGQYGDRQMATAVPGYMQSGAHLQTSESESSVNMLSPEQQQFQAHGLRSVSVDHHQKLMEAQGGLGPAGRTGSSVGADGRQARVLQKNKRFVDAYDTDHSGGADHAGSSGAARRVMDFFRRRGKARGGDDR

SEQ ID NO: 6505 - protein, 122 aa, Brassica napus
MSPEKDGVSIPLHVDITDVASPLPMPLDILHGNPIPPFLSKTFDLVDDPSLDPVISWGLTGASFVVWDPVEFARIILPRNFKHNNFSSFVRQLNTYGFRKIDTDKWEFANEAFLRGQKHLLK

SEQ ID NO: 6506 - protein, 167 aa, Zantedeschia hybrid cultivar
MAADAAAAGASKKLTLKSSDGEVFEVEETVAMESQTIRNLIEDDCTADGVPLPNVTGRILAKVIEFCKKHVEIAALKADEGVDRAADEELKVWDADFVKVDQTTLFDLILAANYLNIKSLLDLTCQTVADMIKGKTPEEIRKTFNIKNDFTPEEEEEVRRENQWAFE

SEQ ID NO: 6507 - protein, 209 aa, Zea mays
  misc_feature (208)..(208): Xaa can be any naturally occurring amino acid
MADQELKLFQEEVEAVKQWWKNPRFAQTTRPYTAEQVVSKRGTLKQTYPSNIQAKKLYATLEAHAAKGTTSHTYGALDPVQVTQMAKHLETVYVSGWQCSSTASSTNEPGPDLADYPYNTVPLKVEHLFMAQLFHDRKQREERSNMSPEQRAKTPVIDYLRPIVADADTGHGGLTAVMKLTKLFVEKGAAGIHIEGPAPGTKKCGHMXR

SEQ ID NO: 6508 - protein, 360 aa, Rhodobacter sphaeroides 2.4.1
MDIRTHRIAAIPGDGIGIEVVAAGLEVLEALADRDGGFRFDVESFDWGTDRYRRTGAFMPEDGADRLRGFDAILFGAVGAPDVADHLTLWGLRLAICQPLDQYANVRPTRMLPGIRSPLRHVGESELDWVIVRENSEGEYAGQGGRSHPGLPLEVATDVSIFTRAGVERIMRFAFRLAQSRPRKLLTVVTKSNAQRHGMVLWDQIAGEVAREFPDVRWDKMLVDAMTVRMVQKPASLDTIVATNLHADILSDLAAALAGSIGVAPTANLNPERDTPSMFEPIHGSAFDITGRGIANPVATFWTAAMMLEHLGEAEAAGRLMTAVGRVTADEDLHTPDLGGRATTRQVTDALIAALRGRNA

SEQ ID NO: 6509 - protein, 252 aa, Glycine max
MEGVPHPIPRTVEEVFTDFKGRRAGLIKALTTDVEKFYQQCDPEKENLCLYGFPNETWEVNLPVEEVPPELPEPALGINFARDGMQEKDWLSLVAVHSDSWLLAVAFYFGARFGFGKNERKRLFQMINDLPTIFELVTGSAKQSKDQPAAHNNGSKCKSSGKSHQSESQAKGMKMSAPPKEEDESGEEEEEDDEQGATCGACGDNYGTDEFWICCDMCERWFHGKCVKITPAKAEHIKQYKCPSCSNKRVRV

SEQ ID NO: 6510 - protein, 454 aa, Rhodobacter sphaeroides 2.4.1
MNVLIWFRNDLRVADHPALARAADDRVLPLAIVDPAEWADPARSGRQWAFRAECLADLRADLAALGAPLAVRVGDAQAVLSKLCKLHRIGRILCLEDPAFAELDLALQAWAGGTGLDFIRLKPGAGAPAALTPLPAVEPGPIPPARALRLAEDRCPHRQPGGRPQGQLLLQSFLERRGALYRDGRNRLLQAERASSRLSPHLAAGTLSREEVLAAVAARLAERPDADWVRSLGAFRAALASGAPGARGAVCPPGRPGGGGSPRGYLDQTEGEADALRLRLAALHAGETGLPFVDAALRAMAASGWLPARLRGMLASVALHHLGLSEQAAGAALAAGLTDHSPPIHWAQMRRVALGRPVDPERLAGVLDPDGAFTRRWLPELAEVPDRVLQAPWRWEGARGLLGRRYPEPLVDPSAARAAGRTLARRPTARVEVIEGAAPRRPASDPTQQLCLDL

SEQ ID NO: 6511 - protein, 423 aa, Medicago sativa
MFGRGPTRKSDNTKYYDILGVSKSASEDEIKKAYRKAAMKNHPDKGGDPEKFKELGQAYEVLSDPEKKELYDQYGEDALKEGMGGGAGSSFHNPFDIFESFFGAGFGGGGPSRARRQKQGEDVVHSIKVSLEDVYNGTTKKLSLSRNALCSKCKGKGSKSGTAGRCFGCQGTGMKITRRQIGLGMIQQMQHVCPDCKGTGEVISERDRCPQCKGNKITQEKKVLEVHVEKGMQQGHKIVFEGQADELPDTITGDIVFVLQVKGHPKFRRERDDLHIEHNLSLTDALCGFQFNVTHLDGRQLLVKSNPGEVIKPGQHKAINDEGMPQHGRPFMKGRLYIKFSVDFPDSGFLSPSQSLELEKILPQKTSKNLSQKEVDDCEETTLHDVNIAEEMSRKKQQYREAYDDDDDEDDEHSQPRVQCAQQ

SEQ ID NO: 6512 - protein, 363 aa, Gibberella zeae PH-1
MTSTQSVKAVRYHGQQDIRLESVPVKPLDPTTVRIAPKFCGICGTDVHEYLGGNNLIPKPGTPHGITGETSPLTLGHEFSGIVEEVGSEVTRLQKGDRVCVQPIIYDNECRSCKRGLQNCCDQNGFIGLSGWGGGLAESTVVPQDAVKKLPDNVSLEVGALVEPLAVGWHATKISPYEDGNSAFVVGGGPIGLAVVQALVGRGCKNIMLTEVSSKRREFAKKFGAHHVFDPTKDDVVAMVKKLTGGLGADVGFDAAGSQHAIDVAFDCLKARAVLVNIAVWEKRAQLNMNQIVFRERSYVGCATYALGDFEEVIDALSNGKIKPEGMITKVIKMDKVVEEGFQTLINDKDNHVKILVDVSAGV

SEQ ID NO: 6513 - protein, 1144 aa, Photorhabdus luminescens subsp. laumondii TTO1
MSQEYTEDKNIKLKRLSSGRRLLEAVLLVIVILAAYLLVALVSFNPSDPSWSQTAWHEPVHNLGGGVGAWLADTLFSAFGILAYVIPPVMILGCWTAFKQHDDREYVDFFALALRVIGALAIVLTSCGLAALNVDDLHYFASGGIIGSLFSSAMLPWFNELGATLVLLCIWAIGLTLFTGWSWLTIAEKTGAIILGAIGLITNRSRNEQEYTPYDETAIAREDLADDKTEPEFTAAGIDHDDVLFTAPSAVELAKAELDEPESVKAEIEIEQEQPIDIPTTNMANIDAEPEIRVNTSDDGIVQSQPLVEESEKNNNDEPVRYTFEIPAEYHFEPISEFNRQGTPTFEPVENSRNSSDTFTFMPETEPKNVVAATSATVITGNSQVKQGIGPELPRPNPVRIPTRRELYGIKVPSQRLAEQQREEEVKQQVGGADDDIESDKQQEVLLSQQFLEQQRERYRITTDTEEQAPIQPQIRQNPFEPENQPSVEERAQTATETVKQTVEQPQYKRYQEQGHQEKKELSALESLSILNNFSPVEDLVEKEPAEPLFMPSVHSAPENQLERPTEIAFAPAPVHNVVQQPQQPQQPQQPQQPQQPQQPQQPQQPQQPQQPQQPQQPQQPQQPQQPQQPQQDSLFHPFLVRNDQPLPKPTTPMPSLDLLTSPLAEEEPVDMFALEQTSRLIEARLSDYRVKADVVGFSPGPVITRFELDLAPGVKASRISNLSRDLARSLSAVAVRIVEVIPGKPYVGLELPNKKRQTVYLREVLDCEKFRDNPSPLTIVLGKDIGGQPVVADLGKMPHLLVAGTTGSGKSVGVNAMILSILYKAKPEDVRFIMIDPKMLELSVYEGIPHLLTEVVTDMKDAANALRWSVGEMERRYKLMSALGVRNLAGYNEKVKQAEEMGRPIPHPFWKPGDSMDVIHPVLKKEPYIVVMVDEFADLMMTVGKKVEELIARLAQKARAAGIHLVLATQRPSVDIITGLIKANIPTRIAFTVSSKIDSRTILDQGGAESLLGMGDMLYLAPNSSIPVRVHGAFVRDQEVHEVVNDWKARGRPEYVDSILSGGDDAEGGSGFDSDEELDALFDQAVQFVTEKRRVSISGVQRQFRIGYNRAARIVEQMEAQQIVSAPGHNGNREVLAPPPHES

SEQ ID NO: 6514 - protein, 183 aa, Eucalyptus grandis
MGRGRVELKRIENKINRQVTFAKRRNGLLKKAYELSVLCDAEVGLIIFSNRGKLYEFCSSSSMLKTLERYQKCNYGALEPNVSARESLELSCQQEYLRLKARYEGLQRTQRNLLGEELGQLCSKELESLERQLDGSLKQIRSRRTQYMLDQVTDLQHREQVVHEANRTLNQRLMEGYQVMRSS

SEQ ID NO: 6515 - protein, 199 aa, Bacillus subtilis subsp. subtilis str. 168
MTHNPNIIWHPAAISKSDRQSLNGHKSCVLWFTGLSGSGKSVLANAVDEKLYRKGIQSYVLDGDNIRHGLNKDLGFQTGDRIENIRRIGEVAKLFVDSGQMILTAFISPFREDRDMVRALFPKGEFFEIYVKCPLHVCEQRDPKGLYKKARNGEIKHFTGIDSPYEAPLSPDFIIESDQTSISDGADLIINALQNRGII

SEQ ID NO: 6516 - protein, 481 aa, Burkholderia fungorum LB400
MAIPSYTDTRLLINGEWCDAASGKTLDVINPATGQAIGKVAHAGIADLDRALAAAQRGFEAWRKVPANERATTMRRAAALVRERASDIGRLMTQEQGKPFAEARIEVLAAADIIEWFADEGRRVYGRIVPSRNLAAQQLVLKEPIGPVAAFTPWNFPVNQVVRKLSAALACGCSFLVKAPEETPASPAALLQAFVEAGVPAGTVGLVFGDPAEISGYLIPHPVIRKVTFTGSTPVGKQLAALAGAHMKRATMELGGHAPVIVAEDADVALAVKAAGGAKFRNAGQVCISPTRFLVHNSIREEFAAALVKHAEGLKLGDGLAEGTTLGPLANARRLSAMSKVLDDARKTGAKVETGGERVGSEGNFFAPTVLTNVSLEADVFNNEPFGPIAAIRGFDKLEEAIAEANRLPYGLAGYAFTKSFSNVHLLSQQVEVGMLWINQPATPSPEMPFGGVKDSGYGSEGGPEAMEGYLVTKAVSVMAV

SEQ ID NO: 6517 - protein, 127 aa, Rickettsia sp. TwKM02
PAHGGANEAVINMLKEIGSSEKIPKYIAKAKDKNDPFRLMGFGHRVYKNYDPRAAVLKETCKEVLKELGQLENNPLLQIAIELEAIALKDEYFIARKLYPNVDFYSGIIYKAMGIPSQMFTVLFAIA

SEQ ID NO: 6518 - protein, 176 aa, Zea mays
  misc_feature (109)..(109): Xaa can be any naturally occurring amino acid
  misc_feature (130)..(130): Xaa can be any naturally occurring amino acid
  misc_feature (159)..(159): Xaa can be any naturally occurring amino acid
GPVLSAASTPRFLHAQPPQSVAFPSATAIRRAKSAAIPLRPQRPPAAISPPAAPAIRRLSIRGRNRFHPRPQSTAPNPPPHPCARNASTLLLSPYMHFGELSVRKVFHXGNDSNHAGEESCTLFLCSIGXFNHPCSHEKPLLSHLRFFPWVVNEVYFKXPLVDAGMRELRATGWVH

SEQ ID NO: 6519 - protein, 175 aa, Triticum aestivum
MPPPVMAWSATSVAPLQGLESTGVLPVSRRSNGDSLDSVSNGGRIMCMQVWPIEGIKKFETLFYLRPLSTEALLKQVDYLIRSKWVPCLEFSKVGFIFREHNASPGYYDGRYWTMWKLPMFGCTDATQVINEVEEVKKEYPDAYVRIIGFDNMRQVQCVSFIAFKPPGCEESGKA

SEQ ID NO: 6520 - protein, 118 aa, Brassica napus
MAESQAKSPGGGESGGDQSPRSSSHVREQDRFLPIANISRIMKRGLPANGKIAKDAKEIVQECVSEFISFITSEASDKCQREKRKTINGDDLLWAMATLGFEDYIDPLKIYLTRYREM

SEQ ID NO: 6521 - protein, 310 aa, Zea mays
  misc_feature (247)..(247): Xaa can be any naturally occurring amino acid
  misc_feature (289)..(289): Xaa can be any naturally occurring amino acid
MAARSSPSSTSPPAGGPAAAAWRRRRVASEPPYSCGAGASPNIPFCDVGLPIDRRVDDLGSRMTVAKKTSQLGDQSPAIPRLGVPAYKWWSEALHGIFNQGRGIHLDGPLRAATSFPQVILTAASFNLHLWDRIGQDVDELKEEVQEAPRVKMLHCPSKAMDIENEIQVLCDQLAKKSSDSLRLLKELELHRSYGENDMPLYELKGLETLGSTLHIVVHDCASVDFWNSSIQWFRIQPEGSKKEIIXGTTKPAYAPEPHDVGRYTQAEVKSGGQTSITKIAGSVDPVSXAAGLVHYVEALVRRRETGYNV

SEQ ID NO: 6522 - protein, 303 aa, Bartonella bacilliformis
YIDGDEGILLYHGYSIDQLAENGDFLETCYLLLYGELPNKQQKIDFDRCIMRHTMVHEQFARFFHGFRRDSHPMAVMVACLGAMSAFYHDSINITDPQQRMIASIRLISKVPTLAAMAYKYSIGQPFVYPRNDLNYATNFLHMCFSVPCEEHKISPVIARAMDRIFTLHADHEQNASTSTVRLAGSSGANPYACIAAGVACLWGPAHGGANEACLKMLQEIGSVKKIPEFIARAKDKNDPFRLMGFGHRVYKNYDPRAKIMQKTCHEVLQELNIQDDPLLDIAMELEHIALNDEYFINKKLYP

SEQ ID NO: 6523 - protein, 501 aa, Glycine max
MTSLTNGDAGSLNKVPTIKFTKLFINGDFVDSLSGKTFETIDPRTGDVIARISEGDKEDIDIAVKAARHAFDNGPWPRLPGSERARILLKWAEIIEENAEELAALDAIDAGKLYHMCRNVEVPAAANTLRYYAGAADKIHGEVLKMSREFHAYTLLEPLGVVGHITPWNFPNTMFYIKVAPSLAAGCTMVLKPAEQTPLSALFYAHLAKLAGIPDGVINVVPGFGPTAGAALSSHMDVDKVSFTGSTQTGREIMQAAAKSNLKPVSLELGGKSPLIIFDDADIDKAAELALFGIISNKGEICVASSRVFVQEGIYDEFEKKLVEKAKSWVVGDPFDPKVQQGPQVDKNQFEKILSYIEHGKREGATLLTGGKTVGNKGYYIEPTIFSNVKEDMLIAQDEIFGPVIALMKFKTIEEAIKSANNTKYGLAAGIVTKNLDTANTVSRSIRAGIVWINCYFAFGDDVPFGGYKMSGFGRDHGLEALHKYLQVKSVVTPLYNSPWL

SEQ ID NO: 6524 - protein, 320 aa, Bartonella doshiae
TYIDGDKGILLYRGYPIEQLAEKGDFLESCYLLLYGELPTQQEKNDFDRRIMQHTMVHEQFSRFFQGFRRDSHPMAVMVACLGAMSAFYHDSIDITDPQQRMIASIRLISKVPTLAAMAYKYSIGQAFVYPHNSLSYAANFLRMCFAVPCEEYQVNPVLTRAMDRIFILHADHEQNASTSTVRLAGSSGANPFACIAAGVACLWGPAHGGANEACLKMLKEIGSVKKIPEFIARAKDKNDPFRLMGFGHRVYKNYDPRAKIMQKTCHEVLKELNRQDDPLLDIAIELEHIALNDEYFIEKKLYPNVDFYSGITLKALGFP

SEQ ID NO: 6525 - protein, 467 aa, Listeria monocytogenes str. 4b F2365
MLYSEDDKRKQESYRIPLFGSEEESTSIPKYVLKKEPMEPRIAYQLVKDQLMDEGNARQNLATFCQTYMEKEAEILMAETLEKNAIDKSEYPQTAELENRCVNILADLWNAPKDMSYLGTSTVGSSEACMLGGLAMKFRWRNHAEKRGLDIQAKRPNLIISSGYQVCWEKFCVYWDVDMRVVPMDKEHLSIDVDKVFDLVDEYTIGIVGILGITYTGKFDDIQLLDEKVEAYNEANEHQLVIHVDGASGAMFTPFVNPELPWDFRLKNVVSINTSGHKYGLVYPGVGWILWKDKEYLPKELIFEVSYLGGSMPTMAINFSRSASQIIGQYYNFLRYGFEGYREIHEKTKKTALYLAKSVEKSGYFEIINDGANLPIVCYKMKEGLDVEWTLYDLADQLLMKGWQVPAYPLPADLSDTIIQRFVCRADLGYNVAEEFAVDFADALHNLEHARVLYHDKERNDSYGFTH

SEQ ID NO: 6526 - protein, 194 aa, Methanosarcina barkeri str. fusaro
MNRKTGAVVLIFLFAAIVFISGCVQNEKVGAPVNKEFPEDGKGDESMNIQSIKVSSSAFESNGSIPGKYTCDGQNINPPLEFEGIPEEAESLVIIVDDPDAPTKTFTHWIVWNIEPVAKIEEDSIPGIEGLNDFKKIGYGGPCPPSGTHRYFFRVYALDKNLDLKAGAGRKGLENEMIGHIIAEGELMGKYSRK

SEQ ID NO: 6527 - protein, 467 aa, Pseudomonas aeruginosa UCBPP-PA14
MGLNADWMQRDLNVLWHPCTQMKDHERLPVIPIRRGEGVWLEDFEGKRYIDAVSSWWVNVFGHANPRINQRIKDQVDQLEHVILAGFSHQPVIELSERLVKITPPGLDRVFYADSGSAGIEVALKMSYHFWLNSGRPRKKRFVTLTNSYHGETIAAMSVGDVALFTETYKSLLLDTIKVPSPDCFLRPDGMCWEEHSRNMFAHMERTLAEGHDEIAAVIIEPLIQGAGGMRMYHPVYLKLLREACDRYGVHLIHDEIAVGFGRTGTMFACEQAGIAPDFLCLSKALTGGYLPMSAVLTSETIYRGFYDDYQTLRAFLHSHTYTGNPLACAAALATLDIFEEDKVIEANRALSTHMARATAHLADHPHVAEVRQTGMVLAIEMVQDKASRTPYPWQERRGLKVFQHGLERGALLRPLGSVVYFLPPYVITPEQIDFLAEVASEGIDIATRDAVSVAVSDFHPDHRDPG

SEQ ID NO: 6528 - protein, 484 aa, Pseudomonas aeruginosa UCBPP-PA14
MLGVFSAVALGKDKQPTAIVVGAGLAGLSAAYELQKDGWQVTVLEARPQVGGRSGLATSEWVGNQKVQPTLNAYLDTFKLKPVPAPDFVRTPSYLIDGLYYSSSDLALKQPNVAADLKRFESTLDDLSASISDPLNPASSNTLFALDQMNAARWLDKLNLSPTARLLVNQRIRSRYDEPSRLSLLYLAQQGRAYRGVDDRDLRAARLPGGSQVLAEAFVKQIKTIKTKSKVSSIVQAKDGVAVKAGSETYKADYVVLAVPLKALGQIQMTPSLSGTQMSALKGTNYGWRDQILLKFKRPVWDDKSRLSGEIFSDQGLGMIWVEPALKGGANVLINLSGDNARVLQAFGDRQMVDQVLIRMNKFYPKMRGAFGGYEIRRYSADPGTGGSYLAYGPGQVTRFWRIWEQPLSRVAFAGEHTDALYPGTIEGALRSGKRAASQVRDLYAGKTPVIEGAPMVAKAEKVAAPTTGGEKKNPFAWFTRLFD

SEQ ID NO: 6529 - protein, 232 aa, Zea mays
  misc_feature (215)..(215): Xaa can be any naturally occurring amino acid
MAQILLHGTLHATIFEAESLSNPHRATGGAPKFIRKLVEGIEDTVGIGKGTTKIYATVDLEKARVGRTRMVSNEPVNPRWYESFHIYCAHMAADVVFTVKIDNPIGASLIGRAYLPVEDILGGDEIDKWLEIRDEKREPIGDSKIRVKLQYFDVGKDRNWARGVRSTKYPGVPYTFFSQRQGCKVTLYQDAHVPDNFVPRIPLADGKNYEPHRVXWEDIFDAISKGQHLIYI

SEQ ID NO: 6530 - protein, 378 aa, Anabaena variabilis ATCC 29413
MMVCEYKPGLEGIPAAQSSISYVDGQKGILEYRGIRIEDLAQKSTFLETAYLLIWGELPTKEELQVFEEEVRLHRRIKYRIRDMMKCFPESGHPMDALQASAAALGLFYSRRDLHNPVYIRDAVVRLIATIPTMVAAFQLMRKGNDPVKPRDDLDYSANFLYMLNEKEPDALAAKIFDICLILHVEHTMNASTFSARVTASTLTDPYAVVASAVGTLGGPLHGGANEEVIQMLEEIGSVENVRSYVEERLQRKDKLMGFGHRVYKVKDPRATILQGLAEQLFAKFGADKYYDIAQEMERVVEEKLGHKGIYPNVDFYSGLVYRKMGIPTDLFTPIFAIARVAGWLAHWKEQLEENRIFRPTQVYNGKHSVTYTPIDQR

SEQ ID NO: 6531 - protein, 350 aa, Listeria monocytogenes str. 4b H7858
MTYKITSLAGDGIGPEIMTSGLQVLEAVAKKYNHTFEIESHPFGGAGIDVAQDPIPSSTLKACRDADAILLGAIGGPKWDNAPKRPEDGLLALRKALGLFANIRPIQVPSSITHLSPLKKEIVENTDFVVVRELTGGLYFGEPKYWDNEAAVDSLTYTRAEIERIIEKAFEIAATRNKKVTSVDKANVLASSKLWRKIADEVASRHPDITLEHLYVDAAAMLMIQRPTTFDVIVTENLFGDILSDEASVITGSLGMLPSASHAENGPSLYEPIHGSAPDIANQNIANPMSMISSVSMMLRQSFSLFEEADATDAATARTMQAGFLTADLGGNTSTTDFTNEVLKQIEGGE

SEQ ID NO: 6532 - protein, 294 aa, Staphylococcus aureus subsp. aureus MRSA252
MVIQWYPGHMAKAKREVSEQLKKVDVVFELVDARIPYSSRNPMIDEVINQKPRVVILNKKDMSNLNEMSKWEQFFIDKGYYPVSVDAKHGKNLKKVEAAAIKATAEKFEREKAKGLKPRAIRAMIVGIPNVGKSTLINKLAKRSIAQTGNKPGVTKQQQWIKVGNALQLLDTPGILWPKFEDEEVGKKLSLTGAIKDSIVHLDEVAIYGLNFLIQNDLARLKAHYKIEVPEDAEIIAWFDAIGKKRGLIRRGNEIDYEAVIELIIYDIRNAKIGNYCFDIFKDMTEELANDANN

SEQ ID NO: 6533 - protein, 335 aa, Burkholderia cepacia R1808
MALEQRPKPELQSPTDAIVRVTRTTICGTDLHILKGDVPTCEPGRVLGHEGVGVVEQVGAAVDALKPGDRVLISCISSCGRCEYCRRGLYSHCTTGGWILGNRIDGTQAEYVRIPHAQTSLYPIPAGADEDALVMLSDILPTGFECGVLNGKVQPGCSVAIVGAGPIGLAALLTAQFYSPGQIIMIDPDSNRLDIARRFGATDCVDGRSGDAAADVMKLTDGIGVDCAIEAVGIPATFELCTSIVAPGGVVANVGVHGVKADLHLEKLWDRNIAITTRLVDTVSTPMLLKTVRAGRLDPAQLITHRFALDDVEGAYDTFGRAAQTHALKVIIEVS

SEQ ID NO: 6534 - protein, 263 aa, Oryza sativa (japonica cultivar-group)
MSPPLELDYIGLSPPPPPPSSSSAAAARADDVDLKGTELRLGLPGSESPDRRPAAIAAAAATATTLELLPAKGAKRVFPDEAALTPPTAAAGKGKAAREGEEVGAEEEDKKVAAPPQPAAKAQVVGWPPIRSYRKNTMATNQIKSNKEDVDAKQGQGFLYVKVSMDGAPYLRKVDLKTYKNYKDMSLGLEKMFIGFSTGKEGAENQKDGEYVLTYEDKDGDWMLVGDVPWEMFTDSCRRLRIMKGSDAIGLAPRAGEKSKNRN

SEQ ID NO: 6535 - protein, 248 aa, Glycine max
WFRFQVDWTPELHKKFVKAVEQLGIDQAIPSRILEIMKVEGLTRHNVASHLQKYRIHKRQSAPREEDRKWHNQRDAMQRNYYMQRPIMAYPPYHSNHTLSPAPIYPMWGQPGSQTAGVQIWGHPGYHIWHPTESCHWKPYQGVHVDAWGCPLLPAPQAPCFPYNQNIPGLHNPKAVDYRFGMPQSSFEHHPAEEVVDKVVKEAISKPWLPLPLGLKPPSMDSVLAELSKQGISGIPLGNKRSSTPKLR

SEQ ID NO: 6536 - protein, 335 aa, Moorella thermoacetica ATCC 39073
MKHVVTLIPGDGTGPELIAAARRVLEASGAELEWEVMAAGEGAQEKYGSVLPEETLASIRKNGVALKGPITTPVGTGFRSVNVALRKELDLYANVRPFRNLPNVPSRYQGVDLVIYRENTEDLYAGVEHMVGEDAAESIKIITRKGSERIARAAFEYARRQGRKRVTAGHKANIMKFSDGLFLRTFYDVARDYPEITADDRIVDNLSMQLVQKPEQYDVLVLPNLYGDILSDLCAGLVGGLGVAPGANIGEKAAVFEPIHGSAPKYAGQNKVNPLATILSGVMMLEHLGEKEAAARIQRAILAVLAEGKYLTYDLGGSAGTSDMADAIVRRLEVE

SEQ ID NO: 6537 - protein, 199 aa, Zea mays
  misc_feature (72)..(72): Xaa can be any naturally occurring amino acid
  misc_feature (74)..(75): Xaa can be any naturally occurring amino acid
  misc_feature (77)..(78): Xaa can be any naturally occurring amino acid
  misc_feature (86)..(87): Xaa can be any naturally occurring amino acid
  misc_feature (101)..(102): Xaa can be any naturally occurring amino acid
MASSMLSSAAVVTSPAQATMVAPFTGLKSSAAFPVTRKANNDITSIASNGGRVSCMKVWPPVGKKKFETLSXYXXDXXEVEWVKEXXYLLPHKWIPLCEFXXEHGFVYREHGNTPEYYNARTGHGGTSLGPMTDFAQGLKEAKRAKGKPNPFLGTSIPKNRKAGDNFYPKNPKFPGGKFERNPKKTPPIYSQGGFFPRG

SEQ ID NO: 6538 - protein, 370 aa, Arabidopsis thaliana
MVDQGFFTLKKEKKKNILIKLFYVKILGFCFCDSWSSSDMAHSLTSLAVFQSVIRKEMVRSLHVYESVEIEREFWFKSKSCYVEKKAKPLFRSEDFRRPEISEGSVFGTWRCIFVFRFNHSLPRFPTLLCLSRNPKLEDIPNLANELKFISELKPSKIYEEEQCSSSTEGYYNSDLPKPRKLVLKQDLNCLPDSETESEESVNEKTEHSEFENDKTEQSESDAKTEILKKKKRTPSRHVAELSLEELSKYFDLTIVEASRNLKVGLTVLKKKCREFGIPRWPHRKIKSLDCLIHDLQREAEKQQEKNEAAAMAVAKKQEKLETEKRNIVKRPFMEIGIETKKFRQENFKKRHRASRAKKNQESLVTSSST

SEQ ID NO: 6539 - protein, 422 aa, Desulfovibrio vulgaris subsp. vulgaris str. Hildenborough
MSDILFLRNARLLGTPVDLIARDGVIAAIGEHGTLDTPADATVHDAGGHILFPSFIDAHVHLREPGFEYKEDIASGLAAAAHGGFGAVMCMANTRPVNDDAAVTRHIIETSLRHWPHGPRVYPVGAATVGLKGTELAPMAELAAAGCAAFSNDGAPVPDTEMFRRAVEYAADLGRVVIDHCEDPYLAKGAHMNEGATSGRVGVKGQPDVGEALHVARDILLADYLGLPIHLAHISCRRSVELIAWAKVRGVPVTAETCPHYLILDDTALENYDTNAKVNPPLRTPDDVAALREAVKSGVIDMFVTDHAPHAAHEKETPLDEAPNGISGLDTAVALTWGLVREGLLTEGDLVRLWNREPARVFGLPRNGFEPGDPADFFLFDPDEAWVVSRETMHSKSCNTPFLGHTLTGRVKAHWMGGRRIA

SEQ ID NO: 6540 - protein, 333 aa, Zea mays
MEAEAAAKRAREGGEDATAPVAGAEAVVAGAGEQAGISAVIPGWFSEISPMWPGEAHSLKVEKVLFQGKSDYQNVMVFQSSTYGKVLVLDGVIQVTERDECAYQEMITHLPLCSIKDPKKVLVIGGGDGGVLREVSRHISVEQIDICEIDKMVVDVSKQFFPHLAVGFEDPRVSLHIGDGVAFLKNAPEGTYDAVIVDSSDPIGPAQELFEKPFFHSVARALRPGGVVCTQAESIWLHMHIIEDIFVNCRQVFKGSVNYAWTTVPTYPSGVIGFMLCSTEGPAVDFQHPVFNIEEDEHSTKSKGPLKFYNSEIHTASFCLPSFAKRVIESKAS

SEQ ID NO: 6541 - protein, 345 aa, Arabidopsis thaliana
MDGKASNGNGLEKTVPSCCLKAMACVPEDDAKCHSTVVSGWFSEPHPRSGKKGGKAVYFNNPMWPGEAHSLKVEKVLFKDKSDFQEVLVFESATYGKVLVLDGIVQLTEKDECAYQEMIAHLPLCSISSPKNVLVVGGGDGGVLREISRHSSVEVIDICEIDKMVIDVSKKFFPELAVGFDDPRVQLHISDAAEFLRKSPEGKYDAIIVDSSDPVGPALALVEKPFFETLARALKPGGVLCNMAESMWLHTHLIEDMISICRQTFKSVHYAWSSVPTYPSGVIGFVLCSTEGPAVDFKNPINPIEKLDGAMTHKRELKFYNSDMHRAAFALPTFLRREVASLLAS

SEQ ID NO: 6542 - protein, 488 aa, Shigella flexneri 2a str. 301
MKKVNHWINGKNVAGNDYFQTTNPATGEVLADVASGGEAEINQAVAAAKEAFPKWADLPMKERARLMRRLGDLIDQNVPEIAAMETADTGLPIHQTKNVLIPRASHNFEFFAEVCQQMNGKTYPVDDKMLNYTLVQPVGVCALASPWNVPFMTATWKVAPCLALGNTAVLKMSELSPLTADRLGELALEAGIPAGVLNVVQGYGATAGDALVRHHDVRAVSFTGGTATGRNIMKNAGLKKYSMELGGKSPVLIFEDADIERALDAALFTIFSINGERCTAGSRIFIQQSIYPEFVKRFAERANRLRVGDPNDPNTQVRALISQQHWEKVSGYIRLGIEEGATLLAGGPDKPSDLPAHLKGGNFLRPTVLADVDNRMRVAQEEIFGPVACLLPFKDEAEGLRLANDVEYGLASYIWTQDVSKVLRLARGIEAGMVFVNTQNVRDLRQPFGGVKASGTGREGGEYSFEVFAEMKNVCISMGDHPIPKWGV

SEQ ID NO: 6543 - protein, 489 aa, Mycobacterium avium subsp. paratuberculosis str. k10
MALLADGVSELFIDGKMSAGNAGTFPTVNPATEEVLGVAANADAADMDRAIDAARRTFDETDWSRNTELRVRCVRQLRDAMREHIEELRDITIAEVGAPRMLTSAAQLEGPVGDLSFAADTAESYEWNQDLGQASPMGIPTRRTIAREAVGVVGAITPWNFPHQINLAKLGPALAAGNTVVLKPAPDTPWCAAVLGQLIAEHTDFPPGVVNIVTSDDHGVGALLSKDPRVDMVSFTGSTATGRSVMSDAAATIKRVFLELGGKSAFVVLDDADLGGACSMSAFTAAMHAGQGCAITTRLLVPRDRYDEAVAAAAGTMGSIKPGDPNDPGTVCGPVISARQRDRVQSYLDLAIAEGGTFACGGGRPADKDVGFFIEPTVIAGLTNDARPAREEIFGPVLTVIAYDGEEDALRIANDSPYGLSGTVFSADPERAANFASRMRVGTVNVNGGVWYSADAPFGGYKQSGNGREMGLAGFEEYLEIKTIATAVQ

SEQ ID NO: 6544 - protein, 365 aa, Yersinia pestis biovar Medievalis str. 91001
MRLAMKKTYRIAAIPGDGIGHEVMPEGINVLQAAALRWDLDISFENIEWASCEYYQHHGQMMPNDWQRQLQCFDAIYFGAVGWPATVPDHISLWGSLLKFRRDFQQYVNLRPVRLFPGIPCPLVGKQPGDIDFYVVRENTEGEYSSVGGRLFEGTEQEMVLQASIFTRRGVDRILKYAFELAQMRPRKRLTSATKSNGLAFSMPYWDERFEVMAAQYPQISADKQHIDILCARFVLNPERFDVVVASNLFGDILSDLGPACAGTIGIAPSANLNPERDFPSLFEPVHGSAPDIYKRNIANPIAMIWAGAMMLDFLGQGDERYHAAHNGILNAIEQVIAQGPKTPDMCGDASTQQVGSAIVQVLSH

SEQ ID NO: 6545 - protein, 283 aa, Oenococcus oeni PSU-1
MVLSRSVPNIVLNDGHSLPAIGLGTYLVRGGQGVDQILSAIEDGYRLIDTSTNYDSEGAVGEAIRRSGIPRSEFIVTSKLPGKYHHYQDALMMIQESIFRMGIDYLDLYLIHWPLPKRDHYVKAWKALVDAQKLGLIRSIGVSNFLPEHLDRIINESGVTPAVNQIEVHPYWVQEDMLAANKSRGIVSEAWSPLGRGSAALKEDIIKNLADKYGKNTGQIILRWHTQRGIIPLPKSSSLIHQRSNIDIFDFSLTSSEIEQINALNRSDGRVDGQDPNTYEEFD

SEQ ID NO: 6546 - protein, 400 aa, Streptomyces avermitilis MA-4680
MLSEQSAATVRATLPAVGAAVGEITARFYDRLFAARPELLRDLFNRGNQAAGTQRQALAGSIAAFATYLVEHPDERPDAMLDRIAHKHASLGIAPGQYAVVHEHLFAAIAEVLGDAVTPEVAAAWDEVYWLMANALIAIERRLYAQHENTGDTGGRRPWRVVERVDETADVAAFRLRPADGRPLPDFRPGQYVSVRVELPDGARQTRQYSLVGAPGSPELRIAVKRVHGGTTPDGEVSNHLHARVREGSVLELSAPYGDLALEATDVPLLLASAGIGVTPMIAMLEHLALTGHRAPVTVVHADRSPAEHALRADHEAYAAKLADAAVHFWYEHPEPGHPADRTGLVDLTGVPVSAGTRAYLCGPLPFMRAVRTQLIEKGVAPADIHYEVFGPDLWLARES

SEQ ID NO: 6547 - protein, 123 aa, Saprolegnia ferax
MIHIQTKLKIKDNTGVKIGQCIKIYKKATGTIGDTILISVKNLRLNKKKKIKITKGDLLKALIIQTKYSVKNTIGNYIKFDNNCAVILNNQNKLMGTRILGPITSEFRKKKQFKILSLASNIL

SEQ ID NO: 6548 - protein, 325 aa, Glycine max
  misc_feature (159)..(159): Xaa can be any naturally occurring amino acid
MGGGGAMRSAAAKIAGIGISKAALRPSALPTEQAVHNASRPTSVVGVKGAKSTEVASLHAAAPWDDWDLADDGDLVVPRMVFGSVPTFAEAKEATAELKDAIDQVYLSPESSQYSSRGGQVSALSPTGGQVSALSPTLYEPVNRSCVVDAISDSSAPKXAIQAFHLLSTSRDVFAVVASLACDPNVWNAVMENPAVSSFFQSQQSVADLGAAGNTEELDKFSSCTSETVESPERLGVSAESHPGNGIFDFMDLLQNVKLTVIELVSRVSGFLQNIFPTPDAMKEKMSGDVDGNTKASFMDSKISMGGTFTGLAIKKIMVIVTKRA

SEQ ID NO: 6549 - protein, 320 aa, Bartonella quintana
IDGDKGILLYCGYPIDQLAEKGDFLESCYLLLYGELPTKQEKIDFDRCIMQHMMVHERFTRFFHGFRRDSHPMAVMVACLGAMSAFYHDSIDIKDAQQRMIAAIRLISKVPTLAAMAYKYSIGQAFVYPRNDLSYAANFLHMCFSVPCEEYKINPVLSRAMDRICTLHADHEQNASTSTVRLVGSSGANPFACIAAGVACLWGPAHGGANEACLKMLQKIGSVERIPEFIARAKDKNDPFRLMGFGHRVYKNYDPRAKIMQQTCHEVLKELNIQDDPLLDIAIALENTALNDEYFIEKKLYPNVDFYSGITLKALGFPTE

SEQ ID NO: 6550 - protein, 352 aa, Coxiella burnetii RSA 493
MKNKNLSMPSLKEKLLQETVEHIDITRFDARPIIDAMDHMSFTSRDLARATQIFNRMLQDEQCSIILSLAGSTSAGGCMKLYADLVKYNMVDAIVATGASIVDMDFFEALGFRHYQGSPAVEDRQLRDLYIDRIYDTYIDEEDLQRCDHTIYEIANSLEPRPYSSREFIHHMGAYLAQGKAKKEESLVQLAYEHDVPIFCPAFTDSSAGFGLVLHQVKNPDRHLTIDSIRDFRELTDIKIKAGTTGLLMIGGGVPKNFVQDTVVCAEVIGKTVDMHKYAIQITVADVRDGACSSSTLKEACSWGKVDTAYEQMVYAEATSGLPLLASDAYHRGYWKDRSPRQYANLFKSESK

SEQ ID NO: 6551 - protein, 243 aa, Medicago truncatula
MGKSLFQESLKALEADIQYANTLALGHPRDKEGGCFQMRLSYSPVAPLFLSLVQWTDYRLAGALGLLRILIYVTYGNGKTTISIYERKASIRQFYSIIFPALLQLQKGVTDLEERKQKEVYANRYQKKTDFKDRRESKIDIEREKECGVCLEVKAKVVLPNCCHQMCFKCYREWCLRSQSCPFCRDSLKRVNSGDLWIYTDTSDIVDVGTIFKENCKILFLYIEKLPLIIPDPRHVSYDPFFR

SEQ ID NO: 6552 - protein, 106 aa, Arabidopsis thaliana
MDVGRNNRKNMSFRSSPEKSKQELRRSFSAQKRMMIPANYFSLESLFLLVGLTASLLILPLVLPPLPPPPFMLLLVPIGIMVLLVVLAFMPSSHSNANTDVTCNFM

SEQ ID NO: 6553 - protein, 426 aa, Chlorobium tepidum TLS
MTIDLDFDRCHLWHPYTSMADPLPVWPVKRASGVMIELEDGRKLIDGMSSWWAAIHGYNHPVLNRAVTEQLGRMSHVMFGGLTHEPAIELGKILTSLLPDPLDRIFFCDSGSVAVEVAIKMALQYWLAAGKPGKKRLLTVRSGYHGDTFMAMSVCDPVTGMHSLFSGAVPEQLFVEAPACGFNEPWREEAIDKMRQALEDHANTIAAVIIEPIVQGAGGMRFYSPHYLRRLRELCTEHGVLLIFDEIATGFGRTGKLFAMEYASVTPDIVCLGKALTGGYMTLAATVTTGHVADTISGGNPGLFMHGPTFMANPLACAVAVASLKLLLSGDWQSTVWRIERQLAEELAPCTGMTGVRDVRVLGAIGVVELDRPVDMAKIQQAFVERGIWVRPFGRLVYLMPPFIIRDNELTRLTSVICEVIGAEYR

SEQ ID NO: 6554 - protein, 319 aa, Bartonella sp.
ITYIDGDKGVLLYRGYPIDQLAEKGDFLESCYLLLYGELPTKQEKNDFDRCIMQHTMVHEQFARFFHGFRRDSHPMAVMVACLGAMSAFYHDSIDITDPQQRMIASVRLISKVPTLAAMAYKYSIGQAFVYPRNDLSYAANFLRMCFSVPCEEYKTNPVLTRAMDRIFILHADHEQNASTSTVRLAGSSGANPFACIAAGVACLWGPAHGGANEACLKMLQEIGDVKRIPEFIARAKDRNDPFRLMGFGHRVYKNYDPRAKIMQKTCHEVLKELNIQDDPLLDIAIELEKIALNDEYFVEKKLYPNVDFYSGITLKALG

SEQ ID NO: 6555 - protein, 315 aa, Bartonella sp.
DGDKGVLLYRGYPIDQLAEKGDFLESCYLLLYGELPTKQEKNDFDRCIMQHTMVHEQFARFFHGFRRDSHPMAVMVACLGAMSAFYHDSIDITDPQQRMIASVRLISKVPTLAAMAYKYSIGQAFVYPRNDLSYAANFLRMCFSVPCEEYKTNPVLTRAMDRIFILHADHEQNASTSTVRLAGSSGANPFACIAAGVACLWGPAHGGANEACLKMLQEIGSVKRIPEFIARAKDRNDPFRLMGFGHRVYKNYDPRAKIMQKTCHEVLKELNIQDDPLLDIAIELEKIALNDEYFVEKKLYPNVDFYSGITLKALG

SEQ ID NO: 6556 - protein, 472 aa, Escherichia coli CFT073
MTTHLVWFRQDLRQHDNLALAAACRNSSARVLALYIATPRQWAAHNVSPRQAELINTQLNALQIALAEKGIPLLFREVDDFAASVEIVKQVCAEYRVTHLFYNYQYEVNERARDVQAERTLRNVVCEGFDDSVILPPGAVMTGNHEMYKVFTPFKNAWLKRLREGMPECVAAPKVRSSGSIEPAPSITLNYPRQSFDTAHFPVEEKAAIAQLRQFCLNGAGEYEQQRDFPAVEGTSRLSASLATGGLSPRQCLHRLLAEQPQVLEGGPGSVWLNELIWREFYRHLMTYYPSLCKHRPFIAWTDRVQWQSNPAHLKAWQEGKTGYPIVDAAMRQLNSTGWMHNRLRMITASFLVKDLLIDWREGERYFMSQLIDGDLAANNGGWQWAASTGTDAAPYFRIFNPTTQGEKFDREGEFIRQWLPELRDVPGKAVHEPWKWAEKTGVTLDYPQPIVDHKEARLRTLAAYEEARKGA

SEQ ID NO: 6557 - protein, 500 aa, Bordetella parapertussis 12822
MDTPSDLLRKLGLDPAALAQGSLRARSPIDGALLARVPEHSVAQAHAAITRARQASQQWRDVPAPRRGELVRRFGDVLREHKEALGRLVSLEAGKILAEGAGEVQEMIDICDFAVGLSRQLYGLTIASERPGHRMMETWHPLGVVGVISAFNFPVAVWSWNAALALVCGNAVVWKPSEKTPLTALACQALLARALQDYGEAPAGLAEVLIGGRQLGEALVDSHDVALVSATGSTRMGRQVGPRVAQRFGRVLLELGGNNAIIVAPSADLEMATRGIVFGAIGTAGQRCTTTRRLIAHTDIADTLVARLKQAYASATVGDPLQPGTLVGPLIDRAAYDAMQAALTAAREQGGQVSGGERLLAERYPDAWYVRPAIVEMPGQTDVVCHETFAPILYVMRYGDFPAALAMHNGVPQGLSSAIFTNDLREAEAFLSSAGSDCGIANVNIGTSGAEIGGAFGGEKETGGGRESGSDAWKHYMRRATNTVNYSRALPLAQGIRFGE

SEQ ID NO: 6558 - protein, 221 aa, Glycine max
  misc_feature (117)..(117): Xaa can be any naturally occurring amino acid
MALFAAFSICKVAKDAAGVAGNVFAFGLFVSPIPTFRRIIRNGSTEMFSGLPYIYSLLNCLICMWYGTPLISADNLLVTTVNSIGAVFQFVYIIIFLMYAEKAKKVRMIGLSLAVLXIFAIILVGSLQIDDIIMRRFFVGFLSCASLISMFASPLFIIKLVIQTKSVEFMPFYLSLSTLLMSTCFLLYGLLNDDAFIYGPDGVGTMLGLVPGVLCWVLRGG

SEQ ID NO: 6559 - protein, 425 aa, Fusobacterium nucleatum subsp. nucleatum ATCC 25586
MLLKNCKILKNTKFEKVDILIRDNKIEKISENIDITDENIIDIKNRFVTAGFIDVHVHWREPGFSKKETVYTASRAAARGGFTTVMTMPNLNPVPDSVETLNKQLEIIKKDSVIRAIPYGAITKEEYGRELSDMEAIASNVFAFTDDGRGVQSANVMYEAMLMGAKLNKAIVAHCEDNSLIRGGAMHEGKRSAELGIKGIPSICESTQIVRDVLLAEAANCHYHVCHISAKESVRAVREGKKNGIKVTCEVTPHHLLSCDEDIKEDNGMWKMNPPLRSREDRNALIVGILDGTIDIIATDHAPHTMEEKIRGIEKSSFGIVGSETAFAQLYTKFVKTDIFSLEMLVKLMSENVAKIFDLPYGKLEENSFADIVVIDLEKEITINPNNFLSKGKNTPYINEKINGIPVLTISNGKIAYIDKEEINL

SEQ ID NO: 6560 - protein, 481 aa, Pseudomonas putida KT2440
MHPIAPHWLNFIDGQWTDSEQHLSIHNPGTTDLVATIAQASVADAECALQAARRCADSNALNRVRPAQRVTWLLEVAAQIRAITDEGAWVLCQENGKSLRDARDEFIEAARYFEYYAGMADKIEGKSIPLGDGYIDFTVYDPLGVSLQIVPWNFPVSICARSLAPALAAGNAVVIKSPELSPLGLCVLMQAIERAGLPQGAVNLICGRGREVGAYLAGHRDVDQIVFTGSVGTGQSILRSAAEHAIPSVMELGGKSAALVFPDADREQLISSVKSGIFFNAGQVCSAMSRLLVHRSIYDEVVADVVAMAEGLTVGLGQDNPDHTPVISAAQLEGIEALCRRAQQQGAVVATGGEAISGLSGHYMAPTVLRDVTAQMEIAQTEVFGPVLAVIPFDSEEEALAIANGTVFGLVAGVFTQDLNRALRCARRLCTGQVFVNEWYAGGIETPFGGVGLSGFGREKGQEALYSYVRTKNLAVRIKGE

SEQ ID NO: 6561 - protein, 175 aa, Triticum aestivum
MGPTVMASSATSVAPFQGLKSTAGLPVSRRSNGASLGSVSNGGRIRCMQVWPIDVIKKWETLSYLPPLSTEALLKQVDYLIRSKWVPCLEFSKVGFIFREHNASPGYYDGRYWTMWKLPMFGCTDATQVINEVEEVKKEYPDAYVRIIGYDNMRQVQCVSFIAFKPPGCDESGKA

SEQ ID NO: 6562 - protein, 458 aa, Synechocystis sp. PCC 6803
MIRRRSFFKLSQLMFVSYLLSTSCGKNNTPVTANDAPSILIIGAGLAGLAAAQSLMKQGYTVRVLEARDRLGGRTWTSNYWDDAPLDMGASWIQGTEGNPITELAEKIATPLVMTSYDNAITYEVGGQPFTAKEDRIIEQLEKKWQGAIATAQNGDGDQSLQAVIENVFDLENQPLETKQIIDWYMNSTIEHEYAGSLKDTSIYWFDGDGGFGGDDAIFVEGYQAIVNYLAKDISIELNQIVESIDYSEEIPKIITNQGAYTADQVIITLPLGVLKSGQVKFIPELPSPKRKAIKALGMGILNKCYLRFPKVFWPKKVDWIEQVPTERGLWSEWVNIFRVNQLPILLGFNAADEGKEIETWTDEEIIKSAMKTLRHLFGDDIPDPTDYQITRWQSDSFSRGSYSFNALGSHPDMRDHLAKSLNDQIFFAGEATERDYFATAHGAYLSGLRVAEEINNL

SEQ ID NO: 6563 - protein, 254 aa, Arabidopsis thaliana
MENEREKQVYLAKLSEQTERYDEMVEAMKKVAQLDVELTVEERNLVSVGYKNVIGARRASWRILSSIEQKEESKGNDENVKRLKNYRKRVEDELAKVCNDILSVIDKHLIPSSNAVESTVFFYKMKGDYYRYLAEFSSGAERKEAADQSLEAYKAAVAAAENGLAPTHPVRLGLALNFSVFYYEILNSPESACQLAKQAFDDAIAELDSLNEESYKDSTLIMQLLRDNLTLWTSDLNEEGDERTKGADEPQDEV

SEQ ID NO: 6564 - protein, 506 aa, Brassica napus
MTSINVKLLYHYVITNLFNLCFFPLTAIVAGKAYRLTIDDLHHLYYSYLQHNLITIAPLFAFTVFGSVLYIATRPKPVYLVEYSCYLPPTHCRSSISKVMDIFYQVRKADPSRNGTCNDSSWLDFLRKIQERSGLGDETHGPEGLLQVPPRKTFAAAREETEQVIIGALENLFKNTNVNPKDIGILVVNSSMFNPTPSLSAMVVNTFKLRSNVRSFNLGGMGCSAGVIAIDLAKDLLHVHKNTYALVVSTENITYNIYAGDNRSMMVSNCLFRVGGAAILLSNKPRDRRRSKYELVHTVRTHTGADDKSFRCVQQGDDENGKTGVSLSKDITDVAGRTVKKNIATLGPLILPLSEKLLFFVTFMGKKLFKDKIKHYYVPDFKLAIDHFCIHAGGKAVIDVLEKNLGLAPIDVEASRSTLHRFGNTSSSSIWYELAYIEAKGRMKKGNKVWQIALGSGFKCNSAVWVALNNVKASTNSPWEHCIERYPVKIDSDSGKSETRAQNGRS

SEQ ID NO: 6565 - protein, 373 aa, Zea mays
MRRRRMGALHVVGEPRISFRQQPAAVVAKNGGHGAVVEEIHGLIRVYKDGHVERLPAIPAVPCTWGGTAAPDAPGGVVARDVVVDPATGVWARLYAPTSAAAGDGARRPVVVYFHGGGFCVGSAAWSCYHEFLAQLAARAGCAVMSVDYRLAPEHRLPAAFDDGLAAVRWLRHQAAASASASACSNDDLSWWRARCGFDRVFLMGDSAGASIALHVAARLGQGQLGALPPLTVRGAVLIQPFLGGEGRTASEKNVAQPPRSALTLPTSDCYWRLALPAGASREHPWCNPLSGRAAPRLETTPLPPLLVCVSETDILRDRNLELCRALREAGKRVEQAVYGGVGHAFQVLHNCHLSQPRTQEMLAHIKAFVSAR

SEQ ID NO: 6566 - protein, 391 aa, Zea mays
MCCLQLKDMVLKFSGSSKQCKGTAGTQSFRSSGDRYRRPYPGFIDDTGFTPASKVLGEDYYPRTALAGAAGAAGGARTASSDTLDMGRSNRKSPGSSGWIPGTDEAAAGGDDVLALEDAAAPREWTAQVEPGVQITFGTIPTGGNDLKRIRFSREMFNKWEAQRWWGENYDRIVELYNVVMFSGRQQGCSTPVSSVDDLALVGRDSSYSRGGSTSRGSPITAPPPPPPLPPVASKEPITRSASYKATAAGSSSAPYAAAHSTRAAAAYFPSAAVPDPSDHVWAHHFNMLNSAAAAAGTSAAMGGGAPSSYDPSRATTSSRDEASVSLSNVSDLEATEWIEEDEPGVCLTIRELGDGTRELRRIRFSREIFGEDRAKVWWEQNRERIQAEYL

SEQ ID NO: 6567 - protein, 506 aa, Brassica oleracea
MTSINVKLLYHYVITNLFNLCFFPLTAIVAGKAYRLTIDDLHHLYYSYLQHNLITIAPLFAFTVFGSVLYIATRPKPVYLVEYSCYLPPTHCRSSISKVMDIFYQVRKADPSRNGTCDDSSWLDFLRKIQERSGLGDETHGPEGLLQVPPRKTFAAAREETEQVIIGALENLFKNTNVNPKDIGILVVNSSMFNPTPSLSAMVVNTFKLRSNVRSFNLGGMGCSAGVIAIDLAKDLLHVHKNTYALVVSTENITYNIYAGDNRSMMVSNCLFRVGGAAILLSNKPRDRRRSKYELVHTVRTHTGADDKSFRCVQQGDDENGKTGVSLSKDITDVAGRTVKKNIATLGPLILPLSEKLLFFVTFMGKKLFKDKIKHYYVPDFKLAIDHFCIHAGGKAVIDVLEKNLGLAPIDVEASRSTLHRFGNTSSSSIWYELAYIEAKGRMKKGNKVWQIALGSGFKCNSAVWVALNNVKASTNSPWEHCIDRYPVKIDSDSGKSETRAQNGRS

SEQ ID NO: 6568 - protein, 285 aa, Moorella thermoacetica ATCC 39073
MALRGIWFSELQTPDLAISVRLNQTLHHEKTPYQELAVVDTEAYGRMLLLDNIIQTTVKDEFFYHEMIAHVPLNTHPNPRTALVIGGGDGGVVREIVKHPSIEKVTLVEIDARVVANAREYLPEIACGLDDARVEIRFEDGIEHVRQRENTYDVIIVDSTDPIGPAVGLFSAEFYRNVYRALKADGVFVAQTESPIFNSRLIRRIQRDLKEIFPIARLYLTTVPTYPGGLWAFSLGSKKYDPLEVDWRQAPKVATRYYTPAIHQAAFSLPPFVQEFLEAPEEEEF

SEQ ID NO: 6569 - protein, 506 aa, Brassica rapa
MTSINVKLLYHYVITNLFNLCFFPLTAIVAGKAYRLTIDDLHHLYYSYLQHNLITIAPLFAFTVFGSVLYIATRPKPVYLVEYSCYLPPTHCRSSISKVMDIFYQVRKADPSRNGTCDDSSWLDFLRKIQERSGLGDETHGPEGLLQVPPRKTFAAAREETEQVIIGALENLFKNTNVSPKDIGILVVNSSMFNPTPSLSAMVVNTFKLRSNVRSFNLGGMGCSAGVIAIDLAKDLLHVHKNTYALVVSTENITYNIYAGDNRSMMVSNCLFRVGGAAILLSNKPGDRRRSKYELVHTVRTHTGADDKSFRCVQQGDDENGKTGVSLSKDITDVAGRTVKKNIATLGPLILPLSEKLLFFVTFMGKKLFKDKIKHYYVPDFKLAIDHFCIHAGGRAVIDVLEKNLALAPIDVEASRSTLHRFGNTSSSSIWYELAYIEAKGRMKKGNKVWQIALGSGFKCNSAVWVALNNVKASTNSPWEHCIDRYPVKIDSDSGKSETRVQNGRS

SEQ ID NO: 6570 - protein, 384 aa, Glycine max
KLQIIREIATLKLLRHPNVVRLYEVLASKTKIYMVLEYVNGGELFDIIASKGKHIEGEGRKLFQQLIDGVSYCHTKGVFHRDLKLENVLVDNKGNIKITDFGLSALPQHLREDGLLHTTCGSPNYVAPEVLANKGYDGATSDTWSCGVILYVILTGHLPFDDRNLVVLYQKIFKGDVQIPKWLTPGARNMIRRILDPNPETRITMAGIKEDPWFKKGYIPVNPEDEDVYVDQEAFSIHEQPNEAEQRNSGSPSLINAFQLIGMSSCLDLSGFFEKEDVSERKIRFASNLSVKDLIERIEDTATEMEFRVEKKNGKLKVIRENKVHKTLGCLSVVVEVFGISSSLYVVELRKSYGDGSVYKQLCNKLLNDLGIPPKQPLVRSAAN

SEQ ID NO: 6571 - protein, 506 aa, Brassica napus
MTSINVKLLYHYVITNLFNLCFFPLTAIVAGKAYRLTIDDLHHLYYSYLQHNLITIAPLFAFTVFGSVLYIATRPKPVYLVEYSCYLPPTHCRSSISKVMDIFYQVRKADPSRNGTCDDSSWLDFLRKIQERSGLGDETHGPEGLLQVPPRKTFAAAREETEQVIIGALENLFKNTNVNPKDIGILVVNSSMFNPTPSLSAMVVNTFKLRSNVRSFNLGGMGCSAGVIAIDLAKDLLHVHKNTYALVVSTENITYNIYAGDNRSMMVSNCLFRVGGAAILLFNKPGDRRRSKYELVHTVRTHAGADDKSFRCVQQGDDENGKIGVSLSKDITDVAGRTVKKNIATLGPLILPLSEKLLFFVTFMGKKLFKDKIKHYYVPDFKLAIDHFCIHAGGRAVIDVLEKNLALAPIDVEASRSTLHRFGNTSSSSIWYELAYIEAKGRMKKGNKVWQIALGSGFKCNSAVWVALNNVKASTNSPWEHCIDRYPVKIDSDSGKSETRAQNGRS

SEQ ID NO: 6572 - protein, 307 aa, Sorghum bicolor
MSAELKRDYEIGAEIGRGRFGVVHRCTSRATGEAFAVKSVDRSQLADDLDRELAELEPKLAQLAGAGNPGVVQTHAVYEDETWTHTVMDLCAGPDLLEWVRLRRGAPVPEPLAAAIVAQVAQALALCHRRGVAHRDVKPDNILIDTAPAGSDDGEDEEEDSGEAEEAETAPRARLADFGSAAWVGAGGLGRAEGLVGTPHYVAPEVVGGGEYGAKADVWSAGVVMYALLSGGALPFGGETAAEVLAAVLRGSVRFPPRLFSGVSPAAKDLLRRMICRDEWRRFTAEQVLAHPWIVSGGGARAIERPT

SEQ ID NO: 6573 - protein, 395 aa, Yersinia pestis biovar Medievalis str. 91001
MNAMSLLSVEVSNFTFVGLFKNDNVNIVSIHRVLLLLEELMSQLPEKMSAVVCHGPQDYRLEHVPTPVPKAKELVIKVKGCGICAGDCKCKNGAKMFWGETPWVKPPVVPGHEFYGHIVALGEGTESKYKLGERVIAEQIVPCWDCRYCNSGSYWMCETHNIYGFQKDVAEGGMAEYMRFSENAIVHKIPESLSHEDAVLIEPMACAIHTVARGDIQLDDVVVLAGAGPLGLCMVQVARLKTPKKLIVIDTIEERLALAKAFGADVVINPLKEDADKIVKSLTGGYGCDVYIEATGAPIGVTQGLQMIRKLGRFVEFSVFGQETTVDWSIIGDRKELDIRGAHLAPYSYEIATDLFERGLVTSKGIVTHSYSLDDWEKAFELADSTNSIKVILVP

SEQ ID NO: 6574 - protein, 500 aa, Oryza sativa (japonica cultivar-group)
MENSQVWLLWGALSVAVLFYLSTLRRRHAGGKPLPPGPTPLPLIGNLHLAGGTSFHHKLRDLARVHGPVMTLKLGLATNVVISSREAAIEAYTKYDRHLAARATPDTFRACGFADRSMVFIPSSDPRWKALRGIQGSHVFTPRGLAAVRPIRERKVGDLMAYLRAHAGEEVLLGQAMHTGLLNLVSFSYFSIDIVDMGSQMARDLREVVDDIISVVGKPNISDFYPFLRPLDLQGLRRWTTKRFNRVFSIMGDIIDRRLAHIRDNKPSHNDFLDSLLELMAAGKIDRVNVLDMLFEAFVAGADTMALTLEWVMAELLKNPGVMAKARAELRDVLGDKEVVEEADAARLPYLQAVLKEAMRLHPVGALLLPHFAVEDGVEVGGYAVPKGSTVLFNAWAIMRDPAAWERPDEFVPERFVERAPLLDFRGKDAEFMPFGSGRRLCPGLPLAERVMPFILASMLHTFEWKLPGGMTAEDVDVSEKFKSANVLAVPLKAVPVLIK

SEQ ID NO: 6575 - protein, 282 aa, Oryza sativa
GEFEDVKLLNNLLTEKNKETGWDVPIHVDAASGGFIAPFLYPELEWDFRLPLVKSINVSGHKYGLVYPGVGWVIWRSKEDLPEELIFHINYLGTDQPTFTLNFSKGSSQIIAQYYQLIRLGFEGYKNIMQNCMETPAILREGIEATGRFEILSKEAGVPLVAFSLKASGRYTVFDISEHLRRFGWIVPAYTMPANAEHVAILRVVIREDFSRSLAERLVSDIVKILHELDAHSAQVLKISSAIAKQQSGDDGAVTKKSVLETEREIFAYWRDQVKKKQTGIC

SEQ ID NO: 6576 - protein, 319 aa, Bacillus sphaericus
MKKIAVLTSGGDVPGMNAAIRAVVRKAAFHGINVVGIKHGYEGLVKGYLEELDLGSVGGIIQRGGTHLNSARCPEFKEDAVQQQGIENLRAAGIEGLVVIGGDGSYRGAMDLVKKGFPAVGVPGTIDNDVPGTEYTIGFDTALNTVVESIDKIRDTATSHENSFIVEVMGRDAGDIALWAGLAAGAETVLIPEEDYDLDDIVARLDRGAARGKKHSIIIVAEGVMSGNELAKLIKEKTGKETRVSVLGHIQRGGSPTARDRVLASQFGAHAVELLMEGKYGRAVGIRNHQVIDYDMPEAFEKNHEADVSLYTLMKELSI

SEQ ID NO: 6577 - protein, 44 aa, Zea mays
AIILPPFGVFLKVGCKGEIWVCLLVPFLAYFPGVIFPIFGFPQG

SEQ ID NO: 6578 - protein, 109 aa, Ipomoea batatas
CWQFITLAGFHGNALIIDTFAKDFASRGMLAYVEKIQREERNNGVDTLAHQKWSGANYYDRVLRTVQGGITSTAAMGKRVTEEQFQESWTRPGTTNMGDGGVVIAKARM

SEQ ID NO: 6579 - protein, 200 aa, Triticum aestivum
MSAVNITNVAVLDNPTAFLNPFQFEISYECLVPLDDDLEWKLTYVGSAEDETYDQQLESVLVGPVNVGTYRFVFQADPPDPLKIREEDIIGVTVLLLTCSYVGQEFMRVGYYVNNDYDEEQLREEPPAKLLLDRVQRNILADKPRVTKFPINFHPEPGTSSEQPQQDAEQQQQPTSPEPQTAPVEPHMAPLENVPIAADQ

SEQ ID NO: 6580 - protein, 441 aa, Glycine max
  misc_feature (51)..(51): Xaa can be any naturally occurring amino acid
  misc_feature (224)..(224): Xaa can be any naturally occurring amino acid
MPETESAAAAAVEEENNTALFGKYEVGRLLGCGAFAKVYHARNTETGQSVXAVKVISKKKLNSSGLASNVKREISIMSRLHHPNIVKLHEVLATKTKIYFILEFAKGGELFARIAKSRFSEDLARRYFQQLISAVGYCHARGVFHRDLKPENLLLDEQGNLKVSDFGLSAVKDQIGVDGLLHTLCGTPAYVAPEILAKKGYDGAKVDVWSCGIILFVLVAGYLXPFNDPNLMVMYKKIYKGEFRCPRWFSMELRRILTRLLDTNPDTRITVDEIMKDTWFKKGYKEVKFGDLGLEWKSEGEGVKDLNAFDIISFSTGLNLSGLFDSSCGVEEGERFLLRESPEKVVEMLVAAAEKEGVVVRMRKECGVELEGCGGNFAALVEVYRLPGELVVVEVRRRDGDGGVFRDVWRNKLRPCLCAASSSTTSDRDGTTLAQPVAGDS

SEQ ID NO: 6581 - protein, 411 aa, Zea mays
MRHHLMCPISLQPMQDPVTAPTGITYDRRAIERWLAAGHATCPVTGQPLALADLTPNHTLRRLIQSWCAPRPSTPPEAAGANKPADGDDDAVEHSQSQTDDDVVKKLLRAATSPPIDVLREAAAAAFESDAARRRMVDAGVLQRVLRGVAAIASEVKADDPRHHENESRSSSAIARAIEARLDLARALAVSSCDDDELRPQLVSDSLVHGLLDAATDVLAALERAGGGGGDDGDAARASAVRLLDSVTGAAGAAVLERLRPGLFRAVTAVVRDRVSPAATRSALRVLLHACPLGRNRALAVEAGAAREAIELELDAPPPPPGGGGGRRATELALALLAELCACADGRAAVAAHPAGVAVVARRLLRVSAAADACAVRVLAAVGGRAASPEVLREMARVGAVGKLCCVLQAC

SEQ ID NO: 6582 - protein, 290 aa, Nicotiana tabacum
ELFDRIIAKGHYTERAAASMCRAIVNVVHVCHFMGVIHRDLKPENFLLTDKSENAALKATDFGLSMFIQEGKVYKDIVGSAYYVAPEVLRKSYGKEIDVWSAGVMLYILLSGVPPFWAETERGIFDAILKEDIDFESQPWPSITSSAKDLVRKMLTKDPKKRISAAQVLEHPWLKVGGVASDKPLDNAVLSRMKQFRAMNKLKKLALKVIAENMSAEEIQGLKSMFHNIDTDNSGTITYEELKSGLARLGSKLTEAEVKQLMEAADVDGNGSIDYIEFITATMHKHTEFL

SEQ ID NO: 6583 - protein, 427 aa, Escherichia coli CFT073
MADTKAKLTLNGDTAVELDVLKGTLGQDVIDIRTLGSKGVFTFDPGFTSTASCESKITFIDGDEGILLHRGFPIDQLATDSNYLEVCYILLNGEKPTQEQYDEFKTTVTRHTMIHEQITRLFHAFRRDSHPMAVMCGITGALAAFYHDSLDVNNPRHREIAAFRLLSKMPTMAAMCYKYSIGQPFVYPRNDLSYAGNFLNMMFSTPCEPYEVNPILERAMDRILILHADHEQNASTSTVRTAGSSGANPFACIAAGIASLWGPAHGGANEAALKMLEEISSVKHIPEFVRRAKDKNDSFRLMGFGHRVYKNYDPRATVMRETCHEVLKELGTKDDLLEVAMELENIALNDPYFIEKKLYPNVDFYSGIILKAMGIPSSMFTVIFAMARTVGWIAHWSEMHSDGMKIARPRQLYTGYEKRDFKSDIKR

SEQ ID NO: 6584 - protein, 73 aa, Glycine max
AFSMIFSPAVITVNLAGADMVAPFTVLMSMAGFPTRKTNNDITSIASNGGRVQCMQVRPPICKNKSETLSYLA

SEQ ID NO: 6585 - protein, 362 aa, Triticum aestivum
  misc_feature (200)..(200): Xaa can be any naturally occurring amino acid
  misc_feature (213)..(213): Xaa can be any naturally occurring amino acid
AYRQDQIVSVWLLQSTTFFSIWIKQHLQSIVHIFYSEGTDHSYSWYLQLRNLVWATSKHDVYMAQNNSVMHWSSLLQRGTEVLHVAGQVVPKQKAHGARTLSRVQISSMALKDNLMVAGGFRGELIFKYVDKPGVAFCTNAADNKNSVTNAVDVYESPSGATRVTAANNDCTVKFLDAERCSLLSRFTFPWSVNNNIGEXPDGKLLAVLGDSXPDCVIADAQSGEEIATLKGHLDYSFSSAWHPGGHVLATGNQDKTCRLWDTRNLSAPFAVLGGRIGAVRGLRFSSDGRFLAAAEAADFVHVYDARAGYGAAQEIGLFGEIAGVAFSPDADALFVGVADRAYGSLLEFGRRGRHAYLDSYL

SEQ ID NO: 6586 - protein, 100 aa, Burkholderia cepacia R18194
MVIVALISPYEADRQRARQIVGVDHFVEVYLKTDIATCSARDPKQLYAKAITGQTTQFTGISDPYEVPTTPDLVVETGSMDIASSVALIMNFERQRFTHA

SEQ ID NO: 6587 - protein, 431 aa, Burkholderia cepacia R18194
MGALNRAGSRVIVKADGVYLWDSDGNKIIDGMAGLWCVSVGYGCKALADAAYRQIQELPFYNTFFKTTHPPVIELSAMLAEVSPKGFNHFFYCNSGSEGNDTVLRLVHQYWRVQGQPQKKYVISRKNGYHGSTIAGGTLGGMGYMHEQMPSKVENIVHIDQPYFFGEAAAGETPEAFGLARAQQLEAKILELGAENVAAFIGEPFQGAGGVIFPPSTYWPEIQRICRKYDILLAADEVIGGFGRTGEWFAHQHFGFEPDLITMAKGLTSGYVPMGAVGIHERVARPIIDNGEFNHGLTYSGHPVAAAVAVANLKLLRDEGIVERVKNDIGPYFQRRLRDALGDHPIVGEIAGAGLVAGVQLARDRDRRERFGASVDIGTICRDFCFNGNLIMRATGDRMLLSPPLVIREAEVDEIVDKAKRAFDATAERVG

SEQ ID NO: 6588 - protein, 111 aa, Brassica napus
  misc_feature (34)..(34): Xaa can be any naturally occurring amino acid
  misc_feature (36)..(36): Xaa can be any naturally occurring amino acid
  misc_feature (38)..(42): Xaa can be any naturally occurring amino acid
  misc_feature (48)..(50): Xaa can be any naturally occurring amino acid
  misc_feature (59)..(59): Xaa can be any naturally occurring amino acid
MAYSMLSSAAVVTSPAQATMVAPFTGLKSSSAFXVXRXXXXXFTSIVXXXRRVSCMPVXSLLSPVPPRRYPPVAPLFACALPARAFGPSAGLAFLPRLPPPARCRRRAFVS

SEQ ID NO: 6589 - protein, 409 aa, Streptomyces coelicolor A3(2)
MAAEIVNPRSDSEAGAEQEAGAEPLDSFDPAFALHRGGKMAVQATVPIRDKEDLSLAYTPGVAKVCSAIAEQPDLVHDYTWKSSVVAVVTDGTAVLGLGDIGPEASLPVMEGKAILFKQFGGVDAVPIALNCTDADEIVETVVRLAPSFGGVNLEDISAPRCFEIERKLQERLDIPVFHDDQHGTAVVTLAALRNAARLSGRTLGELRAVISGAGAAGVAIAKMLVEAGIGDVAVADRKGVVSADREDLTPVKQELASFTNKAGLSGPLEAALAGADVFIGVSGGTVPEPAVASMAEGAFVFAMANPNPEVHPEVAHKYAAVVATGRSDFPNQINNVLAFPGIFAGALQVRASRITEGMKLAAAEALASVVGDDLAADYVIPSPFDERVAPAVTAAVAAAARAEGVARR

SEQ ID NO: 6590 - protein, 423 aa, Candida albicans SC5314
MMNIDQHHQLQQQHQQQMLQQQAQAQAQAQAQAQQQQQQQQQAAAAAAAANAAATTSSSSPRQVSFNVSDHYQILEIVGEGAYGIVCSAIHKPSQQKVAIKKIEPFERSMLCLRTLRELKLLKHFNHENIISILAIQRPINYESFNEIYLIQELMETDLHRVIRTQNLSDDHIQYFIYQTLRALKAMHSANVLHRDLKPSNLLLNSNCDLKICDFGLARSIASQEDNYGFMTEYVATRWYRAPEIMLTFQEYTTAIDVWSVGCILAEMLSGRPLFPGRDYHNQLWLIMEVLGTPNMEDYYNIKSKRAREYIRSLPFCKKIPFSELFANTNNNTSTSTSNTGGRTNINPLALDLLEKLLIFNPAKRITVEDALKHPYLQLYHDPNDEPISDKIPEDFFDFDKMKDQLTIEDLKKLLYEEIMKPL

SEQ ID NO: 6591 - protein, 467 aa, Listeria monocytogenes str. 4b H7858
MTSVMWFRRDLRVNDNKALYHACKEDDLLLLFQVNPAQFITGSPSHQAFFASVAHFKQEIDKTAHLQIMFGEPIECFQQLKDSLPSWDKVYFNRDETGYGAKRDEAAQAFFDEQKIEVQAFHDSYLHSAEEVKKSPTEYYKIFTPYYKKWREEIKETPFKVTLKHENIRKESLFLKYEEQFAEMTSDLPILDIGERAANTRLANFIKHDVADYDKARDFPELDKTSHLSRYLRTGEISIRTIWQTLQETEATEGRATFEKELCWRDFYNMIYVSFPNQKNEPIQENYRFIEWENNREYFKAWQEGKTGFPLVDAAMRQLKETGWMHNRLRMITASFLTKDLLIDWRFGEKYFQQMLIDYDPASNIGGWQWAASTGTDAVPYFRIFNPTTQSQKFDSTGKFIRKYVKELANLPDKYIHQPEKMSETEQKEHGLLLGKDYPFPIVDHKERRKLAIARYEFSKEHSRGNI

SEQ ID NO: 6592 - protein, 314 aa, Zea mays
ACLQAVIKRLMTDVPFGVLLSGGLDSSLVASVTKRHLVKTDAAGKFGTELHSFVVGLENRARDGTLTARTFQGSPDLKAAREVADYLGTTHHEFHFTDGIDAIEEVIYHDETYDVTTIRASTPMFLMARKIKSLGVKMVLSGEGSDELLGGYLYFHFAPNKEEFHRETCRKVKALHQYDCLRANKATSAWGLEVRVPFLDKEFINVAMGMDPEWKMYDKNLGRIEKWVMRKAFDDDEHPYLPKHILYRQKEQFSDGVGYNWIDGLKSFTEQQVTDEMMNNAAQMFPYNTPVNKEAYYYRMIFERLFPQDSARET

SEQ ID NO: 6593 - protein, 334 aa, Deinococcus radiodurans R1
MTQPDMAYPNPAGIKRVAVLTSGGDAPGMNAAIRAVVRTGAQQGIEVVGVRRGFSGLHRGEVQLLGPRDVANTIQRGGTILLTARSHTWRSPEGRAKGAAVLREWGVDGLVVIGGDGSFHGGYFLQEEHGIPVIGVPGTIDNDLYGTDHTIGYFTAVETALEAVDKLRDTGASHERIFVIEVMGRHAGHIALDVAVAGGAEEVFIPEDKKPIGDVVNIVKDSIAKGKRGSIIIVAEGYDGGAEAVAQAIHAGTGLETRVSILGHIQRGGTPVSSDRILASRLGEAAVYALMDGKKGVMVGRIGGGIAYTPLHETWEKRKDVSRDLYRCAKMLSI

SEQ ID NO: 6594 - protein, 270 aa, Moorella thermoacetica ATCC 39073
MPAPLQSLRQYLKVVDAVLEVADARLPVSSRYPDLEKLIGFRARVVVLTRADLADPAATACWLEKLRAGGTRAVAMNARTGSGDRLLYQYLKAIAKAKREARARRGLGEAPLRVMALGIPNVGKSSVLNRLAGRGAARTGNRPGITRGPQWIRIKDNLELLDTPGVLWPRWREPRTALWLGALGCAPEESVPVVGIACLVGEFLLREAPGTLAARYGIQEQGDATDILAAIGRARGFLLPGGVVDQEKTARALVNDFREGRLGRFTLERP

SEQ ID NO: 6595 - protein, 486 aa, Pseudomonas aeruginosa UCBPP-PA14
MIKHWINGREVESKDVFENYNPATGELIGEVASGGAAEIDAAVAAAREAFPKWANTPAKERARLMRRLGELIDRNVPHLAELETLDTGLPIHQTKNVLIPRASHNFEFFAEVCTRMNGHSYPVDDQMLNYTLYQPVGVCGLVSPWNVPFMTATWKTAPCLALGNTAVLKMSELSPLTANELGRLVHEAGIPPGVFNVVQGYGASAGDALVRHRDVRAVSFTGGTATGRRIMEAAGIKKYSMELGGKSPVLVFEDADLERALDAALFTIFSLNGERCTAGSRIFVQESVYPQFVAEFAARARRLIVGDPQDPKTQVGSMITQAHYDKVTGYIRIGLEEGATLVAGGLERPTGLPAHLSKGQFIQPTVFADVDNRMRIAQEEIFGPVVCLIPFKDEAEALRLANDVEYGLASYIWTQDIGKAHRLARGIEAGMVFINSQNVRDLRQPFGGVKASGTGREGGEYSFEVFAEIKNVCISMGSHHIPRWGV

SEQ ID NO: 6596 - protein, 498 aa, Thermoplasma volcanium GSS1
MINTENFGNIINGTEEMVGDESIVKSPVDGSPIASVYFADRDAVSKAIDSSYDSYYKVWSKFTLSERKKLLAKLADRIQEKSERYATLESLNTGKTLRQSMLMDIPLGIEHLRYFATETEFKMERQITHPEYPDSHGIVQYVPMGVVGAITPWNVPFLMAVWKAAPALLAGNTVVIKPSSFTPLTTIEMARDAISVGFPPGVLNVVNGRGETVGEELARNKKVRMLSFTGSTYTGKRITEITGIKKVTLELGGKSPNIVFDDADLERAALGVMFGIYLNSGQLCESGSRLLVQSSIKDKFLNLLKSKIEKMRPGNPMSMETDISAITTKNQRDKIEKMVNSGLKDGSVIFYQKSIDGSVPKGGLYFPPTILDKVSEDMEVAKEEIFGPVLSVMEFDDEADAIDKANMTDYGLAAGVWTQDSEKATRVASSIEAGTVWINEYHLLSAAAPRGGFKNSGVGRELGLDGIMEFTQTRHLFVSHGSTDQDTVAYGLVLADLS

SEQ ID NO: 6597 - protein, 514 aa, Triticum aestivum
  misc_feature (98)..(98): Xaa can be any naturally occurring amino acid
  misc_feature (127)..(127): Xaa can be any naturally occurring amino acid
  misc_feature (179)..(179): Xaa can be any naturally occurring amino acid
  misc_feature (197)..(197): Xaa can be any naturally occurring amino acid
  misc_feature (222)..(222): Xaa can be any naturally occurring amino acid
PPPPEPPSLVITDSHFLPLASHSSQQNPPHLFSTRDSETNWRRAERKRSHTPDLRFAEGGFQRQRGIRQPGSQGLSTTKVKGRVGKYELRRTIGEGTXVKVRNVINPETVDPVAIKIVGKEKLLKHXMVEQIKREIATMKLIKNPNVVCIHEVMGSKTKVYIVLDNRAGWNTVNSITSXSLFLDSCGNLMLSGFWAXARYLSSSRMTDYCTQLVALQFMLHXGILEVSDFGLSALSQQLKDDGLLHTTCGTPNYVAPEVLEDQGYDGAMADLWSCGVILFVLLAGYLPFEDSNLMALYKKISDAEFTFPPWTSFPAKRLLTRILDPNPMTRITVQEMLEDEWFKKGYKRAEFDEKYDTTLDDVDAVFNDSEEHHVTEKKEEEPVALNAFELISMSAGLNLGNLFDSEQEFKRETRFTSKSSPKEILRKIEEAAKPLGFDIHKKNYKLRLEKVKAGRKGKLNVATEILRVGPSLHMVEVRKAKGDTLEFHKFYKNLSNTLKDVVWKSDDLQIQPS

SEQ ID NO: 6598 - protein, 123 aa, Triticum aestivum
  misc_feature (5)..(5): Xaa can be any naturally occurring amino acid
THLIXDMLSICREVFKGGVHYAWASVPTYPSGVIGFLLCAKDGPPVDFLTPVNPIEKIEGATKDGREMRFYNSEIHRAAFILPTFVKRELEAYNTSTEKEKPEKPAAKPVKMKVMRDSAITAS

SEQ ID NO: 6599 - protein, 133 aa, Zea mays
MSYYGDRRAESSIVEAFTLSPLPYPVILVLLMVTLLLGASWFFTYDDFIEEASQQLSWALLGVPIALVLLIRWISSVDSFEGYLGFYPTESRWKGRYERGPAEGSSPWGVALLVLLLLVLASFHSTIHDMWGP

SEQ ID NO: 6600 - protein, 273 aa, Ralstonia eutropha JMP134
MEHCMTNMTKTADRKYWRTAIGDPTPHEGTMVRGYDVLTDLVGKIDFGAMVYLLYKGELPKGNESKIINAMFISVADHGISPSSTVTRFVQAAGVPIQCAVAAGAMMFGDVHGGAGEEFSRYIQELVSLAASSGRTYEDVATEHVANHKRLDGFGHPQHPEGDPRGKVLFALAEEYGIAGDHVRMTRELEKALIKKKNRPLLANIDAAVGAIISDMGFDWRLARAFIVVPRTAGLFAHAFEESVREPGWRQINLDQVEYDGPARRKNENPSAI

SEQ ID NO: 6601 - protein, 200 aa, Cichorium intybus x Cichorium endivia
MATIGHNNLNAKLVLLGDMGAGKSSLVLRFVKGQFLEFQESTIGAAFFSQTLVVNDATVKFEIWDTAGQERYHSLAPMYYRGAAAAIIVYDITSADSFTRAKKWVQELQKQGNPNMVMALAGNKADLEDKRKVTVEEARVYAEENGLFFMETSAKTAANVNDVFHEIAKRLPRAQPTQNPAGMVLVDRPAEGARAASCCS

SEQ ID NO: 6602 - protein, 1071 aa, Arabidopsis thaliana
MAEKVSEDVMLLHGDLDLKIVKARRLPNMDMFSEHLRRLFTACNACARPTDTDDVDPRDKGEFGDKNIRSHRKVITSDPYVTVVVPQATLARTRVLKNSQEPLWDEKFNISIAHPFAYLEFQVKDDDVFGAQIIGTAKIPVRDIASGERISGWFPVLGASGKPPKAETAIFIDMKFTPFDQIHSYRCGIAGDPERRGVRRTYFPVRKGSQVRLYQDAHVMDGTLPAIGLDNGKVYEHGKCWEDICYAISEAHHMIYIVGWSIFHKIKLVRETKVPRDKDMTLGELLKYKSQEGVRVLLLVWDDKTSHDKFGIKTPGVMGTHDEETRKFFKHSSVICVLSPRYASSKLGLFKQQASPSSSIYIMTVVGTLFTHHQKCVLVDTQAVGNNRKVTAFIGGLDLCDGRYDTPEHRILHDLDTVFKDDFHNPTFPAGTKAPRQPWHDLHCRIDGPAAYDVLINFEQRWRKATRWKEFSLRLKGKTHWQDDALIRIGRISWILSPVFKFLKDGTSIIPEDDPCVWVSKEDDPENWHVQIFRSIDSGSVKGFPKYEDEAEAQHLECAKRLVVDKSIQTAYIQTIRSAQHFIYIENQYFLGSSYAWPSYRDAGADNLIPMELALKIVSKIRAKERFAVYVVIPLWPEGDPKSGPVQEILYWQSQTMQMMYDVIAKELKAVQSDAHPLDYLNFYCLGKREQLPDDMPATNGSVVSDSYNFQRFMIYVHAKGMIVDDEYVLMGSANINQRSMAGTKDTEIAMGAYQPNHTWAHKGRHPRGQVYGYRMSLWAEHLGKTGDEFVEPSDLECLKKVNTISEENWKRFIDPKFSELQGHLIKYPLQVDVDGKVSPLPDYETFPDVGGKIIGAHSMALPDTLTTQGGKERLILRFIALTKTLILSVSIATSVSSAMADSPQRRRDSRSPSPRKERARSRSRSRSRSRSRPRLRSRSRSLPRPVSPSRSRGRSRSRSRGRSEVENPGTTLYVTGLSTRVTDKDLEAHFAKEGKIEKAVAVEGGTMIVMITETVGHQDATIHLVMKEGLEEIGLTLLMEEAQREDQREGLRGQREGMNPVARDDLFSSF

SEQ ID NO: 6603 - protein, 498 aa, Anabaena variabilis ATCC 29413
MKTPLNCQNYINGQWLNAATETTLNSHNPANKSEIVATFPRSQADDTDRAVTAARQAYGSWRKVPAPARAEYIFRVGELLLQHKEELAQLISREMGKPITEARGDVQEGVDCAFYSAGEGRRLFGQTTPSEMPNKFAMTVRMPIGVCALITPWNFPVAIPCWKAMPALVCGNTVILKPAEDTPACATKLIEIFAAAGLPPGVINLVHGVGEEAGKALVEHPNIDLVSFTGSSATGAYVGETCGRTHKRVCLEMGGKNAQVVMEDADLELALDGALWGAFGTTGQRCTATSRLILHRDIKEKFTTMLRERTSQLRLGAGTEPETDIGPIINNRQLQRVHEYMNIAREEGAKILIGGEIVTEGQLKQGYFFQPTILDNVTPQMRVAREEIFGPVVALIEVSTFEEAIAILNDTKYGLSSSVYTRDINRAFVAMRDIEVGITYINGPTIGAEVHLPFGGVKQTGNGHREAGTTALDVFTEWKSVYVDFSGSLQRAQIDNRS

SEQ ID NO: 6604 - protein, 200 aa, Cichorium intybus x Cichorium endivia
MATIGHNNLNAKLVLLGDMGAGKSSLVLLFVKGQFLEFQESTIGAAFFSQTLAVNDATVKFEIWDTAGQERYHSLAPMYYRGAAAAIIVYDITSADSFTRAKKWVQELQKQGNPNMVMALAGNKADLEDKRKVTAEEARVYAEENGLFFMETSAKTAANVNDVFHEIAKRLPRAQPTQNPAGMVLVDRPAEGARAASCCS

SEQ ID NO: 6605 - protein, 272 aa, Lactococcus lactis subsp. lactis Il1403
MKLNNQIEIPELGLGVFQIPNDETADVVKNAIVNGYRLIDTAKIYENEEGTGQGIKEGLAMTGLSRDDLFITSKLWGDNHSYEETVQNFEKSLKKLDLDYLDLYLIHWPGTHYAYKEAWNAMEDLYKAGKIKAIGVSNFQKSHLEELLSYAKITPVLNQIELHPKLSQEELRNFLELHDIKVQAWSPLMQGQLLDNEVLKKIADKHGKSVAQIILRWDIQQDILVNVKSIKSERMIANRQIFDFSLDSEDMKAINSLNEELRVGPDPEHFNF

SEQ ID NO: 6606 - protein, 115 aa, Corylus avellana
MGSLKLVCAVLLCMMVAAPVARASLTCPQIKGNLTPCVLYLKNGGVLPPSCCKGVRAVNDASRTTSDRQSACNCLKDTAKGIAGLNPNLAAGLPGKCGVNIPYKISPSTNCNNVK

SEQ ID NO: 6607 - protein, 162 aa, Zea mays
QPGKRSEDQDPSVVVVAAIVVVAAIVVVATPVAAASVRLLPLQEALGGLHNLFGGPSVVRVSQCDGPHCFAVTRAAAGPSCADVLRAMQHEPEVMYEVLKQRTDGATAAALARAFGAMPYLVFDPEAAVMSGGESSDSERSAAGAAEEEDDEEWEFMRGLTV

SEQ ID NO: 6608 - protein, 158 aa, Shigella flexneri 2a str. 301
MKLISNDLRDGDKLPHRHVFNGMGYDGDNISPHLAWDDVPAGTKSFVVTCYDPDAPTGSGWWHWVVVNLPADTRVLPQGFGSGLVAMPDGVLQTRTDFGKTGYDGAAPPKGETHRYIFTVHALDVERIDVDEGASGAMVGFNVHFHSLASASITAMFS

SEQ ID NO: 6609 - protein, 212 aa, Shigella boydii
LYICLRPVRYYQGTPSPVKHPELTDMVIFRENSEDIYAGIEWKADSADAEKVIKFLREEMGVKKIRFPEHCGIGIKPCSEEGTKRLVRAAIEYAIANDRDSVTLVHKGNIMKFTEGAFKDWGYQLAREEFGGELIDGGPWLKVKNPNTGKEIVIKDVIADAFLQQILLRPAEYDVIACMNLNGDYISDALAAQVGGIGIAPGANIGDECALF

SEQ ID NO: 6610 - protein, 202 aa, Shigella boydii
RPVRYYQGTPSPVKHPELTDMVIFRENSEDIYAGIEWKADSADAEKVIKFLREEMGVKKIRFPEHCGIGIKPCSEEGTKRLVRAAIEYAIANDRDSVTLVHKGNIMKFTEGAFKDWGYQLAREEFGGELIDGGPWLKVKNPNTGKEIVIKDVIADAFLQQILLRPAEYDVIACMNLNGDYISDALAAQVGGIGIAPGANIGD

SEQ ID NO: 6611 - protein, 1342 aa, Shigella flexneri 2a str. 301
MSQEYTEDKEVTLTKLSSGRRLLEALLILIVLFAVWLMAALLSFNPSDPSWSQTAWHEPIHNLGGMPGAWLADTLFFIFGVMAYTIPVIIVGGCWFAWRHQSSDEYIDYFAVSLRIIGVLALILTSCGLAAINADDIWYFASGGVIGSLLSTTLQPLLHSSGGTIALLCVWAAGLTLFTGWSWVTIAEKLGGWILNILTFASNRTRRDDTWVDEDEYEDDEEYEDENHGKQHESRRARILRGALARRKRLAEKFINPMGRQTDAALFSGKRMDDDEEITYTARGVAADPDDVLFSGNRATQPEYDEYDPLLNSAPITEPVAVAAAATTATQSWAAPVEPVTQTPPVASVDVPPSQPTVAWQPVPGPQTGEPVIAPAPEGYPQQSQYAQPAVQYNEPLQQPVQPQQPYYAPAAEQPAQQPYYAPAPEQPVAGNAWQAEEQQSTFAPQSTYQTEQTYQQPAAQEPLYQQPQPVEQQPVVEPEPVVEETKPARPPLYYFEEVEEKRAREREQLAAWYQPIPEPVKEPEPIKSSLKAPSVAAVPPVEAAAAVSPLASGVKKATLATGAAATVAAPVFSLANSGGPRPQVKEGIGPQLPRPKRIRVPTRRELASYGIKLPSQRAAEEKAREAQRNQYDSGDQYNDDEIDAMQQDELARQFAQTQQQRYGEQYQHDVPVNAEDADAAAEAELARQFAQTQQQRYSGEQPAGANPFSLDDFEFSPMKALLDDGPHEPLFTPIVEPVQQPQQPVAPQQQYQQPQQPVAPQQQYQQPQQQVAPQPQYQQPQQPVAPQQQYQQPQQPVAPQPQYQQPQQPVAPQPQYQQPQQPVAPQPQDTLLHPLLMRNGDSRPLHKPTTPLPSLDLLTPPPSEVEPVDTFALEQMARLVEARLADFRIKADVVNYSPGPVITRFELNLAPGVKAARISNLSRDLARSLSTVAVRVVEVIPGKPYVGLELPNKKRQTVYLREVLDNAKFRDNPSPLTVVLGKDIAGEPVVADLAKMPHLLVAGTTGSGKSVGVNAMILSMLYKAQPEDVRFIMIDPKMLELSVYEGIPHLLTEVVTDMKDAANALRWCVNEMERRYKLMSALGVRNLAGYNEKIAEADRMMRPIPDPYWKPGDSMDAQHPVLKKEPYIVVLVDEFADLMMTVGKKVEELIARLAQKARAAGIHLVLATQRPSVDVITGLIKANIPTRIAFTVSSKIDSRTILDQAGAESLLGMGDMLYSGPNSTLPVRVHGAFVRDQEVHAVVQDWKARGRPQYVDGITSDSESEGGAGGFDGAEELDPLFDQAVQFVTEKRKASISGVQRQFRIGYNRAARIIEQMEAQGIVSEQGHNGNREVLAPPPFD

SEQ ID NO: 6612 - protein, 287 aa, Erwinia carotovora subsp. atroseptica SCRI1043
MSQKEIWYETLHANFGQYFSVDRVLYHEKTDHQDLIIFENDALGRVMALDGVVQTTERDEFIYHEMLTHVPLLSHGNAKRVLIIGGGDGGMLREVSRHHGVEQITMVEIDAGVVEFCRQYLPNHSAGSYDDPRFNLVIDDGVNFVRQCSEKFDVIISDCTDPIGPGESLFTSDFYQGCARSLNEGGIFVAQNGVCFLQQDEAIGSHKKLSHYFNDVSFYQAAIPTYYGGIMTFAWASNNPALRQMDIVTLRQHFAQSGITCRYYTPDVHIGSFALPQYLLSALQNAQ

SEQ ID NO: 6613 - protein, 279 aa, Brassica napus
MTIINLDTYPRNKPGGAIAIREVWAENLESEFELISGIIDDYPFVSMDTEFPGVIFKSDLRRGNPADLYSLLKSNVDALSLIQVGLTLSDADGNLPDLGAGRRFIWEFNFKDFDVARDAHAPDSIELLRRQGIDFERNCRDGVDSERFAELMMSSGLVCNEEVSWVTFHSAYDFGYLMKILTRRELPCALGEFQRMMKALFGERVYDMKHMMRFCERKLYGGLDRVARTLEVSREVGKCHQAGSDSLLTWHAFQRTRASDFLQDGPEKHAGVLYGLEVF

SEQ ID NO: 6614 - protein, 214 aa, Shigella boydii
LYICLRPVRYYQGTPSPVKHPELTDMVIFRENSEDIYAGIEWKADSADAEKVIKFLREEMGVKKIRFPEHCGIGIKPCSEEGTKRLVRAAIEYAIANDRDSVTLVHKGNIMKFTEGAFKDWGYQLAREEFGGELIDGGPWLKVKNPNTGKEIVIKDVIADAFLQQILLRPAEYDVIACMNLNGDYISDALAAQVGGIGIAPGANIGDECALFEA

SEQ ID NO: 6615 - protein, 221 aa, Zea mays
MATTKREKVILVLLFSLTMLPLSTLGTRSGPAAVQHHGHGGTTKHPSPPSPATAALVRSTCNSTAYYDVCVSALGADPSSATADVRGLSTIAVSAAAANASGGAATAAALANGTGTASSSNAQAAPATASAAAALLRTCAAKYGQARDALAAAGDSIAQQDYDVASVHVSAAAEYPQVCRVLFRRQKPGQYPAELAAREETLRQLCSVALDIIGLASTNTN

SEQ ID NO: 6616 - protein, 190 aa, Brassica napus
MAFAGTTQKCMACDKTVYLVDKLTADNRVYHKACFRCHHCKGTLKLSNYNSFEGVLYCRPHFDQNFKRTGSLEKSFEGTPKIGKPDRPLEGERPAGTKVSNMSGGTREKCVGCDKTVYPIEKVSVNGTLYHRSCFKCTHGGCTISPSNYIAHEGKLYCKHHHIQLIKEKGNLSQLEGGGENAAKDKVVAA

SEQ ID NO: 6617 - protein, 416 aa, Salmonella enterica subsp. enterica serovar Typhi Ty2
MESKVVVPVEGKKITLQNGKLNVPENPIIPFIEGDGIGVDVTPAMLKVVDAAVEKAYKGERKISWMEIYTGEKSTQVYGQDVWLPAETLDLIRDYRVAIKGPLTTPVGGGIRSLNVALRQELDLYVCLRPVRYYQGTPSPVKHPELTDMVIFRENSEDIYAGIEWKADSADAEKVIKFLREEMGVKKIRFPEHCGIGIKPCSEEGTKRLVRAAIEYAITNDRDSVTLVHKGNIMKFTEGAFKDWGYQLARDEFGGELIDGGPWLKIKNPNTGKEIVVKDVIADAFLQQILLRPAEYDVIACMNLNGDYISDALAAQVGGIGIAPGANIGDECALFEATHGTAPKYAGQDKVNPGSIILSAEMMLRHMQWFEAADLIVKGMEGAIAAKTVTYDFERLMDGAKLLKCSEFGDAIIANM

SEQ ID NO: 6618 - protein, 489 aa, Bacillus sp. KSM-K16
MAKFTQTVEVFQNYINGEWKDSTSGQVMDSVNPANKTETIGQLQSSTTEEVDEAIQSATEAKIGWRKTGAYQRGQLLASVANELEKNVDDIAETLTKEMGKTLPEAIGETQRGIAILRYYAAEGMRKEGEVIPASDKEALMFTKRTPLGVVGIITPWNFPVAIPIWKIAPALVYGNTVVFKPASESAVTAAKVVKCFEHAGLPKGVLNFITGKGSIVGEALINSKKLNGITFTGSESTGKRVAKAASANGIKYQLEMGGKNPVIVLDDADVQSAVQGILSGAFKSTGQKCTATSRVIVQEGIYEELKAALLAETKKITIGDGMNSSIWMGPCASESQLNTVLEYIQIGQEEGATLLYGGQRLTENEYAHGFYVEPAIFEQVTSTMRIAQEEIFGPVIALLKVKTVEEAIDIANDTEFGLSASLYTSNIGSALSFIDDIEAGLVRVNSESAGVELQAPFGGMKASSTGTREQGEAAKEFYTAIKTVLIRS

SEQ ID NO: 6619 - protein, 261 aa, Zea mays
  misc_feature (255)..(255): Xaa can be any naturally occurring amino acid
MSCSIAAVVVSLFLSLNQIISCRAAGADDDGAARSLASCLISHGVTNFTLPTSRSYAGVLNSSISNLRFALPDVGKPAAVVLPGSRQDLQRSVLCARSSSLAVRVRSGGHSYEGLSYTSENRVPFVVIDVANLNRVRVDRGSATAWAEAGATLGELYHAVGRSGRSLAFSAGSCSTIGLGGTVSGGGFGLLSRRFGLAADNVLDAVLVDADGRALDRAAMGRDVFWAIRGGGGGSWGVMYAWKLRLVPVPRNVTXALGGAD

SEQ ID NO: 6620 - protein, 192 aa, Triticum aestivum
  misc_feature (132)..(132): Xaa can be any naturally occurring amino acid
ELHSFVVGLEGSPDLKAAREVADYLGTIHHEFHFTVQDGIDAIEEVIYHDETYDVTTIRASTPMFLMARKIKSLGVKMVLSGEGSDELLGGYLYFHFAPNKEECHRETCRKVKALHQYDCLRANKATSAWGXEVRVPFSTRSHNVRWHGPQWKSPQDLGRSRMGQRKGPHDSTYCQDISTGEEIMTGKWLPI

SEQ ID NO: 6621 - protein, 358 aa, Triticum aestivum
  misc_feature (235)..(235): Xaa can be any naturally occurring amino acid
  misc_feature (254)..(254): Xaa can be any naturally occurring amino acid
  misc_feature (268)..(268): Xaa can be any naturally occurring amino acid
  misc_feature (315)..(315): Xaa can be any naturally occurring amino acid
  misc_feature (321)..(321): Xaa can be any naturally occurring amino acid
MRRRLSSNGHMLRAGCGVAAVFLMWMQFRSWLVAKNTLKIMPFKLPPLGPYDVRVRMKAVGICGSDVHYLKEMRIAHFVVKEPMVIGHECAGIIEEVGDGVKHLAVGDRVALEPGISCWRCRHCRGGRYNLCDDMKFFATPPYHGSLADQIVHPGDLCFKLPDNVSLEEGAMCEPLSVGVHACRRADVGAEKSVLIMGAGPIGLVTMLSARAFGAPRIVIADVDDHRLSVAKSLXGADAAVKVSGNAEDLAGEXERIQAAMGGDIDVXWDCAGSSKTMSTALEATRPGRRVCLVGMGHNEMTVPLTSAGSRQVDXVGIFRXKDTWPLCPKFLRSGITDLKPSSKVRFPREWRASPTIR

SEQ ID NO: 6622 - protein, 428 aa, Zea mays
MGRGLGAAPVSPRLASLGAAALALLVAAALPSPAAGVNATAVLSAFPNFADFARLLASTPVASELAGRSSLTLLAVPNANLPQSPSAFVAGAAAGADIADVLRYHVLLEYLSPADLARLPPSGKLVTTLFQTTGRAPSDFGAVNLTVGPNSTVVVRSPAPSPGSSATVLGAVTAVPYNLSVLAVGGLIVPSGFDLAASESRPPPPVNITRVLTDARGFYVAASMLQASGVASEFEADERGAGITVFVPTDDAFAGLPTTDRLQSLPAERKAVVLRFHVLHSYYPLGSLESIVNPVQPTLATEHTEAGHFTLNITRVNGSIAIDTGIVQASITRTVFDQNPVAVFAVSKVLLPKEMFSRGDSGSTAMVPPSVAMAPGDAGTEQTPQTRLSSPPDLHGEDSESSAALATAKGTSWWCVGLMYLHLLLSLV

SEQ ID NO: 6623 - protein, 143 aa, Glycine max
  misc_feature (23)..(23): Xaa can be any naturally occurring amino acid
  misc_feature (25)..(25): Xaa can be any naturally occurring amino acid
ALNLALGSLPQFTICNRAGAGGXVXFTVPLFTAGLPTRKTNNDITNIVSNGGRVRCMQVWAPVGKKKHETLSYLPDLDDAQLAKEVEYLPRKGWIPCLESEREHGLVYREHIRLPGYYDGRYWTMWKLLMIGCTDASQVLKEL

SEQ ID NO: 6624 - protein, 48 aa, Mirabilis jalapa
EDRDGDWMLVGDVPWEMFVNSCKRLRIMKGSEAIGLAPRAVEKCKSRS

SEQ ID NO: 6625 - protein, 356 aa, uncultured crenarchaeote
MSDAHSFTGKKIEPPLISKNMTISQLVDFFGSTGYNARRLFEAANIMKQMIDAGSTICLTLAGAMTPIGMGNTIKTLIENGYIDWIVTTGANVYHDLHFAYDLPVRQGHFQVDDDVLFSKQIVRIYDVYIKEIGTLQAQDLIVQREIKKIEKSYSKSYSTADMSHGLGKATYENSTNPEKSFLASAYKNDVPVFIPAISDSSIGLNMLPLLFEDMTRFPNVIMDIAESTAILWKSKVSGGIELGGGVPKNFFQQTGPALYQILKLKDGGHDYVIQITDARPDTGGLSGATIQEGKSWGKIKTSHKNNVIVYGDSSICFPIIGAYVLSECKKRSSKRLYSKKNAWVEEMKKEYLKNK

SEQ ID NO: 6626 - protein, 179 aa, Daucus carota
MERADQQARGFQGYRKIHQQQQLPASGTASTGTDNNPAAGDQDCLVREQDRFMPIANVIRLMRKSIPSHAKISDDAKELVQESVSEFISFVTSEANYRCQKEQRKTITAEDVLWAMSSLGFDDYVEPLTFYLDRFREADGGERTALRGEPLVKKSGEHGHRGFLQHLHHGTIWGRIMRF

SEQ ID NO: 6627 - protein, 393 aa, Mycobacterium tuberculosis H37Rv
MTGPLAAARSVAATKSMTAPTVDERPDIKKGLAGVVVDTTAISKVVPQTNSLTYRGYPVQDLAARCSFEQVAFLLWRGELPTDAELALFSQRERASRRVDRSMLSLLAKLPDNCHPMDVVRTAISYLGAEDPDEDDAAANRAKAMRMMAVLPTIVAIDMRRRRGLPPIAPHSGLGYAQNFLHMCFGEVPETAVVSAFEQSMILYAEHGFNASTFAARVVTSTQSDIYSAVTGAIGALKGRLHGGANEAVMHDMIEIGDPANAREWLRAKLARKEKIMGFGHRVYRHGDSRVPTMKRALERVGTVRDGQRWLDIYQVLAAEMASATGILPNLDFPTGPAYYLMGFDIASFTPIFVMSRITGWTAHIMEQATANALIRPLSAYCGHEQRVLPGTF

SEQ ID NO: 6628 - protein, 467 aa, Pseudomonas aeruginosa PAO1
MGLNADWMQRDLNVLWHPCTQMKDHERLPVIPIRRGEGVWLEDFEGKRYIDAVSSWWVNVFGHANPRINQRIKDQVDQLEHVILAGFSHQPVIELSERLVKITPPGLDRVFYADSGSAGIEVALKMSYHFWLNSGRPRKKRFVTLTNSYHGETIAAMSVGDVALFTETYKSLLLDTIKVPSPDCFLRPDGMCWEEHSRNMFAHMERTLAEGHDEIAAVIVEPLIQGAGGMRMYHPVYLKLLREACDRYGVHLIHDEIAVGFGRTGTMFACEQAGIAPDFLCLSKALTGGYLPMSAVLTSETIYRGFYDDYQTLRAFLHSHTYTGNPLACAAALATLDIFEEDKVIEANRALSTHMARATAHLADHPHVAEVRQTGMVLAIEMVQDKASRTPYPWQERRGLKVFQHGLERGALLRPLGSVVYFLPPYVITPEQIDFLAEVASEGIDIATRDAVSVAVSDFHPDHRDPG

SEQ ID NO: 6629 - protein, 496 aa, Pseudomonas aeruginosa PAO1
MSLRWLRAAAFLMLGVFSAVALGKDKQPTAIVVGAGLAGLSAAYELQKDGWQVTVLEARPQVGGRSGLATSEWVGNQKVQPTLNAYLDTFKLKPVPAPDFVRTPSYLIDGLYYSSSDLALKQPNVAADLKRFESTLDDLSASISDPLNPASSNTLFALDQMNAARWLDKLNLSPTARLLVNQRIRSRYDEPSRLSLLYLAQQGRAYRGVDDRDLRAARLPGGSQVLAEAFVKQIKTIKTKSKVSSIVQAKDGVAVKAGSETYKADYVVLAVPLKALGQIQMTPSLSGTQMSALKGTNYGWRDQILLKFKRPVWDDKSRLSGEIFSDQGLGMIWVEPALKGGANVLINLSGDNARVLQAFGDRQMVDQVLIRMNKFYPKMRGAFAGYEIRRYSADPGTGGSYLAYGPGQVTRFWRIWEQPLSRVAFAGEHTDALYPGTIEGALRSGKRAASQVRDLYAGKTPVIEGAPMVAKAEKVAAPTTGGEKKNPFAWFTRLFD

SEQ ID NO: 6630 - protein, 295 aa, Bordetella bronchiseptica RB50
MTARDPLAAIRARLAEVTASWQAAESLARIRASFADYLAEVGPRGAAMARPRPQPLAPALAGAWIGQGARRALYCHGGGFQIGGIASHASLIARLAEAGQARILAVEYRLAPEHRYPAAIDDAFAAYQWLLANGGAPAAIIGDSAGGALALQTAQRARDAGLPLPRSLVLLSPWLDLSMQGRSYVELAEQDIFSKPAQLRAMARSYLGRLGPPPDAPPASPLWDDLSGLPPIVVHAGAHDITLDDSHTLAARVRAAGGQVQLQVFPGMCHHFQIYEALAEARESIDALGRHLRQD

SEQ ID NO: 6631 - protein, 452 aa, Fusobacterium nucleatum subsp. nucleatum ATCC 25586
MRGVCIMINNLSELQKKDLKYVFHPCAQMKDFEENPPLVIKKGDGLYLIDENGNKYMDCISSWWVNLFGHCNKRINRIITEQVNNLEHVIFANFTHEPAAELCEELTKVLPKGINKFLFSDNGSSCIEMALKLSFQYHLQTGNPQKTKFISLENAYHGETIGALGVGDVDIFTETYRPLIKEGRKVKVPYIDSKLSNDEFVKLEDECIKELEDLIIKNHNEIACMIVEPMVQGAAGIKIYSAKFLKAARDLTKKYNIHLIDDEIAMGFGRTGKMFACEHAGIEPDMMCIAKGLSSGYYPIAMLCITTDIFNAFYADYKEGKSFLHSHTYSGNPLGCRIALEVLRIFKEENILKTINEKGTYLRNKMKEIFEDKSYIKDIRNIGLIGAIELKDNLLPNVRIGKEIYNFALKKGAFLRPIGNSVYFMPPYVITYEEIDKMLHVCKESIEELLKI

SEQ ID NO: 6632 - protein, 447 aa, Ralstonia eutropha JMP134
MTITSPKLPQAAELDLKAHWMPFSANRNFHDDPRMVVAAKGRWLIDDQGRKVFDGLSGLWTCGAGHARAEIQAAVASQLGTLDYSPAFQFGHPQSFMLAERIAELFPGDLNHVFYTGSGSECADTAVKMARAYWRIKGQPAKTKLIGRARGYHGVNIAGTSLGGIGGNRKMFGQLMDADHLPHTLQADCAFTKGQAETGGVELANELLKLIELHDASNIAAVIVEPMSGSAGVIVPPKGYLQRLREICTQHGILLIFDEVITGFGRLGKASGAEYFGVTPDIANVAKQLTNGAIPMGAVIASSEIYNTFMAQPTSGHAVEFGHGYTYSGHPVACAAGLATLDLLARENLIQQAADLAPHFEQAIHGIRGAKHVVDIRNCGLAGAIQMAPRDGDATIRPFEAGLALWKKGFYVRFGGDTLQFGPAFNTTISELDTMFDSVGAVIETLA

SEQ ID NO: 6633 - protein, 351 aa, Oceanobacillus iheyensis HTE831
MKAAVWYGKHDIRVENKEEPIIKPGKVKIKVAWTGICGSDLHAYHGAEGVVQVGEPHPVTGEMAPLTLGHEFSGVIHEIGEGVSGLSVGDRVAIEPAIKCGKCENCVRGNYNLCEHNGFVGLQSDGAFAEYAIVDPHMVHKLPDNISFEEATAIEPTAVSFHALKLSNMKAGDTVAVFGVGPIGLTAILCAKAAGASRIYAIDVSNERLEMAQKLGATTVINAIEENAAEKIYAETGSGVTIAFDCAGAEATVNSAIDSLAKGGQLVIVSIIPEPIKVNLLQANLKEINILATIGYRDVYKDVIAMVESGQLDLKPIITKKIGLDDIIEEGFHALTNDKSQAKILVSPTGV

SEQ ID NO: 6634 - protein, 495 aa, Staphylococcus aureus subsp. aureus COL
MAVNVRDYIAENYGLFINGEFVKGSSDETIEVTNPATGETLSHITRAKDKDVDHAVKVAQEAFESWSLTSKSERAQMLRDIGDKLMAQKDKIAMIETLNNGKPIRETTAIDIPFAARHFHYFASVIETEEGTVNDIDKDTMSIVRHEPIGVVGAVVAWNFPMLLAAWKIAPAIAAGNTIVIQPSSSTPLSLLEVAKIFQEVLPKGVVNILTGKGSESGNAIFNHDGVDKLSFTGSTDVGYQVAEAAAKHLVPATLELGGKSANIILDDANLDLAVEGIQLGILFNQGEVCSAGSRLLVHEKIYDQLVPRLQEAFSNIKVGNPQDEATQMGSQTGKDQLDKIQSYIDAAKESDAQILAGGHRLTENGLDKGFFFEPTLIAVPDNHHKLAQEEIFGPVLTVIKVKDDQEAIDIANDSEYGLAGGVFSQNITRALNIAKAVRTGRIWINTYNQVPEGAPFGGYKKSGIGRETYKGALSNYQQVKNIYIDTSNALKGLY

SEQ ID NO: 6635 - protein, 282 aa, Mycobacterium leprae TN
MMPSTPRTSIPSITLNDENTMPLLGLGVAELSEDETERAVLAALEIGCRLIDTAAAYGNEAAVSRAIAASGIPRAQLFVTTKLATPDQGFTKSQDACNASLDRLGMDYVDLYLIHWPAPPVGQYVDAWGGMIQSRGEGHARSIGVCNFTEEHLSAIIDLTFVTPAVNQIELHPLLNQDEMRKSNAQHNVITQSYTPLVLGRLMDNSTLTAIAAEYGKTPAQVLLRWNLQLGNAVVFRSAKAEHIASNFDVFDFELAVNHMDAMNELHDGTRLRPDPETYAGS

SEQ ID NO: 6636 - protein, 429 aa, Vibrio vulnificus CMCP6
MADKKATLHVEGKAPIELPIMEGSLGTPVIDVRKLGANGYFTFDPGFLATASCESQITYIDGGKGILLHRGYPIDQLANNADYLEVCYILLYGEAPTREQYEKFKTTVTRHTMVHEQIASFFHGFRRDAHPMAVMCGVVGALAAFYHDSLDINNDLHREITAYRLLSKMPTLAAMCYKYSTGQPFIYPRNDLSYAENFLHMMFATPCEEYEVNPVVARAMDKIFTLHADHEQNASTSTVRLAGSSGANPFACIAAGIASLWGPAHGGANEACLKMLEEIGSVDNIPEYVDRAKDKDDPFRLMGFGHRVYKNYDPRATVMRETCHEVLKELNIQDPLLDVAMELERIALSDEYFVSKKLYPNVDFYSGIILKAIGIPVSMFTVIFAISRTIGWIAHWNEMHSDPLNRIGRPRQLYTGEVQRDFQPMHERE

SEQ ID NO: 6637 - protein, 204 aa, Shigella boydii
LYICLRPVRYYQGTPSPVKHPELTDMVIFRENSEDIYAGIEWKADSADAEKVIKFLREEMGVKKIRFPEHCGIGIKPCSEEGTKRLVRAAIEYAIANDRDSVTLVHKGNIMKFTEGAFKDWGYQLAREEFGGELIDGGPWLKVKNPNTGKEIVIKDVIADAFLQQILLRPAEYDVIACMNLNGDYISDALAAQVGGIGIAPGAN

SEQ ID NO: 6638 - protein, 215 aa, Shigella boydii
DLYICLRPVRYYQGTPSPVKHPELTDMVIFRENSEDIYAGIEWKADSADAEKVIKFLREEMGVKKIRFPEHCGIGIKPCSEEGTKRLVRAAIEYAIANDRDSVTLVHKGNIMKFTEGAFKDWGYQLAREEFGGELIDGGPWLKVKNPNTGKEIVIKDVIADAFLQQILLRPAEYDVIACMNLNGDYISDALAAQVGGIGIAPGANIGDECALFEA

SEQ ID NO: 6639 - protein, 219 aa, Ustilago maydis 521
MRKFKLVFLGEQSVGKTSLITRFMYDTFDNTYQATIGIDFLSKTMYLEDRTVRLQLWDTAGQERFRSLIPSYIRDSSVAVVVYDITNRASFQNTSKWVDDVRAERGNDVIIVLVGNKTDLSDKRQVTTEEAEKKAQEFNVMFIETSAKAGHNVKVLFKKIAQALPGMDKDADAATGGAAANKSEYRSQAWHLHYASRMTDLLVCCASAFTPIALEQIST

SEQ ID NO: 6640 - protein, 209 aa, Shigella sonnei
RPVRYYQGTPSPVKHPELTDMVIFRENSEDIYAGIEWKADSADAEKVIKFLREEMGVKKIRFPEHCGIGIKPCSEEGTKRLVRAAIEYAIANDRDSVTLVHKGNIMKFTEGAFKDWGYQLAREEFGGELIDGGPWLKVKNPNTGKEIVIKDVIADAFLQQILLRPAEYDVIACMNLNGDYISDALAAQVGGIGIAPGANIGDECALFEA

SEQ ID NO: 6641 - protein, 212 aa, Oryza sativa (japonica cultivar-group)
MAEEEDLADMPRVVGVLAALLERVTERNDAAAAELELAVAGAPAASAFRATTKPDITVRAYMARIARFAGCSPACYVVAYIYLDRLLRRRRRACAFSVDSYSVHRLLITAVLAAVKFMDDICYNNAYFAKVGGVSLPEMNYLEVDFLFGVGFDLNVSPETFGHYCAVLQSEMLCLELEPPPSPSPAPAARLHCFLSEDDTSSSGSTQHQLAA

SEQ ID NO: 6642 - protein, 298 aa, Zea mays
MEAMPRPSVAPSLQLQARPCPRWPRRKHCPPSSVASRRVACSASAADADVVDLFDAAKLTVDKFVTSGMVVGLGSGPASALAIQYLGTRLRRGSLAGITAVTSSVLSASEADKAGIRANSYQEGTQIDFAFTDAEAIEEGTLAAVIGRRKTESGEPSFMAEKAMAKSAHKLAFITGNDKYVTTGVEGSIPVLIKSGNWIDTAEEIDDLFLGDAEVWRRPSFGTAGPLGGDHPLVTKEGHHVLDVIFTTPIQDLGQVAEKLDKVDGVVDHGIICSNQPYAVIASKGEVQVLDEKSSVIQ

SEQ ID NO: 6643 - protein, 215 aa, Shigella sonnei
ELDLYICLRPVRYYQGTPSPVKHPELTDMVIFRENSEDIYAGIEWKADSADAEKVIKFLREEMGVKKIRFPEHCGIGIKPCSEEGTKRLVRAAIEYAIANDRDSVTLVHKGNIMKFTEGAFKDWGYQLAREEFGGELIDGGPWLKVKNPNTGKEIVIKDVIADAFLQQILLRPAEYDVIACMNLNGDYISDALAAQVGGIGIAPGANIGDECALF

SEQ ID NO: 6644 - protein, 467 aa, Zea mays
  misc_feature (200)..(200): Xaa can be any naturally occurring amino acid
MMSSQQQQQQMARPDRQAMYGAPVLPEIPTRFVYMPQTATDVMSGSSSLWKTGAPPHDTLAESAAMYTATLSSQQQQQMARPDRQAMYGAPVLPEIPTRFVYRPQTATDVMSSFSSLWETGAPPPAAYAAMLSSQQQQMPTARPGWQAAPRGAPVPPPMNMRFIPNTMPAADAMDVGSSAPMTPADSSSERTPSPLQRVXVRQVWAHNFDSEAKLIESLLPKFRYVAVETEFPGTVYRPAGPAYKLEPAERYRLLRCNVDALHPVQLGLTLFDAGCVLPGGATRYVWQFNFRDFDVRRHRHVAESVTALRSRGVDLDRTRQYGVAAAAAFGPRLRKWTRAGLGRAGVVTSRGGYDLAYLMKMMFGTGFRMPGSAAEFNAVVKSVLHRRRVFDIGEMARLCPHEHLHRGLDSIAGQLNAARFAADAACQAGYDSLRTCYTFMKLREIYFDDDGKLAGVDGILAEVTAF

SEQ ID NO: 6645 - protein, 209 aa, Shigella sonnei
QELDLYICLRPVRYYQGTPSPVKHPELTDMVIFRENSEDIYAGIEWKADSADAEKVIKFLREEMGVKKIRFPEHCGIGIKPCSEEGTKRLVRAAIEYAIANDRDSVTLVHKGNIMKFTEGAFKDWGYQLAREEFGGELIDGGPWLKVKNPNTGKEIVIKDVIADAFLQQILLRPAEYDVIACMNLNGDYISDALAAQVGGIGIAPGANI

SEQ ID NO: 6646 - protein, 200 aa, Simmondsia chinensis
MATIGHNNLNAKLVLLGDMGAGKSSLLLLFVKGHFLEFQESTIGAAFFSHTLAVNDATVKFEIWDTAGQERYHILAPMYYRGAAAAIIVYDITSADSFALAKKWVQELQKQGNPNMVMALAGNKADLEDRRSVPAEEARIYAEDNGLFFMETSAKTALNVNEIFYEIAKRLPRAQPPQNPAGMVLVDRPPEGSRASTCCS

SEQ ID NO: 6647 - protein, 372 aa, Magnaporthe grisea 70-15
MSATNGSAAAAPSKKNIGVFTNPKHDLWINEAEPSLESVQKGSDELKEGQVTIAIRSTGICGSDVHFWHHGCIGPMIVREDHILGHESAGEIIAVHPSVTSLKVGDRVAVEPQVICYECEPCLTGRYNGCEKVDFLSTPPVPGLLRRYVNHPAVWCHKIGDMSWEDGAMLEPLSVALAGIQRAGITLGDPVLVCGAGPIGLITLLCAKAAGACPLVITDIDDGRLKFAKELVPDVITFKVEGRPTAEDAAKSIVEAFGGVEPTLAIECTGVESSIASAIWAVKFGGKVFVIGVGRNEISLPFMRASVREVDLQFQYRYCNTWPRAIRLIQNKVIDLTKLVTHRFPLEDALKAFETAADPKTGAIKVQIQSLE

SEQ ID NO: 6648 - protein, 492 aa, Burkholderia cepacia R18194
MPAKSSVAPAIVWFRDDLRVTDQPALTRAVESGRPLVCVFVDDTGDGAGRALGGAARWWLHGSLAGLDAALARHGGRLLLLRGDAQREIERVVHDTGAEAVYWNRRYAQPQRDADAALKASLKARGVTVESSNGSLLNEPWEVLTGSGGPYQVFTAYWRAARRDRTVAVPLPEPERIAFHPWPKAVRDCALALDVLALRPPVPDWAGGLRDAWPAPDEAGAHARLDAFLTASLAGYADARDLPDRPATSRLSPFLRFGNLSPRQVWHAVQGAANAGGAAVAADADKFLSELGWREFSYTLLYHFPALASDNFRAQFDAMPWRDDPAALRAWQRGRTGYPLVDAGLRELWTTGWMHNRVRMVVASFLIKHLLIDWRAGEAWFWDTLVDADPANNAASWQWVAGCGADAAPYFRIFNPVAQGQKFDPDGAYVRRWVPELAGLDNASIHAPWEASPLELDAAGVRLGVDYPAPLVEHAAARARALDALAALPKRR

SEQ ID NO: 6649 - protein, 194 aa, Methanosarcina mazei Go1
MNRKAGAVVLICLFAGVILVPGCINKQHVEQPVNNESSNAGKGDESVDIQVIKVFSSAFESNSTIPRKYTCNGENINPPLEFADIPEETESLVLIMDDPDSPMNPFTHWIVWNIEPVAKIEEDSIPGIEGMNNFRKIGYGGPCPSSGTHRYFFKVYALDRKLELKAGSGRKELESEMIGHIIAEGELMGKYGKT

SEQ ID NO: 6650 - protein, 316 aa, Rubrivivax gelatinosus PM1
MSSQLEQLKAYTTVVADTGDFKQIAAFAPRDATTNPSLILKAVSQPAYAPLLAQTAAAHRGQPLDAIVDRVLVRFGCEILNVVPGRVSTEVDARLSFDAAATVARAQRIMALYESEGIARERVLIKIAATWEGIQAAKALEHHGIHCNLTLLFAFCQAVACGESGVRLISPFVGRIHDWHKKAAGARWDEAANAGANDPGVKSVAQIWRYFRKFGIETEVMGASFRNTGQILALAGCDLLTISPELLAQLQASEATVMRALDVDAALHCDAKALSFNEASFRYALNEDAMATEKLAEGIRAFAVDAAQLDRLIQAL

SEQ ID NO: 6651 - protein, 151 aa, Sinorhizobium meliloti
MIRLLIALFLLLASVAPGFAVNPDEVLADPALEARARAISAQLRCMVCQNQSIDDSNAELAKDLRLLVRERLKNGDSDEAVISYVVSRYGEFVLLNPRLEAKTLVLWGMPAILLVAGIITLVVAARRRGARVPGAPLSDEEKERLDRLLRP

SEQ ID NO: 6652 - protein, 421 aa, Arabidopsis thaliana
MVIKGMRVGKYELGRTLGEGNSAKVKFAIDTLTGESFAIKIIEKSCITRLNVSFQIKREIRTLKVLKHPNIVRLHEVLASKTKIYMVLECVTGGDLFDRIVSKGKLSETQGRKMFQQLIDGVSYCHNKGVFHRDLKLENVLLDAKGHIKITDFGLSALSQHYREDGLLHTTCGSPNYVAPEVLANEGYDGAASDIWSCGVILYVILTGCLPFDDANLAVICRKIFKGDPPIPRWISLGAKTMIKRMLDPNPVTRVTIAGIKAHDWFKHDYTPSNYDDDDDVYLIQEDVFMMKEYEEEKSPDSPTIINAFQLIGMSSFLDLSGFFETEKLSERQIRFTSNSLAKDLLENIETIFTEMGFCLQKKHAKLKAIKEESTQKRQCGLSVTAEVFEISPSLNVVELRKSHGDSSLYKQVMMHSCNIS

SEQ ID NO: 6653 - protein, 400 aa, Ralstonia eutropha JMP134
MIANTDDLAYLMTREQGKPLDEAKGEIAYAASFLEWFAEEAKRVDGEVLASPAADKRLVTLRQPVGVCAAITPWNFPAAMITRKAAPALAAGCAIVIKPAELTPLSAFALAELAHRAGVPAGVLQVVTGDARTIGAVLTASPIVRKLSFTGSTEVGRILMAQSAATVKRLSLELGGNAPFVVFDDADVDAAVDGAIAAKFRNGGQTCVCANRFYIQDGIYDAFATKFAQRASQLRVGNGLEQGVVIGPLIEEAAVEKVTSLVDDATSKGGRLLTGGLKHQLSGTYYAPTVIADATATMRVAREEIFGPLAPLFRFKRDEDAVAAANATEYGLAAYLYTRDIARAWRTAEALEYGMVGLNTGLISNEVAPFGGIKQSGLGREGSRHGIEEYLETKYLCLQM

SEQ ID NO: 6654 - protein, 321 aa, Ureaplasma parvum serovar 3 str. ATCC 700970
MNQVNFLNLDKNILIITSGGDAPGMNASLISLIHRLMNNNFNVFIGIEGLLGLYNNLIEPIKDKRVFDVYFNEQGTVIKTSRFIKLDINDKKTQIIKDNLLSHNIQKIIILGGQGSMQAGLVLTKMGFEVFGILHTIDNDFSETQMCIGALSAASFNQKLLKCLNYTAKAHCAFNLVELMGRECSWLVNNSVGKLKPILMLTNQDNKYTVDEVIDLIKDKINSIKEYDPLIIVQELIYDQKWYELLVKTFEQKLHKSLRITILNYLQRGAPVSDFDLQLAKDSANVLVDFIVNQNDIKNTNNMYVVINKFDNKLEVIKFNK

SEQ ID NO: 6655 - protein, 153 aa, Desulfovibrio desulfuricans G20
MKLKSPIFEQGELLPAANPQHGGESPPLAWEDVPEGTASFVLLCDDPDADGGTATLWMLYNLPADLRSLEAGIADDFAPLKGAAHGINTRGNCRYDAPQPSCHPRRVYYRLYALDSRLSLKAGIARGQLVRAMEGHIISEASLTTVVGSAHTA

SEQ ID NO: 6656 - protein, 400 aa, Rubrivivax gelatinosus PM1
MVWMMAAGALVFFMQAGFALLESGMSRAKNAINVIMKNYCDTCFGAVAYWAVGFGLMFGANASGWIGTDRFLPHAMPEADYGLLFFQMMFAATAATIVSGAIAERARFWAYIVSSVLITGLIYPVFGSWAWGSLFSGQGWLREMGFIDFAGSTVVHSVGGWSALAAILVIGPRLGRFGPNGEARPMLGHNLTSVALGGFILWLGWFGFNGGSTAAATVGIGKIVLNTHLAGAAGAIGALAVLALGRQPVLMTAAVNGSIAGLVGITAGCHVMEPAYALLTGFVAGGLSVLAGWLLEAGRIDDVVGAVSVHAVGGVWGTLAAGLFKHDAMFDLRQLGVQAIGCGVAFAWSFGTALLMYWLLARGVGLRASTLDEQRGLDFTEHYEIGYPEFQQDAVHRGKR

SEQ ID NO: 6657 - protein, 491 aa, Fusobacterium nucleatum subsp. nucleatum ATCC 25586
MENILKKSYKMFINGEWIDSSNGVMVKSYAPYNNELLSEFPDASESDIDFAIKSAKEAFKTWRKTTVKERARILNKIADIIDENKDLLATVETMDNGKPIRETKLVDIPLAATHFRYFAGCILADEGQATVLDEKFLSLILREPIGVVGQIIPWNFPFLMAAWKLAPALAAGDTVVLKPSSTTTLSLLVLMELIQDVIPKGVVNLVTGKGSTAGEFLKNHPDLDKLAFTGSTAVGRDIALAAAEKLIPATLELGGKSANIILDDADIEKALEGAQLGILFNQGQVCCAGSRIFVQEGIYDEFISKLVKKFENIKIGNPLDPTTIMGSQIDARQVKTILDYVEIAKQEGGVILTGGVKYTENGCDKGNFVRPTLITNVNNGCRVSQEEIFGPVAVVIKFKTDDEVIAQANDSEYGLGGAVFTKNINRALKLAREIQTGRVWINTYNQIPEHAPFGGYKKSGIGRETHKVILEHYTQMKNILIDLEEGTSGLY

SEQ ID NO: 6658 - protein, 314 aa, Oryza sativa
EESMEMMVHGRRDEQYGGLGLGLGLGLSLGVAGGAADDEQPPPRRGAAPPPQQQLCGWNGGGLFSSSSSDHRGRSAMMACHDVIEMPFLRGIDVNRAPAAETTTTTARGPSCSEEDEEPGASSPNSTLSSLSGKRGAPSAATAAAAAASDDEDSGGGSRKKLRLSKDQAAVLEDTFKEHNTLNPKQKAALARQLNLKPRQVEVWFQNRRARTKLKQTEVDCELLKRCCETLTDENRRLHRELQELRALKLATAAAAPHHLYGARVPPPTTLTMCPSCERVASAATTTRNNSGAAPARPVPTRPWPPAAAQRSSA

SEQ ID NO: 6659 - protein, 426 aa, Pichia pastoris
MSGDHKSFTVFNQEFIIDRDFELIKALGQGAYGVVCSAQYKGNEDGGKVAIKKVTNIFSKKILAKRALREIKLLRHFRGHKYITCLYDLDVIPDQNNNFNEIYLYEELMECDLHHIIKSKQPLTDSHYQSFIYQILGGLKYIHSADVLHRDLKPVNLLVNSDCELKICDFGLARGYSSDAEKNAGFLTEYVATRWYRAPEIILSFQTYTKAIDIWSVGCILAELLGGRPIFRGRDYVDQLNLILSTLGTVSEETLQSIRSERAQDYVRSLPFMPKIPFSQLFPGANPEAIDLLDRMLTVDPTHRITVTEALEHPYLKVWHDPNDEPVCSSKFDFSFEVVDDIETMKQMIVDEVLSLREFVRRPIQEQQLPFTEPDKHFDVSFDQPQIEPPAENYRDDHLPRPHELESQILDLEHELQYGLDRYGTQ

SEQ ID NO: 6660 - protein, 320 aa, Arabidopsis thaliana
MSALTFPIGSVHHLMPVLALGTAASPPPEPIVLKRTVLEAIKLGYRHFDTSPRYQTEEPLGEALAEAVSLGLIQSRSELFVTSKLWCADAHGGLVVPAIQRSLETLKLDYLDLYLIHWPVSSKPGKYKFPIEEDDFLPMDYETVWSEMEECQRLGVAKCIGVSNFSCKKLQHILSIAKIPPSVNQVEMSPVWQQRKLRELCKSKGIVVTAYSVLGSRGAFWGTHKIMESDVLKEIAEAKGKTVAQVSMRWAYEEGVSMVVKSFRKDRLEENLKIFDWSLTEEEKQRISTEISQSRIVDGEVYISEKGPIKSVTEMWDGEI

SEQ ID NO: 6661 - protein, 273 aa, Thermoplasma volcanium GSS1
MKLIENWFSERYSDNLQLSFRVSDQLLSIKTDYQRIDLFDTYDFGKLLAIDGTVQLTERDEYIYHELITMIPYHMTKNPPQSALVIGGGDGGAARRLLDLGLNKIVNVEIDGQVVEVSKRFFPDLSSAFTDKRVNLIIDDGIKYVRKCNEKFDLVIIDSTDPEGPAEGLFSMEFYSDITKILSDGGVIVSQSGSPFYQPKALKLAYTGMRRLFKDVKVYTGFIPTYPSGFWSFTIASEDAMNPRKPAIKGKYFNEDVLDGVFKLPQFVKDLIT

SEQ ID NO: 6662 - protein, 310 aa, Thermoplasma volcanium GSS1
MDRKELLSKPVQDLRIDGNTTLSNLMAQFSNIGGFTAAKLYEAHSIISDMFLEDNTTFLSFPADIISTGLRGLINDVVKRKLVDVIITTSGTLDHDIARTFGKYYCGSFNYSDVELREININRLGNVLVPDESYGELIEEKVMEQLEKLYSIKKEWATVDLIKEIGLSINNESSILYNAAKNDIPIFVPGITDGSFGSQLWSFYEQHHDFKINLLEDEHRLSDIIFDAKKTGAIMVGGGISKHHTIWWNQFRDGLDYAVYITTAQEYDGSLSGAKLEEAISWKKVRPNARFVNIYGDATVIMPILMAPFL

SEQ ID NO: 6663 - protein, 76 aa, Triticum aestivum
MSSESLGKNSKIMGGRERKEVNSTAKHFVDFTEAEEDLVFRMHRLVGNRWELIAGRIPGRTAEEVEMFWAKRHQDQ

SEQ ID NO: 6664 - protein, 43 aa, Zea mays
PTRPRTRVLKYGCGHEWWVCLLLTFLGYIPGIIYAFYAITKNN

SEQ ID NO: 6665 - protein, 425 aa, Mesorhizobium loti MAFF303099
MSGRSLMSPVWHPFTQHALELAIPEIARTEGAYLHKADGTRILDAISSWWVVTHCHRHPRIIKAIETTAASLDQIIFAGFTHEPAERLARALVGLAPAGLDWVFYSDSGSTSVEVALKMALGYFRNIGAPRSRIVVMEHSYHGDTIGTMSVGARGVFNAAYEPLLFEVDTIPFPAAGQEQETLDRFEAVSRDRRAAALIVEPLVLGAGGMQMYPAWVLAELKKITEASGTLLITDEVMTGWGRTGTMFACEQASISPDILCTSKGLTGGTIPLAATLATDAIFQAHYSEDRKKTFFHSSSYTANPIACGAALANVEIWRDEPVAERIAALSAMQAAGLRRFGDNPRFTDSRVTGTIAALDLRTSSAGYLADIGPKLRAFFLERGLLVRPLGNVLDLMPPYCITGDELDGLYDAIEEAAERFGSRP

SEQ ID NO: 6666 - protein, 299 aa, Arabidopsis thaliana
MASEDQSAARSTGKVNWFNASKGYGFITPDDGSVELFVHQSSIVSEGYRSLTVGDAVEFAITQGSDGKTKAVNVTAPGGGSLKKENNSRGNGARRGGGGSGCYNCGELGHISKDCGIGGGGGGGERRSRGGEGCYNCGDTGHFARDCTSAGNGDQRGATKGGNDGCYTCGDVGHVARDCTQKSVGNGDQRGAVKGGNDGCYTCGDVGHFARDCTQKVAAGNVRSGGGGSGTCYSCGGVGHIARDCATKRQPSRGCYQCGGSGHLARDCDQRGSGGGGNDNACYKCGKEGHFARECSSVA

SEQ ID NO: 6667 - protein, 320 aa, Lupinus cosentinii
FAHYGPQWRLRRKLSSVHMFSGKALEDFTHLRQEEVARLTSNLASSRSKAVNLGQVLNVCTTNALTRVMIGRRVFNDGNDGFDPKADEFKSMVVELMVLAGALNIGDFIPALEWLDIQGVQAKMTKLHKKFDAFLTNIVEEHKNSKIEKHQDMLSTMLSLKDGTEDGGKLTDIEIKALLLNMFAAGTDTSSSTTEWAISELIKNPNIQAKLQQELDSVVGRDRLVTEADLAHLPYLEAVVKETFRLHPSTPLSLPRIASESCEVFGYHIPKGSTLLVDVWAIARDPKEWNNPLEFKPERFLPGGEKANVDIKGNDFEVIP

SEQ ID NO: 6668 - protein, 90 aa, Brassica napus
MASFARRAMNLAQIPSARAPASVCQRRGFAGAADHHGSTKVDFWKQPTNPGNWKEEHFVLISLSGWGMLFYGGYKLFTGGKGEKPVEAAQ

SEQ ID NO: 6669 - protein, 413 aa, Burkholderia fungorum LB400
MPIYKGTLGPDVIDIRKLYGQTGKFTYDPGFMSTAACNSAITYIDGDKGELLYRGYPIDNLAENADFLETCYLLLKGELPNAQQNAEFVKTVTNHTMVHEQMHFFFRGFRRDAHPMAILVAAVGALSAFYHDSLDINNPRHREVSAIRMIAKLPTLVAMAYKYSIGQPFAYPKNDLSYSANFMHMMFSNPCEEYKVNDVLVRALDRILILHADHEQNASTSTVRLAGSSGANPFACIAAGIACLWGPAHGGANEAALNMLEEIGSVDNIPEFIKQVKDKNSGVKLMGFGHRVYKNYDPRAKLMRETCHEVLEELGLHDDPLFKLAMALEKIALEDEYFVSRKLYPNVDFYSGIVQRALGIPTSMFTCIFAMARTVGWIAQWNEMIADPEQKIGRPRQLFIGDTQREAKPIAQR

SEQ ID NO: 6670 - protein, 170 aa, Glycine max
  misc_feature (125)..(125): Xaa can be any naturally occurring amino acid
MASDGSEEFRLVSPAFSNEGKLPRNYTDEGQGAKKNISPPLEWYNLPEGTKTLALVVEDIDGSDSDGPIMPWTHWVVANIPATVKGLPEGFSGKAAEMGGDYVTIKEGNNDLKKTGWNGPRLPTXGHRIQFRLYALDDELKLGNKVTKEKLLEETIEGHVLGEATLMAIF

SEQ ID NO: 6671 - protein, 216 aa, Shigella sonnei
QELDLYICLRPVRYYQGTPSPVKHPELTDMVIFRENSEDIYAGIEWKADSADAEKVIKFLREEMGVKKIRFPEHCGIGIKPCSEEGTKRLVRAAIEYAIANDRDSVTLVHKGNIMKFTEGAFKDWGYQLAREEFGGELIDGGPWLKVKNPNTGKEIVIKDVIADAFLQQILLRPAEYDVIACMNLNGDYISDALAAQVGGIGIAPGANIGDECALF

SEQ ID NO: 6672 - protein, 415 aa, Magnaporthe grisea
MSDLQGRKIFKVFNQDFIVDERYTVTKELGQGAYGIVCAAVNNQTSEGVAIKKVTNVFSKKILAKRALREIKLLQHFRGHRNITCLYDMDIPRPDNFNETYLYEELMECDLAAIIRSGQPLTDAHFQSFIYQILCGLKYIHSANVLHRDLKPGNLLVNADCELKICDFGLARGFSVDPEENAGYMTEYVATRWYRAPEIMLSFQSYTKAIDVWSVGCILAELLGGRPFFKGRDYVDQLNQILHILGTPNEETLSRIGSPRAQEYVRNLPFMAKKPFPTLFPNANPDALDLLDRMLAFDPSSRISVEQALEHPYLHIWHDASDEPDCPTTFNFDFEVVEDVGEMRKMILDEVYRFRQLVRTAPGAGGHGAPHAPQVPIPAGAGQGQWKAEDPRPQEYVGQMNDLEAELAGGLDQRR

SEQ ID NO: 6673 - protein, 439 aa, Anabaena variabilis ATCC 29413
MEKASLQHRDMFTAEVIGFGDTVVFVSHPQGIQTIFANDRKKLVAVGEANRILYPLVGNNSMFLLEGVKHKQRRQLLMPSFHGERMREYGHLIRNITETLFSQLQQNVTFSALTAMREISMQVILQAVFGFYEGERCQQFKHLLPVFLSELFQSPLASSILFFPFLQKDLGNLTPWGRFVRQREKIDKLLYEEIAERRQEINSDRIDILSLLISSRDETGNSMSDQELRDELITLMISGHETTGTAMAWSLYWILQTPEVFQRLIQELDSLGDSPDPMSIFRLPYLTAVCNETLRINPVAMLTLPRVVKEPVELLGNRLESGTTVVGCIYLTHHREDLYPESKLFQPERFLKREFSQYEFMPFGGGVRGCIGQAIAMFEMKIVLATVLSRYQFALADGKPERPQRQGFTLTPANGVKMLITGKHQRQNYSTAASTTFTT

SEQ ID NO: 6674 - protein, 429 aa, Pseudomonas putida KT2440
MADKKAQLVIEGAAPVELPILTGTVGPDVIDVRGLGATGHFTFDPGFMATASCESKITYIDGDKGILLHRGYPIEQLAEQSDYLETCYLLLNGELPNAEQKAQFVSTVKNHTMVHEQLKSFFNGFRRDAHPMAVMCGVVGALSAFYHDSLDINNPQHREISAVRLVAKMPTLAAMVYKYSMGQPMMYPRNDLSYAENFLHMMFNTPCEIKPISPVLAKAMDRIFILHADHEQNASTSTVRLAGSSGANPFACIAAGIAALWGPAHGGANEAVLTMLDEIGDVSNIDKFIAKAKDKNDPFKLMGFGHRVYKNRDPRATVMKQTCDEVLRELGIKNDPQLELAMRLEEIALTDPYFIERSLYPNVDFYSGIILKAIGIPTSMFTVIFALARTVGWISHWKEMLSSPYKIGRPRQLYTGEQKRDIVALKDRK

SEQ ID NO: 6675 - protein, 333 aa, Zea mays
MASPPRNVGTRTTSNPEIPEFLVGPAGRPVPAVGLGTASFPFVEENVRTAVLAALELGYRHLDTASLYRSERAVGDAVAEAARRGIVASREEVFVTTKMWCSQCHPDLVLPSLKESLQNLQMDYVDLYLVHWPIAAKPGKPQFPFKREDIMPMDLIGVWRAMEECHRLGLARMIGVSNFTTKKLQELLAIAKIPPSVNQVEMNPIWQQKRLAEFCKDKGIHLTAYSPLAGQSTSKVNPVMQSEVLQEVAKARGKSVAQISLRWIYEQGASVVVKSFGRDRLKENVEIFDWELTNEDRRKISQIPQHKRVTVLGILSPDGVSSVDLAELDIVEM

SEQ ID NO: 6676 - protein, 476 aa, Rhodopseudomonas palustris CGA009
MVNRMQFYIDGAWVDPVVKKSTPVVNPATEEAMYEVALGSKADVDKAVAAAKRAFETFSVTSREERIALLEKVVAIYKSRMKEIGAAISDEMGAPLPMAEKMQAGAGLGHIMSTLDVLKNYQFEEPLGSAMIVREPIGVVGMITPWNWPLNQIACKVAPAIAAGCTMVLKPSEFTPTSALLFAEILHEAGVPKGVFNLVNGLGPEVGAAMSEHPDIDMISFTGSTRAGIDVAQRAAPTVKRVSQELGGKSPNVILEDADLTKAVTGGVMHMFNNSGQSCNAPSRMIVPLSKMKEVAAIAKGVAEKTKAGDPRGEGTTIGPVVNRIQWDKIQTLINKGIEEGATLVAGGPGLPEGVNKGFYVRPTVFADVTKDMTIAREEIFGPVLVIMGAKDENEAVELANDTPYGLAGYVSAGSVDRARAVGRKIRAGNVNLQGVPNERTAPFGGYKQSGNGREWGKFGLEEYLEVKAIAGFNAA

SEQ ID NO: 6677 - protein, 210 aa, Zea mays
MASDRVLGTVKWFNGTKGFGFITPDDGSEDLFVHQSSIKSDGYRSLNDGDAVEYTVGSGNDGRAKALDVTAPGGGPLAGGERPDGGNGGGRGGYGGGDRGYGGGGDRGYGGGGDRGYGGGDRGYGGGGDRGYGGGGDRGYGGGGGYGGGYGGGGGGGGRGCFKCGEEGHMARDCSQGGGYGGGGGGGRGSECYNCGQEGHISRDCPNKRR

SEQ ID NO: 6678 - protein, 418 aa, Bordetella pertussis Tohama I
MSYQHIKVPTGGQKITVNADYSLNVPDQVIIPVIEGDGTGADITPVMIKVVDAAVQKAYAGKRKIHWMEVYAGEKATKVYGPDVWLPEETLDAVKDYVVSIKGPLTTPVGGGIRSLNVALRQQLDLYVCLRPVRYFKGVPSPVREPEKTDMVIFRENSEDIYAGIEYMAESEQAKDLIQYLQTKLGVTKIRFPNTSSIGIKPVSREGTERLVRKALQYAIDNDRASVTLVHKGNIMKFTEGGFRDWGYALAQNEFGAQPIDGGPWCKFKNPKTGREIIVKDSIADAFLQQILLRPAEYDVIATLNLNGDYISDALAAQVGGIGIAPGANLSDSVAMFEATHGTAPKYAGKDYVNPGSEILSAEMMLRHMGWTEAADLIIASMEKSILSKKVTYDFARLLEGATQVSCSGFGQVMIDNM

SEQ ID NO: 6679 - protein, 294 aa, Allium cepa
MDQYEKVEKIGEGTYGVVYKARDRLTNETIALKKIRLEQEDEGVPSTAIREISLLKEMQHANIVRLQDVVHSEKRIYLVFEYLDLDLKKHMDSCPDFAKDSRLAKTFLYQLLRGIAYCHSHRVLHRDLKPQNLLIDRRTNSLKLADFGLARAFGIPVRTFTHEVVTLWYRAPEILLGARQYSTPVDIWSVGCIFAEMVNQRPLFPGDSEIDELFKIFRIMGTPNEDTWPGVTSLPDFKSAFPKWPAKDLATIVPKLDSAGIDLLYKMLHLEPSKRITARKALEHEYFRDLGTIP

SEQ ID NO: 6680 - protein, 247 aa, Pisum sativum
EHLANLEYANAGLLSHLSLAFWDQDDPYDMGGDHCFLPGGNGKLVQALAENVPILYEKTVHTIRYGSDGVQVIAGSQVFEGDMALCTVPLGVLKKGSIKFIPELPQRKLDGIKRLGFGLLNKVAMLFPHVFWEMDLDTFGHLSDDPSRRGEFFLFYSYATVAGGPLLIALVAGEAAHKFESMPPTDAVTKVLQILKGIYEPKGINVPEPIQTVCTRWGSDPFCFGSYSNVAVGASGDDYDILAEMVG

SEQ ID NO: 6681 - protein, 298 aa, Archaeoglobus fulgidus DSM 4304
MARTGFQGRKLGEAFEIWTEMLREENITILMGLSGAMVPAGMRKIIAWLIRNRYIDVLVSTGANLFHDIHEAMGFRHFMGSEHVNDCKLFEEGIDRIHDVFAYEKEFNVIDYTLAEIISEMSGVMSSREFLEEIAGRLNVKDRNSIVIAAYESKVPIFSPAIADSSIGIAAALAKREVVIDTIRDVEELTEIVVNSEKTGVIYVGGGVPKNFIQQTEVVARLKGYDVRGHEYAIQITTDVPQFGGLSGCTFEEGVSWGKISGKAKKVQVNCDATIALPVLAHGLIGIRRQKYPIFNGL

SEQ ID NO: 6682 - protein, 290 aa, Coxiella burnetii RSA 493
MSPGKLFRQAVANEHPLQIVGAINAYCALLAENVGFKAIYLSGGGVANTLGLPDLGITDLHDVLEDARRITAATHLPLLVDIDTGFGGAFTIARAIKEMERAQVAAVHMEDQVAQKRCGHRPGKELVNTNEMVDRIKAAVDVKSNDFVLIARTDAYAVEGLKATIDRACTYVEAGADMIFAEALENINDYPTFCKAVKVPVLANMTEFGKTPLYTAAQLADHGVKMVLYPRSADRAMSKAALAVYEDIKKHGVQTASLPFMQTREALYEVLNYHAYEDKLNQLFKRKEDD

SEQ ID NO: 6683 - protein, 372 aa, Coxiella burnetii RSA 493
MTKTAKGLRGQSAGETSIATVGKEGHGLTYRGYRIEDLAANATFEEVAYLLLKNKLPTKSELDAYTKKLVNLRSLPPALKDTLERIPASSHPMDVMRTGCSMLGNLEPENGFENEQNIADRLVAIFPAIQCYWYHYSHHGKRIDTELDDLTLAGYFLHLLLGKKAAQMAIDCMNASLILYAEHEFNASTFAARVCSATLSDIYSAVTAAIATLRGPLHGGANEAAMDLIMLYKTPSEAIAGIKRKLANKELIMGFGHAVYRERDPRNAIIKSWAQKLAPNAADGYLFDISDAIENTMQDEKKLFPNLDFYSATAYHFLNIPTKLFTPIFVMSRVTGWCAHIFEQRKDNRIIRPNADYIGPEEQGWVPIEKRR

SEQ ID NO: 6684 - protein, 325 aa, Bradyrhizobium japonicum USDA 110
MEGPAMAAPLDPVIAQIIPLLPLRDPTTMTPQSARDSLRALAAARAAVPPPPVDTVQDIKVKGGAGPLDARLYRIGSDPAPTVVFFHGGGWVAGDLETHDRQARNLAIETGAVVVSVDYRRPPETRFPGAFEDAFAAARDIFNRVAEFGGDAKRLGVAGDSAGGNLAAATAIACRDAGIKLAAQLLVYPVTDVAGHYADARENARFPSRAENADGYFLSRAVMEWFCGHYLADPGHGADWRVSPLRAASLAGLAPAIVATASFDPLRDEGAAYARALEAAGVRVKHHEGPGLIHGYFGLGDASDVARAEAQRARADFKALLARGI

SEQ ID NO: 6685 - protein, 203 aa, Glycine max
  misc_feature (159)..(159): Xaa can be any naturally occurring amino acid
MVAGKYPSPTYFILLLITITRLISTVGKTSQWMKALTPPPELASVSLDDTIFSKLRNDPEALQGRASRDYGNLVREVPSAVFHPTSSSDIARLIKLSYNGSVPFKIAARGQGHSTRGQAMVRDGVVVDMAGFRERGNGEGIRVVMSVVVDPYNKNGYGXYYADVGGEQLWIDVLNATLEHGLAPMSWTDYLYLTVGGTLFNAG

SEQ ID NO: 6686 - protein, 486 aa, Dechloromonas aromatica RCB
MLQDKILNFINGEFVATNKWFENRTPISNAVIGQVAEAGKAEVDAAVAAAQAALKGPWGKMTLAKRVELLEALVAEINNRFDEFLEAECADTGKPKSLASHIDIPRGAANFKVFADVIKNVPGEFFDMATPDGGTAINYTFRSPVGVVGVICPWNLPLLLMTWKVGPALACGNTVVVKPSEETPRTAALLGEVMNKVGIPKGVYNVVHGFGPNSAGEFLTTHPDVDAITFTGETRTGEIINRAASVGSRPVSLEMGGKNAAIVFADCDFDAAIEGTLRSAFANCGQVCLGTERVYVERPIFEKFVAAMKAGAEKLKIGVPEDPATGMGPLISKEHQNKVLSYFQIAKEAGATIVTGGGVPDMPGELKDGCWVQPTIWTGLPETARVIKEEIFGPCCHIAPFDTEEEVLEKANDNIYGLATAIWTKDVSRANRVAQQMEVGIAWVNSWFLRDLRTAFGGAKQSGIGREGGVHSLEFYTELKNICIKL

SEQ ID NO: 6687 - protein, 256 aa, Gibberella zeae PH-1
MPGVGFGTFANEGAKGETYKAVIAALKTGYRHLDCAWFYLNEGEVGQAVRDFLAEDNGVKREDLFICTKVWNHLHEPEEVKWSFENSLKNFGLDYIDLFLVHWPIAAEKGDDYQPKIGPDGKYVIKKDLTENPEPTWRAMEEIYASGKARAIGVSNWTIDGLKQLMAFAKVKPAVNQIEIHPFLPNEDLVKFCLENDILPAAYSPLGSQNQVPTTGETVRSNKTLNEVADRSGNTLAQVLIAWGLRRGYAPVRRGL

SEQ ID NO: 6688 - protein, 66 aa, Triticum aestivum
  misc_feature (10)..(11): Xaa can be any naturally occurring amino acid
  misc_feature (41)..(42): Xaa can be any naturally occurring amino acid
  misc_feature (47)..(47): Xaa can be any naturally occurring amino acid
ERERETLEHXXWSGANFYDRVLKTVQGGMSSTAAMGKGATXXQFWTXPGSESNNQARSQVQDVMKV

SEQ ID NO: 6689 - protein, 288 aa, Glycine max
MRVAREEAMGGGKRNTVETFFLATLILWFASLCFQILLNKRWELLSVIAGSIFYQTSNCLIRFFSPHKDKDALFVNTSVSLLHSLLTSSSVIFILFRELLSNGPSGMSDHSQLVEDAWSWAFEALSFSCGYFAYDQWDMLHYRLYNGWIPSILVHHLVLLICFTLALYRNVTINYLILTLICELHSIFLHLRKVRRMAGIRDAKSILVKLEWFLNWVTFFVARSVPHVLITAKLIKDAYKFEKGMELPLALLGMAGMNLLNIGLGIDLLKAFKRERKSQQGNLHHHRE

SEQ ID NO: 6690 - protein, 372 aa, Arabidopsis thaliana
MPEIEIAAGSGDNNDALFGKYELGKLLGCGAFAKVFHARDRRTGQSVAVKILNKKKLLTNPALANNIKREISIMRRLSHPNIVKLHEVMATKSKIFFAMEFVKGGELFNKISKHGRLSEDLSRRYFQQLISAVGYCHARGVYHRDLKPENLLIDENGNLKVSDFGLSALTDQIRPDGLLHTLCGTPAYVAPEILSKKGYEGAKVDVWSCGIVLFVLVAGYLPFNDPNVMNMYKKIYKGEYRFPRWMSPDLKRFVSRLLDINPETRITIDEILKDPWFVRGGFKQIKFHDDEIEDQKVESSLEAVKSLNAFDLISYSSGLDLSGLFAGCSNSSGESERFLSEKVAGDVGGGSGGVCERGESEDEEEEGGRVWV

SEQ ID NO: 6691 - protein, 499 aa, Triticum aestivum
  misc_feature (21)..(21): Xaa can be any naturally occurring amino acid
  misc_feature (275)..(275): Xaa can be any naturally occurring amino acid
RPTLPKSSAETGNFRLTIPTXSAPTSGFSSPVGSPRRLSNADVSSTVASSHAPQAWSAPSIHTIDFLGALSPRTLPEKLTGASEPSPYSSTFRSPILMPRNTSAPPSPLPKLFPENQISRTEVNGSASLHPLPLPPSAISPMQTSFSNQPAPKVEMPSVSCQWQKGKLLGSGTFGCVYEATNRNTGALCAMKEVNIIPDDAKSAESLNQLEQEIKFLSQFKHENIVQYYGSDTIEDRFYIYLEYVHPGSINKYVQQHYGAITESVIRNFTRHILXGLAFLHGQKIMHRDIKGANLLVDINGVVKLADFGMAKHLSSAAPNLSLKGPPYWMAPEMIRATLVKDVGYDLAVDIWSLGCTIIEMFNGKPPWSGLEGPTAMFKVLNKDPPLPDNLSHEAKDFLKCCFKRNPAARPSARELLTHPFIRNSSHYSKHVQEVIIAGCEEVIRASCDPSLTRKTTTSGGNDARSSESLVSQLTLQPVQVVTPYFPPRNSGFVSNPGS

SEQ ID NO: 6692 - protein, 395 aa, Burkholderia fungorum LB400
MSETTQTAGTPGGNEPKSGFKPKKSVALSGVTAGNTALCTVGKTGNDLHYRGYDILDIASACEFEEIAYLLVHEKLPTQAELTAYKTKLKALRGLPANVKAALEWIPAAAHPMDVMRTGVSVLGTVLPEKDDHNLPGARDIADRLMASLGSMLLYWYHYSHNGKRIEVETDDDSIGGHFLHLLHGVEPSNAWVDAMHVSLNLYAEHEFNASTFTGRVIAGTGSDIYSALTGAIGALRGPKHGGANEVAFEIQSRYQTPDEAEADIRRRVENKEVVIGFGHPVYTISDPRNKVIKEVAKKLSKEAGNTRLFSIAERLESVMWDAKKMFPNLDWFSAVSYHMMGVPTAMFTPLFVIARTAGWSAHIIEQRIDNKIIRPSANYTGPENLKYLPLNRRK

SEQ ID NO: 6693 - protein, 512 aa, Robinia pseudoacacia
MDQLVWRVLPMLALLVSFLVFFYLQDSYKAQLSPFIKLPGDECSLLPHRHYWISSKRIVTPQGIISGSVEINEGEIVSIIEGYGKQGNSMQEAVIDYGEAVVMPGLIDVHVHLDEPGRTEWEGFDTGTRAAAAGGVTTVVDMPLNNYPTTVSKETLQLKLEAAEKKLYVDVGFWGGLIPENALNTSILEGLLSAGVLGVKSFMCPSGIDDFPMTTIDHIKEGLSVLAKYRRPLLVHAEIQQDSKNHLELKGNGDPRAYLTYLNTRPPSWEQAAIKELVDVTKDTIIGGPLEGAHVHIVHLSDSSASLDLIKEAKSRGDSISVETCPHYLAFSSEEIPDRDTRFKCSPPIRDALNKEKLWEAVLEGHIDLLSSDHSPTVPELKLLEEGDFLRAWGGISSLQFDLPVTWSYGKKHGLTLEQLSLLWSKKPATFAGLESKGAIAVGNHADIVVWQPELEFDLNDDYPVFIKHPSLSAYMGRRLSGKVLDTFVRGNLVFKDGKHAPAACGVPILAK

SEQ ID NO: 6694 - protein, 162 aa, Arabidopsis thaliana
MSSEELRLVSPTIDNDGKLPRKYTMAGQGVKKDISPPLEWYNVPEGTKTLALVVEDIDAPDPSGPLVPWTVWVVVDIPPEMKGLPEGYSGNEDQTTGIREGNNDHKIPGWRGPLLPSHGHRFQFKLFALDDKPKIGHTVTKERLLIAIEGHVLGEAILTCLA

SEQ ID NO: 6695 - protein, 111 aa, Lactobacillus delbrueckii subsp. lactis
MKRIGILTSGGDAPGMNAAVRAVTRVAIANGLEVFGIRYGFAGLVAGDIFPLESEDVAHLINVSGTFLYSARYPEFAEEEGQLAGIEQLKKHGIDAVVVIGGDGSYHGALQ

SEQ ID NO: 6696 - protein, 267 aa, Shigella flexneri 2a str. 301
MAIPAFGLGTFRLKDDVVISSVKTALELGYRAIDTAQIYDNEAAVGQAIAESGVPRHELYITTKIWIENLSKDKLIPSLKESLQKLRTDYVDLTLIHWPSPNDEVSVEEFMQALLEAKKQGLTREIGISNFTIPLMEKAIAAVGAENIATNQIELSPYLQNRKVVAWAKQHGIHITSYMTLAYGKALKDEVIARIAAKHNAIPAQVILAWAMGEGYSVIPSSTKRKNLESNLKAQNLQLDAEDKKAIAALDCNDRLVSPEGLAPEWD

SEQ ID NO: 6697 - protein, 84 aa, Brassica napus
  misc_feature (43)..(43): Xaa can be any naturally occurring amino acid
MGCFHSKVAREFRGHEDPVKLASETAFSVSEVEALFELFKSIXSSSVVDDGLINKEEFQLALFKSRKRENIFANRIFDMFDVKR

SEQ ID NO: 6698 - protein, 429 aa, Pseudomonas syringae pv. tomato str. DC3000
MADKKAQLIIEGAAPVELPILTGTVGPDVIDVRGLTATGRFTFDPGFMSTASCESKITYIDGDNGILLHRGYPIEQLAEQSDYLETCYLLLNGELPTAEQKAQFVAVVKNHTMVHEQLKTFFNGFRRDAHPMAVMCGVVGALSAFYHDSLDINNPQHREISAVRLVAKMPTLAAMVYKYSMGQPMMYPRNDLSYAENFLHMMFNTPCEIKPISPVLAKAMDKIFILHADHEQNASTSTVRMAGSSGANPFACIAAGIAALWGPAHGGANEAVLTMLDEIGDVSNIDTFIAKAKDKNDPFKLMGFGHRVYKNRDPRATVMKQTCDEVLKELGIKNDPQLELAMRLEEIALTDPYFIERSLYPNVDFYSGIILKAIGIPTSMFTVIFALARTVGWISHWKEMLSSPYKIGRPRQLYTGNVQRDIIALKDRK

SEQ ID NO: 6699 - protein, 479 aa, Saccharomyces bayanus
MSAILSTTSKNFLSRNPARQCQSAQKALFALLSSRHYSSATEQTLKERFAEIIPAKAEEIKKFKKEHGKTVIGEVLLEQAYGGMRGIKGLVWEGSVLDPDEGIRFRGRTIPEIQRELPKAEGSTEPLPEALFWLLLTGEIPTDAQVKALSADLAARSEIPEHVVQLLDSLPKDLHPMAQFSIAVTALESESKFAKAYAQGVSKKEYWSYTFEDSLDLLGKLPVIASKIYRNVFKDGKITTVDPNADYGKNLAQLLGYENKDFVDLMRLYLTIHSDHEGGNVSAHTTHLVGSALSSPYLSLAAGLNGLAGPLHGRANQEVLEWLFKLREEVKGDYSKETIEKYLWETLNSGRVVPGYGHAVLRKTDPRYMAQREFALKHFPDYELFKLVSTIYDVAPGVLTKHGKTKNPWPNVDSHSGVLLQYYGLTEASFYTVLFGVARAIGVLPQLIIDRAVGAPIERPKSFSTEKYKELVKKIESKN

SEQ ID NO: 6700 - protein, 308 aa, Aspergillus nidulans FGSC A4
MTRTHPSSFQQLEKLGEGTYATVYKGRNCQTGEMVALKEIHLDSEEGTPSTAIREISLMKELHHDNILSLYDVVHTENKLMLVFEYMDQDLKKYMDTHGNHGQLEPAIVKSFAFQLLRGIAFCHDNRILHRDLKPQNLLINSKGQLKLADFGLARAFGIPVNTFSNEVVTLWYRAPDVLLGSRTYNTTIDIWSIGCIIAEMFTGRALFPGTTNEDQLQKIFRVMGTPSERTWPGVSQFPEYKSDFPVYPPQDLRQVVPRIDPYGLDLLRCMLRLQPDLRISAVDALRHPWFNDPVSDLPIDHGMEALT

SEQ ID NO: 6701 - protein, 204 aa, Paracoccidioides brasiliensis
MAQQQLQQLQTENVMRRKLVIIGDGACGKTSLLSVFTLGYFPTHYVPTVFENYVTDCRVDGRSVQLALWDTAGQEDYERLRPLAYSKAHVLLIAFAVDTPDSLENVRNKWIEEANERCPDVPIILVGLKKDLREDPLAIEEMRKKSLRFVSSKEGHDTAAQVGARKYLECSSLTGEGVDDVFEAATRAALLTFEKDRGSCCVIL

SEQ ID NO: 6702 - protein, 114 aa, Lycopersicon esculentum
MEMFGKIACFVVFCMVVVAPHAESLSCGEVTSGLAPCLPYLEGRGPLGGCCGGVKGLLGAAKTPEDRKTACTCLKSAANSIKGIDTGKAAGLPGVCGVNIPYKISPSTDCSTVQ

SEQ ID NO: 6703 - protein, 294 aa, Saccharomyces bayanus
MTVPYLNSGRNVASYLQTHSHQEKTLKERFSEIYPSHAQDVKQFVKEHGKTKISDVLLEQVYGGMRGVPGSVWEGSELDAEEGIRFRGRTIADIQKELPKAKGSSQPLPEALFWLLLTGEVPTQAQVENLSADLMSRSELPHHVVQLLDNLPKDLHPMAQLSIAVTALESESKFAKAYAQGISKQDYWSYTFEDSLDLLGKLPVIAAKIYRNVFKDGKIGEVDPNADYGKNLVNLIGSKDEDFVDLMRLYLTIHSDHEGGNVSAHTSHLVGSALSSPYLSLASGLNGLAGPLHG

SEQ ID NO: 6704 - protein, 286 aa, Listeria monocytogenes str. 4b H7858
MILPGNETIPYIGLGVFQVTEQEFIAGAVEKAIEVGYRLFDTAAVYNNEAIVGQAIASSAVSREELFISSKVWNGDLGFDETLFAFERTLRNLKLDYLDLYLIHWPVAGKYRDSWRAMERLHDEKLIKSIGVANFKQHHLSDLLVAANEKPVLNQVETHPLLPQNDLRKYLAEQNIAHAAWSPLAKGILMQNPVITEIAKKHQASVDQVILQWHLNRNTIIFPKSITSSRIEENSRLSYFQLDAIDMEKIDRLETGKRVGPDPDDLEYFLSSIERERAYLSGENAE

SEQ ID NO: 6705 - protein, 491 aa, Zea mays
  misc_feature (377)..(377): Xaa can be any naturally occurring amino acid
MAREQLEESIVADGNGKEEEVGVMGIGAADGADDQHGGGKLSMKSLLWHGGSVWDAWFSCASNQVAQVLLTLPYSFSQLGMLSGVLLQIFYGFLGSWTAYLISVLYVEYRSRKEKEGVSFKNHVIQWFEVLDGLLGPYWKAAGLAFNCTFLLFGSVIQLIACASNIYYINDRLDKRTWTYIFGACCATTVFIPSFHNYRIWSFLGLGMTTYTAWYLAIAALLNGQAEGVAHSGPTKLVLYFTGATNILYTFGGHAVTVEIMHAMWKPAKFKYIYLLATLYVFTLTLPSSAAMYWAFGDELLTHSNAFSLLPKTRWRDAAVILMLIHQFITFGFACTPLYFVWEKVIGMHDAKSIFKRALARLPIVVPIWFLAIIFPXFFGPINSAVGALLVSFTVYIIPALAHVLTYRTASARMNAAEKPPFFLPSWTGMFVLNMFIVVWVLVVGFGLGGWASMVNFVRQIDTFGLFAKCYQCPKPPVPAAAQSPAPLPHH

SEQ ID NO: 6706 - protein, 204 aa, Ustilago maydis 521
MASHQEEVSLSEPGTSELHHAQSTDAAGVEPTSTDTTADVTAMTDEDAEIEAMKQRVAEMEAEAAKLRELQQAAGEAGGAGLHPTEEEREEVDSRSIYVGNVDYGATPEEVQQHFQSCGTINRVTILCDKFTGHPKGFAYVEFAEPSLVANAMVLNESLFRGRLIKVTAKRTNMPGLSARGRGRGRGRGRPFRGRGRGRGRGYY

SEQ ID NO: 6707 - protein, 283 aa, Listeria monocytogenes EGD-e
MKTVKLNNGVEVPILGFGTYQITDAAEAEHAVKDAIKAGYRHIDTAQSYMNEEAVGRGIAASGVDRKELFITTKIWVENVSYKGVMSSFDRSLKRLGLDYVDLLLIHQPFNDVYGAWIAMEELQASGKIRAIGVSNFSPDRVIDLAAFNEVTPQVNQIEVNPFQQQTANLAILRKEGVAIEAWAPFAEGKNDIFNNPVLTKIGAKYGKSAAQVILRWLVEQDIIVLAKSVKPERMAQNLAIFDFELTEADKEEIAGLDQGESQFFSHADPEMVKWMASRKLNV

SEQ ID NO: 6708 - protein, 158 aa, Staphylococcus aureus subsp. aureus MRSA252
METIYDFVVETNKGVTYKLDAYKGDVMLIVNTASECGFTSQFEGLQSLYEKYKDQGFVILGFPCNQFGGQEPGSGEEAAQNCKLNYGVTFPMHQKIDVKGEHQLPLFRYLTAAQHGFFNEKIKWNFTKFLVDREGNVVKRFAPQKKPVQIEREIEKLL

SEQ ID NO: 6709 - protein, 422 aa, Streptococcus pyogenes SSI-1
MILIKNGRVMDPKSQRDQVADVLIDGKQIVKIASAIECQEAQVIDASGLIVAPGLVDIHVHFREPGQTHKEDIHTGALAAAAGGVTTVVMMANTNPVISDVETLQEVLASAAKEKIHIYTNASVTQAFNGKDVTDFKALLEAGAVSFSDDGIPLESSKVLKEAFDLANANQTFISLHEEDPQLNGVLGFNEGIAEEHFHFCGATGVAEYSMIARDVMIAYDRQAHVHIQHLSKAESVQVVAFAQQLGAKVTAEVSPQHFSTTEDLLLTAGTSAKMNPPLRTQRDRLAVIEGLKSGVITVIATDHAPHHKDEKAVDDMTKAPSGMTGLETSLSLGLTHLVEPGHLTLMSLLEKMTLNPALLYGFDAGYLAENGPADLVIFADKQERLITENFASKASNSPFIGNKLKGVVKYTIADGEVVYPN

SEQ ID NO: 6710 - protein, 174 aa, Lactuca sativa
MASISSSAIATVNRTTSTQASLAAPFTGLKSNVAFPVTKKANNDFSSLPSNGGRVQCMKVWPPIGLKKYETLSCLPPLSDEALSKEIDYLIRNKWIPCLEFELEHGFVYREHHHSPGYYDGRYWTMWKLPMFGCTDSAQVMKEVGECKKEYAGTEFAKGSLKVKLLKWPRSPLQ

SEQ ID NO: 6711 - protein, 159 aa, Triticum aestivum
  misc_feature (17)..(17): Xaa can be any naturally occurring amino acid
  misc_feature (92)..(92): Xaa can be any naturally occurring amino acid
  misc_feature (106)..(106): Xaa can be any naturally occurring amino acid
  misc_feature (140)..(140): Xaa can be any naturally occurring amino acid
  misc_feature (146)..(147): Xaa can be any naturally occurring amino acid
MSDSEDHHFESKADAGXASKTYPMQAGRHPGRAASSVIKNRPCKVVEVSTSKTGKHGHAKCHFVALDIFNGKKLEDIVPSSHNCDVPHVDRXTEYQLIDISEDGFXVSLLTDNGNTKDDLKSQLDDAILTNSRMVAEGKXSTDIMXXGEEKFGIKDSAK

SEQ ID NO: 6712 - protein, 445 aa, Pisum sativum
GGFSVVRKGTRKSNNDDEKSQSQSKSQSQSQVAIKTLRRLGTSNNLPRKKDGGENSTETMMKFPTMRQVSVSDALLTNEILVMRRIVENVSPHPNVIDLYDVYEDTNGVHLVLELCSGGELFDRIVAQDKYSETEASTVVHQIVAGLEAIHRANIIHRDLKPENCLFLDVGKDSSLKIMDFGLSSVEEFTDPVVGLFGSIDYVSPEALSQGKITTKSDMWSLGVILYILLSGYPPFIAQNNRQKQQMILNGNFSFYEKTWKGISQSAKNLISSLLTVDPAKRPSAQELLSDPWVKGEKAKDDQMDPEIVSRLQRFNARRKLRAAAIASVWSSTIFLRTKKLKSLVGSYDLKEDEIENLRMHFKKICADRDNATLCEFEEVLKAMKMPSLIPFAARIFDLFDNNRDGTVDMREILCGFSSLKNSKGEDALRLCFQMYDTDRSGCIT

SEQ ID NO: 6713 - protein, 273 aa, Triticum aestivum
HSITSLYKKAGWYRSGIPGISSTHASGDEYLAAVAKAKRKLRGFIAEKNCAPLMLRLAWHSAGTFDVATKTGGPFGTMKCPAELAHGANAGLDIAVRLLEPIKEQFPILSYADFYQLAGVVAVEVTGGPEVPFHPGRQDKPEPPPEGRLPDATQGSDHLRQVFSTQMGLSDQDIVALSGGHTLGRCHKERSGFEGAWTANPLIFDNSYFTELLSGEKEGLLQLPTDKTLLTDPAFRPLVDKYAADEDAFFADYAEAHLKLSELGFGEAVEGCC

SEQ ID NO: 6714 - protein, 276 aa, Thermosynechococcus elongatus BP-1
MSGEGMTAVSEPVQLTVPQMLAQLQGTDTSLRYYAAWWLGKFGLETATAAERQAIVSALIAALADEADRTELGGYPLRRNAARALGKLGDRQAVPALIECLRCEDFYVREAAAIALGQLGDPRAIAPLQSLLEGGVAMARLVPGRPHLVQPVEAVIESLGHLGATEAIALIEPFLAHEMPRVQFAAARALFQLTGDAVYGDRLLAALNSEDVQLRRTALLDLGAMGYLPAAEAILQAGVEASFKLIALHGILGQQLRQAAPAEQTLSLFQGLDQLL

SEQ ID NO: 6715 - protein, 329 aa, Ralstonia eutropha JMP134
MKTRTMSVPLDPELAAIVAAMREARAPAPFSGSPEHARERMRSAILAARARTPLPEVGAIEDGIAVHDGQRVPVRVYRPRTASAMLATVVFFHGGGFVLGSVELMDDIARKLCRDLDAVVVSVDYRLAPEHPFPAAHDDALAATSWAIRNVSALGGNPARIAVAGESAGANLAASTALLLRDQGETLAAQLLIVPGVDLARDTQKLEAARGEFPMLSPTDLRDISRLYMGERAALAGRFPPSPMHAVNVHRLPPAVVAVAGHDPLCEEGTRYAARLEAAGVPVCLLRFDDMFHPFFGFFEASASARRANNAICHTFKSWLHQHASPTST

SEQ ID NO: 6716 - protein, 500 aa, Amaranthus hypochondriacus
MAIRVPSRQLFIDGEWREPIKKNRIPIINPSTEEIIGVIPAATAEDVELAVAAARRALKRNKGEDWASASGAHRAKYLRAIAAKITEKKDYFAKLEAMDCGKPLDEAAWDIDDVAGCFEYYADQAEALDAKQKAPIALPMDTFKCHVLKQPIGVVGLISPWNYPLLMATWKVAPALAAGCSAVLKPSELASVTCLELAEVCREVGLPPGVLNILTGLGPEAGGPLACHPDVDKVAFTGSTATGSKVMSSAAQLVKPVTLELGGKSPIVIFEDVDLDKAAEWTAFGCFWTNGQICSATSRLLVHESIAAEFLDRLVKWCKNIKISDPFEEGCRLGPVVSKSQYEKVLKFISTAKSEGATILCGGSRPEHLKKGYYVEPTIISDVSTSMQIWREEVFGPVLCVKTFGSEDEAIELANDTQYGLGAAVLSKDLDRCERITKALQAGIVWVNCSQPCFCQAPWGGTKRSGFGRELGEWGIENYLNIKQVTEYISDEPWGWYKSP

SEQ ID NO: 6717 - protein, 304 aa, Zea mays
MAFLNMEQQTWAFTFGILGNIVSLMVFLSPLPTFYRVYRNKSTEGFQSTPYVVTLFSCMLWILYALLKPGAELLVTINGVGCVVETVYLAMYLVYAPKAARVLAAKMLLGLNVAVFGLVALVTMLLSDAGLRVHVLGWICVSVSLSVFAAPLSIMRQVIRTKSVEFMPISLSFFLVLSAVVWFAYGALKKDVFVAFPNVLGFVFGLAQMALYMAYRKPAAALVIIPEQSKEEVAEGKASCGGAEVHPIDIAEVHDLQTVVVDVDVEPVTYAAASGMVDGSVGRPRAPEQLVIKPDMVTVIAAEA

SEQ ID NO: 6718 - protein, 85 aa, Glycine max
TRPCEKTTEGDIKHLMKFCNSLHGGLNKLAELLEVERVGVCHQAGSDSLLTSCTFRKLRDTFFSGSTEKYAGVLYGLGVESGQTN

SEQ ID NO: 6719 - protein, 511 aa, Agrobacterium tumefaciens str. C58
MDMDAMTKLDVKQEAAALLDKMGVARDLYTGGDMASFSPVTGEQIASLRTVSVEGVAAVVDKADAAFRTWRNVPAPRRGELIRLLGEELRAFKTDLGRLVSLEAGKIPSEGLGEVQEMIDICDFAVGLSRQLYGLTIATERPGHRMMETWHPLGVVGVISAFNFPVAVWSWNAALALVCGNSVVWKPSEKTPLTALAVQGIFERAAARFGDAPEGLSQLLIGDRAVGEAMVDYPKVPLVSATGSTRMGRDVGPRLAKRFARAILELGGNNAGIVCPSADLDMALRAIAFGAMGTAGQRCTTLRRLFVHDSVYEELVPRLKKAYASVSVGNPLESSALVGPLVDKAAFDGMQKAIEAAKAAGGVVHGGDRVDTGAADAYYVKPALVEMPKQVGPVLEETFAPILYVMKYSDLDQAIDAHNAVAAGLSSSIFTRDIQESERFLSSEGSDCGIANVNIGTSGAEIGGAFGGEKETGGGRESGSDSWKAYMRRATNTINYSKALPLAQGVSFDIE

SEQ ID NO: 6720 - protein, 189 aa, Desulfovibrio desulfuricans G20
MMVSKLNPWNWFKKESEQEKTLPVKQTERGAREYASPLDHFHAEFDRMVDSMFSGFGMPSPRRLFDAASPMLGKSVIKPKVDIYGTDKEYVVEVDLPGIEEKDLSVELKDDVLILSAEKKHEEKTEEKGYYRVERSYGSFRRVLNVPDDADKEGINAKLNKGVLRITMPRNKAIETESRKIAIESSKED

SEQ ID NO: 6721 - protein, 366 aa, Cupriavidus necator
MTAMMKAAVFVEPGRIELADKPIPDIGPNDALVRITTTTICGTDVHILKGEYPVAKGLTVGHEPVGIIEKLGSAVTGYREGQRVIAGAICPNFNSYAAQDGVASQDGSYLMASGQCGCHGYKATAGWRFGNMIDGTQAEYVLVPDAQANLTPIPDGLTDEQVLMCPDIMSTGFKGAENANIRIGHTVAVFAQGPIGLCATAGARLCGATTIIAIDGNDHRLEIARKMGADVVLNFRNCDVVDEVMKLTGGRGVDASIEALGTQATFEQSLRVLKPGGTLSSLGVYSSDLTIPLSAFAAGLGDHKINTALCPGGKERMRRLINVIESGRVDLGALVTHQYRLDDIVAAYDLFANQRDGVLKIAIKPH

SEQ ID NO: 6722 - protein, 255 aa, Glycine max
EKQWQRSGIILSVSIGVLQSDLLAFNPTLPRWKLDAIEKCDVMVYTKIFLKFPYKFWPSGPDKEFFIYAHERRGYYTFWQHMENAYPGSNMLVVTLTNEESKRVEAQADEETLREAMAVLRDMFGPNIPNAIDILVPRWWNNRFQRGSYSNYPIISNHKLFHNIKAPVGRIFFTGEHTSERFNGYVHGGYLAGIDTSKALLEEMRKEKESQTLLLEPLLASLTMSKPETVSNIHKCDIPTQLYLSGKLGVPEAIL

SEQ ID NO: 6723 - protein, 318 aa, Pseudomonas putida KT2440
MSLNPDLAAYLQLVEAGRSAGKVLPMHALAADEARRQFEESSALIAGKADEPDCISDLSLTTRDGHTLPVRLYRPPQADPALAGAALLYLHGGGYVVGSLDSHDTLCWNLAQDAGVPVIAVGYRLAPQWRFPTASDDALDAWRWLVEQAEALGIDAQRLAVVGDSVGGSLATILANQLAAQRELPAPRLQVMIYPVTDASCRRPSVQRYGSGYLLEAQTLEWFYQQYATVPADRHDPRFSPLLGSVASNSAPALMLIAECDPLHDQGVAYARHLEQAGVAVQLAVIPGVTHDFMRMGSIIEEADEGLAMVVEALQQHL

SEQ ID NO: 6724 - protein, 170 aa, Arabidopsis thaliana
MNSSSNGMMNGSILSQQQHRTFIQMGTILKCVDNSCAKEVMCIQSLRGKKGARLGDIIVGSVKEANPIVQKKVKKDAVPKGKVKKGMVVYGVVVRAAMPKGRADGSQVKFDDNAIVVVGIKEKKGQNNSHGSKRKMEYNQPTGTRVFGPVPHEMRLRKQLKILSLAQHIV

SEQ ID NO: 6725 - protein, 231 aa, Triticum aestivum
MGERVKGTVKWFNVTKGFGFISPDDGGEDLFVHQSAIKSDGYRSLNENDAVEFEIITGDDGRTKASDVTAPGGGALSGGSRPGEGGGDRGGRGGYGGGGGGYGGGGGGYGGGGGGYGGGGGGYGGGGYGGGGGGGRGCYKCGEDGHISRDCPQGGGGGGGYGGGGYGGGGGGGRECYKCGEEGHISRDCPQGGGGGGYGGGGGRGGGGGGGGCFSCGESGHFSRECPNKAH

SEQ ID NO: 6726 - protein, 277 aa, Bacillus cereus ATCC 14579
MILTNLKDYTTLHNGVKMPWFGLGVFKVEDGSEVIDSVKAAIKNGYRSIDTAAIYQNEEGVGQAIRESGVSREELFITSKVWNSDQGYETTLQAFETTLEKLGLEYLDLYLVHWPVKGKYTESWKALETLYKDGRVRAIGVSNFHIHHLQDVFEIAEIKPMVNQVEYHPRLAQEELHAFCKEHNIQLEAWSPLMQGQLLDNPTLQEIATKYNKSTAQIILRWDLQNEVVTIPKSIKEHRIIENANIFDFELSADDMKAIQALNEDRRVGPDPDNFNF

SEQ ID NO: 6727 - protein, 194 aa, uncultured crenarchaeote
MDSRGYYAILGVSQSANFQEIKKSYRKLAKKYHPDKNKSPLAEETIKKINQAFEILSDRRKRKQYDLEASNIYDANDSTYEEKEENLSDQMQRNSYNFAKPESTSNLGFDNLLLDTIKSRFHILIEPSLCLAFGGCETIAPKVFVVDKSKHINPKARVQSETADTLDRIVLAAQACPTKAIKIIDRYTGNQIYP

SEQ ID NO: 6728 - protein, 518 aa, Zea mays
MAAITPPTQSEPSPQTGRPASSAAAAAKRGGGGAGAAGGPLMGKYELGRLLGHGTFAKVYHARHVDTGDNVAIKVLDKEKAVKSGLVPHIKREIAVLRRVRHPNIVHLFEVMATKTKIYFVMELVRGGELFSRVSKGRLREDTARRYFQQLVSAVGFCHARGVFHRDLKPENLLVDEQGNLKVSDFGLSAVAEQFRPDGLLHTFCGTPAYVAPEVLGRRGYDGAKADVWSCGVILFVLMAGYLPFHDKNIMAMYKKIYKGEFRCARWFSKDLTSLLMRILHTNPNTRITLPEIMESRWFKKGFKPVKFYIEDDQLHNVIDDEDGLLDMGPAGPVPPPLPPPPPPLPPPKVDGDESGSDSDSSISSCPASMLSDESQRPRGSLPRPASLNAFDIISFSRGFNLSGLFEEKGDEVRFISAEPMSDIITKLEDIAKLKSFKLRRKDWRICLEGTREGVKGPLTIGAEIFELTPPLVMVEVKKKAGDNEEYENFCDKELKPGMQHLVHHMVRAPSMLLTDAK

SEQ ID NO: 6729 - protein, 385 aa, Aspergillus fumigatus
MISARNFVAPARQCLRTTRVSSGFASHLSQLRGYASAADDRVAKFKGQKGPDGKYTVTLIEGDGIGPEIAQSVKDIFAAAKAPIKWEPVDVTPILKDGKTTIPEEAIKSVQKNYVALKGPLATPVGKGHVSLNLTLRRTFNLFANLRPCRSVAGYKTPYDNVDTVLIRENTEGEYSGIEHVVVDGVVQSIKLITREASERVLRFAFQYARSVNKKKVRVVHKATIMKMSDGLFLNTAREIAKEFPDIEFDAELLDNSCLKIVTDPTPYNDKVLVMPNLYGDILSDMCAGLIGGLGLTPSGNIGDECSIFEAVHGSAPDIAGKGLANPTALLLSSIMMLQHMGLHEHAARIQKATFDTLAEGKTLTGDLGGKAKTHEYAEAICKRL

SEQ ID NO: 6730 - protein, 363 aa, Pseudomonas aeruginosa UCBPP-PA14
MNSSPQANAAMRAAVWHGRHDIRVEDVPLPAEPPPGWVQIRVHWCGICGSDLHEYLAGPVFIPVEAPHPLTGLKDQCILGHEFSGEIVRLGNGVTGFALGQAVAADACQHCGTCYYCRHGLYNICENLAFTGLMNNGAFAEYVNVPANLLYALPAGFPSEAGALIEPLAVGMHAVKKAGSLLGQNVVVVGAGTIGLCTIMCARAAGAAQVIALEMSSARKAKALEVGASQVLDPSRCDALGEIRALTGGLGADVSFECIGNKHTAKLAIDAIRKAGKCVLVGIFEEPSEFNFFELVSTEKQLLGALAYNGEFADVIAFIADGRLDIAPLVTGRIGLEEIVERGFEELVNNKEHNVKIIVSPGG

SEQ ID NO: 6731 - protein, 180 aa, Triticum aestivum
MAGVGRNMVAPLLVLNLIMYLIVIGFASWNLNHFINGLTNRPGVGGNGATFYFLVFAILAGVVGAASKLAGVHHVRTWRGDSLATSASSSLVAWAITALAFGLACKEIHIGGYRGWRLRVLEAFVIILAFTQLLYVLALHSGLFGNQFGNHAGGYGAEHGGYGAGDPHNKGMGTGGVARV

SEQ ID NO: 6732 - protein, 284 aa, Glycine max
MTRLCSCRYYLKDAVLEGGIPFNKAYGMTAFEYHGTDPRFNKVFNKGMADHSTITMKKILETYTGFEGLKSLVDVGGGTGAVVNMIVSKYPTIKGINFDLPHVIEDAPSYPGVEHVGGDMFVSVPKADAIFMKWICHDWSDEHCLKFLKNCYEALPDNGKVIVAECILPVAPDSSLATKGVVHIDVIMLAHNPGGKERTEKEFEALAKGSGFQVKRVWSTPMRSFWHIIHQGKRVQRKSLRLFPKGKDSKVSELFAVLSTPPSWNFSKKFKFFGMNSCQAAFGF

SEQ ID NO: 6733 - protein, 293 aa, Methanocaldococcus jannaschii DSM 2661
MNQNNDFKCHIWFTEYHNNNVALSVRVKDILYREKSGFQEIEIIDTYDFGKALILDNTFQTTERDEFIYHELISHIPLFTHPNPRNVLVIGGGDGGTVREVVKHKSVETVDFVELDEKVIEACKKYMPKLSCEIDNEKVNLIITDGIKYVAETEKKYDVIIVDCPDPVGPAKGLFEKEFYKNVFKCLNDDGIMVQQSESPLYNLDLIQNICRYLKDAGFKIIMPYTYPMPTYPSGFWSFTLASKKYNPLEVDEARIKEALKDMETKYYDEEVHKGIFLAAPKFLKDAVKKALE

SEQ ID NO: 6734 - protein, 117 aa, Zea mays
  misc_feature (110)..(110): Xaa can be any naturally occurring amino acid
MATVDLEKLRMSGAGKAIGVLTSGGDAQGMNAAVRAVTRMGIYVGAKVFLIYEGYEGLVEGGENIKPANWLSGSDIMQLGGTIIGSARCKAFTTREGRLAAGYTLLRRGXTNLCVIG

SEQ ID NO: 6735 - protein, 289 aa, Neurospora crassa
MPETVTDMLSRRVKLSNGLSIPQIQLGLYMMSGPETTRAVRWALGAGYRGFDSAQWYYNEREAGQAILSFLSSPENTAGLTRKDVHFTSKLRDNSTNYDAVRASISKSVKASGLGYIDLFLLHSPLGGREARLTSWKAVEDAVLAGEVKMAGVSNYGVKHLDEVMSAPFKIKPLVNQIECHPFNTQPEIRAACEKYGIVIEAYAPLARGMRMKHPVLTAVAKKYGVTPAQVLVRWSVQHGFVTLPKSTKKERLVENADVGRFELAEEDMEKLDGLDEKLVTDWDPTDAD

SEQ ID NO: 6736 - protein, 304 aa, Kluyveromyces lactis
MVAPSQFKQLEKVGNGTYATVYKGLNKTTGVYVALKEVKLDSEEGTPSTAIREISLMKELKHDNIVRLFDVIHTENKLTLVFEFMDNDLKKFMDNRNKGNPHKGLEMDLVKYFQWQLLQGVAFCHENRILHRDLKPQNLLINNRGQLKLGDFGLARAFGIPVNTFSSEVVTLWYRAPDVLMGSRNYCTLIDIWSCGCILAEMIMGKPLFPGSNDEEQLKLIFDTMGTPVEQTWPQVTQLAKYNPLLPPHMPRDLKQLLQNNTEEVLDDNVVDLLHGLLQLNPDARLSAKDALNHPWFAEYNHAN

SEQ ID NO: 6737 - protein, 447 aa, Sinorhizobium meliloti 1021
MTHLLHRAIHAKLPVAVRGEGIRLFDAEGRAYIDASGGAAVSCLGHAHPDVLAALHAQLDRIAYAHTGFFTTEAAERLADRLVADAPDGLDHVYLVSGGSEAVEAALKMARQYFVEKGEPQRRHIIARRQSYHGNTLGALAAGGNEWRRAQFRPLLVETHHIDPCFAYRLQQAGESDTDYAARAAGQLEAKILELGADQVIAFVAETVVGATAGAVPPVADYLKRVRAICDKYGVLLILDEVMCGMGRTGTLHACEQDGVVPDLMTIAKGLGGGYQPVGAVLLSSAIFQAFSEGSGFFQHGHTYMGHPMAAAAGLAVQEVIRRDGLLENVVSMGDYLERCLVERLGNHHHVGDIRGRGLFRAVELVADRATKSPFDPGLKLNARIKKEAMARGLMVYPMGGTIDGQRGDHVLLAPPFILNREDVGQIVERLGDAVDAAIASLTKAAG

SEQ ID NO: 6738 - protein, 249 aa, Triticum aestivum
  misc_feature (78)..(78): Xaa can be any naturally occurring amino acid
RRRRGRRCHAQHPAGHQGAHGADQGGNDLKRIRFSRERFNKWQAQRWWAENYDKVMELYNVQRFNHQSVPLPTTPKSXDESSKEDSPVTPPLDKERVPRSLQRPTSGGGAMGYSSSDSLEHHSNHYCNGLHPHHGHQCYDSVGLASTPKLSSISGAKTETSSMDASMRTSSSPEEVDRSGELSVSISNASDQEREWVEEDQPGVYITIRALPGGIRELRRVRFSREKFSEMHARLWWEENRARIHEQYL

SEQ ID NO: 6739 - protein, 313 aa, Glycine max
MSTFMLKIFLLISIFQISFATRRLNELVQDQTQLLRYHNGPLLSGKISINLIWYGHFKPSQKAIVSDFITSLSPSSPHSTQPSVATWWKTTEKYYHHLSNTKKTSPLSIPLNKQILDENYSLGKSLTSKHLIQLASKGDHKNAINVVLTSADVAVEGFCTSRCGTHGSSSAGHAKNKNYKFAYIWVGNSEAQCPGQCAWPFHQPIYGPQSPPLVAPNNDVGIDGMVINLASLLAGTVTNPFGNGFYQGPAEAPLEAATACPGVYGKGAYPGYAGNLNVDSSTGASYNAHGANGRKYLLPALYDPATSSCSTLV

SEQ ID NO: 6740 - protein, 481 aa, Ralstonia eutropha JMP134
MNVFLNHIDGEWTACQSGRTFDNVNPADTGDIVGRFQASSAVDAQAAVAAAAAAFAGWKKTPVGKRAAVLNRAADHLEANADSIAAELTREEGKALTLARDEVLRSAQTLRFYAVEGQTFTGEVFPNDDPDQLVFSQREPLGVVTVIAPWNFPVSIPARKIAPALVTGNTVVFKPSSEAPLSGYRLAEALIKAGLPKGVLNFITGSAAEIGAAITEAPVVRAISFTGSSRAGEQIHRAVPLTTRTQMELGGKNPLIVMEDADLDRAVDLTIKGGFSLSGQACTGTSRVLVAESVKAAYTERLLAKVATLKVGSGMTAGMDLGPLASQKQMETVLRYIDIGKSEATLLCGGERLTGGEFDKGYYVAPTVFTDVTQQMRIAREEIFGPVIAILGFTDYADAIAKANDTEYGLAAAIVTSNPRYIHHFANDIEAGTVKINRTTTGNLVNAPFGGLKRSSTSTFRESGRTGLEFYTQIKTVYRGA

SEQ ID NO: 6741 - protein, 118 aa, Brassica napus
MVTGVKKVAKRGLIGGMSFAKEAGAINWFPGHMAAATRAIRSRLKLSDLVIEVRDARIPLSSANEDLQPQLSAKRRIIALNKKDLANPNVLNKWTHHFESKKQDCVAINAHSRSSVKK

SEQ ID NO: 6742 - protein, 376 aa, Populus tremula x Populus tremuloides
MASMYNPETSAVQDQQQNPTLLYDALYCSEENWVEEVREDWFQDELEGESYCSNNSNKLNTFPILLEQDLSWEDEELSSLFAKEEQNQLCKDLETNPSLARARCEAVEWILKVNEHYSFTALTAVLAVNYLDRFLFSVHLQKEKPWMAQLAAVSCLSLAAKVEETQVPLLLDFQVEDSKYVFEAKTIQRMEILVLSTLKWKMNPVTPISFLDYITRRLGLEHYLCLEFLKRCERMVLSILADSRSMPYVPSVMAAATMLYVIDNIEPSLAAEYQSQLLSILGIDKDKVEDCSKFLMEFALRDHFKLLSNKRKFCSLPGSPSGVVDVSFSSDSSNDSWSVASSVSSSPKPLSKKSRALQSLNNATTSDFSQHSSPVP

SEQ ID NO: 6743 - protein, 174 aa, Ustilago maydis 521
MSIVHLQSVEILNAEASFKDPYVFKITFECISPLQDDLEWRLVYVGSAGDEKYDQELDTCMVGPVPVGVNSFEFEAAAPSPSKIPPEDLLGVTVILLTASYRDQEFIRVGYYVNNAYESEELRENPPEKVDLTQVRREVLVSKPRVTRFNIKWDDSATASASTQQQGSAEGLTA

SEQ ID NO: 6744 - protein, 505 aa, Neurospora crassa
MGIIHEKAHYVVAVALVAFLIRAFVLSQWNTIKRNGERLKKPPNTLPLVGNGLQFLQSRWKLFSWFDACQRKFGYETVAISVPTLPPGVLIHDPRNLDYVFKNEGIFTKGNFVKGRTWDLFGNGIINAEGDFWKTQRKAGLSFLNTANLRVLTDVALPQYLSESISQLRSSTNGTVVDLQHMAMHADDEFTVSFDYASGGTAERFQNPLWFVTEIFLGAELRKSIAVVKNFGRHIVTKAVQDRQEKEFGEEEGKLDQISGSLIQSLLDAIQDEQMVADAALTYLSAGRDTTGQALTWTFYLLMRHPRVVAKIREEATQLLKEKNVTLTPDQFDSSLFNPVTMPYSMAVFYEVLRLYPPIPFEIRQCNEDVTLPDGTFLPKSSILVWCLWAMQRSKLTWGDDADEFRPERFLDGNKLISRSPSEFPVFYGGPRTCLGRKMAEAIAAQVIPTMACLFDFVPTSDEERTSKTSLTLPMEGGLPVTVKTLTGEEREKLVRIPEIRFSEH

SEQ ID NO: 6745 - protein, 177 aa, Zea mays
  misc_feature (33)..(33): Xaa can be any naturally occurring amino acid
  misc_feature (73)..(73): Xaa can be any naturally occurring amino acid
VHASRRAGVGPETGVLVVGAAPIGVVSLLAARXFGAPRVVVVNVKEHRLPVARSLGANAAVRVSPRAKALANXVKRIGAAMGWDIEVSLDCAGLTKPMSRALKPTGPAGKLCLVGLAPTKLPWPLRRRRARKLNVVGCSGQDPWPCDHFCQGKWTQALITPVRLSQRDVEEASRSAP

SEQ ID NO: 6746 - protein, 258 aa, Glycine max
MAINHETWAFIFGLLGNVISFMVFLAPLPTFYQIYKKKSTDGFQSLPYIVALFSSMLWIYYALVKKDASLLLITINSFGCVIETIYLAIFLIYAPSKTRLWTIKLLLMLNVFGFGAMLLSTLYLTTGSKRLSVIGWICLVLNISVFAAPLCIMKRVIKTKSVEFMPFSLSFFLTINAVMWFFYGLLLKDYYIALPNTLGFLFGIIQMVLYLIYRNAKPQGLEEPTKVQELNGHIIDVVKPNHVTKNGPVPVIETASNV

SEQ ID NO: 6747 - protein, 106 aa, Glycine max
MELGSYSDQSKSTFSLVDEDHTFANSVRFTLNQDPRVTFCGYSIPHPSDNRVNIRVQTTGDPAREVLKDGCQDLMLMCQHVRSTFDNAMTDFKRTQTNTEQEMDTK

SEQ ID NO: 6748 - protein, 142 aa, Triticum aestivum
  misc_feature (100)..(100): Xaa can be any naturally occurring amino acid
  misc_feature (107)..(107): Xaa can be any naturally occurring amino acid
  misc_feature (115)..(115): Xaa can be any naturally occurring amino acid
MAPAVMASSATTVAPFQGLKSTAGLPVSRRSGSAGLSSVSNGGRIRCMQVWPIEGIKKFETLSYLPPLSTEALLKQVDYLIRSKWVPCLEFSKGWLRLPXEHNSSPXYYDGRYWXTMWKLPMFGCNDATQVLSKWRSQRRIP

SEQ ID NO: 6749 - protein, 143 aa, Glycine max
  misc_feature (85)..(85): Xaa can be any naturally occurring amino acid
  misc_feature (93)..(93): Xaa can be any naturally occurring amino acid
  misc_feature (122)..(122): Xaa can be any naturally occurring amino acid
MASSMISSPAVTTVNRAGAGMVAPFTGLKSMAGFPTRKTNNDITSIASNSGRVQCMHVWPPVDKKKFETLSYLPYLDNTQLAKEXEYLLKKEXIPYLEFECKHDFIYHKHNRSPGYYNKHYXTIVKLAIYNYTNTSQILRDLQ

SEQ ID NO: 6750 - protein, 433 aa, Ustilago maydis 521
MVLEATMLVLDNSEWMRNGDYTPTRWEAQADAVSMIFDAKTNSNPESEVGLMTMAGKSPEVLVTLTQDIGKILAALHRSKIVGNSDLTTGINVASLALKHRQNKNQRQRVVVFVGSPVEQTEEDLVKLGKKLKKNNIAVDIISFGEDVENEEKLSKFIEAVNSGDNSHLLSIPAGPQLLSDIILSSPVLQEEGGDSGAGPSGSGGGGNNFEFGVDPSMDPELAMALRLSLEEEQARQRAAEGSSGSQVPSLPTVSEGAENITAATGSAGPAAGLAGSGSMVPKGAESITGEGHNADDESEEAMLQKAIALSQAGEAKTNDEDVDMTSAEPSGGRRAVVAGQVEGEEDEEMDEDEAIARAIQMSLQEGDGQDESNVQIGVQSAYSRLDPMRLLPTSRVNVSWHLYTRAVEQSRRHVTANMAELHERTHLAAAHN

SEQ ID NO: 6751 - protein, 118 aa, Glycine max
LQKNVLISITYVQIQSVDQLLSKLSYIPSTLFLSEVSYVEFLDRVHVSENKLRAQGLWEVPHPWLNLLIPRSEIHDFAEEVFGNILKDTSNGPILIYPVNQTRCVLYMDTTTQTNEFN

SEQ ID NO: 6752 - protein, 300 aa, Aspergillus fumigatus
MPFHKLVKNSAYYSRYQTKYRRRREGKTDYYARKRLITQAKNKYNAPKYRLVVRFTNRDIITQIVYSEITGDKVFASAYSHELKRYGITQGLTNWAAAYATGLLLARRTLKKLGLDEQFTGVEEPDGEYKLTEAVETDDGTRRPFKAFLDVGLVRTSTGARVFGAMKGASDGGIFIPHSENRFPGYDIESEELDAETLRNYIFGGHVSEYMETLADDDEERYRSQFAKYIENEIDAGDLEEIYAEAHKAIREDPFKKDEDEKPKKSKEEWKAESKKYKKAKLSREEKKARVEQKIRELAA

SEQ ID NO: 6753 - protein, 66 aa, Glycine max
TYRIDLCFVEKSSQVSDVEFSEAEEILIAMVYNLVGERWSLIAGRIPGRTAEEIEKYWTSRFSTSQ

SEQ ID NO: 6754 - protein, 126 aa, Brassica napus
MARTGTAKNGAGQFFLATLLLWLVSVVFEIAFNLRTELLWVLGGGCFFQLVNCFVRSYLSRDPLFVNTSVSLLHSIITSASVVFILVNQCLAKGVDEMFDHSELVGGSWRWAYQALCFSCGYFAYD

SEQ ID NO: 6755 - protein, 490 aa, Photorhabdus luminescens subsp. laumondii TTO1
MTNNVNTELLRQQAYINGQWVDADNQATFKVTNPANGEVIAHVSNMGAAETERAIAAAQQALPAWRTMTAKQRSQILQRWFQLMMANQPALAELLSREQGKSQTEAMGEIAYGASFIEWFAEEGKRTYGETIPSPLPGRRIVTIKQPIGVVAAITPWNFPNAMITRKVGPALAAGCTVILKPASETPLSALALAALAEQAGIPAGVFNVVTGIDAKAIGGAMTQSPIVRKLSFTGSTRVGKLLMAQSADTVKKLSLELGGNAPFIVFDDANIDAAVQGALIAKFRNSGQTCVCANRILVQETIYDTFAERLAQAVNQLQVGPASDAKSQQGPLINQAAVDKVEEHISDAISHGARILAGGKPHALGGLFFEPTVLADVNKSMLISQEETFGPIAPLFKFRDEAEAIHLANETEFGLAAYFYSRDIGRIYRVAEALESGMVGINEGLISNEAAPFGGIKQSGLGREGSRYGIEDYLEVKYLCFGGIEDTGV

SEQ ID NO: 6756 - protein, 488 aa, Photorhabdus luminescens subsp. laumondii TTO1
MTVISHWINGKNISSKTYFETTNPATGEVLAEVASGGQEEVDQAVAAAKAAFPKWADLPMKERARLMRRLGELIDENVPEIAAMETKDTGLPIHQTQNVLIPRASHNFNFFAEICQQMNGRTYPVDDKMLNYTLVQPVGVCALISPWNVPFMTATWKVAPCLALGNTAVLKMSELSPLTANRLGELALEAGIPAGVLNVVQGYGATAGDALVKHHDVRAVSFTGGTATGRQIMKNAGLKKYSMELGGKSPVLIFEDADIERALDAALFTIFSINGERCTAGSRIFIQQSIYPEFIKRFAERANRLRVGDPQDPTTQIGALISKPHWEKVSGYIRLGIEEGATLLAGGPDKPIDLPAHLKDGHFLRPTVLADVDNRMRVAQEEIFGPVACLLPFKDEAEGLRLANDVEYGLASYLWTQDVSKVLRLARNIEAGMVFVNTQNVRDLRQPFGGVKASGTGREGGEYSFEVFAEMKNVCISMGDHPIPRWGV

SEQ ID NO: 6757 - protein, 490 aa, Escherichia coli
MSRMAEQQLYIHGGYTSATSGRTFETINPANGNVLATVQAAGREDVDRAVKSAQQGQKIWASMTAMERSRILRRAVDILRERNDELAKLETLDTGKAYSETSTVDIVTGADVLEYYAGLIPALEGSQIPLRETSFVYTRREPLGVVAGIGAWNYPIQIALWKSAPALAAGNAMIFKPSEVTPLTALKLAEIYSEAGLPDGVFNVLPGVGAETGQYLTEHPGIAKVSFTGGVRSGKKVMANSAASSLKEVTMELGGKSPLIVFDDADLDLAADIAMMANFFSSGQVCTNGTRVFVPAKCKAAFEQKILARVEPIRAGDVFDPQTNFGPLVSFPHRDNVLRYIAKGKEEGARVLCGGDVLKGDGFDNGAWVAPTVFTDCSDDMTIVREEIFGPVMSILTYESEDEVIRRANDTDYGLAAGIVTADLNRAHRVIHQLEAGICWINTWGESPAEMPVGGYKHSGIGRENGVMTLQSYTQVKSIQVEMAKFQSIF

SEQ ID NO: 6758 - protein, 294 aa, Gibberella zeae PH-1
MSNEEITHPTIVDGWFREISDMWPGHAMTLRVEKVLVHEKSKYQDVLIFKSTDFGNVLVLDNVIQCTERDEFSYQEMIAHLALNSHPNPKKVLVIGGGDGGVLREIVKHDCVEEATLCDIDEAVIRLSKEHLPSMACGFDHPKSKTHVGDGFKFLNDYKNEFDVIITDSSDPDGPAEALFQKSYFQLLHDALREGGVITTQGSESPWLHLPLIARLKKDCGAIFPVAEYAYTTIPTYPSGQIGFMVCSKDPKADVKNPIRSWTKEEEDEKLRYYSSEIHKASFVLPKFAAKALE

SEQ ID NO: 6759 - protein, 276 aa, Bacillus subtilis subsp. subtilis str. 168
MSELWYTEKQTKNFGITMKVNKTLHTEQTEFQHLEMVETEEFGNMLFLDGMVMTSEKDEFVYHEMVAHVPLFTHPNPEHVLVVGGGDGGVIREILKHPSVKKATLVDIDGKVIEYSKKFLPSIAGKLDDPRVDVQVDDGFMHIAKSENQYDVIMVDSTEPVGPAVNLFTKGFYAGIAKALKEDGIFVAQTDNPWFTPELITNVQRDVKEIFPITKLYTANIPTYPSGLWTFTIGSKKYDPLAVEDSRFFDIETKYYTKDIHKAAFVLPKFVSDLIK

SEQ ID NO: 6760 - protein, 481 aa, Thermosynechococcus elongatus BP-1
MKAMSKLKLKRARRQKRPLLNLDWQPNFRWRSPALVACIPLALIIVAVWGVAAQAQDKPLTPEDVQGVLNTIWVLVAAILVIFMNAGFGMLETGFCRQKNAVNILAKNLIVFALATLAYWAIGYSFMFGTEGNAFIGWGGFFLSSEDPATYGLNPFPKGLPISVAFLFQAAFAGTAATIVSGAVAERIKFVDFLIFSLLLTGISYPITGHWVWGGGLLSSIGFLGENVAFKDFAGSTVVHAVGGWSALMGAAFLGPRIGKYAADGTPQALPGHNMGFAMLGCLILWIGWFGFNPGSQLAADEAVPYIAVTTNLAAAAGGVAATITAWLAIGKPDLSMIINGILAGLVSITAGCAGVSYWSAVIIGTIGGVIVVYSVLFFDRIKIDDPVGATSVHLVCGTWGTLAVGLFDKELGLFSGYGVTQLIAQIIGILTIGGFTVLLTSIFWLALKQTLGIRVSEEEEIKGLDIGEHGMEAYSGFLKE

SEQ ID NO: 6761 - protein, 422 aa, Staphylococcus aureus subsp. aureus COL
MTAEKITQGTEGLNVPNEPIIPFIIGDGIGPDIWKAASRVIDAAVEKAYNGEKRIEWKEVLAGQKAFDTTGEWLPQETLDTIKEYLIAVKGPLTTPIGGGIRSLNVALRQELDLFTCLRPVRWFKGVPSPVKRPQDVDMVIFRENTEDIYAGIEFKEGTTEVKKVIDFLQNEMGATNIRFPETSGIGIKPVSKEGTERLVRAAIQYAIDNNRKSVTLVHKGNIMKFTEGSFKQWGYDLALSEFGDQVFTWQQYDEIVENEGRDAANAAQEKAEKEGKIIIKDSIADIFLQQILTRPAEHDVVATMNLNGDYISDALAAQVGGIGIAPGANINYETGHAIFEATHGTAPKYAGLNKVNPSSVILSSVLMLEHLGWQEAADKITDSIEDTIASKVVTYDFARLMDGAEEVSTSAFADELIKNLK

SEQ ID NO: 6762 - protein, 373 aa, Staphylococcus aureus subsp. aureus COL
MAELQRGLEGVIAAETKISSIIESQLTYAGYDIDDLAENAQFEEVIFLLWNYRLPNEEELAHLKGKLNQYMTLNPRVYTHFEEYVTDHVHPMTALRTSLSYIAHFDPDAENESDENRYERAMRIQAKVASLVTAFARVRQDKEPLKPNPDLSYAANFLYMLRGELPTDIEVEAFNKALILHADHELNASAFTARCAVSSLSDMYSGIVAAVGSLKGPLHGGANEQVMTMLSEIGSIENVDAYLDEKFANKDKVMGFGHRVYKDGDPRAKYLREMSRQITKDAGREELFEMSVKMEKRMAEEKGLIPNVDFYSASVYHCMEIPHDLFTPIFAVSRSAGWIAHILEQYKDNRIMRPRAKYIGETNRKYIPLEERK

SEQ ID NO: 6763 - protein, 407 aa, Zea mays
  misc_feature (129)..(129): Xaa can be any naturally occurring amino acid
  misc_feature (160)..(160): Xaa can be any naturally occurring amino acid
  misc_feature (170)..(170): Xaa can be any naturally occurring amino acid
  misc_feature (180)..(180): Xaa can be any naturally occurring amino acid
  misc_feature (199)..(199): Xaa can be any naturally occurring amino acid
  misc_feature (219)..(219): Xaa can be any naturally occurring amino acid
MEVGDARNGSAAAALTKGSADDAARKPLPPCCVKAKARVPETEANCHDTVVSGWFTEPRSRFGKTSKVQYFNNPMWPGEAHSLKVEKILFQGKSPYQEILVFESSTYGNVLVLDGIVQLTDKDECAYQXNGCYFATEQIELKDVLPTLRLLMSSNFMGSXPYDISLLTDXVLVVGGGDGXGVLREIARHDSVETIDICXKEFFPNLSIGFKDPRVRLHXGDAVDFLRNSPEGKYDAIIVDSSDPIGPAQALVEKPFIQTIARALKPGGVLCNLAESMWLHTHLIQDMLAICRQTFKGAVHHAWTSVPTYPSGVIGFLLCAKEGRAVNFLTPVNPIEKIEGTAKAGRELRFYNSEIHRAAFVLPTFVRRELEAYTTPSASAENEKPKESVSEPQKIKILSNNAILTAT

SEQ ID NO: 6764 - protein, 322 aa, Staphylococcus aureus subsp. aureus COL
MKKIAVLTSGGDSPGMNAAVRAVVRTAIYNEIEVYGVYHGYQGLLNDDIHKLELGSVGDTIQRGGTFLYSARCPEFKEQEVRKVAIENLRKRGIEGLVVIGGDGSYRGAQRISEECKEIQTIGIPGTIDNDINGTDFTIGFDTALNTIIGLVDKIRDTASSHARTFIIEAMGRDCGDLALWAGLSVGAETIVVPEVKTDIKEIADKIEQGIKRGKKHSIVLVAEGCMTAQDCQKELSQYINVDNRVSVLGHVQRGGSPTGADRVLASRLGGYAVDLLMQGETAKGVGIKNNKIVATSFDEIFDGKDHKFDYSLYELANKLSI

SEQ ID NO: 6765 - protein, 512 aa, Glycine max
  misc_feature (31)..(31): Xaa can be any naturally occurring amino acid
  misc_feature (188)..(188): Xaa can be any naturally occurring amino acid
  misc_feature (210)..(210): Xaa can be any naturally occurring amino acid
  misc_feature (227)..(227): Xaa can be any naturally occurring amino acid
  misc_feature (327)..(327): Xaa can be any naturally occurring amino acid
EVRREKWQSPLPSRQLFTKMESGKFPLLNKXRFPIINPATEDIIGHIPAATKEDVDLAVDAAKRAFSHNKGKDWSSAPGSVRARYLRAIASKITEKKDELGKLEAIDCGKPLDEALADLDDVIGCFNYYAELAEGLDAKQNAPVSLPMETFKSYVLKEPIGVVALITPWNYPLLMATWKVAPALAAGXTAILKPSELASVDCLELSEICXEVGLPPRVLNIVTGLGXHEAGAPLAAHPDVDKIAFTGSSATGSKIMTAAAQLIKPVSLELGGKSPIIVFEDVDLDKAAEWTIFGCFWTNGQICSATSRLIVHESIATEFLNRIVKWXKNIKISDPLEEGCRLGPIVSEGQYEKILKFISNAKSEGATILTGGSRPEHLKKGFFVEPTVITDVTTSMQIWREEVFGPVLCVKTFSTEEEAIDLANDTVYGLGSAVISNDLERCERITKAFKAGIVWINCSQPCFTQAPWGGIKRSGFGRELGEWGLDNYLSVKQVTQYISDEPWGWYQSPSRL

SEQ ID NO: 6766 - protein, 498 aa, Hypericum androsaemum
MEFLLITQCSLLFVATYLLVNHVILRGRSKNNGSTKLPPGPRPLPIIGNLLALRDKPHKSLAKLARVHGPLVTLKLGQVTTVVVSSPATAREILQKHDATLSNRYIIDAIRAQGHHEAGLAWVPVGPTWRKFRKVCYSHIFTNQKLNSSQHVRQRTIQQLLAEARESCRVGEAMDVGKAAFRAALSSLSISVMSLDLADAASDTAREFKELARCIMNDVGEPNLADYFPVLKRFDPQGVRGRVEISFGRILDLFGSIIADRMEKRGADEDILDTLLTTHDENPELVEINDIKHLLLDLFVAGTETTSSTLEWAMAELLHKPTTMAKAKAELEQIIGKGNSIDQESEVSRLPYLQAVIQETLRLHPAVPLLLPRRAGEEVHVSGFTIPKDAQVLVNVWAMGRDPEVWEDPCSFTPERFLGSSIDVIGTCFELIPFGAGRRICPGLPLAMRMLQMMLGNLLLSFDWKLPDGVTPECMDMEDRFGITLQKAQPLLAIPLSL

SEQ ID NO: 6767 - protein, 164 aa, Zea mays
MDAVMFGLETPLMAALQHLLDVPDGDAGAGGDNKTGSGGSATRTYVRDARAMAATPADVKELPGAYAFVVDMPGLGTGDIRVQVEDERVLVVSGERRREEREDDAKYLRMERRMGKFMRKFVLPDNADVDKVAAVCRDGVLTVTVEKLPPPEPKKPKTIEVKVA

SEQ ID NO: 6768 - protein, 391 aa, Zea mays
  misc_feature (221)..(221): Xaa can be any naturally occurring amino acid
  misc_feature (295)..(295): Xaa can be any naturally occurring amino acid
MELEATMICIHNSEWMRNGDYAPSRFQAQADAVNLICGAKTQSNPENTVGVLVTPTSDLGKILACMHGLEVGAEANLAAAIQVAQLALKHRQNKRQQQRIIAFIGSPVKYDKKVLETIGKKLKKNNVALDIVDFGESDDEKPEKLEALIAAVNSSDSSHIVHIPPGENALSDVLLSTPIFTGEEGGSGFAASAAAAAATGASGFEFGVDPNVDPELALALXRLSMEEERARQEAIAKKAAEDTSNTEHNNVPSSNSDSVMAEGEPASNAAAGDKEQPKDDDDLLQQALAMSMEGXASGSAAVTDSAMAEAGAVDPDLALALQMSVQDANMSSDTDMSKVFEDRTFVSSILNSLPGVDPNDPSVKDLLASLHSQGEQEKKEDTSDKTEDDKN

SEQ ID NO: 6769 - protein, 171 aa, Zea mays
  misc_feature (146)..(146): Xaa can be any naturally occurring amino acid
MPDSDNDSGGPSNAGGELSSPREQDRFLPIANVSRIMKKALPANAKISKDAKETVQECVSEFISFITGEASDKCQREKRKTINGDDLLWAMTTLGFEDYVEPLKHYLHKFREIEGERAAASAGASGSQQQGELPRGAANAAGYAGXGAPGSGGMMMMMMGQPMYGGLPPQQ

SEQ ID NO: 6770 - protein, 338 aa, Leuconostoc mesenteroides
MEALVLTGTKKLEVKDIDRPKVLPNEVLIHTAFAGICGTDHALYAGLPGSADAVPPIVLGHENSGVVAEIGSAVTNVKVGDRVTVDPNIYCGQCKYCRTARPELCENLSAVGVTRDGGFEEFFTAPASVVYPIPDNVSLKSAAVVEPISCAVHGIQLLKVTPYQKALVIGDGFMGELFVQILQAYGIHQVDLAGIVDEKLAMNKEKFGVKNTYNTMKGDKIPEGEYDVIIEAVGLPQTQEAAIEASARGAQVLMFGVGGPDAKFQMNTYEVFQKQLTIQGSFINPNAFEDSLALLSSGKLNVEALMSHELDYKTVDDFVNGKLGVVSKAVVKVGGEEA

SEQ ID NO: 6771 - protein, 220 aa, Zea mays
MPVQRSQRQRRILSFVGGLDLCDGRYDTPCHSLFRTLDGAHHDDFHQPNFATAAIAKGGPREPWHDIHCRLEGPVAWDVLYNFEQRWRKQGGKDLLIQLRDLADEIIAPSPVTFPNDPETWNVQLFRSIDGGAAFGFPDTPDDATRAGLVSGKDQIIDRSIQDAYIHAIRRARSFIYIENQYFLGSSYCWKPDGIKPEDIGALHVIPKELSMKVVSKIEA

SEQ ID NO: 6772 - protein, 316 aa, Ustilago maydis 521
MAGRIREVWAENLEVEMALLRDTIEKYPYVAMDTEFPGIVARPIGTFKGSSDYHYQTLRCNVDLLKLIQLGITLCDENGNLPPDVCTWQFNFRFSINDDMCAPDSLDLLTKAGLDFDRHERMGIDVEHFGELLITSGLALFDDVKWVSFHSGYDFGYLLKVVTCSPLPAQESDFFALLRVWFPCIYDIKFLMRSCKTLKGGLQDVADDLQVSRIGQQHQAGSDSLLTATTFFKMRQKYFDGSIDDSKYLGCLYGFSSSSSHVNGMVHYSQGRPVSVQSFHDASAVPRSVSGGYAAGGYGSNFGSPFKSTLSASTER

SEQ ID NO: 6773 - protein, 122 aa, Bdellovibrio bacteriovorus HD100
MSLTNDQIVEALSAKTVLEIAELVKTLEEKWGVSAAAPVAAAAAGPAAAVEEKTAFDVILVDAGANKINVIKEVRGLTGLGLAEAKALVEAGNKAVKEGATKEDAEKIKKALEAAGAKVTVK

SEQ ID NO: 6774 - protein, 358 aa, Ralstonia eutropha JMP134
MSKFHELTVASVTRETRDAVAVTFAVPEDLADTYRYVQGQHLTLRAGIGGEDVRRSYSICSAVQDRRLRVAIKRVDGGMFSNWANDALQPGMTLEVMPPSGHFHVPLSDTHSKHYVAFAAGSGITPMLSIIKTTLMTEPDSRFTLFYGNRASSSVLFKEELEDLKDTYLERFNLVFILSREQLDIDLFNGRIDGEKVRALLRHWVRPQDIDVAFICGPHSMMEEVSQALQENGVDKARIKRELFATSIPAARPAAHAHKQLGQQQCEVTVIQDGRTRQFTLEKNKETILDAALAQGIELPYSCKGGVCSTCRCKRIEGEVDMDVNFALEDYEVARGFILSCQSYAVTDKLVIDFDQET

SEQ ID NO: 6775 - protein, 181 aa, Zea mays
MASSMFSSTAVVTSAAQATMVAPFTGLKSSASFPVTRKANNDITSITSNGGRVSCMKVWPPIGKKKFETLSYLPDLSDVELAKEVDYLLRNKWIPCVEFELEHGFVYREHGNTPGYYDGRYWTMWKLPLFGCTDSAQVLKEVEECKKEYPGAFIRIIGFDNTRQVQCISFIAYKPPSFTEA

SEQ ID NO: 6776 - protein, 400 aa, Zea mays
  misc_feature (367)..(367): Xaa can be any naturally occurring amino acid
RLELEPLGCQGMGIPVGKLSLYTALGGVRPSACLPITLDVGTNNEELLNDEFYIGLRQRRATGQEYTDFLQEFMSAVKQNYGEKVLIQFEDFANHNAFDLLARYGTTHLVFNDDIQGTASVVLAGLIAAQTLLGGSLADHTYLFLGAGEAGTGIAELIALEISRQTKAPIEECRKKIWLVDSKGLIVSTRKESLQHFKKPWAHEHKPLSNLLDAVNAIKPTVLIGTSGKGQTFTKDVVEAISSFNERPIILALSNPTSQSECTAEQAYTWSKGQAVFATGSPFDPVEYNGKIHVPGQANNAYIFPGFGLGVVMSGAIRVHDDMLLAASEALAQQVTEENFEKGLIYPPFSNIRKISAHIAASVAAKXAYELGLASRRPRPKDLVKYAESCMYSPIYRNYR

SEQ ID NO: 6777 - protein, 361 aa, Saccharomyces cerevisiae
MTTAVRLLPSLGRTAHKRSLYLFSAAAAAAAAATFAYSQSQKRSSSSPGGGSNHGWNNWGKAAALASTTPLVHVASVEKGRSYEDFQKVYNAIALKLREDDEYDNYIGYGPVLVRLAWHTSGTWDKHDNTGGSYGGTYRFKKEFNDPSNAGLQNGFKFLEPIHKEFPWISSGDLFSLGGVTAVQEMQGPKIPWRCGRVDTPEDTTPDNGRLPDADKDADYVRTFFQRLNMNDREVVALMGAHALGKTHLKNSGYEGPWGAANNVFTNEFYLNMLNEDWKLEKNDANNEQWDSKSGYMMLPTDYSLIQDPKYLSIVKEYANDQDKFFKDFSKAFEKLLENGITFPKDAPSPFIFKTLEEQGL

SEQ ID NO: 6778 - protein, 487 aa, Arabidopsis thaliana
MGSKLKLYPLLNHSSVFHPDSRYQSAPTMEEEQQQLRVLFAKYEMGRLLGKGTFGKVYYGKEITTGESVAIKIINKDQVKREGMMEQIKREISIMRLVRHPNIVELKEVMATKTKIFFIMEYVKGGELFSKIVKGKLKEDSARKYFQQLISAVDFCHSRGVSHRDLKPENLLVDENGDLKVSDFGLSALPEQILQDGLLHTQCGTPAYVAPEVLRKKGYDGAKGDIWSCGIILYVLLAGFLPFQDENLMKMYRKIFKSEFEYPPWFSPESKRLISKLLVVDPNKRISIPAIMRTPWFRKNINSPIEFKIDELEIQNVEDETPTTTATTATTTTPVSPKFFNAFEFISSMSSGFDLSSLFESKRKLRSMFTSRWSASEIMGKLEGIGKEMNMKVKRTKDFKVKLFGKTEGRKGQIAVTAEVFEVAPEVAVVELCKSAGDTLEYNRLYEEHVRPALEEIVWSWHGDNHNNNIVKSNGNYVSDENSGSDC

SEQ ID NO: 6779 - protein, 71 aa, Triticum aestivum
MAPRQVGIVKSFNDEKGFGLITPAGGGADLFVHFRNIQASGFKSLKEGQQVTFVAVQGQKGMQANEVITEE

SEQ ID NO: 6780 - protein, 101 aa, Brucella melitensis 16M
MLPDDLLSINSIHRDVCEACGLNSYYVTKDIPMATGTVKWFNTTKGFGFIQPDQGGTDVFVHISAVQRAGLTTLDEGQKVSYEIVQDRRSGRSSADNLVAA

SEQ ID NO: 6781 - protein, 409 aa, Staphylococcus aureus subsp. aureus COL
MSLRDEALEMHKRNQGKLEVKPNVKVTNKEELSLAYSPGVAEPCKDIYEDKRKVYDYTIKGNTVAVITDGTAVLGLGNIGPEASIPVMEGKAVLFKSFAGINGVPIALNTTDTEEIIKTVKLLEPNYGGINLEDISAPRCFEIEERLKKETNIPVFHDDQHGTAIVTLAGLVNALRVVNKDIAKIKVVLNGAGAAGIAIVKLLYAYGVRNMVMCDSRGAIFEGRSYGMNPTKDVVAKWTNKDKIEGSLEEVVKDADVFIGVSVANALSQDMVKSMADNPIIFAMANPNPEIIPDDAKAAGARVVGTGRSDYPNQINNVLAFPGIFRGALEVEATHINEEMKKAAVEAIADLIDSSELNEDYCIPGPFDKRVAPSVARNVAKAAMESGVARIEVDPQDVYDKTMKLTDLQ

SEQ ID NO: 6782 - protein, 390 aa, Crocosphaera watsonii WH 8501
MATLLEQLREFTVVVADTGDIQAIETFTPRDATTNPSLITAAAQMPQYQSIVDDTLKTARKELGKDADESAVVTLAFDRLAVAFGLKILEIIPGRVSTEVDARLSYDTEATLEKARYLISEYEKAGVSRDRILIKIASTWEGIKAAEVLEKEGIHCNLTLLFGMHQAVACAEANVTLISPFVGRILDWYKKETGKEYAPTEDPGVMSVTTIYNYYKKFGHKTEVMGASFRNIGEICELAGCDLLTISPKLLDQLNSTEETLPRKLDPEAAAKMDIAKIAMDKAIFDKMHQEDKMAYEKLDEGIKGFTKALETLEEMLKERLTRIEGETRVNNAAADIFRVYDLDGDGFITREEWAGTDVVFDAIDINHDGKITPEEMAAGLGAAICLVEA

SEQ ID NO: 6783 - protein, 449 aa, Centaurium erythraea
MDVIFPLLVAFITWAIASSLTFRRFGRLPPGPFPVPVIGNIHQLGKHPNQSLAKLSKIYGPLMSLKLGTQTAIVASSSTVVREILQKHDQVFSSRTIPSALHAHDHHKFSMALLPASSRWRHLRKITKEQMFSVQRLDESQGLRQDKLKELRDYLHSCCVTGQAVNIGEAAFTTTLNLMSCTLFSVNFASFDSKFSDELKRDICAFVQVIAAPNLADFSPVLRHVDPQGLLKRTKTYMQKVFDSFEDIITKRLQERGTSQQDSLRRHDLLEALLDEMEKNDSAFTINDMKHLILDLFIAGADSTSSTTEWGMAELLHNPEKMEKAKAELNEVIGQKNLVEESDISRLPYLQAVVKEVFRLHPPGPLLVPHKADADVEIDGYVVPKNANVLVNVWALGRDSSSWADPEAFMPERFLDNEIDVKGQHFELIPFGAGRRMCPGLPLSYRMLH

SEQ ID NO: 6784 - protein, 143 aa, Glycine max
MAMAYKMATEGMNIKEECKRWFTEMKWKKVHRFVVYKIDERTRAVLVDKVGGPGEGYDELVAALPGDDCRYAVFDFDFVSVDNCQKSKIFFIAWSPAASRIRAKILYATSKQGLRRVLEGVHYEVQATERSEMGFDVIRERAQ

SEQ ID NO: 6785 - protein, 214 aa, Triticum aestivum
  misc_feature (8)..(10): Xaa can be any naturally occurring amino acid
  misc_feature (14)..(14): Xaa can be any naturally occurring amino acid
  misc_feature (21)..(21): Xaa can be any naturally occurring amino acid
  misc_feature (24)..(24): Xaa can be any naturally occurring amino acid
  misc_feature (36)..(37): Xaa can be any naturally occurring amino acid
  misc_feature (39)..(39): Xaa can be any naturally occurring amino acid
  misc_feature (42)..(42): Xaa can be any naturally occurring amino acid
  misc_feature (52)..(53): Xaa can be any naturally occurring amino acid
  misc_feature (66)..(66): Xaa can be any naturally occurring amino acid
  misc_feature (68)..(68): Xaa can be any naturally occurring amino acid
  misc_feature (77)..(77): Xaa can be any naturally occurring amino acid
  misc_feature (82)..(83): Xaa can be any naturally occurring amino acid
  misc_feature (91)..(91): Xaa can be any naturally occurring amino acid
  misc_feature (122)..(122): Xaa can be any naturally occurring amino acid
  misc_feature (135)..(136): Xaa can be any naturally occurring amino acid
  misc_feature (140)..(140): Xaa can be any naturally occurring amino acid
  misc_feature (157)..(158): Xaa can be any naturally occurring amino acid
  misc_feature (163)..(163): Xaa can be any naturally occurring amino acid
  misc_feature (167)..(167): Xaa can be any naturally occurring amino acid
MAPTVMAXXXTSVXPFQGLKXTAXLPVSRRSNGASXXSXSNXGRIRCMQVWXXEGIKKFETLSYLXPXNTEALLKQXDYLIXXKWVPCLEXSKVGFIFREHNASPGYYYGRYWTMWKLPMFXCTDATQVINEVEXXKKEXPDAYVRIIGFDNMRQVXXVSLIXFKPXGCEERGLKQNSPGQHIKVFAGFFDFWGCFLSHLFLVPKKNIGKGPFG

SEQ ID NO: 6786 - protein, 465 aa, Haloarcula marismortui ATCC 43049
MRLHWHRRDLRATDNAGLAAATPSDPVVPVFIFDTAVLDHAGPPRVAFMLDALDSLREWYRDKGSDLVVAEGDPTSVLPELAAQHGAEKVTWGKDYSGLARERDAAVRQALDDADVAREAVQNAVLHEPGEITTNDGDPYSVFTYFGRKWHDREKAAPYDPPSADTLADVDGDALPTLADLGFEEPEADVPAAGTEEARALLDDFLDENVYEYEERRDFPADECTSRLSAHLKFGTIGIREVYDRTQAAKEGTGGDRRDSVREFQSQLAWREFYTQVLFAHPHVVSSNYKSYENPIEWENDEELLQAWKDGDTGYPIVDAGMRQLRDEAYMHNRVRMIVASFLTKDLLIDWRHGYEWFREKLVDHDTANDNGGWQWAASTGTDAQPYFRIFNPMTQGEDYDPNAEYIKEYVPELRDAAPEIIHDWNDCSLTQRRSAAPEYPDPVVDHSERREEALAMFERARGDD

SEQ ID NO: 6787 - protein, 466 aa, Arabidopsis thaliana
MNSGDVFILSRSKGHDMLAPFTAGWQSADLDPLVIAKSEGSYVYDDTGKKYLDSLAGLWCTALGGNEPRLVSAAVEQLNTLPFYHSFWNRTTKPSLDLAKVLLEMFTANKMAKAFFTSGGSDANDTQVKLVWYYNNALGRPEKKKFIARKKSYHGSTLISASLSGLPPLHQNFDLPAPFVLHTDCPHYWRFHLPGETEEEFSTRLAKNLEDLIIKEGPETIGAFIAEPVMGAGGVIPPPATYFEKVQAVVKKYDILFIADEVICAFGRLGTMFGCDKYNIKPDLVTLAKALSSAYMPIGAILMSQEVADVINSHSSKLGVFSHGFTYSGHPVSCAVAIEALKIYKERNIPEYVAKVAPRFQDGVKAFASGSPIIGETRGTGLILGTEFVDNKSPNEPFPPEWGVGAFFGAECQKHGMLVRVAGDGILMSPPLIISPEEIDELISIYGKALKATEEKVKELKAQHKK

SEQ ID NO: 6788 - protein, 148 aa, Oryza sativa
DGLVGIPKCGKAIGALKGHLDYSFASAWHPDGNILATGSQDTTCRLWDIRNLSESVAVLGGRMGSIRCIKFSSDGRFLATAEPVDFVHIYDSYADYGRSHEIDLFGEIAGLSFSPDAEALYVGIADPTYGGLIEFNRRHQHHYLNCMW

SEQ ID NO: 6789 - protein, 316 aa, Buchnera aphidicola str. Bp (Baizongia pistaciae)
MNQLECLKKYTDIVVDSGDLVSINKFKLGDVTTNPSLIRQVMSLQKYQYIIYDSIRYAKKKGGSHKFKLENAIDKVSVILGSEILKNISGKISTEIDSRLSFNTNLCIERAKKLISMYEEHDIHRDRVLIKLAATWESVSAAKELKKENIQSNLTLLFSFAQAKICAEAGVFLISPFVGRIYDWYKSKSLIKSAMIDDDPGVNAVRKIYQYYKEYGYHTIIMGASFRNVDQVLALSGCDRLTISPNLLHKLQLSDDLVIRKLIPPKHKKLQPVCMSKSEFCWFHNEDAMAVEKLSEGIRQFGKDQQELENIINNNF

SEQ ID NO: 6790 - protein, 250 aa, Zantedeschia aethiopica
MGKSYPAVSEEYQTAVGKAKRKLRALIAEKNCAPLMLRLAWHSAGTYDVSTRTGGPFGTMRFQAELAHGANNGIDIAVRLLEPIKEQFPILSYADFYQLAGVVAVEVTGGPEIPFHPGREDKPAPPVEGRLPDATKGSDHLRQVFSQQMGLNDQDIVALSGAHTLGRCHKERSGFEGAWTTNPLIFDNSYFKELLSGEKEDLLQLPSDKALLSDPVFRPLVEKYAADEDAFFADYTEAHLKLSELGFAEC

SEQ ID NO: 6791 - protein, 432 aa, Dechloromonas aromatica RCB
MTTERKATLSIDGQAPVDFSIMSPTHGNDCIDIRTLGGKTGLFTYDSGFLSTASCKSKITFIDGDVGQLLYRGYPIEQLAENCNFLEVTYLLKNGELPNAKQKADFESTIKNHTMVHEQLSKFFSGFRRDAHPMAVMTGVVGALSAFYHDAMDFSDAEHRNVSFNRLVAKMPTIVAMAYKYNTGAPFMYPDNSLDYTANFMRMMFGNPCEKYVPNPVLVRALDTIFTLHADHEQNASTSTVRLAGSSGANPFACIAAGIACLWGPAHGGANEACLQMLEEIGDVSRVPEYIARAKDKNDSFKLMGFGHRVYKNFDPRAKLMRQVCNEVLAELGLENDRLFKLAMELERIALEDPYFVEKKLYPNVDFYSGIVQKAIGIPTEMFTCIFALARTVGWMTQWEEMISDPEYKIGRPRQLYMGAAKRDVVPLAQRG

SEQ ID NO: 6792 - protein, 202 aa, Glycine max
  misc_feature (43)..(43): Xaa can be any naturally occurring amino acid
MSGRVSGKVKWFNDQKGFGFITPDDGSEELFVHQSQIKSDGFXRSLAEGESVEFAIESESDGRAKAVDVTGPDGASVQGTRRGGDGGRSYGGGRGGGGGGYGGGGGYGGGGGYGGGGGYGGGGRGGGGGACYNCGESGHLARDCSQGGGGDRYGGGGGGGGRYGGGGGGRYGGGGGGGGGGGSCYSCGESGHFARDCPSSAR

SEQ ID NO: 6793 - protein, 636 aa, Zea mays
FHTGDWKIDESPVDGKKFDRQALEELSKEGVTLMMSDSTNVLSPGRSISESVVAGSLLRHISEAKGRVITTQFASNIHRIGSIKAAADLTGRKMVFVGMSLRTYLEAAFKDGKAPLDPSTLVKVEDMDAYAPKDLLVVTTGSQGEPRAALNLASYGGSHALKLSKEDVLLYSAKVIPGNETRVMKMMNRLTDLGPKIIMGKDSGLHTSGHAYREELEEVLRIVKPQHFLPVHGELLFLKEHELLGRSTGIRHTTVIKNGEMLGVSHLRNRRVLSNGFVSLGKEDLQLMYSDGDKAFGTSTDLCVDERLRIASDGIIFVSMEIFRPQKEHGLAQSGLKGKFKITTRCLWLDNGRLLDALYKAAHAALSSCPVNCPHSHMERMVAEILRKMVRKYSGKRPDVIAVATENTTAGFSEHLDTKASGNFGPSSATSHLSRSPATSLEGSYKTHPDNPEVDAEEILPETVRTTPDDATTSSNGEALFSSDLHQPKTLEHFWESFKSPTAVKIARIVNGGDKQNFGKIGIMGQDSLIQSAPAPVKSSKRNKWKPEEIKSLIQMRGEMNEKFQSVKGRMVLWKEISDTMLNQGVSRTPAQCKSLWTSLVQKYEESKDTESMKTWPYFSAMDKILSQQGEMATKG

SEQ ID NO: 6794 - protein, 370 aa, Senecio vulgaris
MAESNKEAIDSARSNVFKESESLEGTCAKIGGYDFNNGIDHSKLLKSMVSTGFQASNLGDAMIITNQMLEWRLSHDEVPENCSEEEKKNRESVKCKIFLGFTSNLISSGVRETICYLTQHRMVDVLVTTTGGIEEDFIKCLASTYKGKFSLPGADLRSKGLNRIGNLIVPNDNYIKFEDWIIPIFDQMLIEQKTQNVLWTPSRMIARLGKEINNETSYLYWAYKNNIPVFCPSITDGSIGDMLYFHSVSNPGPGLVVDIVQDVIAMDNEAVHASPQKTGIIILGGGLPKHHICNANMMRNGADFAVFINTAQEYDGSDSGARPDEAVSWGKISSTGKAVKVHCDATIAFPLLVAETFAVKKEKASKVNGF

SEQ ID NO: 6795 - protein, 122 aa, Panax ginseng
MIQPQTLLNVADNSGARELMCIRIIGASNRRYAHIGDVIVAVIKEAVPNMPLARSEVVRAVIVRTCKELKRDNGMIIRYDDNAAVVIDQEGNPKGTRVFGAIARELRQLNFTKIVSLAPEVL

SEQ ID NO: 6796 - protein, 358 aa, Triticum aestivum
  misc_feature (260)..(260): Xaa can be any naturally occurring amino acid
MAPAAASQHQATTTVAPTSGRKVVDEVSGWLRVMDDGSIDRTWTGPPEALPLMEPVQPYAVPRDGHTLHDLPGEPNLRVYLPEVDAGSAGRLPVIVQLHGGGFCISHPSWVLYHHFYARLACAVPAVVVTAELPLAPEHRLPAQLHTGVDVLRRLRSIAMSDEGSLDDPAAELLREAADMSRVFLVGDSSGGNLVHLVAARVGEDGADAWAPLRVAGGVPIHPGGSMRATRSKSELQDTPDSVFFTLDMLDKFLAMALPXGATKDHPYTCPMGPNAPPLESVPLPPMLVVVGEKDLIRDTNLEYCDALRAAGKEVEVLINRGMSHSFYLNKFAVDMDPTTGERAQELIDAIKSFVARH

SEQ ID NO: 6797 - protein, 299 aa, Triticum aestivum
ASTHASGWLGWLCGLTRTRPPRRRPQEESDKNAADARSDFDTCGLYADQLKRRCAEQFKEGVLGLEHLAAVDGLCEIVARGMGAAEGPRRYHINLSVFTSLPDMWAIEQLFPIIPIQRLQERPAVDGVLSDLTCDSDGKVDQFIGGRSSLPLHELPTHGTRGYYLGMFLGGAYQEALGGLHNLFGGPSVVRVSQSDGPHCFAVTRAAPGPSCADVLRAMQHEPEVMFEVLKQRTTDDGATAAALARAFGSMPYLSFDAEEAVAMSGAESSGMSSDSEGSAAGAAEDDDEEWEFMRGLTV

SEQ ID NO: 6798 - protein, 434 aa, Magnetospirillum magnetotacticum MS-1
MSHILRKFPNDPAKPRVVKAEGLYIHTEDGRKLLDMTAGTTTFGVLGYSHPEVLAAMQAQMGKFCHIDYNTWVDPNLEELAALLLSRAPRGLDKVYFPGNSGSEAMEAAMKLSYHVHHDSGKPGKTHYIARLQSFHGATLHGISISELPILAFYEPLLPDGRSKIAQHNPSLNRLPGESMEDYARRSAKELEDKILEIGPDKVGAFIGETMLGSLVGDVPPAPGYWKLIREVCDRYDVHLILDEIYCGLGRSGRIYCCDWDGIVPDFVCIGKNLAAGHAPLSAVVTNHRVEDIIAKGQGRIQHGHTHQGYSLGVAAALAVQRIVHTDAMLDHIQARGRQIVDTITTRLGGHPFFKEVRGRGLLQSFEYDCADKNGFGMTLAKRMLDEHATVINAKWHRVSFTPGYIITEAQLGRVLDDFVAVFESTASGWKTAG

SEQ ID NO: 6799 - protein, 180 aa, Triticum aestivum
  misc_feature (100)..(100): Xaa can be any naturally occurring amino acid
  misc_feature (110)..(110): Xaa can be any naturally occurring amino acid
  misc_feature (114)..(114): Xaa can be any naturally occurring amino acid
  misc_feature (121)..(121): Xaa can be any naturally occurring amino acid
  misc_feature (127)..(127): Xaa can be any naturally occurring amino acid
  misc_feature (131)..(131): Xaa can be any naturally occurring amino acid
MAPTVMASSATSVAPFQGLKSTAGLPVSRRSNGASLGSVSNGGRIRCMQVWPIEGIKKFETLSYLPPLSTEALLKQVDYLIRSKWVPCLEFSKLGSSSRXHNASPGYYDXRYWXTMWKLPXFGCTDXTQVXNKWKSQEGLPDAYSASDRQHRKCMSSSPTTGCKIRKAKQSQRQIKCMRL

SEQ ID NO: 6800 - protein, 399 aa, Bacillus thuringiensis serovar konkukian str. 97-27
MLENQINERSLLLHKELVGKIEITSKVEVNSADDLSLTYTPGVAESCKAIAADEETVYDYTARGNMVAVVSDGTAVLGLGNIGPKAAMPVMEGKSILFKKFANVDAFPLCLGTTDVDEIVTLVKNLEPTFAGINLEDIAAPRCFEIEKRLKEETNIPVFHDDQHGTAIVVLAAVINALKVVSKQMDHVKIVINGAGSAGIAIGKLLLKAGAQHITLVSLEGIVCEGEAWMNEAQIEVSKKTNREHVRGTLKEAIHQADIFIGVSAPNVLTKELVQMMNEKAIVFAMANPIPEIFPEDALEAGAAVVGTGRSDYANQVNNVLAFPGIFRGALDVRATDITEEMKLAAAYGIANIITDEERNANYVIPNPLDKRVVPSVAEAVAKAAIDSGVAQIMKIPSY

SEQ ID NO: 6801 - protein, 453 aa, Arabidopsis lyrata subsp. petraea
MESSISQTLSKVSDPTTALLIVVSLFIFIGFITRRRRPPYPPGPRGWPIIGNMLMMDQLTHRGLANLAKKYGGLCHLRMGFLHMYAVSSPDVARQVLQVQDSVFSNRPATIAISYLTYDRADMAFAHYGPFWRQMRKVCVMKVFSRKRAESWASVRDEVDKMVRSVSCNVGKPINVGEHIFALTRNITYRAAFGSACEKGQDEFIRILQEFSKLFGAFNVADFIPYFGWIDPQGINKRLVKARNDLDGFIDDIIDEHMKKKENQNAVDDGDVVDTDMVDDLLAFYSEEAKLVSEAADLQNSIKLTRDNIKAIIMDVMFGGTETVASAIEWALTELLRSPEDLKRVQQELAEVVGLDRRVEEADIEKLTYLKCTLKETLRMHPPIPLLLHETAEDTSIDGFFIPKKSRVMINAFAIGRDPTSWADPDTFRPSRFLEPGVPDFKGSNFEFIPFGS

SEQ ID NO: 6802 - protein, 344 aa, Oryza sativa (japonica cultivar-group)
MVGAVQEGIVREMNGGFEVMSGYDRSSMAPKQQQREEESKWYEEEIDDDLKLCYALNSVLHRGASKYQEIALIDTKHFGKALIIDGKMQSTEVDEFIYHESLIHPPLLFHPNPKTVFIMGGGEGSAAREVLRHNTVHRVVMCDIDQEVVDFCRTYLTVNWDAFASDKLCLIINDARAELEKSREKFDVIVGDLADPVEGGPCYQLYTKSFYQHIVKPKLNDRGVFVTQAGPAGVLTHKEVFSSIYNTLRHVFKYVKAYTAHVPSFADTWGWVMASDYPFSMNAQQINERIKERIDGELVYLSGESLISSTILNKSVYQSLLNETHVYTEDDARFIYGHGRARCA

SEQ ID NO: 6803 - protein, 147 aa, Crocosphaera watsonii WH 8501
MALLRYNPWTEMNALQRQINQLFDDGVLTTSERGLKEAIFAPSAELSETDEAVMLKLELPGVKAEDVDIQATKEAIYITGERKKETKSEENGVTRSEFRYGKFSRFIGLPALIDNTKISAEYKDGILNLTLPKAEEEKHKVVKITLG

SEQ ID NO: 6804 - protein, 485 aa, Magnetospirillum magnetotacticum MS-1
MIKHLINGKHVESASTIANLNPATNEVICQIAAGGEAEVARAVAAAKEAFPKWAGLAPAQRAKLLRKVGDLINQHVDEIAKLESLDTGQSYWRTKKMLVPRAADNFYFFADTCQHVDGETYPTNDHLNYTIYQPVGVVGLISPWNVPFMTATWKTAPCLAFGNTAVLKMSELSPLSADRLGQLILEAGIPAGVFNIVHGYGSAVGEALVKHPDVRGVSFTGSTATGNRIIQSGGLKKYSMELGGKSPNIVFDDCDFERAVDAAIVAVYGNNGESCTNGTRILVQDGIYDRFVAALAERTKKVVVGDPLDEATNVGPMITRDHWKKVTGYIELGIKEGARVVAGGLGEPEGLPAHLKNGNFVKPTVLADVDNSWRVAQEEIFGPVACVIRFKDEAEALKIANATTYGLASYVWTENGAKAIRMAEGIEAGLVFVNSQNVRDLRQPFGGIKGSGTGREGGHYSYEAFLEVKNVCVSKGNHHIPRWGV

SEQ ID NO: 6805 - protein, 307 aa, Zea mays
  misc_feature (41)..(41): Xaa can be any naturally occurring amino acid
  misc_feature (56)..(56): Xaa can be any naturally occurring amino acid
  misc_feature (90)..(90): Xaa can be any naturally occurring amino acid
ADIWSCCLRVFVLLAGCLPFHNANLMEMYRKISTSDIKYPXWLSPELQRVMPKLLXPNPNNRITIEKLLEHPMVKKEYRPAVVLAHPARXSSSLKDVQVAFSNADLLDSSSKVEQPADSSLKPASLNAFDIISHSRGFDLSSLFEVDQEQKASNSRFMTQKPASAIVSKLEQIAETERFMVKKQDGLVKLQGSKQGRKGQLAIDAEIFEVTPAFHVVEVKKSAGDTLEYEMFCRKGLRPSLSDICWSTRSEENMAPSIVSALPNCEPSPLTPISGRITQPLFIRLAIPAPFPFLAATTIHSSYFFSP

SEQ ID NO: 6806 - protein, 222 aa, Pseudomonas syringae pv. tomato str. DC3000
MEKNVFSLCVHNPEWMIMENSQGGQSLVWQPSQVSSKDREQHLRQTPKTVWLTGLSGSGKSTIAFALERALMDLGKLAYTLDGDNIRQGLCRDLGFSAEHRSENIRRIAEVARLMNDAGLIVISSFISPYEADREAARSIIGNERFMEVFISTPLETCIQRDPKGLYRRAVAGELKDFTGISAPYESPLYPVLQLDTRHVPIEECVARILDILQITKNHFRA

SEQ ID NO: 6807 - protein, 477 aa, Synechococcus sp. WH 8102
MTTPRVLFWHRRDLRLTDNLGLAAAAAISPAVTGVYVLDPQVISPSEHLLPMAPARLWFLIESLIELQQRWRDAGSRLLVVEGDPVQLLPQLAERIAAEAVVWNRDVEPYARERDRQVAQRLQADGRKVVVDWDQLLIAPELLKTGGGDPYRVYGPFLRNWRGQVQAKQPVTVPAPAGLVDLDPAAVPSGEPLMARRDSHGFKGTELCPCRPGEAAAMQQLTSFCDGALFGYEPDRNFPGVVGTSYLSAALSVGTLSPRQAWSAAQEAREQARSEEQLHAIAVWEQELCWREFYQQALFHFPELSDGPYREQWRRFPWENNEDWFDFWREGQTGMPIIDAAMRQLNQTGWMHNRCRMIVASYLVKDLICDWRWGERAFMELEVDGDLAANNGGWQWSASSGMDPKPLRIFNPATQASKFDAAGDYIRQWVPELRHVNTKDLLSGEIGALERRDYPEPLVNHKTQQAKFKALYATIRS

SEQ ID NO: 6808 - protein, 109 aa, Triticum aestivum
MIEQVCTKKQAGTGPEFPGYRRPTRPRPPCSHHPSPLAFRWTLREREGGRRKMADEGTANCIDIILAIILPPLGVFFKFACGIEFWICLLLTFFGYLPGIIYAVWVITK

SEQ ID NO: 6809 - protein, 179 aa, Lycopersicon esculentum
MASFGGTTQKCKACEKTVYLVDQLTADNKVYHKACFRCHHCKGTLKLSNYNSFEGVLYCRPHFDQLFKMTGSLDKSFEGAPKTVRERSADQGSNSKVSSLFGGTQDKCVACKKTVYPLEKVAVDGTSYHRPCFKCSHGGCVISPSNYVAHEHRLYCRHHHTQLFKERGNFSQMEDHEKN

SEQ ID NO: 6810 - protein, 323 aa, Sporidiobolus salmonicolor
MVGTTTLNTGASLELVGYGTWQAAPGEVGQGVKVAIETGYRHLDLAKVYSNQPEVGAAIKEAGVKREDLFITSKLWNNSHRPEQVEPALDDTLKELGLEYLDLYLIHWPVAFPPEGDITQNLFPKANDKEVKLDLEVSLVDTWKAMVKLLDTGKVKAIGVSNFDAKMVDAIIEATGVTPSVNQIERHPLLLQPELIAHHKAKNIHITAYSPLGNNTVGAPLLVQHPEIKRIAEKNGCTPAQVLIAWAIVGGHSVIPKSVTPSRIGENFKQVSLSQEDVDAVSKLGEGSGRRRYNIPCTYSPKWDINVFGEEDEKSCKNAVKIK

SEQ ID NO: 6811 - protein, 160 aa, Gibberella avenacea
RAEYGKSGNITCMRKWLCCEKLVDKYPYIAMDTEFPGVVSRPMGGFRGKSDYHYQCLRTNVDMLKVIQIGSHSSMRTAKPAPRPVHGSSTSNLSQDDMYNESRSESLQPSRYRTSICSNVTESTLSNCLTPHPFRSRVLRQRAMDFIPRRLRFWLPHQAL

SEQ ID NO: 6812 - protein, 162 aa, Ustilago maydis 521
MSASDDEQHNATFETADAGSSLTFPMQCSALRKNGHVVIKGRPCKIVDMSTSKTGKHGHAKVHLVAVDIFTTKKYEDISPSTHNMDVPNVRREEYQLVNIDDGFLNLMTNDGDTKDDVRVPDGELGDQIQAAFDDGKDLMVTVVSAMGEEHCLSFKDAPQGK

SEQ ID NO: 6813 - protein, 1348 aa, Oryza sativa (japonica cultivar-group)
MPDIRSAPGRGKSDEDERRPIGSLFKLKRKRRAPGSAEAKGDSNPSVESEAPDGVVPGEMDDTLAIIKRKLRKPKKGKEGGDAVVVGSGAEGELLVEEEDVQGGVNVGDGVAEDKSNLEGVKVEVDEVIGGELKDSGGLGLEDSLSTLFKRSGRKSRQVSVKEEEGVEVAGSHGEEILEKGSGLVSDRVAKGTKRRRRRTKEEMKNAAAKSESAMAHEGSPNRKVGTSLPRKAKAEAKVKISNSNRRSKKSDEKPKASDDVLCHRSLGETIEQDAETRTVLDDGSRNSSDGASHRIEVSACLSNQPCLKPCSGELAEEVSLSAANAATDGVSNEHTYSETLLKERNDDAGCSHGKPPTLAIKSIPGKKPIEMPKKPVRQKDQLLSTDVDNKCVVGSGDTKDVNIENQPAFGIPESHVTGKGLHPHKMATSVKELDVVDVVAPTDFEDMENASKSKRVTRSSRKRKHGDMAYEGDIDWETLMQEQGLFSNLSAALVDYPLKSKDKIKISEVLDNGDGSGVAAVRAGLKAKAVTPIEKIKFKDILKRRGGLQEYLECRNMILSRWCKDVKHILDLAECGVSDVCLDDESPRQTLIRDVYLFLDQNGYINAGIASDKVKTDHESPPEDVEVSKLNESHERKSVSIQDCIVTEAVQDKKAVVKQTDCVLTEASNEESSSAAIHCDAQDLLPPLKSEELIFKEKNQGVLTEVEGGSLHQAEAADIEHSENKHEASDRVESGGYGKKIIVVGAGPAGLTAARHLQRQGFSVTVLEARNRIGGRVYTDRVSLSVPVDLGASIITGVEADIATERRADPSSLICSQLGLELTVLNSACPLYDVVTGDKVPDDLDTDLESEYNGLLDEMAQLFAQNGESAVGLSLEDGLEYALRKNRVTRSEQDDQLRNVSSAGAVDISESASTEKEIAHCGKEDKTDVLSPLERRVMNWHFAHLEYGCAAMLKSVSLPYWNQDDVYGGFGGAHCMIKGGYDTVLESLAKGLDVQLNHVVTEVLYGSEELGASGNSRKFVKISTSNGNEFVGDAVLITVPLGCLKAQTIKFSPSLPDWKLSSIDRLGFGLLNKIVLEFPEVFWDDNVDYFGATAEQTDLRGQCFMFWNLKKTVGVPVLIALLVGKAAIDGQSISSDDHVKNAIVVLRKLFKDASVPDPVASVVTNWGLDPFSRGAYSYVAVGASGRDYDILGRPVSDCLFFAGEATCKEHPDTVGGAILSGLREAVRIIDLVHSGKDYVAEVEALQTYQMQSDSERNEVKDMSNKLDACELSTALCKTSSDASYPLFSKETLLQEMFFSAKTTSGRLHLAKELLKLPPDVLKSFAGSKDGLSTLNSWILVSGLSSEF

SEQ ID NO: 6814 - protein, 137 aa, Brassica napus
  misc_feature (18)..(18): Xaa can be any naturally occurring amino acid
  misc_feature (53)..(53): Xaa can be any naturally occurring amino acid
  misc_feature (66)..(66): Xaa can be any naturally occurring amino acid
  misc_feature (110)..(110): Xaa can be any naturally occurring amino acid
QREVCNMRYRRKDENKSXEPSEIEMEREKKFGICMEMNSLVVLPNCTHSLCIXCYRDWRRRSQSCXFCRDSLKRVDSGDLWMFLEGTDTVNPSVIARENQKRLFVYIEKXPLVVPRQAFASSPYDLHVKVKKEKKGC

SEQ ID NO: 6815 - protein, 506 aa, Magnaporthe grisea 70-15
MALVAMQKRDKRKMLGSQTLPTVAAVLAAVVSASPVSGREVATVPDDLTGELGCEALKLVYGSGSVFLPGDAEYAEEAAAFWSNTQLMSPTCIFRPTSAEQVASAVVGNSGTGTQWAVRGGGHMGIRGANNIDKGMLIVMSGIKTLRISEDRTAVHVGPGNKWGDVYDYLAQFDVAVAGGRLGPVGVPGLLLGGGVSFYGHQAGWSADNVLEYEVVLADGRTVAASADENQDLFWALKGGSANFGIVTDFKLRTFPSKKVWAGVYTVSGEHMAAFEEAVARYSSEPQDPLSHAVPMVIPMAGGVTVASVILFYDSETVSEPECFRDFLAIPPISPPTTAFKTVAEFAKENGALVVPGVNDVFLAGTTVGKTQAELLEGVQITNKPIGAAWQAASEKMNPAGNALGIDTAAKGTYLAWALAIEWVDGPGHDEIVDKWVRETIAAMEEATKAAGLYDAFNYMGDAAGFQEVYAGYGEENQKKLLEISRKYDPERVTQKLWPGGFKVGV

SEQ ID NO: 6816 - protein, 647 aa, Zea mays
MATMKLGSKPEIFVLQDLTWRCTIELESDVVVEVGEMSFYLHKFPLLSRSGVLQRMISEYQAPADGGGMCTLQLDDIPGGAKAFELAAKFCYDVKIELNALNVVCLRCAAEYLRMTDDYAEGNLITQAECFLVDVLANWKDSIKALETCEGVLPTAEDLHLVSRCITALASKACGSDAAAPVVRNASVDKDALWNGIRSGDTTSSAAAAAAAAGMDWWYEDVSFLSLPMFKRLIQAMEAKGMRDESIAGAIMFYAGRFLPGLKRNTSFSNALASYGADGSGGAGGGMSSRNITPRAASVSAPSEGDQRYFLEEIVALLPTKKGVASTKFLLGMLRTAMLLHASPLCRENLERRIGAQLEDASLDDLLVPNLGYHVETLYDIDCVQRILDYFMSSTDGIGTGYTSPALAEEGGGSLGIPQGATPSSSLSPITMVAKLMDGFLAEVAPDTNLKLPKFQALAAVVPDYARPVDDGIYRAIDIYLKSHPWLSESEREQLCRLLNCQKLSLEACTHAAQNERLPLRVVVQVLFFEQLRLRTSIAGWFFVSDNAAGGDGARPHAGGAIVPKGTAAIAGCPQADADSDVEGDAPDGKETITDVKARVSDLEKECKSMKQEIRRLGKPRRSWSLLTRKCGFGAKVQQAQTAMSGK

SEQ ID NO: 6817 - protein, 462 aa, Streptomyces avermitilis MA-4680
MKAQDGMYIDGAWRPAAGPDMIEVVNPADEQVIGRVPAGTPEDVDAAVRAARAALTAWAATPPAERAARISALRDVLVARQDEIAETVTAELGSPLSFSQSVQVGLPILVAGSYAELAATYAFEERVGNSTVHHEPVGVVGAITPWNYPLHQIVAKVAPALAAGCTIVLKPAEDTPLTAQLFAEAVHEAGVPAGVFNLVTGLGPVAGQALAEHEDVDLVSFTGSTAVGRQIGATAGAAVKRVALELGGKSANVILPSADLAKAVNVGVANVMANSGQTCSAWTRMLVHAERYEEAVELAAAAAVKYADRIGPLVNAKQRARVRGYIDKGVAEGARLVAGGPESTEPQGYFVSPTVFADVTPEMTIAKEEIFGPVLSVIRYEDEEEALRIANGTVYGLAGAVWAGDEAEAVAFARRLDTGQVDINGGRFNPLAPFGGYKQSGVGRELGAHGLAEYLQTKSLQF

SEQ ID NO: 6818 - protein, 455 aa, Mycobacterium tuberculosis CDC1551
MSTTQLINPATEEVLASVDHADANAVDDAVQRARAAQRRWARLAPAQRAAGLRAFAAAVQAHLDELAALEVANSGHPIVSAEWEAGHVRDVLAFYAASPERLSGRQIPVAGGVDVTFNEPMGVVGVITPWNFPMVIASWAIAPALAAGNAVLVKPAELTPLTTMRLGELAVEAGLDEDLLQVLPGKGTVVGERFVTHPDIRKIVFTGSTEVGKRVMAGAAAQVKRVTLELGGKSANIVFHDCDLERAATTAPAGVFDNAGQDCCARSRILVQRSVYDRFMELLEPAVHSIVVGDPGSRATEMGPLVSRAHRDKVAGYVPDDAPVAFRGTAPAGRGFWFPPTVLTPKRGDRTVTDEIFGPVVVVLTFDDEADAISLANDTAYGLSGSIWTDDLSRALRVARAVESGNLSVNSHSSVRFNTPFGGFKQSGVGRELGPDAPLQFTETKNVFIAVGEEM

SEQ ID NO: 6819 - protein, 291 aa, Triticum aestivum
FAVLDQIPAPGAGINQWYPGHIAKTEKELKGQLKLMDVVIEVRDARIPLATTHPKMDSWLGNRRRIIVMNREDMVSADDRNAWATYFSSQGIKVIYSNGQLGMGTMKLGRMAKSAASTVNTRRREKGLLPRPVRAGIVGYPNVGKSSLINRLLKRRMCPAAPRPGVTRELKWVRFGKDLELLDSPGILPMRISDQTAALKLAICDDIGERSYDFADVAAILVQILLRHPAVGSEAFRKRYKIDVDSDCGKLFVTKLSVHLFNGDTTQAAFRILSDFRKGRFGWVALERPPT

SEQ ID NO: 6820 - protein, 504 aa, Lycopersicon esculentum
MANRNVPIPRRQLYIGGEWREPVKKNRIPIINPATEEIIGDIPAATAEDVDIAVEAARKAIARDDWGSTTGAQRAKYLRAIAAKVLEKKSVLATLESLDSGKTLYESAADMDDVAGCFEYYAGLAEALDSRRMTPVNLNSDSYKSYVLREPLGVVGLITPWNYPLLMAIWKVAPALAAGCAAILKPSELASITCLELGEICREIGLPSGALNILTGLGPEAGGPLASHPHVDKISFTGSGPTGSKIMTAAAQLVKPVSLELGGKSPIVVFDDIDNLDIAAEWTLFGIFANTGQVCSATSRLIVQENIASAFMDRLLKWTKNIKISDPLEEDCKLGPVVSAGQYEKVLKFISNAKSEGATILCGGERPQHLKKGYYVQPTIITDVNTSMEIWKEEVFGPVLCVKTFKTEEQAIELANDTKYGLGAAVMSKDVKRCERFTKAFQTGIIWINCSQPTFNELPWGGKKRSGFGRDLGKWGLENFLNIKQVTEYTSAEPLAFYKSPSKN

SEQ ID NO: 6821 - protein, 405 aa, Arabidopsis thaliana
MPLSLQSPPCATLSASIRKGRWKTLAAGFSVTPLPAVNFSLRRSIPRILASASSSSSPASSSLEAGENNELNAVSAFSEIVPDTVVFDDFERFPPTAATVSSALLLGICGLPDTIFRNAVDMALADSSCAGLETTESRLSCFFNKAIVNVGGDLVKLVPGRVSTEVDARLAYDTNGIIRKVHDLLRLYNEIDVPHDRLLFKIPATWQGIEAARLLESEGIQTHMTFVYSFAQAAAASQAGASVIQIFVGRLRDWARNHSGDTEIESAIKSGEDPGLALVKRSYNYIHKYGYKSKLMAAAVRNKQDLFSLLGVDYVIAPLKVLQSLKDSPAIPDDEKYSFVRKLTPETATHYHFTNKELVKWDQLSLASSMGPASVELLSAGVEGYANQAKRVEELFGKIWPPPNV

SEQ ID NO: 6822 - protein, 213 aa, Wolbachia endosymbiont of Drosophila melanogaster
MEIFLDSVDLNEIKGLKEFIDGITTNPSLIAKSGRKDKYEDLVREICSIIKGPVSVEVVADSHEEMITEGLNLAKIADNVVIKLPLTHEGLISCKKLWTEHKIPVNITLCFSPGQALLAAKVGACFISPFVGRLDDISYDGLSLIEDICTIYSNYGFDTKVLVASVRSPAHVIEAARLGADSITVPAKVLRQLVNHPLTDQGLAIFEKDWGVK

SEQ ID NO: 6823 - protein, 177 aa, Arabidopsis thaliana
MSSNKIVLTSSDGESFQVEEVVARKLQIVKHLLEDDCVINEIPLQNVTGNILSIVLEYCKKHVDDVVDDDASEEPKGDDASEEAKQNLDAWDAEFMKNIDMETIFKLILAANYLNVEGLLGLTCQTVADYIKDKTPEEVRELFNIENDFTHEEEEEAIRKENAWAFEADTKHEDPKP

SEQ ID NO: 6824 - protein, 369 aa, Oryza sativa
MDAQYNPRTVEEVFRDFKGRRAGLVRALTADVEDFFRQCDPEKENLCLYGFPNEHWEVNLPAEEVPPELPEPALGINFARDGMQEKDWLSMVAVHSDAWLLSVAFYFGARFGFDKNDRKRLFGMINDLPTIFEVVSGKSKAKPPSANNHSNSKSKSSNKTKSSEPRAKQPKPQPQPPVKNEGREEEGGPDDEEGGGGGGGGGREEEHGETLCGACGESYGADEFWICCDICEKWFHGKCVKITPAKAEHIKQYKCPSCSGGNGGGGGVSGNGKQLKICSTKREAIISQYLVRDERSKNTSTHARSPLISDNPYEVISDIRIMLAEQYTTNAREDDFDAKPNDKDNQGEGNVAWGGINKELYSLQVTIQN

SEQ ID NO: 6825 - protein, 515 aa, Glycine max
  misc_feature (252)..(252): Xaa can be any naturally occurring amino acid
EWEMDQLLWRVLPLLTILVSFGVFFYLQDSYTAQFYALIKLPRDKCSLLPHRHFWISSKRIVTPQGIISGSVEINDGKIISVVEGHAKQGKPKQEEIIDYGDAVVMPGLIDVHVHLDEPGRTEWEGFDTGTRAAAAGGVTTVVDMPLNNYPTTVSKEKLKLKLDAAEDKIYVDVGFWGGLIPENALNTSILDGLLSAGVLGLKSFMCPSGINDFPMTTIDHIKAGLSVLAKYRRPIVVHAEIQQDFEKHLEXMSNLDPRAYLTYLNTRPPSWEEAAIKELVGVTKDTRKGGPLEGAHVHVVHLSDSSASLDLIKEAKRRGDSISVETCPHYLAFSSEEIPNGDTRFKCSPPIRDAYNREKLWEAVLEGHIDLLSSDHSPTVPQLKLLEEGDFLKAWGGVTSLQFDLPVTWSYGKKHGLTLEQLSLLWSKKPATFAGLESKGAIAVGNHADIVVWKPEVEFDLNEDYPVFLKHPSLSAYMGRRLSGKVLETFVRGNLVFKKGKHAPSACGVPILAK

SEQ ID NO: 6826 - protein, 176 aa, Triticum aestivum
  misc_feature (108)..(109): Xaa can be any naturally occurring amino acid
  misc_feature (123)..(123): Xaa can be any naturally occurring amino acid
  misc_feature (127)..(127): Xaa can be any naturally occurring amino acid
  misc_feature (130)..(130): Xaa can be any naturally occurring amino acid
  misc_feature (132)..(132): Xaa can be any naturally occurring amino acid
  misc_feature (146)..(146): Xaa can be any naturally occurring amino acid
  misc_feature (151)..(151): Xaa can be any naturally occurring amino acid
  misc_feature (159)..(160): Xaa can be any naturally occurring amino acid
  misc_feature (164)..(164): Xaa can be any naturally occurring amino acid
  misc_feature (166)..(166): Xaa can be any naturally occurring amino acid
MAPTVMASSATSVAPFQGLKSTAGLPVSRRSNGASLGSVSNGGRIRCMQVWPIEGIKKFETLSYLPPLSTEALLKQVDYLIRSKWVPCLEFSKVGFIFREHNASPGYXXAGNWAMWKLPKFGXCTDXTQXVXTKWKEVKKEYPDAXVRIIXFDNMRQVXXVSFXAXKPTGCEVRKG

SEQ ID NO: 6827 - protein, 259 aa, Candida albicans SC5314
MTLTTVSGDPITIGIGTGTSIKDLKRGQPTAENKARIVDILRYALSIGYNHIDTAEVYTTQPEVGTAIAGFQREKLWITTKYSVTSSMIKKKSFTPTDFVEQALDEMNTNYIDLLLIHFPPKPNDPYTIQSLWQEFVSIKATGKVRYIGVSNFDIPQLNTLLEIGTPTINQIQYYLGSDNLEVVEFCKNHGILVEAYGPLTPLRNPNPKTDALIEKLQNANHLTKSQALFRYLLDNNILPITTSFKKERLKEALHSYTY

SEQ ID NO: 6828 - protein, 422 aa, Pseudomonas aeruginosa UCBPP-PA14
MSDLKTAALEYHAQPRPGKLSVELTKPTATARDLSLAYSPGVAEPVREIARDAELAYQYTGKGNLVAVISDGTAILGLGNLGPLASKPVMEGKGVLFKRFAGIDVFDIEVDAESPQAFIDTVKRISITFGGINLEDIKAPECFEIERALIEQCDIPVFHDDQHGTAIVTAAGMLNALELAGKKLEEAKIVCLGAGAAAISCMKLLVSMGAKVENIYMIDRKGVIHAGRDDLNQYKSVFATETDKRTLADALEGADVFVGLSGANLLEPEDLKRMAPNPIVFACSNPDPEIKPELAHATRNDVIMATGRSDYPNQVNNVLGFPFIFRGALDVRATRINEEMKIAAALALRDLAKQPVPEDVCAAYGVDKLEFGREYIIPKPMDKRLITVVSDAVAKAAIETGVATLPYPKNYPLKSVDEVFNG

SEQ ID NO: 6829 - protein, 392 aa, Wolbachia endosymbiont of Drosophila melanogaster
MDHVVNAYNRLDTPIVRGEGAYLFDKDGKKYLDFAAGISTTSLGHCHPYITDKLKEQSSSLWHCSNIFTIPEQERLAEHLTTLTFADKVFFCSSGLEATEAAIKFIRRYFYSKGQAKRNRIITIEGGFHGRSIAAISAGGNEKSREGFAPLLSGFDKVPRNNIKALEEKINNEIAAVFLEPIQSEGGVYPLDVEYLQKVREITKAQGIILCFDEVQCGYGRIGSLFHYQNVGIEPDMLTCAKAMGNGFPVAACLVKDYIAEAITPGTHGSTYGGNPLAMTVGNAVLDIMLKEGFFDHVKRISKYLKEKLLLLAKEFPEMILEVRGEGLLMGIELATLVADKIISRSLDKGLIITRVLNNKVVRVTPPLIIEDEHVNAACNMLYDLFLKIKGI

SEQ ID NO: 6830 - protein, 302 aa, Pyrodictium abyssi
MQRELPRLLEDAVEVLRRRGPVVRLGAGSVLVAGDTHGYPEVSRWVLGLADELGVDAVVFLGDYVDRGPRGVENLSLLVERLLAEPGRVVLLRGNHESPSMNLYYGFRGEFAAKVGVEHLDILHGFYSCLPYAALMGRVLLVHGGVPCRECQGGPEEPLRLGEIEERLRGLFCRRWLLEWGDSVAVQLLWNDPRGELDWFAPSLRGPGIYYYGRLAWKGFLEANGLELIVRAHEAVDAHHVWTSSGRPVHGLEHGYTMGLEELRGSVVTVFSSLYHGAGAGALLLREGEVVFLRYPGGAQGL

SEQ ID NO: 6831 - protein, 173 aa, Oryza sativa (japonica cultivar-group)
MAGVGRTMIAPLLVLNLIMYLIVIGFASWNLNHYINGETNHPGVAGNGATFYFLVFAILAGVVGAASKLAGVHHVRSWGAHSLAAGAASALIAWAITALAFGLACKEIHIGGYRGWRLRVLEAFVIILAFTQLLYVAMLHGGLFSGNHAAGAGGYGGDYPADHHHKPAAAARV

SEQ ID NO: 6832 - protein, 391 aa, Wolbachia endosymbiont of Drosophila melanogaster
MTISPILPVYSPVNINFSHGKGIYLYDVDGERYVDFHSGIAVSSLGHTNSRLISALKLQGEKLWHISNTYNIPAANNFAEKLINNSFADTVFFSNSGSEAVECGLKIARIYQNGKGNKNRHRILTFHGAFHGRTFLTCATNDKQKFSELLNPYIDWCDNIEPNIESVKKAISSGIGVILIEPIQGQGGIKVMNEVFMKELRRLCDENDILLFFDCVQCGAGRTGKLFAYEHIGVEPDICALAKGIGGGFPLGACLATENAAKYMAVGMHGSTFGGNPLATSVGNAVLEELLSPGFLKNVEIRGKYLKNKLEDLASKFPIIEEVRGKGLMLGIKVKADNQKFAEELSHRGLLTVGVTSDNVVRILPPLIITEKEIDEGIEILTQYLSEKSSD

SEQ ID NO: 6833 - protein, 381 aa, Zea mays
FGSRKLDAQQKAHVSLPMDTFKSYVLKEPIGVVALITPWNYPLLMATWKVAPALAAGCAAILKPSELASVTCLELAEICKEVGLPPGVLNILTGLGPEAGAPLAAHPDVDKIAFTGSSATGSKIMTAAAQLIKPVSLELGGKSPIIVFEDVDLDKAAEWTIFGCFWTNGQICSATSRLIVHESIATEFLNRIVKWVKNIKISDPLEEGCRLGPIVSEGQYEKILKFISNAKSEGATILTGGSRPEHLKKGFFVEPTVITDVTTSMQIWREEVFGPVLCVKTFSTEEEAIDLANDTVYGLGSAVISNDLERCERITKAFKAGIVWINCSQPCFTQAPWGGIKRSGFGRELGEWGLDNYLSVKQVTQYISDEPWGWYQSPSRL

SEQ ID NO: 6834 - protein, 157 aa, Triticum aestivum
  misc_feature (41)..(41): Xaa can be any naturally occurring amino acid
PTTLEAKAGSGAFQGLPAIRPAPFRKGGHLVIRGRPCKAFXVSTSNNGKHGHAKCHFVAMTVLDVRNLEDIVLSSHSRGVPHVVRQDYQVIAITHDRYVSVVTQRVIPKDGLQLPTDDLPRGQIKTGFTDGKGPIQYVMHRMGEAQLCAVKEIGGGN

SEQ ID NO: 6835 - protein, 334 aa, Mesorhizobium sp. BNC1
MTAWKVAPALAAGCSCIVKPAEQTPLSAIRMAELAQQAGLPDGVLNILPGLGETAGQAIGRHNDVDIISFTGSTEVGGFFLRYSGESNLKVVGLEMGGKSPFIVLDDADLNDDLVEHAVSSAFWNGGQNCSANMRQLVDTRVADEFVERVVARAEKYKVGDPLDPSTDIGAMVTEEHMKRVVGYIERGESEGARRLTGGARQGRGYFIEPTVFSGLRPEMTIAREEIFGPVLGVMPVKGLDDALRIASDTIYGLHATVFTRDLDRALHLARRLPCGTVSVNGFSEGDIKTPFGGYKQSGSLSRDNGTEAMDQYLQTKTIWITLRGPSNRGSIAG

SEQ ID NO: 6836 - protein, 463 aa, Nostoc sp. PCC 7120
MADLTPNSSFSVTLRLQIPNRVGMLASITQAIASSGGNLGQIDLIEQTRQVSLRDLTVDAASTEHAETIVQAVKAIPDIKLVSVYDRTFNLHRGGKISITSRIPLKSVSDLAMAYTPGVGRVCTAIAQDPSQVYNLTIKQNTVAIVTDGSAVLGLGNLGPHAALPVMEGKAMLFKEFAGLDAFPICLATQDTEEIIQAVKNIAPVFGGVNLEDIAAPRCFEIEKRLRDELDIPVFHDDQHGTAIVTLAALFNSLKLVQKSLADIRIVINGAGAAGVAIARLLRKAGAEKIWMCDSKGIISTTRTDLNEEKQEFAVKAQGTLAGAVQGADVFIGVSAPGVLTPEMVKSMAKDAIVFAMANPIPEIQPELISKDVAVIATGRSDYPNQINNVLAFPGVFRGALDCRAQTITTTMYLEAASAIASLVNPSDLSREHIIPSVFDERVVTAVAAAVQRAAREEGIARG

SEQ ID NO: 6837 - protein, 454 aa, Enterococcus faecalis V583
MQAELVIKNGLVILETGEVITDVAVQGGKIVAIGQDLSGERVIDATGLVVSPGMVDAHVHITDPGGGYRDEWEGYVTGTAACAKGGVTTFMEMPLNQIPATVDKTSLEIKYKAGENKLKVDVGSFGGVVPTNLADGIQELDEGGVSGYKCFLGTCGDRSIEGDFQNVDDYSLYEGMKQVAKTGKVLAIHAENAPITDKLGAVAYQNGETTLAAYVATRPVFTEVEAIQKAILFAKETGCRIHICHVACQEGVEEVLKAQAEGVDVTCETCTHYLYFTTDELDAIGPVVKCSPPIRDADQQAALWNHVQTGGIAFVTSDHSPCTPDLKDTTNAFEAWGGISGVQNNVDVLFDEAVQKRGLSLKQFADMIAANPADRYHLAQKGRISIGKDADFVLIKPNAPYILKAEDLEYRNKISPYIGREIGAQVIQTILRGETIYAQETGVTEAFNGVFIKN

SEQ ID NO: 6838 - protein, 356 aa, Rickettsia sp.
GFMSTASCRSTITYIDGDQGILRHRGYDIKDLAEKSDFLEVAYLLIYGELPNSKQYNDFTKKVAHHALVNERLHYLFQTFCSSSHPMAIMLAAVGSLSAFYPDLLNFFKEADYELTAIRMIAKIPTIAAMSYKYSIGQPFVYPDNSLDFTENFLHMMFATPCEKYKVNPVVKNALNKIFILHADHEQNASTSTVRIAGSSGANPFACVSTGIASLWGPAHGGANEAVINMLKDIGSVENIPKYIAKAKDKNDNFRLMGFGHRVYKNYDPRAAVLKETCKEVLKELGQLDNNPLLQIAIELEAIALKDEYFIERKLYPNVDFYSGIIYKAMGIPPQMFTVLFATARTVGWMAQWKEM

SEQ ID NO: 6839 - protein, 159 aa, Corynebacterium glutamicum ATCC 13032
MTSIHDISVTLNDGTETTMADWAGHLLLIVNVASKCGLTPQYEGLQKLYEEYQDRGFFVIGVPCNQFNGQEPGTDAEVCAFAQNQYDVTFPLLSKTEVNGEGAHPLYKVLKEATDGSEIEWNFEKFLVDAEGNTIKRFAPRTEPSAAEVVEAIEENLPI

SEQ ID NO: 6840 - protein, 371 aa, Pyrococcus furiosus
LAKGLEDVYIDQTNICYIDGKEGKLYYRGYSVEELAELSTFEEVVYLLWWGKLPSLSELENFKKELAKSRGLPKEVIEIMEALPKNTHPMGALRTIISYLGNIDDSGDIPVTPEEVYRIGISVTAKIPTIVANWYRIKNGLEYVPPKEKLSHAANFLYMLHGEEPPKEWEKAMDVALILYAEHEINASTLAVMTVGSTLSDYYSAILAGIGALKGPIHGGAVEEAIKQFMEIGSPEKVEEWFFKALQQKRKIMGAGHRVYKTYDPRARIFKKYASKLGDKKLFEIAERLERLVEEYLSKKGISINVDYWSGLVFYGMKIPIELYTTIFAMGRIAGWTAHLAEYVSHNRIIRPRLQYVGEIGKKYLPIELRR

SEQ ID NO: 6841 - protein, 300 aa, Zea mays
MRTTTHATGATAGTKVGRGFPQHVRSPSASWIPSIGEEDDEEDEEVVVVEEDRVPREWTAQVEPGVQITFVSTAGGAGNDIKRIRFSRDMFNKWEAQRWWGENYDRVVELYNVQTFSRQQGVSTPTSSIDDATQRDSSFYSRAGSTRDSPVILPPTAVGREQPIARATSCRATAAAASTARAACNPSSSAVPDPSDHVWAHHFNLLNSAPAPAPAAPHLDPSRATTSSLDEASVSVSNASDLEATEWVEQDEPGVSITIREFGDGTRELRRVRFSRERFGEERAKVWWDQNRNRIHAQYL

SEQ ID NO: 6842 - protein, 500 aa, Glycine max
  misc_feature (403)..(403): Xaa can be any naturally occurring amino acid
  misc_feature (407)..(407): Xaa can be any naturally occurring amino acid
  misc_feature (409)..(410): Xaa can be any naturally occurring amino acid
  misc_feature (420)..(420): Xaa can be any naturally occurring amino acid
MGLVKKIGKYQLGRTIGEGTFSKVKLAVNGNNGQKVAIKVIDKHMVLENNLKNQAKREIRTMKLLHHPNIVRIHEVIGTKTKIYIVMEYVSGGQLLDKISYGEKLNACEARKLFQQLIDALKYCHNKGVYHRDLKPENLLLDSKGNLKVSDFGLSALQKHNDVLNTRCGSPGYVAPELLLSKGYDGAAADVWSCGVILFELLAGYLPFNDTNLMNLYGKIWKAEYRCPPWFTQNQKKLIAKILEPRPVKRITIPDIVEDEWFQTDYKPVFASEFDQNINLDDVDVAFNSIKENIRESTIPKSSSFINAFQLIAMSQDLDLSGLFEEQDEKKQRTRLGSKHTINETIEKIEAAATDVGLSIEKMNNFKIKMQPKQIMTRCSRSYLSAQVIEVAPTHCVIEISKXTGDXRXXHKFCESLSNXLKQKPDPSQSQDSVDCAAERKNKMLDATKSQKVKIANLFLAINLLEDGLNPCLFHFSEVHGSLTRMKQSTKKNHVANFLL

SEQ ID NO: 6843 - protein, 381 aa, Phanerochaete sordida
MAFSTLVALVALAAIARAAPTTDSAVCSDGTTVNNAACCAFIPLAQDLQANLFQNDCGEDAHEVIRLTFHDAIAISQSQGPTAGGGADGSMLLFPTVEPNFGANNGIDDSVNNLIPFMQKHNTISAGDLVQFAGAVALANCPGAPRLEFLAGRPNKTTAAIDGLVPEPQDSVTKILQRFADAGNFSPFEVVSLLASHSIARADKVDETIDAAPFDSTPFTFDTQVFLEVLLKGVGFPGAANNTGEVTSPLPTGSGADTGEMRLQSDFALARDSRTACFWQGFVNEQAFMASSFRAAMSKLAVLGHSRSALIDCSDVVPQPKPAVNKPATFPASTGPQDLELACTTSKFPTLTTDPGASETLIPHCSDGSMSCPAIQFDGPA

SEQ ID NO: 6844 - protein, 474 aa, Aspergillus nidulans FGSC A4
MWSPFLEVAKALREGHVVEFITQKYNEYGWTFEQNVLGRSGISTIEPENLKALLATQFNDFCLGTREREFGPLLGQGIFTLDGAGWSHSRALLRPQFTRDQVADLDLMESHISRLIELVPKDGSAFDIQRLFFLMTLDSSTHFLFGESVHCMDEGNVLARSTVNNAQGFANAFNTALDYLNWRSVAGNFYWMITSKEFRDANKRVHEVVDYYVHQAIEAKRHPEKKEPGRYIFAEALAADNDNPKVLRDNMLNILLAGRDTTASLLSSAFFYLSRHPAVWEKLRRVIIEEFGDVQNPKGEITHAKLKDLPYLRYVLNEVLRLQPPVPLNLRVAVKDTSLPVGGGPDGKSPVFVEKDQPVLYSVYAMHRRKDLWGPDADSFRPERWEENAKHGWEYLPFNGGPRICLGQQYALTEASYTMVRLMQRFSKVENGEPGLDEPLIRATLTMSHENGVKVRFKLQHVRRKPSPLQTCTR

SEQ ID NO: 6845 - protein, 377 aa, Phanerochaete sordida
MAFTTLFAFVALAAMTRAAPTAVCSDGTRVSNAACCAFVPLAQDLQQTLFMGDCGEDAHEVVRLTFHDAIAISQSQGPKAGGGADGSMLLFPTIEPNFGANNGIDDSVNNLIPFMQKHNTISAGDLVQFAGAVALANCPGAPRLEFLAGRPNKTIAAVDGLIPEPQDSVTKILQRFEDAGNFSPFEVVSLLASHSIARADKVDETIDAAPFDSTPFTFDTQVFLEVLLKGTGFPGQTNVTGEVASPIPVGSGEDTGEMRLQSDFALARDSRTACFWQGFVNEQAFMAASFRAAMAKLAVLGHNRNSLIDCSDVVPQPKPAVNKPATFPATKGPKDLELTCNARFPTLTTDPGAQETLIPHCSDGGMDCPAVQFDGPA

SEQ ID NO: 6846 - protein, 445 aa, Ralstonia solanacearum GMI1000
MKPAPHPLETTDLSYFWMPFTANRQYKAAPRLLVSAQGMYYRDADGREVLDGTAGLWCVNAGHCRKAIVDAITAQAAAMDFAPTFQMGHPVAFRAAEKVAEIMPAGLNRIFFVNSGSEAVDTALKIALAYHRARGEGQRTRFIGRERGYHGVGFGGISVGGIAPNRKAFSANLMPGVDHLPHTHAPEHNAFSKGQPAWGAHLADELERIVTLHDPSTIAAVIVEPLAGSTGVLVPPKGYLERLRALCDKHGILLIFDEVITGFGRLGAATASAFFGVTPDLLTMAKGINNAAVPMGAVAVRQSLHDAVIEAGAPGAIELFHGYTYSAHPLAAAAAVAAIDLYRTEGLFERARALSPAFEAAAHSLKGAPHVKDIRNLGLVAGIELEPRPGAVGARAYEVFLKCLERGVLVRYTGDTLAFSPPLIISEAEIARIFDTVRTVLQEVA

SEQ ID NO: 6847 - protein, 382 aa, Phanerochaete sordida
MAFASLLAIFALVAVASARPRPNPGAVCSDGTRVSNGACCAFIPLMQDLQQNVFQNECGEDAHEVIRLTFHDAIAISRSQGPKAGGGADGSMLLFPTVEPNFAANNGIDDSVNNLIPFMQKHNTISAGDLVQFAGAVALTNCPGAPRLEFLAGRPNKTIAAVDGLIPEPQDDVTKILKRFDDAGGFTPFEVVSLLASHSVARADKVDSTIDAAPFDSTPFTFDTQVFLEVLLKGTGFPGLSNNTGEVASPLPVGTGSDTGEMRLQSDFALARDERTACFWQSFVNEQEFMSASFKAAMSKLAVLGHNRNTLTDCSEIIPEPLPAVKKPATFPATTSAKDLQLTCRALRFPTLTTDQGAQQTLIAHCPNGSMNCTSVQFNGPA

SEQ ID NO: 6848 - protein, 455 aa, Magnaporthe grisea 70-15
MSSTTQAAANKRKRLTGGSTTSLPDEVAAAERAQISESRDASAEEGDTTAAETPATAPTSHPPIKRQRSSNNAVGDATVDLGEPSDTTEASVDIENRVGRKGRKSSNPEKEEESMAPPPIGKLTHPVGYRTNDPPVGRPVRIYADGVFDLFHLGHMRQLEQAKKAFPDVYLIVGVTGDAETHKRKGLTVLSGKERAETVRHCKWVDEVIENCPWIVTPEFLEEHKLDYVAHDDIPYGADEGDDIYGPIKAEGKFLVTQRTEGVSTTGIITKIVRDYEKYIARQLKRGTSRQELNVSWLKKNELDLKRHVQDLRENIRSNWTTTGQELSRELRQYWPASRPQSPAPSRPSLQVPNGDQLTSPQQQSSLREAQLRSPTTPGGANVNSNDFVAGYAVGLIGGVRSWMTKSRRSLRDERDDSSSRPPSDDSSEESEGKEKTTRTRRVVPKGNNAAATGA

SEQ ID NO: 6849 - protein, 243 aa, Triticum aestivum
  misc_feature (90)..(90): Xaa can be any naturally occurring amino acid
NLFGTTVVNCSLNWQTICRYYLKDVALEGGQPFHRAHGMTAYEYNSTDPRANCLFNEAMLNHSTIITKKLLEFYRGFDNVETLVDVAGGXVGATAHAITSKYPHIKGVNFDLPHVISEAPPYPGVQHIAGDMFKKVPSGDAILLKWILHNWTDDYCMTLLRNCYDALPMNGKVVIVEGILPVKPDAMPSTQTMFQVDMMMLLHTAGGKERELSEFEELAKGAGFSTVKTSYIYSTAWVIEFVK

SEQ ID NO: 6850 - protein, 508 aa, Arabidopsis thaliana
MGSANNEYEFLSEIGLTSHNLGSYVAGKWQANGPLVSTLNPANNQPIAQVVEASLEDYEQGLKACEEAAKIWMQVTAPKRGDIVRQIGDALRSKLDYLGRLLSLEMGKILAEGIGEVQEVIDMCDFAVGLSRQLNGSVIPSERPNHMMLEMWNPLGIVGVITAFNFPCAVLGWNACIALVCGNCVVWKGAPTTPLITIAMTKLVAEVLEKNNLPGAIFTAMCGGAEIGEAIAKDTRIPLVSFTGSSRVGSMVQQTVNARSGKTLLELSGNNAIIVMDDADIQLAARSVLFAAVGTAGQRCTTCRRLLLHESVYDKVLEQLLTSYKQVKIGNPLEKGTLLGPLHTPESKKNFEKGIEVIKSQGGKILTGGKAVEGEGNFVEPTIIEISADAAVVKEELFAPVLYVLKFKSFGEAVAINNSVPQGLSSSIFTRNPENIFRWIGPLGSDCGIVNVNIPTNGAEIGGAFGGEKATGGGREAGSDSWKQYMRRSTCTINYGNELPLAQGINFG

SEQ ID NO: 6851 - protein, 65 aa, Brassica napus
  misc_feature (17)..(17): Xaa can be any naturally occurring amino acid
  misc_feature (25)..(25): Xaa can be any naturally occurring amino acid
  misc_feature (29)..(29): Xaa can be any naturally occurring amino acid
  misc_feature (32)..(32): Xaa can be any naturally occurring amino acid
  misc_feature (58)..(60): Xaa can be any naturally occurring amino acid
  misc_feature (63)..(63): Xaa can be any naturally occurring amino acid
MSTFLMRILLALLVLAXTVSQQLEXESEXWCXADEQTPDDELQAALDWACSKGGADCXXXQQXNQ

SEQ ID NO: 6852 - protein, 471 aa, Triticum aestivum
  misc_feature (423)..(423): Xaa can be any naturally occurring amino acid
MGATGDSEVAAAEGAAAGCRARAALLGAYELGRTLGEGNFGKVKQARHRATGEHFAVKILDRGRVLSLRGADDQVRREIATLTMLAHPNVVRLHEVAASKTKIYMVLEFVNGGELFDRIAIKRKLSEREGTRLFQQLIDGVSYCHGKGVYHRDLKPENVLIDRKGNIKISDFGLSALPQHLGNDGLLHTTCGSPNYIAPEVLQNRGYDGSLSDIWSCGVILYIMLVGHLPFDDRNMVVLYQKIFKGDTQIPEWLSPGAQNLLKRILEPNPMKRINMAEIKLHEWFQKDYIPAAPYDDDDEDVRLGAILPIKQQISEAPGDKSTHQMNAFQLIGMASSLDLSGLFEEEGVSQRKIRFTSAHPPKDLFDKIEVSATQSGFHVQRAHSKLKITGNCNGPNNPTPFLVCAEVFALGPSLHGVELRKXHGDTAVYKKLCDRISSDLGIDKTFGMGSLFDDNLPGFDSRATTPLVAL

SEQ ID NO: 6853 - protein, 166 aa, Vitis vinifera
SRSRKEKENVSFKNHVVQWFEVLDGLLGPYWKAVGLAFNCTFLLIGSVIQLIACASNIYYINDKLDKRTWTYIFGACCATTVFIPSFHNYRIWSFLGLGMTTYTAWYLAIAALIHGQSEGVEHSAPTKLVLYFTGATNILYTFGGHAVTVEIMHAMRKPQKFKYIY

SEQ ID NO: 6854 - protein, 470 aa, Gibberella zeae PH-1
MAPSTIADFQDVPCHQAYTPIKPIHREGALMHRSLVQHPYMVESAQGIELKLSTGQTIIDGCGGAAVALIGHGREEVIHAITEQARKVSYVHTQSYTTAPAEELANVLLQGNPYGLEKAFFVGSGSEAVESALKLARQYHYEKGGLEKVHIISRRQCYHGNTMATMSISTNIARRAPYHGFLYPNVSHVSPAFAYHYKDSSESEDQFTARLLVELEEEFLRVGPQKVAAFIAETVVGATSGCVAAPAGYFQGVRALCDKYDVVMILDEIMCGIGRTGTFFAFEQEGVVPDITTVAKGLGGGYAAIAGVLIHKRVVDVLRQGSAAFNHGHTYQAHPISCAAALAVQRIVRRDNLVERCAEMGLVLEKMLKEDLSGCRSVGDIRGRGLFWGVEFVKDRQSKQPFDPAAKFGLLVQQLAFEKGVALYPGGATIDGVKGDHILLAPPFTVTEGSGGGGKNSLLGLTTAHKNMTI

SEQ ID NO: 6855 - protein, 351 aa, Streptococcus agalactiae NEM316
MRAATYLSANELSLTDKAKPQVIKPTDAVVRLVKTTICGTDLHILGGDVPACKPGTTLGHEGIGIVEEVGSAVNHFKVGDKVIISCVTACNTCYYCKHQLPSHCEDGGWILGHLIEGTQAEYVHIPHADGSLYHAPEGVCDDALVMLSDILPTSYEIGVLPSHIKPGDTVCIVGAGAIGLSALLTAQFYSPAKIIMVDLSQKRLEASKKFGATHTILSTSTQEVKEEIDKITKGRGVDVVLECVGYPATFDICQNVVSIGGHIANVGVHGKPVEFNLQDLWIKNITLNTGLVNANTTEMLLEVLETGKIDATQLVTHHFKLSEIEEAYKVFKAAEENNTLKVIIENDITPA

SEQ ID NO: 6856 - protein, 202 aa, Triticum aestivum
MRWSPPGPRELITYHHQRPFLPPSSSSRVLIHHPAQVMIKVAMSDSEDHHFESKADAGASKTYPMQAGAIRKGGFLVIKNRPCKVVEVSTSKTGKHGHAKCHFVALDIFNGKKLEDIVPSSHNCDVPHVDRTEYQLIDISEDGFVSLLTDNGSTKDDLKLPTDDAILTQLKDGFAEGKDLALTVMSAMGEEQICAVKDVGPR

SEQ ID NO: 6857 - protein, 1023 aa, Schizosaccharomyces pombe
MNAQPFHNNTSDVQSFQDIISNSYQKPLSLVDSTDRALPDSSLSSLSRSTFQFHKHHLSGNENPQPSSESPYFTNNERLNSSSFPQIHDNQLSPSFNTSYQAIPSSSSNRSRGGPYTPSIRDDSLLALLSFSSNHRLHSMPSQLQPFNNASSYTTPMAPFTASFSNKVSHSAYPTRRLPSQAKKTSAIERVPVNLNFLQSDNLVVQSSPQTNFENFEFPKKIPSKEDLETREVLLLPPQTSKLSNKNLDTKSFTDVNKISQQGFVEISSNSSKVTPNTSLHQSFGIASSSSNNYMQTSSELTSSTEKMNGSHPLQLSNKSLLSIHLMQSKNQGHVSMTGSDKLSSHVQSETENAPVSKPSKPNTLTEDEKPLQSTKLPGNSLTVGELYQEPKSIQLPELSVSRTTYSAQSSSVKNCNERIPSAKALKKQKHLVPENKSKLQYVWQKKESLPYANLTSASNTHFFLSENQNDTSERLTRTLRKSTKNYTFGSYILGRTIGTGEFGKVKLGWPLPKANSTIHRSTPQVVIKIVLSTKQNCQTSRLMREVAILKGLGNNHPHIVKYLDFVKTKHHFGIVLDYVNGGELFDYILARRRLEDSVACRLFAQLISGVAYLHSRGVVHRDLKLENILLDTNRNIVIADFGFATTFGHFNTLSEHSLPTEKPDLFSTSCGSPCYAAPELVNCKSGMYAGTQADIWSCGVILYAMLAGYLPFDDDPHNPNGENVPRLYRYICSTPLIFPEFFKSKARDILKKILVPDPAKRVRMSAIMNHAYLRSHVSLFETYNDDEATSLRPSPIRLLSQKSLASVSSVSSISTYSSSIELTPQITKTSLNREKPALHGSINLKHSTRPVVPIADGIYASTTLHPIDNAKNRLVSLLRRPKHKVKHAKVETRESPMKNKPTKKQHKRAFSMFERPTSQKAPLSPVESKINLMVAPKRVLNCASDSLRALLAGKTDKSFWGSRIPFLFNKLKSKQKAVSSSFNTENSFLILQAVSPLTFGGCFKEENAYGQKKQHMRHATVF

SEQ ID NO: 6858 - protein, 315 aa, Magnaporthe grisea 70-15
MAAATQKSCLQKLEEMLDVDVDDMDADYIRSMPIKPHDQTSNQAFVDVALAQESNKDLVFQVATEMKGSDWLAVYTRIAVLMCKKNLDLISGRVLLQTSPSKAYDTAATLAHARLYDAEFTRAGVPRDRFCIKIPSTGPGLNAAKVLQGEGISTLGTALFSVVQAVACSQAGCLSISPYFNGHFISVEEAMAAAEMGCQSATLSREILTKLAETPYDANTQPGEGRPKPPHAYNAPEPLPARLQPLLKHDPLTEGWDGSSPSTDVDYLADGGAALQAAIEADPATQKRVRDALEFFVDAEERSRKRIETVMAAVA

SEQ ID NO: 6859 - protein, 317 aa, Zea mays
  misc_feature (110)..(110): Xaa can be any naturally occurring amino acid
MMDPALLDDVIRRLLEVKNLKPGKNAQLSESEIKQLCAAAKEIFLHQPNLLELEAPIKICGDVHGQYSDLLRLFDYGGYPPQANYLFLGDYVDRGKQSLETICLLLAYKXKYPENFFLLRGNHECASVNRIYGFYDECKRRFSVKLWKTFTDCFNCLPVSALIDEKILCMHGGLSPELNKLEQILNLSRPTDVPDTGLLCDLLWSDPSNEATGWAINDRGVSYTFGPDKVSEFLEKHDLDLICRAHQVVEDGYEFFASRQLVTMFSAPNYCGEFDNAGAMMSVDETLMCSFQILKPARKVLGGSTNNKSGFKSSRGW

SEQ ID NO: 6860 - protein, 229 aa, Triticum aestivum
MGERVKGTVKWFNVTKGFGFISPEDGSEDLFVHQSAIKSDGYRSLNENDTVEFEVITGDDGRTKASDVTAPGGGALSGGSRPGDGGGDRGGRGGYGGGGYGGGGGGGGYGGGGGGYGGGGGGYGGGGGGRGCYKCGEEGHISRDCPQGGGGGGGYGGGGYGGGGGGGRECYKCGEEGHISRDCPQGGGGGGGGGGYGGGGGRGGGGGGGGCFSCGESGHFSRECPNKAH

SEQ ID NO: 6861 - protein, 139 aa, Aeropyrum pernix
MSVNYATLGDLKKGSYIVIDGEPCRIVEMSRAKTGKHGSAKAHVVAICVFSGQKKSLVAPVDTRVQIPVIEKRLGQVLADMGDMVQIMDLETYDTFEVEKPGGNEEEEQLAAKLQPGVTVEYWLIMGKPKIIRIRSSSS

SEQ ID NO: 6862 - protein, 275 aa, Salmonella typhi
  misc_feature (175)..(175): Xaa can be any naturally occurring amino acid
MANPTIIRLQDGNVMPQLGLGVWKASNEEVIAAIHKALEVGYRSIDTATAYQNEEGVGKALKAASVAREELFITTKLWNDDQKRPREALQESLKKLQLDYLDLYLMHWPVPAIDHYVDAWKGMIALQKEGLVKSIGVCNFQIHHLQRLIDETGVPPVINQIELHPLMQQRQLHAXNATHKIQTESWSPLAQGGEGVFDQKVIRELADKYGKTPAQIVIRWHLDCGLVVIPKSVTPSRIAENFAVWDFRLDKDELGEIAKLDQGKRLGPDPDQSGG

SEQ ID NO: 6863 - protein, 428 aa, Aspergillus nidulans FGSC A4
MALFLTGYLLLTFTLTLSFSTLRVWAAGRWPDVVAQELGPQLSSLASIITEPGAVESDFERWSAYSAPQPGVVVSVATEEDVAKTVKFCVSNSIRFLAQNGGHGWADTFDLGPNRRGLLIDITQLNTVVFNANRTQVTLGGGVSIGEAVAAAVEHDTLIPTGNCNCVGTLGAILGGGYGNLLGMVGFGVDNVLELKVVLADGEVHTVTPGRQGKDHDLFWALRGAGPNYGIVTSATLKAYPVDSATNITAWMGQLVFSGEQVEAVVQAIEELTLTPEMNIFLYYMTVNGTQRFIATPFYYGDEGEARGRAAFASLLDIGPIEDQTAEVPYARWNDGSDGFCTSGGYKPAYSAALQTQNSVVIMEAYSLDRARALPDDSAAFPGRSRVNFQAVAIPWYYDQGLENSAIAWGETMRALWWETDGLDDPAV

SEQ ID NO: 6864 - protein, 174 aa, uncultured marine gamma proteobacterium EBAC31A08
MNKFYIFGLLFFTLNAFSCSDLLDTDMRVLDSAESRNLCEFEGKALLVVNVASRCGYTYQYAGLQKLYESYKDEDFLVIGIPSRDFLQEYSDESDVAEFCSTEYGVEFPMFSTAKVKGKKAHPFYKKLIAESGFTPSWNFNKYLISKEGKVVSTYGSKVKPDSKELISAIEGLL

SEQ ID NO: 6865 - protein, 284 aa, Desulfitobacterium hafniense DCB-2
MELWYTEEHTENVRFSIKVDRQLYSGQSEFQRIDVFESKEFGTFFTLDGLMMVTQKDEFIYHDMIVHVPMATNPQIKDVLVIGAGDGGTVRELTRYDSIVNIDMVEIDKLVVDVCKEYLPQTACKLEDPRVRLFFEDGLRFIRTKENSYDLIIVDSTDPFGPGEGLFTKEFYGNCYKALKDDGILVNQHESPYYETYAQNMGRAHQRIKEFFPVCRVYQAHIPTYPSGHWLFGFASKKYDPLIDIDEQAWNDLGIKTQYYNTEIHKGCFALPNYVKEQLADAVE

SEQ ID NO: 6866 - protein, 252 aa, Zea mays
MASKSTLRSLVLIMGLLLLSCSGMSSAARLLEEVAPKEEYPHPEVPELPKPELPPHPTVPELPKPVVPELPKPEVPVHPAVPELPKPEIPPHSTVPELPKPEVPELPKPEVPEHPAVPELPKPELPPHPTVPELPKPEVPELPKPEVPEHPAVPELPKPELPPHPTVPELPKPEVPELPKPEVPEHPAVPELPHPDVPEHPASVPELPKPEVPEHPTVPELPKQELPPLPEPELPLPPKAESHYPEPGMAKP

SEQ ID NO: 6867 - protein, 461 aa, Sorghum bicolor
MDERRTILMDRYEIGRQLGQGNFAKVYFARNLTDGQSVAIKMIDKDKITRVGLIVQIKREISIMRLVKHPNVLQLFEVMASKSKIYFVLEYAKGGELFNKISKGKFSEDVARRYFHQLISAVDYCHSRGVYHRDLKPENLLLDENENLKVSDFGLSALAESKRHDGLLHTTCGTPAYVAPEVLSRRGYDGTKADIWSCGVILFVLVAGYLPFHDPNLIEMYRKISKAEYRCPRSFSGELKDLLFRMLDPDPSTRISISRIKRSTWYRKPIEVNSAKIKHDTTRDKVCNGEATTSNSIECSNSEETRGSSSLPNLNAFDIISLSTGFDLSNLFEEKYGRREERFTTRQPAGTVFAKLNELAERLKLKIKKKENGVLKLASPKEGIKGFLELDAEIFELAPSFLLVELKKTNGDTIEYQRLVKEEIRPALKDMVWAWQSDRHQQRNESVQGEQQLSSPLPPQQ

SEQ ID NO: 6868 - protein, 466 aa, Shigella flexneri 2a str. 301
MDQKLLTDFRSELLDSRFGAKAISTIAESKRFPLHEMRDDVAFQIINDELYLDGNARQNLATFCQTWDDENVHKLMDLSINKNWIDKEEYPQSAAIDLRCVNMVADLWHAPAPKNGQAVGTNTIGSSEACMLGGMAMKWRWRKRMEAAGKPTDKPNLVCGPVQICWHKFARYWDVELREIPMRPGQLFMDPKRMIEACDENTIGVVPTFGVTYTGNYEFPQPLHDALDKFQADTGIDIDMHIDAASGGFLAPFVAPDIVWDFRLPRVKSISASGHKFGLAPLGCGWVIWRDEEALPQELVFNVDYLGGQIGTFAINFSRPAGQVIAQYYEFLRLGREGYTKVQNASYQVAAYLADEIAKQGPYEFICTGRPDEGIPAVCFKLKDGEDPGYTLYDLSERLRLRGWQVPAFTLGGEATDIVVMRIMCRRGFEMDFAELLLEDYKASLKYLSDHPKLQGIAQQNSFKHT

SEQ ID NO: 6869 - protein, 181 aa, Zea mays
  misc_feature (52)..(52): Xaa can be any naturally occurring amino acid
MASSMLSSATMVASPAQATMVAPFNGLKSSAAFPATRKANNDITSITSNGGXRVNCMQVWPPIGKKKFETLSYLPDLTDSELAKEVDYLIRNKWIPCVEFELEHGFVYREHGNSPGYCDGRYWTMWKLPLFGCTDSAQVLKEVEECKKEYPNAFIRIIGFDNTRQVQCISFIAYKPPSFTG

SEQ ID NO: 6870 - protein, 174 aa, Triticum aestivum
  misc_feature (45)..(45): Xaa can be any naturally occurring amino acid
  misc_feature (112)..(112): Xaa can be any naturally occurring amino acid
  misc_feature (127)..(127): Xaa can be any naturally occurring amino acid
  misc_feature (137)..(137): Xaa can be any naturally occurring amino acid
MSDTDEHHFESKADSGASKTYPQQAGAIRKGGHIVIKARPCKVVXEVSTSKTGKHGHAKCHFVAIDIFNGKKLEDIVPSSHNCDVPHVDRQDYQLIDITDDGYVSLLTESGXTKDDLKLPTDDGLLXQIKTGFADGXDWILAVMSAMGEEQICAVRKIGWQVAVAWLATCDTCI

SEQ ID NO: 6871 - protein, 498 aa, Medicago truncatula
MGILSYLCYSLFYLSIFFIIRLLFQSRKFKNLPPGPTSLPIIGNLHHLKRPLNRTFKALTEKYGNVISLWFGSRLVVVVSSLSEFQECFTKNDVVLANRPRFLSGKYIFYNYTTLGSTSYGEHWRNLRRITSLDVLSNHRINNFAPIRRDETQRLIKKLAEDSSTKFAEVELTFRFFDMTFNNIMRMISGKRYYGDDCDISEVQEASQFRDMVSELLQLSGANNKTDFMPLLKFLDFENLEKRVKRIGEKNDVFLSGLLQEQRSKKERTNTMIDHLLNMQESQPEYYTDTIIKGLCLAMLLAGTDSSAVTLEWTMSNILNYPEVLKKVRDEVDTHVGQDRLVDESDLPKLTYLRNVIYETLRLYTPAPLLLPHSTADECIMGGYKVPRDTIVLINAWAIHRDPETWSEATTFKPERFDKKGELEKMIAFGMGRRACPGEGLALRAISMTLALLVQCFDWKRINDEKIDMSERDGFTMTKLLPLKAMCKTRPVVNKVFK

SEQ ID NO: 6872 - protein, 291 aa, Saccharomyces cerevisiae
  misc_feature (1)..(1): Xaa can be any naturally occurring amino acid
XVHVASVEKGRSYEDFQKVYNAIALKLREDDEYDNYIGYGPVLVRLAWHISGTWDKHDNTGGSYGGTYRFKKEFNDPSNAGLQNGFKFLEPIHKEFPWISSGDLFSLGGVTAVQEMQGPKIPWRCGRVDTPEDTTPDNGRLPDADKDAGYVRTFFQRLNMNDREVVALMGAHALGKTHLKNSGYEGPWGAANNVFTNEYYLNLLNEDWKLEKNDANNEQWDSKSGYMMLPTDYSLIQDPKYLSIVKEYANDQDKFFKDFSKAFEKLLENGITFPKDAPSPFIFKTLEEQGL

SEQ ID NO: 6873 - protein, 484 aa, Triticum aestivum
MANNNSSYGENVSRKSHTPSAIVIGGGFAGIAAANALRNASFRVVLLESRDRIGGRVHTDYSFGFPVDLGASWLHGVCEENPLAPIIGRLGLPLYRTSGDDSVLFDHDLESYALYDTNGSQVPQEFVEKIGEVFEAILEETAKLREEMREDISIAKAIAIVLERNPHLRQEGIAHDVLQWYWCRMEGWFATDADAISLQCWDQEVLLPGGHGLMVRGYRPVINTLAKGLDIRLGHRVVEIVRHWNRVEVTVSNGKTFVADAAVITVPLGVLKSNTIKFEPRLPEWKEEAIRELSVGVENKIVLHFSEVFWPNVEFLGVVSSTTYGCSYFLNLHKATGHAVLVYMPAGRLACDIEKMSDEAAAQFAFSQLKKILPNAAEPLNYLVSHWGSDENTLGSYTFDGVGKPRDLYEKLRIPVDNLFFAGEATSVQYTGTVHGAFSTGEMAAEECRMRVLEKFRELDMLEMCHPMAEQTATVSVPLLISRL

SEQ ID NO: 6874 - protein, 291 aa, Saccharomyces cerevisiae
  misc_feature (1)..(1): Xaa can be any naturally occurring amino acid
XVHVASVEKGRSYEDFQKVYNAIALKLREDDEYDNYIGYGPVLVRLAWHISGTWDKHDNTGGSYGGTYRFKKEFNDPSNAGLQNGFKFLEPIHKEFPWISSGDLFSLGGVTAVQEMQGPKIPWRCGRVDTPEDTTPDNGRLPDADKDAGYVRTFFQRLNMNDREVVALMGAHALGKTHLKNSGYEGPWGAANNVFTNEKYLNLLNEDWKLEKNDANNEQWDSKSGYMMLPTDYSLIQDPKYLSIVKEYANDQDKFFKDFSKAFEKLLENGITFPKDAPSPFIFKTLEEQGL

SEQ ID NO: 6875 - protein, 254 aa, Acinetobacter sp. ADP1
MTPQQIELVKSTVPVLREHGVTLTSYFYNRMLNNHPELKNVFNLDHQSTGRQPRALAAAVLAYAEHIEQPEKLAKAVERITTKHVSLNIQPEQYAIVGENLLHSISEVLNVPFESELIEAWKQAYLQLADILIEVEKEKYHQLAKQDGGWTGWRSFKIIAIQEQYEGKCFKISATDQQAILAATLGEYISVKVHVPEKELDQPQQFNLNTTQADDHYEFVVKPEPAHSDYDVANILLNHYSLGDEVMVSAPIRN

SEQ ID NO: 6876 - protein, 534 aa, Glycine max
MGNCCATPSTDETANKKGKKGKKENPFAIDYGFNATAANGSKLTVLKSPTGREIEARYELGRELGRGEFGITYLCTDKGTGEELACKSISKKKLRTAIDIEDVRREVEIMRHLPQHANIVTLKDTYEDDNAVHLVMELCEGGELFDRIVARGHYTERAAAAVTKTIVEVVQMCHKQGVMHRDLKPENFLFANKKETAALKAIDFGLSVFFKPGEKFNEIVGSPYYMAPEVLKRNYGPEVDIWSAGVILYILLCGVPPFWAETEQGVAQAIIRSVVDFKRDPWPKVSDNAKDLVKKMLDPDPKRRLTAQDVLDHPWLQNAKKAPNVSLGETVRARLKQFSVMNKLKKRALRVIAEHLTVEEAAGLKEGFQLMDTNNRGKINIDELRVGLHKLGHQVPESDVQALMDAGDVDGDGHLDYGEFVAISVHLRKMGNDEHLRKAFQFFDQNKSEYIEIEELRSALSDDLDTNSEEVISAIMHDVDTDKDGRISYDEFATMMKAGTDWRKASRQYSRERFASLSLTLMRDGSLHLNNEKQ

SEQ ID NO: 6877 - protein, 501 aa, Medicago truncatula
ALFYYSLLSLSFIITIKILLKITSRRLKNLPPGPPTIPIIGNLHHLKHPLHRTFTTLSQTYGDIFSLWFGSRLVVVVSSPSLAHECFTKNDIILANRPRFLTGKYIFYNYTTLGSASYGDHWRNLRRITTIDVLSNNRLNSFLGVRRDETNRLIQKLLKDVVSEGFGFTKVELRPRLTEMTFNAMMRMISGKRYYGDDGDVSDVEEAKQFREIISEMMSLLGANNKGDFLPLLRVVDLDNLEKRCKRIAKRSNAFLEGLIEEHRRGNIHSDGGTMIDHLLKLSESQPEYYSDHLIKGLIQGMLLAGTDTSAVTIEWVMSELLNHPEVLKKAKEELDTQIGKNKLVDEQDLSKLPYLQNIISETLRLHPPAPLLLPHYSSEDCTIGEFNVPKDTIILTNVWGIHRDPKHWNDALSFKPERFEKEEEVNKVMAFGLGRRACPGLSLAQRTVGFTVGLLIQCFEWERESEEKLDMMEGKGITMPMKIPLRAMCKALPIANDVTK

SEQ ID NO: 6878 - protein, 384 aa, Exiguobacterium sp. 255-15
MLTPSAITIIKSTVPVLAEHGHSITRVFYQRLFENHPEMKHIFNQSNQKNDRQSQALATAVYAAAAYIDQLETLKPTLLPVLHKHRSLQIKPYMYDIVGTELIGAIQDVLKDAATPDIIDAWTAGYGEIAKLFISLEAELYQQDEQATDFEGYQPFVIETMTTESSDIKAFTLRPADGRPLAPYQTGQYVTVRLQAPDGLWQNRQYSLTTVANGTSYTIGVKQDGSVSRQLHGLSVGEKVLLSAPAGSFTLTDASTPFVGLAGGIGLTPLLAMTEAALAVGRKTTLYVAVQDDLDRPFAEQLARFEEQGATIIRYAERNALPGTTPGRLSVADVTNIDPAADTYVCGPEAMIQFVRRYFSGQADKLHFEVFGPSLALEAPTAVS

SEQ ID NO: 6879 - protein, 120 aa, Glycine max
  misc_feature (45)..(45): Xaa can be any naturally occurring amino acid
FGTNKAAQLASSMISSPAVTTVNRAGAGMVAPFTGLKSMAGFPTXKTNNDITSIASNGGRVQCMQVWPPVGKKKFETLSYLPDLDDAQLAKEVEYLLMKGWIPCLEIQLEQRFVFREPHQ

SEQ ID NO: 6880 - protein, 1238 aa, Brassica napus
MDGKGKKCGSKKESKVFDFEDDDEPIGSLLKVMKHKTATKSKVETETTGKQRQKGAVEKKLTHVRKDSEDMDDTLASFRKRLKGHKKRVRNDKDVPPVDTVTDSNLIPSPDMADDASELGREGTVNKKSLDDIYKTKVKSSTRSVTLEKEADADDKSKRPLPNVDVYPPVDRKDVSVPSPDQHIHLGEPESESGHFREEKIVMCDCGIQFNFEDRSLDSNSEVAICQKCKRSSHRDASNGGGIQVNTLKDGTAEASPVSVTPYEDEDFRGDAVSLPNSGKPSTLQRPERIARKRKHENMVYGEDMNWENEQGFLDCQSDKSFKGSDKCDFGPFISKEFEIGRAAAVAAGLKAQSVSPVEKTILKEVLKRKGSHQEYLRCRNSILGLWSKNVSRILPVTECVVGHSESEFPSAGLIREVYKFLDQRGYINTGVSSVRGKGGPSTNHDDDLSQGKKLEESSMASVANSDGDTFIFGQVKAVESTSEGKNCALQNDETEIVECATSAMLGSTRKTCEASIIDDCKHSVSINALLADANAPKVEKCPETISVRKTVLSSTLSSANCDQMRGRDCVQGEVEDEKKVIVIGAGPAGLTAARHLQRQGFSVTVLEARSRVGGRVYTDRSSLSVPVDLGASIITGIEADVPSERMPDPSALVCNQLGEKVPPELDDALQGEFNSLIDDMDLLVEEIGKDRANKMSLEDGLEYGLQRLRMPHEKVNIERFGIGNSINGSFSRTGITGTFKHDGRLKEDFLNPLERRVMNWHFAHTEYGCAAVLKEVSLSNWNQDEFYGGFGGPHAMIKGGYSRVAESLAEGLDIRLNNVVSEVSYASDVSAMHNNKHKVIVSTSNGGEYLGDAVLVTVPLGCLKAETIKFSPPLPDWKYSSIKQLGFGVLNKVVLEFSKVFWDDSLDYFGATAEETDQRGECFMFWNVKKTVGAPVLIALVVGKAAVDYKDKSKSEHVNHAMMVLRKLFGGDLVPDPVASVVTDWGADPYSYGAYSYVAIGASGEDYDVLGRPVQNCLFFAGEATCKEHPDTVGGAMMTGVREAVRIIDILRSGNDYTAEIETLEKAQRKSVSIRDEVSDLIKRLEVVELSNVLARHSLLRNMFFSAKTTVGRLHLAKELLNLPGETLKSFAGTKEGLTVLNSWILDSMGKNGTQLLRHCVHILVRVTSDLFAVRLSDSKGNLSNGNYTTTDGEIEDNQLPMSEEEKAVFATAEAARVAAEAAAKASFFYLRMSEMH

SEQ ID NO: 6881 - protein, 324 aa, Magnaporthe grisea 70-15
MDSYQEPTGEEPPTIDPYEVLSLDHTATPDQVKAAYRKAALKNHPDKVPEDQKASAHEKFQQIAFAYAVLSDPARRARYDATGSTSESIVDSDGFDWSDFYRAQFADAVSGEAIEKFARTYKGSDEERDDVLAAYEAGRGDLDVVYESVMLSNVLEDDERFRAWIDEAISKGDVEGFKAYTKESKKKRDKRVKDAKGEAAEAEEYAKELGVHGKLFGGGAAGEGKGKGKGKKKDAGGEDALAALIRGRQADRMDALDRLAEKYGAAAPKAKKKGKKRAAEDEDDEDGGEPSEEAFQATQARLFGKKSNGEKAAAGSTKKRTRRG

SEQ ID NO: 6882 - protein, 315 aa, Bradyrhizobium japonicum USDA 110
MPVVLDPDAAAVYMAFQEAGRPAYETLTAAEARAYYAQARFATNPEPPELARVAPLAIPAPHGTIPARIYVPNDPRRHDGLSPALVFFHGGGWVIGDLDSHDVVCRQLAVEAALIVISVDYRLAPEHKFPAAADDAIAATKWVAANACELGIDASRLSIGGDSAGGNLAAVVALAARDDSGPAIAGQILIYPAVDFAMTHGSHSEPETSVLLTHSVIRWFRDHYLNGAADIHDWRASPARAENLAGLPPAYVLTAGADPLRDEGDEYAARLKQAGVSVTYKHFPGQFHGFFTMGKLLREANVAVSEIGAWLKGLG

SEQ ID NO: 6883 - protein, 468 aa, Methanosarcina acetivorans C2A
MISRKMNLESLDESKKYRVGAYSARYVPKTKEKGIPKYEFPEEGMSPRAAYQLVHDEQSLDGNPFLNLASFVNTWMEPEADKLVMENISKNIIDIFEYPQTSRVIHHNMVNMLGRLFNGHHTDFVGTSTAGSSEAIMLGLLAHKWSWKKSGRGTDKPNIIFGNDAHVCWDKFARYFDVDTRKVPIDKDRRTITAEAVAERIDENTICVGCVLGTTFTGEIDPVKDINDLLLEYKEEKGWDIPIHIDAASGGFILPFTEPDFEWDFRLERVKSINVSGHKYGLTYPGLGWLIFRNKNALPEDLIFHVNYLGEMEDSYTLNFSGGSAMVAAQYYNFLRFGRAGYTGIMKKILAVSQDLAEKVDRLGRFEMLNKGERLPIIAFRQKEKTGYSLLQLSHKLREKGWIVPAYCLPENAADIEIMRIVVRENLTPDMASIIVEDLEKACQFLENGTEAGAEKPCPSGKDMAHIC

SEQ ID NO: 6884 - protein, 437 aa, Methylobacillus flagellatus KT
MPISLLPLTLLFSLCIVPLPVSAGEGAPQALAVDSVWVAISGALVFMMQAGFAMLESGMTRAKNAVNVMMKNYMDLAVGALLFWLVGYGLMFGSNPSGWIGTDHFALAHGDDWGASMLFFQVMFAATAATIVSGAMAERTNFIAYLLGACGIMALIYPVFGSWAWNEHGWLKQMGFIDFAGSTVVHSVGAWCALAGIMVLGPRLGRFGSKGEVHMIPGHNLSLVAMGGFLLWFGWFGFNGGSTLAAGVEIGPILLNTHMAGAAGAVGALLVALAMRRPILMAYVVNGSLGGLVAITAGCASMDVPFAVLTGFIGGIVTMLGVWALEKLRLDDVVGAVAVHGFSGVWGTVAAGLFLKDNMFDLNQVLVQMIGVAVAFVWVFLSALLMYGLLARTIGLRVSTMHEQRGLDITEHGEVGYPEFNREAAYQPEHVQHLSRL

SEQ ID NO: 6885 - protein, 206 aa, Zea mays
  misc_feature (160)..(160): Xaa can be any naturally occurring amino acid
  misc_feature (168)..(168): Xaa can be any naturally occurring amino acid
MTTGEGAEAAAVPRVVSILSALLQRVAERNDAAAAAPPPAAAAGPPVLSAFQGLTKPAISIGGYLERIFRFAGCSPSCYVVAYIYLDRFLRRRPALAVDSFNVHRLLITSVLTAVKFVDDICYNNAYFARVGGISLVEMNYLEVDFLFGIGFDLNVAPGXFGDYCAVXRSELLCAEAAPAPLRLQHCCLSEDDAGAGCSAQQQLAA

SEQ ID NO: 6886 - protein, 252 aa, Zea mays
  misc_feature (148)..(148): Xaa can be any naturally occurring amino acid
MAKNYPTVSAEYSEAVEKARRKLRALIAEKSCAPLMLRLAWHSAGTVRRVVEDRAVPFGTMKCPAELAHGANAGLDIAVRLLEPIKEEFPTLSYADFYQLAGVVAVEVTGGPEIPFHPGREDKPQPPPEGRLPDATKGSDHLRQVFAXKQMGLSDQDIVALSGGHTLGRCHKERSGFEGAWTTNPLVFDNSYFKELLSGDKEGLLQLPSDKALLSDPVFRPLVEKYAADEKAFFDDYKEAHLKLSELGYADA

SEQ ID NO: 6887 - protein, 124 aa, Brucella melitensis biovar Abortus
MADLAKIVEDLSALTVLEAAELSKLLEEKWGVSAAAPVAVAAAGGAAPAAAAEEKTEFDVVLADGGANKINVIKEVRALTGLGLKEAKDLVEGAPKAVKEGASNDEAEKIKAQLEAAGAKVELK

SEQ ID NO: 6888 - protein, 225 aa, Listeria innocua Clip11262
MNEINPTSERVNTEKRTNKQIIMQKILNWFVFSLLLASIGAAIGSKLSPELYLPLVVLEVALLITAMVVRRSKTINKVVGYPVVLAFAFVTGLTLGPTLTYYFGAGQGAAVLMAFVTATITFTTLAFIGAKMKRDLSFLSSALFAAIIILIIFSFAGVFLPLGSMLTTIISAGGTIIFSLYILYDFNQIMKRDVELADVPMLALNLYLDFLNLFMFLLRLFTGRD

SEQ ID NO: 6889 - protein, 423 aa, Kluyveromyces lactis
MRVIRQLHTSKRLLQSLVDKQKYQATTYARPNHLVLTRGKNAILYDDVNNKEYIDFTAGIAVTALGHANPEVAEIMYKQSKKLIHSSNLYYNEECLKLSENLVEATKSFGGQYDASRVFLCNSGTEANEAALKFAKRYGILKSPSKQGIIAFQNSFHGRTMGALSVTSNPKYREPFGSLIPGVEFLNINDELTKLDQQVSSLKEKTAGLIVEPIQGEGGVFPIPLDSLVGLKKICEDHDIIVIYDEIQCGLGRSGKLWAHSYLPKEAHPDIFTTAKALGNGFPIAATVTNDKVNDILKVGDHGTTYGGNPLGSAVGNYVVNVIAEQKFLDEVNKKGEIITNRLRKLQERFPEHIKDIRGKGLMIGCDFDEAPAKIVDAARDSGLLIITAGKTTVRFVPALTIEDNLLEKGLNIFEKAVEKVYS

SEQ ID NO: 6890 - protein, 437 aa, Cicer arietinum
NSARVMTLKLGQVTTVVISSADMAKEVLLTHDLITSNRTVPDALSVLNHDQYSLSFMRVSPRWRDLRKICNYQLFSNKTLDSSQALRRRKLQDLLNDIERCSKVGEAVDVGKAAFKTTVNLLSNTFFSVDFVHSAKEAGEYKEIIVSILKEVGVPNVSDFFPMLKFLDLQGIRKRSIVSVKKVLSIFKRFVGERVKMREGTGSIGNDDVLDALLNMSSDGGKIEMDKDEIEHLLLNIFVAGTDTTTYTLEWAMAELIHNPEMMSKLKEELEKTVGKGIPVEETDIAKLPYMQAVIKETFRLHPPVPLLLPRRAEIDVKIGDYVIPKDAQILINAWVVGRDPTKWENPNVFIPERFLDSEIDIKGHHFELIPFGSGRRTCPGLPLAIRMLPLMLGSLVNCFDWKLEDGLNVEDFNKEDEFGITLEKSQPVRIVPTKLY

SEQ ID NO: 6891 - protein, 320 aa, Vibrio cholerae
MIKKIGVLTSGGDAPGMNAAIRGVVRTALGAGLEVFGIYDGYQGLYEDRIKQLDRSSVSDVINRGGTFLGSARFPQFREVEVREKAIENLKKHGIEALVVIGGDGSYMGAKKLTEMGFPCIGLPGTIDNDIAGTDYTIGYLTALNTVIEAIDRLRDTSSSHQRISIVEIMGRHCGDLTLTSAIAGGCEYIITPETGLNMEQLISNIKDGIAKGKKHAIIALTELMMDANKLAKEIESATGRETRATVLGHIQRGGKPTAFDRVLASRMGNYAVHLLMEGHGGRCVGIQKEQLVHHDIIDAIENMKRPVRTDLYKVAEELF

SEQ ID NO: 6892 - protein, 371 aa, Populus alba
MSFLQQQETHNQSPALALDGLYCEEDGFGEDYSCGLDDETSQVYDQNVKKEQNLSSVLLEQDLFWEDSELLSLISKEKETHVVFDSVGSRDGSLMVVRREAVEWFLRVKAHYGFSALTGVLAVNYFDRFISSSRFRRDKPWMGQLAAVACLSLAAKVEETQVPLLLDLQVEDAKYVFEAKTIKRMELWVLSTLHWRMNPVTSISFFDHIIRRLGLKTHMHWEFLWRCERLLLSVISDSRFMSYLPSILATATMLHVIKEVEPRNQLQYQTQLMAVLKTNEDEVNECYRLILEQPGSQNQRHKRKYLSTPSSPNGVIDASFSSENSNDSWAVASSISSSSSVPQFKRSRAQVQQMRLPSLNRMCVDVLSSPH

SEQ ID NO: 6893 - protein, 316 aa, Salmonella enterica subsp. enterica serovar Typhi Ty2
MNQLDGIKQFTTVVADSGDIESIRHYQPQDATTNPSLLLKAAGLEQYGHLIEDAIAWGKKHGGTQEQQVAAASDKLAVNFGAEILKSIPGRVSTEVDVRLSFDKEKSIEKARHLVDLYQQQDVDKSRILIKLAATWEGIRAAEQLEKEGINCNLTLLFSFAQARACAEAGVYLISPFVGRIYDWYQARSPLEPYVVEEDPGVKSVRNIYDYFKQHRYETIVMGASFRRTEQILALTGCDRLTISPNLLKELKEKEEPVIRKLVPSSQMFHRPTPMTEAEFRWEHNQDAMAVEKLSEGIRLFAVDQRKLEDLLAAKL

SEQ ID NO: 6894 - protein, 280 aa, Glycine max
MKGEYVEQQQQHPKSETPPSMFSKLQPQHHPFPHHPFQLSAEDATTITPSTAQKANSSGGDGATIEVVRRPRGRPPGSKNKPKPPVIITRDPEPAMSPYILEVSGGNDVVEAIAQFSHRKNMGICVLTGSGTVANVTLRQPSTTPGTTVTFHGRFDILSVSATFLPQQSGASPAVPNGFAISLAGPQGQIVGGLVAGGLMAAGTVFVIAASFNNPAYHRLPPEEEGASAGDGHSPPVSGGGDSGHGQAESCGMSMYSCHLPSDVIWAPTARPPPPPPPPY

SEQ ID NO: 6895 - protein, 402 aa, Bacillus cereus ATCC 10987
MLSEKTIEIVKSTVPLLQEKGVEITTRFYEILFSEHPELLNIFNHTNQKKGRQQQALANAVYAAATYIDNLEVIIPVVKQIGHKHRSLGIKAEHYPIVGTCLLRAIKEVAGAPDEVLNAWGEAYGVIADAFISIEAEMYEEAAHKEGGWKDFRNFVVVKKVKESDVITSFYLKPEDGGKVSSFIPGQYVTVQINIEGETYTHNRQYSLSDAPGKEYYRISVKKEKGVDTPDGKVSNYLHDHVKEGDMLPVSAPAGDFVLNMDSTLPVVLISGGVGITPMMSMLNTLIEQDSKRNVCFVHAALNSNTHAMKEHVEALDNEYEQVKAYTCYSAPTEKDLEMKNFDKEGLIEAEWLQTIIPTTEAEFYFCGPVAFMKHINATLTDLGVKQEHIHYEFFGPAASLQ

SEQ ID NO: 6896 - protein, 510 aa, Oryza sativa (japonica cultivar-group)
MAEFRQRGQVPEDVESSIGTVLSYIHFAIPDAPVSSHARLSALPPDDDDDGVDRLSLLPDALLRRIVSRLPVKDAARTAALSSRWRDAWRSTPLVLVDADLLPAGVSDADTDAAREEARAVTFAVSRVIAAHPGPFRRLHLTSSFMDQYQGLLASWLQVLAVKGIQELILVNRPFPADLTLPATFFGMATLTRLYLGLWKFPDTAALPRAACFPNLRDLGFSLIGITNHDMDFVLARSPVLETLCLQANTLQRVRVASRSLRCLMMMGFDQDVNVVNAPRLERLIMLYSCGSSMLVKIGRAPSLRAIGYLDLETHVLEIGDTIIKAGTRASPSTMVPSVKILGIIVCFGVRNEAKMLPSFLRCFPNVETLHVESRKTDELTGKLNLKFWQDAGAIECIQSHITVMIFRRFRATRGEINFLKFVLESARMLKKLIIVSPKGTFASTDEANFRLKPLFATKWASKCCSLVVLESDASAGESNWNFERGCDFSLMDPFAIIIRSSRLDISGSC

SEQ ID NO: 6897 - protein, 322 aa, Neurospora crassa
MVPAIKLNSGFDMPQVGFGLWKVDGSIASDVVYNAIKAGYRLFDGACDYGNEVECGQGVARAIKEGIVKREELFIVSKLWNTFHDGDRVEPIVRKQLADWGLEYFDLYLIHFPVALEYVDPSVRYPPGWHFDGKSEIRPSKATIQETWTAMESLVEKGLSKSIGVSNFQAQLLYDLLRYAKVRPATLQIEHHPYLVQQNLLNLAKAEGIAVTAYSSFGPASFREFNMEHAQKLQPLLEDPTIKAIGDKYNKDPAQVLLRWATQRGLAIIPKSSREATMKSNLNSLDFDLSEEDIKTISGFDRGIRFNQPTNYFSAENLWIFG

SEQ ID NO: 6898 - protein, 396 aa, Escherichia coli O157:H7
MLDAQTIATVKATIPLLVETGPKLTAHFYDRMFTHNPELKEIFNMSNQRNGDQREALFNAIAAYASNIENLPALLPAVEKIAQKHTSFQIKPEQYNIVGEHLLATLDEMFSPGQEVLDAWGKAYGVLANVFINREAEIYNENASKAGGWEGTRDFRIVAKTPRSALITSFELEPVDGGAVAEYRPGQYLGVWLKPEGFPHQEIRQYSLTRKPDGKGYRIAVKREEGGQVSNWLHNHANVGDVVKLVAPAGDFFMAVADDTPVTLISAGVGQTPMLAMLDTLAKAGHTAQVNWFHAAENGDVHAFADEVKELGQSLPRFTAHTWYRQPSEADRAKGQFDSEGLMDLSKLEGAFSDPTMQFYLCGPVGFMQFAAKQLVDLGVKQENIHYECFGPHKVL

SEQ ID NO: 6899 - protein, 499 aa, Medicago truncatula
MTTFYLSLIISLFFLIITLKVFFNTSRKFKNLPPGPQCLPIIGNLHQLKQPLHHTFHTLSQKYGQIFSLWFGSRLVVVVSSLTIAQECFTKNDIVLANRPHFLTGKYIGYNNTTVAQSPYGDHWRNLRRILSIEILSSHRLNSFLEIRRDEIMRLIQKLAQKSYNGFTEVELRPMFSEMTFNTIMRMVSGKRYYGNDCDVSDVEEARLFRGIIKEVVSLGGANNVGDFLGFLRWFDFDGLEKRLKKISKRTDAFLQGLIDEHRFGKRNSNTMIDHLLTQQQSQPEYYTDQIIKGLMVVMLLAGTDTSSVTIEWAMSNLLNHPEIMKKAKNELDTHIGHDRQVDEHDISKLPYLQSIVYETLRLHAAAPLLVPHLSSEDFSLGGYNIPQNTILMVNAWVIHRDPNLWSDPTCFKPERFEKEGEVNKLLSFGLGRRACPGENLSQRTEGLTLGLLIQCFEWKRIGEEKIDMVEAKGITAGKKTSLNAMCKVRHPLKINDVF

SEQ ID NO: 6900 - protein, 341 aa, Streptomyces avermitilis MA-4680
MLGCVIHGRGDLRVDELPEPAAGPGQALVAVRYGGVCGSDLHYWRHGGVGDFRLREPMVLGHEVVGTVLSYGPGAAGPAPGTAVAVHPATPCGVCPECADGRANVCRDTRYLGSAARMPHVQGGFAARVVVPAAQVRALPEGLDLRRAALAEPLSVALHAVRRAGPVAGRPVLVTGAGPIGCLVVAAAKAAGAGRVTVTDLLPRALSYAAGVGADDVVRADDPADAGWPDSVDVAVEASGVAAGLDTCLRLVRRGGVVVQLGMLPPGQTPFAGNLVVSREIELRGAFRFADEFDEALTLLAREPAFDSLISAVVPLEEAESAFALAADRGEACKVLLDFGV

SEQ ID NO: 6901 - protein, 213 aa, Arabidopsis thaliana
MGCFHSTAAREFPDHENPVKLASETAFSVSEVEALYELFKSISSSVVDDGLINKEEFQLALFKNRKKENLFANRIFDLFDVKRKGVIDFGDFVRSLNVFHPNASLEEKTDFTFRLYDMDCTGFIERQEVKQMLIALLCESEMKLADDTIEMILDQTFEDADVDRDGKIDKTEWSNFVIKNPSLLKIMTLPYLRDITTTFPSFVFNSEVDEIAT

SEQ ID NO: 6902 - protein, 294 aa, Daucus carota
MDQYEKVEKIGEGTYGVVYKARDRVTNETIALKKIRLEQEDEGVPSTAIREISLLKEMQHENIVRLQDVVHSEKRLYLVFEYLDLDLKKHMDSCPEFAKDPRLIKMFLYQILRGIAYCHSHRVLHRDLKPQNLLIDRRTNALKLADFGLARAFGIPVRTFTHEVVTLWYRAPEILLGSRHYSTPVDVWSVGCIFAEMVNQQPLFPGDSEIDELFKIFRIVGTPNEDTWPGVTALPDFKSAFPKWPSKELGNVVPNLDVAGLNLLKKMLCLDPSRRITARSALEHEYFKDIGIVP

SEQ ID NO: 6903 - protein, 375 aa, Zea mays
MDSTLNQVKEESHGEGGDLMAGTVEAADGPSAAVAAAPKPMEGLHDPGPPPFLTKTYDMVDDSDTDLIVSWSATNNSFVVWDPHAFATVLLPRHFKHNNFSSFVRQLNTYGFRKVDPDRWEFANEGFLRGQRHLLKNIRRRKPPAQNATNQQSIGPYLEVGHFGYDAEIDMLKRDKQLLMAEVVKLRQEQQNTKANLKAMEDRLQGTEQKQQQMMAFLARVMRNPEFLKHLVSQNEMRKELQDAISKKRRRRIDQGPEADDLGASSSLEQGSPVLFNAQDPVEFLVDGIPADLESPAFDGHGLIGPHDIDIDIDIGSTSEQQQDMPQEDLNDNFWEQLLNEGLGEENDSPVIEDDMNVLSEKMGYLNSDGPTSSN

SEQ ID NO: 6904 - protein, 408 aa, Pirellula sp.
MLSEKTIRIVKEITPLVAANAETITRRFYERMFEANPEVKAFFNQAHQHSGGQQKALAGAICAYFTHIDNPAVLMPAVELIAQKHVSLGIKPEHYPIVGSNLLAAIGDVMGDAATPEIVEAVSEAYGFLADIFIGREGAIYEEQASMPGGWNGTRTFVVTKKVRESEIVTSFYLKPEDEGPLPPFKPGQYITVHMDHPHTPTSPRNYSLSDCASQPHYRISVKREERLVPDAPDGLISNHLHDGIEEGHRIELGPPCGEFTVDPATIAKPIVLIAGGIGVTPLLSMAKSIVHANPNAELHFIQAARNSKVHAFADELRRLAQAGPNVHTKVIYDSPLPGDVEEGKCDEAGFVTENQIRESTPFTDADFYFCGPKPFMKNVHSCLRELGVDEHRVRYEFFGPKEELVAV

SEQ ID NO: 6905 - protein, 481 aa, Haemophilus somnus 129PT
MNIQHLLKTQAYINGEFISAKNHRTFPVINPANQQVICEIACCGKEETELAIKSAKQAQVHWKKYTAKERSKILKKWFELIMQHQESLAYLLSLEQGKPLSESRAEIAYGASFVEWFAEEAKRAYGEIIPQVREDHRLLVIKQPVGVVAAITPWNFPNAMITRKAAPALAAGCAIIIKPAPETPLSALALAALAEQAGIPKGIFNVLPTVYAEEVGSVLTRSTDVRKLTFTGSTKIGKILMQQCADTVKKISLELGGNAPSLIFNDADLDRTVDSVIASKFRNSGQTCICTNRIYVQSEIYRAFADKLKQKVRSFIVGDFQQEAVNIGPLINESAVRKIERHIEDALSKGAILTLGGQRHSLGGTFFEPTILENVSQDMLVCHEETFSPLAALIPFDTEEQAISMANDSEFGLAAYVYTQDFSRIWRLSEELECGLVGVNEGIISNEVSPFGGVKQSGLGREGSRHGLDEFLEMKYLCMKV

SEQ ID NO: 6906 - protein, 250 aa, Brassica juncea
MTKNYPTVSEVYQKVYEKCKRKLRGLIAEKNCAPIMVRLAWHSAGTFDCASRTGVPFGTMRFDGELAHGANSGLHIALRLLEPIREQFPTISFADFHQLAGVVAVEVTGGPDIPFHPGREDKPQPPPEGRLPDATKGCDHLRQVLLKQMVLTDQDIVALSGAHTLGRYRAAPSGFEGAWTSNPLIFDNSYFKELLTGEKEGLLQLVSDKALLDDPVFRPLVEKYAADEEAFFADYAEAHLKLSELGFADA

SEQ ID NO: 6907 - protein, 214 aa, Ustilago maydis 521
MAPAAIRRKLVIVGDGACGKTSLLCVFAIGEFPQEYEPTIFENYVAEIRLDGKPVQLALWDTAGQEEYERLRPLSYSQAHVILIAFAIDTPDSLENVQVKWMEEVRQICGPSVPVLLVGCKKDLREDAIAKGKPVQGHYVERQQAKLVAAQIGARSYHECSSLNNQGVDAVFEAATRAAMLVRNSGASSGGAISQSKTKEALHNDAGSCKCIVL

SEQ ID NO: 6908 - protein, 282 aa, Craterostigma plantagineum
MKTQNTSETLGALISICPNTTDEERVSNVETSAMFGLDDECFASEKKRRLSNEQVKALEKYFEVENKLEPERKVKLAQELGLQPRQVAVWFQNRRARSKTKNLERDYGVLKSNYNALKHDFETLKRDNESLLKEIHELKSKLNEDDDSKSVEEEPFVEALELDANSDDVEPDSNQLFGSSDSDSSAILNEDNNNSRSSFLDDHRRKLSKIHGGSSPPSSAKIASEKNGSDESCKRAAAYKPQFVKIEEQHNLFREEDESCTTTFFSDEQAPTLNWYTPDEWN

SEQ ID NO: 6909 - protein, 481 aa, Pseudomonas sp.
MFHVPLLIGGKPCSASDERTFERRSPLTGEVVSRVAAASLEDADAAVAAAQAAFPEWAALAPSERRARLLRAADLLEDRSSEFTAAASETGAAGNWYGFNVYLAAGMLREAAAMTTQIQGDVIPSNVPGSFAMAVRQPCGVVLGIAPWNAPVILGVRAVAMPLACGNTVVLKSSELSPFTHRLIGQVLHDAGLGDGVVNVISNAPQDAPAVVERLIANPAVRRVNFTGSTHVGRIIGELSARHLKPAVLELGGKAPFLVLDDADLDAAVEAAAFGAYFNQGQICMSTERLIVTAVADAFVEKLARKVATLRAGDPNDPQSVLGSLIDANAGQRIQVLVDDALAKGARQVVGGGLDGSIMQPMLLDQVTEEMRLYREESFGPVAVVLRGDGDEELLRLANDSEFGLSAAIFSRDVSRAMELAQRVDSGICHINGPTVHDEAQMPFGGVKSSGYGSFGSRASIEHFTQLRWLTIQNGPRHYPI

SEQ ID NO: 6910 - protein, 1859 aa, Gibberella zeae PH-1
MAPRIEFSIEQIRNKARKDLLYLLEGVRGKKNVILDQSLVGPIGTIVKVATLQEYGVDKFFILENDNADTSQRNVVFISRGECGRHAETIAAQIKRIQRESQTGHEFHIFWIPRRTLVSDKLLEDAGVLGDVNISELPLSFFPLEKDVLSLELDGSFRDLYLSKDVTPNFLMAKALMEIQQNHGLFPRVIGKGDNAKRVADLLSRMRQELLAGEGTAEANKIGLTPSTTNESVIIIDREVDFVTPLLTQLTYEGLIDEVFEIHNNQTKVDTTVVGAPAQASAATSQSRKRTIQLDSTDKLYEQLRDANFAIVGSLLNKVARRLQKVQSDYESKHKTKTIAELKDFVSQLPGYQQEQQSVKTHTGLAEEIMKHTRTDEFKGLLEVQQNLAAGADPSSQFDGIEELISRDAPIAQTLRLLCIYSCISGGIRPKEFDQFKRLILQGYGYQHLLTLSNLEKLQLFLSKSSPLAGMIPIPGTNVGAVTIGSKTNYTYLRKQLRLIVDEVQEDDPNDVSYVYSGYAPLSIRLVQCILQKQYLLSVTKGNNASAAGAPPGVGTQGWQGFDEAVKHVRGQTFYEHQKGEDKAVKARALLSGSGNKQTVFVVFVGGITFTEIAALRFIAKQEEGRRNIVICTTSIINGNKMMESAIEKESFTKEKYCQLAGCCFGMFYVGASRLIKKRQDTWLRRAQDQENNDKTMLVVRVEVRIVAVMGTRPTAESISKRSWYRNEPINYKFLSLVIDSLTSNDNGSSQTNRDQYQKKPRTNAAMGTDFGQSFRKGIGIRKRDVDEGNVIDSVPPSDTSPISGVPGRISPPITPDVVSVPQSRQTSMEIASEIAPEIVVWTEDMDIDMDIDNASPVESDDELSSLKTDPEEEPLQVDADPTPMQTSTNGGAVGSFPSSLSNLTELSDLSSIPSTASSKATTPTPVEAEGSQDQEQPIDEQPPSHQQSPSHEAERYNFNIRSKASIPTDISPYRYASECISAAESSRLNPYALHPEEYHLLRHHISYAQVTTYLNVRNGILRLWSKRPWVGVTRLEAVGCANARWFDAASVCYDWLVRRGYINYGCVQVPETETEDSIAPVRRQKTIAVIGAGISGLACGRQLEGLFKQFADRFHERGEPPPRVVVLEGRSRVGGRVYSREFQTKPKEPMPAFKGKRHTAEMGGMIITGFDRGNPINILLRGQLSLPYHALTADTTIYDSSGRAVDPVRDQLVEKLYNDCLDRVSEYKHKNRTAKLIEGRRDLIEEGRDSPGDGSKTMFQEEEAAAAQPYAAPVAQQNVPEKVNLIPVSSDKLTGRVHMEPGTPATIKASDKAKLMGWTIRDSADGENIDLVPAVNEEGATLGSVLDSAISQYKQIVGLNAQDHRLINWHVANLEYSNATSLHNLSLPLWDIDAGNEWEGSHTMVVGGYQSVARGLAQCPSPLDLKTKFPVKSVSYHTGEGMASAAIECEDGSVVDADAVVCTVPLGVLKQNNIVFNPPLPSWKTDVVERLGFGILNKVVLVYDEIFWEQDRHIFGVLRESTNRHSTSQKDYATSRGRFFQWFNVSNTTGLPCLIALMAGEAGFETEHSSNDSLVAEATEVLRRVFGKDVPYPVEAMVTRWGSDRFARGSYSSAAPGMQPEDYDVMARPVGNLFFAGEHTIGTHPATVHGAYLSGLRAASEVLEALIGPVEVPTPLILPRDSVLLRKRKEPAKDLKPARLQAYEQDIQAHIQAKIGDRPSRPAKVASNPYILYSKDLFDVARKRCEENRKPGRGGRAVPNEVRIMTSKMWKEATPEERKPYEDQATEMKRGYAEAVQSWNQATEKWDRESAALRTAYEKENPFDSYKIQMEDPREASYKQRRTRNISYAEDGDSDVGF

SEQ ID NO: 6911 - protein, 1124 aa, Gossypium hirsutum
MDNNPHQHPYPYHHGYPPNQDPYAAFPYQYPYNTPQYPHAPHMYPPSAHVPVAAPIDYRHAHSHSGQVPYQYSHPVPPNPSQLQHHGNFQYGSTPYPYQQSLSGHYPPPEINPQSSSTYQQPAQYPPQSSSSYQQPAQYPPPESNAEHLSRHVSFSGHNRQDSTSSLGANMRSASPAYPPLDHQLNNMHLSGSHSSAPASPPAPSVPILAAGTSTPDYASNSSNWEGPSLGRADLANRSSFSHKDSFKGSQQVQGMQIVPFQKGSLRVLLLHGNLDIWVLEAKNLPNMDMFHKTLGDMFGNFSSNISKKIGGRSEGKNTSDPYVTIAVSGAVIGRTFVINNDENPVWRQHFYVPVAHHAAEVQFVVKDIDILGSEIIGVVTIPVEQIYAGEKIEGTYPVLNGNGKPCKPGAVLKLSIQYTPMEKLSFYHHGVGAGPEYVGVPGTYFPLRKGGKVTLYQDANVPDGCLPNIKLDQGMHFVQGKCWSDIFDAIRQARRLVYITGWSVWHKVRLVRDVAPASDCTLGDILRSKSQEGVRVLLLLWDDPTSRSILGYKTDGIMTTHDEETRSYFKHSSVHVLLCPRIAGKKHSWVKQKEVGTIYTHHQKTVIVDADAGNSNRKIIAFLGGLDLCDGRYDNPDHALFRTLQTYHKDDYHNPTYTGSTAGCPREPWHDMHSKIDGPAAYDVLVNFEERWLKAAKPHGLKKLKKPFDDALLRIERIPDIMGVSDFTENENDPERWHVQIFRSIDSNSVKGFPKDSKDATSKNLVCGKNVLIDMSIHTAYVKAIRAAQHFIYIENQYFLGSSYNWSSYKDLGADNLIPMEIALKIASKIKANERFAAYIVIPMWPEGVPTGSATQRILYWQNKTRSMMYETVYRALVEAGLDSTFVPEDFLNFYCLGNRELDGYQPPADGSPRAANSPEVIYTKSQKPFLFGNSTSWAISWYSKILKPDPKALPKLPRLALSQKSRRFMIYVHSKGMIVDDEFIIVGSANINQRSLEGTRDTEIAMGAYQPQHTWAAKHSSPHGQIYGYRMSLWAEHVGVVEDCFARPESLECVRRINQMTILNWRQFAAEEVTEMRGHLMKYPVEVDPKGKVKPLPGAETFPDTGGNVVGSFLGIQENLTI

SEQ ID NO: 6912 - protein, 368 aa, Gibberella zeae PH-1
MSFAGMLNRLHGQPESYDKKAKYKFGRTLGAGTYGVVREADGPTGKVAVKIILKRNVKGNEQMVYDELEMLQKLKHPHIVKFVDWFESRDKFYIVTQLATGGELFDRICEQGKFTEKDAAETIKQVLLAVDFLHKNNIVHRDLKPENLLYLNRDPESDLVLADFGIAKMLDGKGESLKTMAGSFGYAAPEVMRKEGHGKPVDMWSMGVITYTLLCGYSPFRSENLQDLIRECTDNSVVFHERYWKDVSNDAKDFILKLIDPDADKRWTSEEALGHIWLTGENATDYNLLPEIKSFRARSRFRRIIEKIKLQARIEKLKAMEEDPDNSDLSAIFSEVARAKLADEKEEREVLRITQEVEKEVKRRSFQA

SEQ ID NO: 6913 - protein, 500 aa, Pseudomonas fluorescens
MNTLPSQVWRTNIGSAPSQLLNYIDGNFVTSASSFANINPVNGKLISDVFEADAKQVNEAVVAAQNALKGPWGKLSVQDRAALIHKIADGIQARFEEFVAAEVADTGRPVHQARTLDIPRAIANFRTFADLAKTSHTDLFEMSTSDGSGALNYTVRKPLGVIGVISPWNLPLLLFTWKVAPALACGNTVVAKPSEESPSSATLLAEVMHDAGVPPGVFNLIHGFGKDSAGEFLTQHPGISALTFTGESKTGSTIMKAVADGVKEVSFELGGKNAAVVFADADLDAAIEGVLRSSFTNSGQVCLCSERVYVHRSIFDEFVSGLKVEAERLVVGYPDQDGVNMGPLISHGHRDKVLSYYRLAVDEGATVVTGGGVPKFNDERDQGAYVQPTIWTGLSDKARCVTEEIFGPVCHISPFDDEDEVINRVNDSNYGLACAIWTTNLSRAHRVSRQIHVGLVWVNTWYLRDLRTPFGGVKLSGLGREGGRFSMDFYSDIANICIKI

SEQ ID NO: 6914 - protein, 329 aa, Coffea canephora
MCGGAILEGLIPPRNNNDGTRRLSSADLWPSAADFWPNSHLAKPSRSNPTDAPHKATHETCHDPHDEAGGKQQVLPKGAKRQRKNLYRGIRQRPWGKWAAEIRDPRKGVRVWLGTFNTAEEAARAYDKEARKIRGKKAKVNFPNEDSTSYPTCIPSQTQYQQVHIPSPPTFCGPSSSNCKFNQLRVGSSDCSASDCYHANSIDDCARFTNMMGFRNPSEEVSGSGSSDNECFLGHLKQVAKAAAEEEAASVITENDTKDNNKAAESEEYQVEKLSEELLAYESFMKFYQIPYIDGQSAAASANPAQELATSIQLWSFDDVSPANRPMPL

SEQ ID NO: 6915 - protein, 451 aa, Methylococcus capsulatus str. Bath
MGSAGRQWMERDLAVLWHPCSQMKDHESLPLIPIRRGEGVWLEDFDGRRYLDAISSWWVNLFGHCHPAINAALADQLGRLEHVIFAGFSHEPGIRLAERLVDITPPGLERCFYADNGSAAVEVALKMSFHYWRNRGRPGKTRFVTLENSYHGETLGALAVGDVPLYKETYRPLLMEAVAAPSPDAYGREPGETEAGYAERRFRDMLAILERGADEICAVIVEPLVQCAGGMRMYDPLYLRLLRAACDRLGIHLIADEIAVGFGRTGTLFACEQAGISPDFLCLSKGLTGGYLPLAAVLTRPEIYAAFYDDYGTLKAFLHSHSYTGNPLACRAALATLELFDATDVLGRNRELARCMADATERFQEHPHVAEVRQRGMILAIEMVKDKTTREPYPWQERRGLRVYRRALERGVLLRPLGNVIYFMPPYLITPEQIRLMAEVAWEGLLVAAED

SEQ ID NO: 6916 - protein, 318 aa, Burkholderia cepacia R1808
MLEAQIAAFVAAVDAAYPAGTAARSPAEQRRIYDRFAAAWTPAELPPGIVRHDALWRAPHGPAIALRRYAPAHGAPRGTVLFFHGGGFVVGSLDSHALITAQLAADTGLAVIAVAYRLAPEHRAPAALEDCLAVTRAARDAAHWPFGPCARPLTLAGDSAGGNLAAAVATALRDAGEAGLDGIALAYPMLGIEPQAPARDTEAHARMLTLDDVRRYRALYWAQADAAALSADPLLRASVPLVASRFDGLPPVLAIGAQHDPLRDDARVYVERIVAAGGVARYWMGEGLVHGCWRALGTSPQAARMHRMIGGFLLAPHA

SEQ ID NO: 6917 - protein, 336 aa, Glycine max
  misc_feature (272)..(272): Xaa can be any naturally occurring amino acid
MADESVVESPVKRQRDDDEENEVSVSMDVEGGKDPLSNGLSSVIPGWFSEISSMWPGEAHSLKVEKILFQGKSEYQNVMVFQSSTYGKVLVLDGVIQLTERDECAYQEMITHLPLCSIPNPKKVLVIGGGDGGVIREVAHHSSVEKIDICEIDKMVVDVSKQYFPDVAVGYDDPRVTLHIGDGVAFLKEVPEGTYDAVIVDSSDPIGPAQELFEKPFFSSVAKALRPGGVVCTQAESIWLHMDIIEDIVANCRQIFKGSVNYAWTTVPTYPXSGMIGFMLCSTEGPPVDFKHPVNPIDENESQKSVRPLKFYNSEIHTAAFCLPSFAKRKIGSKAN

SEQ ID NO: 6918 - protein, 364 aa, Populus balsamifera subsp. trichocarpa x Populus deltoides
MGSTGETQMTPTQVSDEEAHLFAMQLASASVLPMILKTAIELDLLEIMAKAGPGAFLSTSEIASHLPTKNPDAPVMLDRILRLLASYSILTCSLKDHPDGKVERLYGLAPVCKFLTKNEDGVSVSPLCLMNQDKVLMESWYYLKDAILDGGIPFNKAYGMTAFEYHGTDPRFNKVFNKGMSDHSTITMKKILETYKGFEGLTSLVDVGGGTGAVVNTIVSKYPSIKGINFDLPHVIEDAPSYPGVEHVGGDMFVSVPKADAVFMKWICHDWSDAHCLKFLKNCYDALPENGKVILVECILPVAPDTSLATKGVVHIDVIMLAHNPGGKERTEKEFEGLAKGAGFQGFEVMCCAFNTHVIELRKN

SEQ ID NO: 6919 - protein, 503 aa, Brassica napus
MAITVPRRQLFIGGQWTEPLRRQTLPVVNPATEDIIGYIPAATSEDVELAVEAARKALTRNKGNDWSKASGAVRARYLRAIAAKVTERKSELANLEAIDCGKPLDEAAWDMDDVAGCFEYYADLAQGLDSKQKAPLSLPLDTFKGYVLKEPIGVVGLITPWNYPLLMAVWKVAPALAAGCTAILKPSELASVTCLELADICREVGLPPGVLNILTGLGTEAGAPLASHPHVDKIVFTGSTATGSNIMTSAAKLVKPVSLELGGKSPIIVFDDVKIDKAVEWTMFGCFWTNGQICSATSRLLVHEKIADEFLDKLVKWTKNIKISDPFEEGCRLGPVVSKGQYERVVKFVSNARKEGATVLCGGARPGHLKKGYFVEPAIISNVTTSMEIWRDEVFGPVLCVKTFSTEDEAIQLANDSQYGLAGAVLSNDLERCDRVSKAFEAGIVWVNCSQPCFCQAPWGGTKRSGFGRELGEWGLENYLSVKQVTQYISNEPWGWYKSPSKL

SEQ ID NO: 6920 - protein, 494 aa, Medicago truncatula
MAASPAYQAHLPTSPEWLNKGDNAWQMTAATLVGLQSMPGLVILYASIVKKKWAVNSAFMALYAFAAVLICWVLVAYRMAFGDELLPFWGKGAPALGQKFLVARAKVPASTHYYKNGVDIETPMEEPFFPMASLVYFQFTFAAITMILLAGSVLGRMNIKAWMAFVPLWLIFSYTVGAFSLWGGGFLYHWGVIDYSGGYVIHLSSGIAGFTAAYWVGPRIKSDRERFPPNNVLLMLAGAGLLWMGWSGFNGGAPYAANVASSIAVLNTNICAATSLLVWTSLDVVFFGKPSVIGAVQGMMTGLVCITPGAGLVQSWAAIVMGILSGSIPWVSMMILHKKSSLLQKVDDTLGVFHTHAVAGLLGGLLTGLFAEPALCRLLLPVTNSRGAFYGGSGGMQLLKQLVAAMFVIGWNIVSTTIILLVIQLFIPLRMPDEQLEIGDDAAHGEEAYALWGDGEKYDPTRHGSLNTGNTGVSPYVNGARRCDYKFMSHNLQV

SEQ ID NO: 6921 - protein, 274 aa, Exiguobacterium sp. 255-15
MEFVTLNNGLVMPQLGYGVFKVPEQEVYEAVREALRVGYRSIDTAMIYENEAGVGRALKDSGIPREDIFLTTKVWNKDQGYERTLAAFETSLQKLGVDYVDLYLIHWPMPDEDLYMDTWRALEQLYRDGKAKAIGVSNFHIPHLTRVLEEGTVVPAVNQIELHPFLSQEAIRAFCQKNGIVVEAWSPLMKGRDALTDPVITDIAARHGKTPAQVVLRWHLQHDIIAIPKSVTPSRIQENLDIFDFVLSPDDMRQIDQLNRNERTGSNPDEMHKK

SEQ ID NO: 6922 - protein, 124 aa, Desulfitobacterium hafniense DCB-2
MSGYVAGAAFAKGHRESWPDAVDPPIRYIVAPRFLLATSTRTFALTTPRFRERVAMSGKEIGTVKWFNDAKGFGFISRENGEDVFVHFRAIQSQGFKSLKEGQKVSFTVVQGQKGLQADAVEPL

SEQ ID NO: 6923 - protein, 308 aa, Helianthus annuus
MAILSRYSSSNTLFCIEEQVHEDEDELTHQDSSAIHPLDLQDLCWEHEELVSLFTKEEEQQKQTPWPSSCTLSFRKEAVDWILKVKGCHGFTPLTAILAINYLDRFLSSLHFQKANTPWMIHLVAVTCLSLAAKIQETHVPLLLDLQLEESKFLFEAKNIQKTELLVMSTLKWRMNLVTPISFLDHIVRRLGLSNHLHWDFFKKCEAMILYLVADSRFVCYKPSVLATATMLCVVEEIDPTNSIGYKSQLLDLLKTTKDHINECYKLVMDLSYDNHNKGKRDENERTIYPVSPAGFIGFMCHESSNDS

SEQ ID NO: 6924 - protein, 508 aa, Psychrobacter sp. 273-4
MLYAYPNTENSPVQFRKKYDNFINGEWVAPIDGEYFDNSSPIDGKTFCQIARSKEADVEAALDAAHAAKDAWGKTSVTERSNMLLKLADGIEANLEKIAIAESYENGKPVRETLAADIPIAIDHLRYFAGVIRAQEGGISQIDEDTVAYHFHEPLGVVGQIIPWNFPILMAIWKIAPALAAGNCVVLKPAEQTPASILYMLDVIGAADILPKGVLNVVNGFGVEAGKPLASNPRIDKVSFTGETTTGRLIMQYASENIIPVTLELGGKSPNIFFADVMDEDDDFLDKAVEGLVMFALNQGEVCTCPSRALVHESIYDEFMKRCIARVKAIKMGNPLDTDTMIGAQASSDQLEKILSYLDIGKKEGAKVLVGGELAKHDGDIANGYYVQPTIFEGTNDMRVFQEEIFGPVLAVTTFKDDEEAMALANDTLYGLGAGVWTRNGTRAYRFGRGIKAGRVWTNCYHLYPAHSAFGGYKQSGIGRENHLMMLDHYQQTKNMLVSYSPKAMGFF

SEQ ID NO: 6925 - protein, 490 aa, Arabidopsis thaliana
MESRKNSDRQMRRANCFSAGERMKTRSPSVIVIGGGFGGISAARTLQDASFQVMVLESRDRIGGRVHTDYSFGFPVDLGASWLHGVCKENPLAPVIGRLGLPLYRTSGDNSVLYDHDLESYALFDMDGNQVPQELVTQIGVTFERILEEINKVRDEQDADISISQAFSIVFSRKPELRLEGLAHNVLQWYVCRMEGWFAADAETISAKCWDQEELLPGGHGLMVRGYRPVINTLAKGLDIRVGHRVTKIVRRYNGVKVTTENGQTFVADAAVIAVPLGVLKSGTIKFGPKLPEWKQEAINDLGVGIENKIILHFEKVFWPKVEFLGVVAETSYGCSYFLNLHKATGHPVLVYMPAGQLAKDIEKMSDEAAANFAVLQLQRILPDALPPVQYLVSRWGSDVNSMGSYSYDIVGKPHDLYERLRVPVDNLFFAGEATSSSFPGSVHGAYSTGLMAAEDCRMRVLERYGELDLFQPVMGEEGPASVPLLISRL

SEQ ID NO: 6926 - protein, 89 aa, Zea mays
MSEGTANCVDILIAIILPPLGVFLKYGCGHEFWICLLLTFLGYIPGIIYAIYGHHQEQLASHPCRRRSMSLYLRLFICPDADLCCMPVA

SEQ ID NO: 6927 - protein, 162 aa, Crypthecodinium cohnii
MSDEDHTFESTDAGASATYPQQAGEIRKGSYLMIKGRPCKCIEVSTSKTGKHGHAKAHIVALDIFSGKKYEDLCPTSHNLDVPFVKRTEYLLTADGTLARACDGHKDDLNLPTVVKVGEPTDRDKKVTAEILESVEKGTTIFVIVQAASGEEKIIQTKTTSG

SEQ ID NO: 6928 - protein, 425 aa, uncultured marine gamma proteobacterium EBAC31A08
MSCLVLKILEIFGHLIFELKPRYNIFMKEIIKEYTNYMVPFYAPADFVVKKASGSHVWDLNNKKYIDFTAGIAVTNLGHSNKDLIKILKKQSEELWHLSNLYINEPSVTLARKLCKNSFADKVFFCNSGAESIEAAVKIARKFCSSTVNKNKNEVISFSTSFHGRTMLGIALAKAKHLTDGFAPLPRGIKNHPYNDITNLEKVFSDKTAAVILELVQWQSGITKADKKFIAKIKKLAKKHKALVIIDEVQSGIGRTGTLFAYEQFNITPDILCFAKGISNGFPLGGILTSDKVSKHMSAGSHGTTFGGGPIACAIGNEVIDTISKKSFLNKVLKKEVRFINLLNKINEKHKCFEKITSAGLWVGVEVSKDSKIQIDDLIKKSHHNGLMILKANASTVRFSPSLIIENELVDEGLKIFEKSIISLL

SEQ ID NO: 6929 - protein, 158 aa, Clostridium perfringens str. 13
MEIYDISVKDINGENVSLERYRGKVLLIVNTASKCGFTKQFDGLEELYEKYKDEGFEVLGFPCNQFKEQDPGSNSEIMNFCKLNFGVTFPMFEKIDVNGENESLLYSYLKEQKSGMFGSKIKWNFTKFLVDREGNVIKRFSPQTTPKSIEKDIEELLA

SEQ ID NO: 6930 - protein, 183 aa, Arabidopsis thaliana
MASSSEEIVSAGESSEIEEAVASLTMSSNKILLTSSDGESFEIDEAVARKFLIIVHMMEDNCAGEAIPLENVTGDILSKIIEYAKMHVNEPSEEDEDEEAKKNLDSWDAKFMEKLDLETIFKIILAANYLNFEGLLGFASQTVADYIKDKTPEEVREIFNIENDFTPEEEEEIRKENAWTFNE

SEQ ID NO: 6931 - protein, 177 aa, Rubrobacter xylanophilus DSM 9941
MDQGKSDEWIADALGTSASSVQSFRSRNDIYRRERVQREPESIFEGVLDHGERDGWGLWLDPSVAEDPIWKRHWQDVDAVVVKLAREAIVLEPDRAEQEGGEKPARQARPSQREQGRVKWFDPEKGYGFLVRPGGEDLFVHHSEVEGDASSLGQGVEVEYEVGRNERGPNARRVRVL

SEQ ID NO: 6932 - protein, 109 aa, Brassica napus
MASSMLSSAAVVTSPAQATMVAPFTGLKSSSAFPVTRKANNDITSIVSNGGRVSCMKVWPPVGKKKFERRLISVLKEMVRLQSEFLKPMRPRPKLLKKRLQYQQQEEEE

SEQ ID NO: 6933 - protein, 305 aa, Arabidopsis thaliana
MARCVGRCYVSPAFGESESHRLSERRFLKLSSSTNSDPAGSKSLKLRGKIHRRMSYFRPIMAKDESISSRSGETKQINGKQKNIVWHDCPVTKSDRQELIKHKGCVIWITGLSGSGKSSLACALSRALHNRGKLSYILDGDNVRHGLNSDLSFEADDRAENIRRVGEVAKLFADSGIICIASLISPYRIERAACRALLPQGDFIEVFMDVPLHVCEARDPKGLYKRARAGKIKGFTGVDDPYEAPLDCEIVIQNSRDKGLSSSSSSSSSPSSSSSSLCEMADIVVSYLDQNGYLKKHSTKSRDCM

SEQ ID NO: 6934 - protein, 1162 aa, Gossypium hirsutum
MDNNPHQNPYPYHHGYPPPNQDPYAPPPYQYPYNSPQYPPALHMYPPPAHALAAAPIDYGHSHSYSGPIPYQYSHPIPPNSSQPAPQYHGSFQYGSTFNPYQQSLSGHYPPPKSNPQSSSTYQQPAQYPPQSSSSYQQPGQYTPPESNSELLSTHISFSGHNRQDSTKYGSTFNPYQQSLSGHYPPPKSNPQSSSTYQQPAQYPPQSSSSYQQPGQYTPPESNSELLSTHISFSGHNRQDSTSYLAANSGSASPAYPLLDHQFSNMHLSGSHPSAPASPLAPLGPPLAAATSTPDYASESSNWEGLSLGRADSANHSTFSHNHSFNGSQKGQGMQIVPFQKGSLRVLLLHGNLDIWVLEANNLPNMDMFHRTLGDMFANFSSNISKKVGGRSDEKITSDPYVTIAVAGAVIGRTFVISNNENPVWMQHFNVPVAHHAAEVQFVVKDSDILGSDIIGVVAIPVEQIYAGGKIEGTYPVLNAAGKPCKPGAVLKLSIQYTPMEKLSFYHQGVGAGPEYVGVPGTYFPLRKGGKVTLYQDAHVPDGCLPNIKLDQGIHFVQGKCWTDMFDAIRQARRLVYITGWSVWHKVRLVRDVAPASDCTLGDILRSKSQEGVRVLLLLWDDPTSRSILGYKTEGIMATHDEETRSFFKHSSVQVLLCPRIAGKKHSWVKQKEVGTIYTHHQKTVIVDADAGNNHRKIIAFVGGLDLCDGRYDNPDHVLFRTLQTYHKDNYHNPTYTGSTVGCPREPWHDMHSKIDGPAAYDVLVNFEERWLKAAKPHGLKKLKKPFDDALLRIERIPDIMGVSDFTENENDPERWHVQIFRSIDSNSVKGFPKDPKDAPSKIWCAVRTSLIDMSIHTAYVKAIRAAQHFIYIENQYFLGSSYNWSSYKNLGADNLIPMEIALKIASKIKANERFAAYVVIPMWPEGVPTGAATQRILYWQNKTMSMMYETIYRALVEAGLDSTFVPEDFLNFYCLGNRELDGYQPPVDESPKAANTPEALSRKSRRFMIYVHSKGMIVDDEFIIVGSANINQRSMEGTRDTEIAMGAYQPQHTWAAKRSSPLGQINGYRMSLWAEHVGVVEDCFARPESLECVRRINQMAKLNWRQFAAEEVTEMRGHLLKYPVEVDPKGKVKPLPGSESFPDTGGSVVGSFIGIHENLTI

SEQ ID NO: 6935 - protein, 52 aa, Zea mays
MVLEATMICIDNSEWMRNGDYAPSRFQAQADAVNLICGAKTQSNPENTVRRE

SEQ ID NO: 6936 - protein, 262 aa, Capsicum annuum
MNTAIIAKSSGVRKGAWTEEEDFLLRKCIQNYGEGKWHLVPIRAGLNRCRKSCRLRWLNYLRPHIKRGDFGWDEIDLILRLHKLLGNRWSLIAGRLPGRTANDVKNYWNSHLQKKLITAPHRQEKKYNTALKITTKNVLRPRPRTFSSSAKNNISWCTNKSTVITNTLDKDERDKEIGLNICQKLTSETSSTIDDGVQWWTSLLENCKEIEEDVAAVGIFEEKNKLVPSLLHDEINSLTMQQGQSDGWDDFSADIDLWNLLN

SEQ ID NO: 6937 - protein, 452 aa, Neurospora crassa
MAPSDPVNPPGTPAPSLLEGRLWVDGCFDFFHHGHAGAVVQARQLGTELYVGVHSDEAILENKGPTVMTLRERLLATDACRWVTKSVAYAPYVTQLDWISHFGCKYVVHGDDITSDSSGEDCYRFVKAANRFKVVKRTPSISTTDLVGRMLLCTRTHFIKDLEKMLEGEEGNGTAEEKKKVGEEMKERIRLYATDETAKNPGANVWFWKGDEKKKKKEDEGKEEEKGVFRELFGGIGPKPGQRVVYVDGGFDLFSSGHIEFLRLVTQKEEELARQEGWYSQQAIDERKGKGADYGPAFVVAGVHDDEVINREKGVNYPIMNVFERGLCVLQCKYINAVVFGAPFKPTKGYLTSLPWGTPDAVYHGPTSFMPHTEDVYAVPKEMGIYKEIGQHEYKDVNAGTIVQRIMKSRDLYEARQKAKGMKADIEAAHRERELLEEQQRQKEEAIAAQKE

SEQ ID NO: 6938 - protein, 427 aa, Bacillus sp. KSM-K16
MAMKVTGGFILDENGEQVAKDVYIKDGKIVEHVADGDIRQQFDATGLLISPGFVDVHVHLREPGGEKKETIETGTKAAARGGFTTVAAMPNTRPVPDNAEQLDLLQARISETAVVRVLPYASITTRQLGQELTDFKALKEAGAFAFTDDGVGIQEAGMMLSAMKEAAALNMAVVAHCEDNSLINGGAVHEGHYAKAHGLNGIPSVCEAVHIARDVLLAEAAGAHYHVCHVSTKESVRTIRDAKKAGIRVTAEVTPHHLLLCEDDIIGKDPNFKMNPPLRAKEDRDALVAGLLDGTIDFIATDHAPHTAEEKSASLERAPFGIVGLETAFPLLYTHFVKPGTFTLKQLIDWLTVKPAQTFNLPYGTLQVGAAADLTLIDLKANETIDPSMFLSKGKNTPFAGWDCAGIPQATMVAGKTVYKKERITNE

SEQ ID NO: 6939 - protein, 443 aa, Glycine max
MKLEESVSNSNITAPLLPPEDPSPSPQNGSISGAVFNITTTMIGAGIMSIPATMKVLGIVPGLVVIVLVALITDVTVEFMLRYTSSGKSSTYAGMMAESFGSIGSLAVKICVIITNLGVLIIYFIILGDVLCGNESNGITHLGILQEWFGINWLTSRAFALLFVALFIMLPLVMLRRVDSLRYSSAISILLALVFVVICSSMAVSALLSGKSQTPRIVPDFSQVTVLDLFTAIPVFVTGFGFHVNVHPIRAELIKVEHMGLAARISLIICVAIYFAIGFFGYLLFGDSIMPDVLVNFDQNSHTSTGRLLNAIVRLSYALHLALVFPIMNYSLRANIDELIFSNKNKPPLASDTPRFVSLTLTLLALTYLVAVTIPNIWYFFQFLGSTTIVSTSFIFPAAIVLRDMHGISKTKDQVMAIVVIVLAVGTSGIAIWTNLNGSGDDQ

SEQ ID NO: 6940 - protein, 497 aa, Methanosarcina acetivorans C2A
MCGIAGVFGTPDSNLKVKKMLAALGHRGPDACGIHTAGDLSIGNTLLKITGDMPQPLTGKGALVLNGEIFNFRELAAEIGIKIDSDTELLFSLIETGVKEGSTPIDAVCSALSKVNGDYALAYACGGELVLARDPSGVKPLFYCSGTEGEKPEIAFASEKKALAFISRKAKPFPQGGILGFNTESGKITEKIPEGYLEIKSPEKRIYTEHEALSQLKETLEKAVELRLTPTTGIAFSGGIDSTFLAALAKRIDPGVSLYAVGLPDSHDITQAERAAEAIGMRKNLKVHFLSPEEIEAAVPRVVYATESTDPMTVAIGIPLYIVAKTAKEDGKRVLLTGQGADELFGGYRRHEEFLKKGAEVLDREIYSDLATISKINLERDDMVTMANSVELRVPFLDKEVIKTGLAIRPELKVLKKDGYYEDGYYERKYILRKAAKGLIPPEILWKEKKAMQYGTGVQKVLDRLARDSGFSKKQESHIEKYLMQIASEKGFEFVNN

SEQ ID NO: 6941 - protein, 196 aa, Oryza sativa (japonica cultivar-group)
NILFKHIKELLSGDTALIAETGDSWFNCQKLRLPEGCGYEFQMQYGSIGWSVGATLGYAQAAKDKRVMSCIGDGSFQMTAQEVYTMLRCGQKSIIFLINNGGYTIEVEIHDGPYNVIKNWDYTGLIDAIHNSDGNCWTKKVRTEEELIEAIATATGAKKDCLCFIEIIVHKDDTSKELLEWGSRVSAANSRPPNPQ

SEQ ID NO: 6942 - protein, 209 aa, Brassica napus
MPKKKNASNSLVDDTRGSLYPALSDRSSQLNFQSEKMQQRKTTAAAAGRPSGTDGSDFSYRMVVDSRYTKVTKGRSRLRLLILVQATIYLIGLSCAFMTSTKNEERNTLGIASASIGLLFAFIGDFGCRRSRVNLLRLYTAASTVVMVLSVFSAVRSRLTMEERNSSGTAANLELLGFISAQLGAVVQILAIIVTGSLVNNMSPPTKTE

SEQ ID NO: 6943 - protein, 434 aa, Escherichia coli O157:H7 EDL933
MFDFVCNHMSAKSEWFKNYLQQQPGFEDFFIAVDPQTDLSAVTRPRALPLLTPFQMDDNSTRHLWTTFSDDQIDLNYRSPDVLLAMVDVLLCYLEKGAEYVRLDAVGFMWKEPGTSCIHLEKTHLIIKLLRSIIDDIAPGTVIITETNVPHKDNIAYFGEGDDEAHMVYQFSLPPLVLHAVQKQNVEALCQWAQSLSLPSGKTTWFNFLASHDGIGLNPLRGLLPESEILALVEALQQEGALVNWKNNPDGTRSPYEINVTYMDALSRRESSDEERCARFILAHAILLSFPGVPAIYIQSILGSRNDYAGVEKLGYNRAINRKKYHSEEITRELNDEATLRHAVYHELSRLITLRRSHNEFHPDNNFTIDTVNSSVMRIQRSNAEGNCLTGLFNVSKNIQHVNITGLHGRDLISEVDILGNKITLRPWQVMWIK

SEQ ID NO: 6944 - protein, 414 aa, Azoarcus sp. EbN1
MSTSHITVPTGGQKIIPGQPIPDNPIIPFIEGDGIGVDITPVMIKVIDAAVAKAYGGKRKIHWMEVYAGEKSTQVYGPDEWLSKETLDALKEYSVSIKGPMTTPVGGGIRSLNVALRQELDLYQCVRPIQYFKGVPSPLKNPELTNMVIFRENTEDIYAGIEWQADSEQARKVIAFLQNEMGVRKIRFPATSGIGIKPVSVEGTQRLVRAALKYVIDNDRKSLTIVHKGNIMKFTEGLFRDVAYELAQKEFGAQPIDGGPWCKFKNPNTGREIVVKDSIADAFLQQILLRPAEYDVIATTNLNGDYISDALAAQVGGIGIAPGANISDQYACFEATHGTAPKYAGLDKVNPGSLILSAEMMLRFMKWTEAADLVIKGMEAAIGDKVVTYDFARLMEGAQEVSCSAFGDAMIARM

SEQ ID NO: 6945 - protein, 484 aa, Azotobacter vinelandii
MQLTDSTLLRTRAFIAGQWVDADDGATFVVTDPADLSPIGTVASLGAAETARAIAAAEAALPAWRAKTAKERSVLLRKWFELIMANREDLARLLSREQGKPLAESRGEIAYGASFIEWFAEEAKRTYGDVIPHDKQGRRLVVIRQPIGVVAAITPWNFPNAMITRKAGPALAAGCTIVIKPASETPLSALALAELAVRAGIPAGVINVVTGDPRVIGGELTRNPAVRKLSFTGSTGIGKLLMAQCADTMKKVSMELGGNAPFIVFDDADLDAAVAGALASKYRNSGQTCVCTNRLLVQEGVYDAFARRLVAAVKALKVGPACEEGAQLGPLINAKAVLKVQEHIEDALTKGARLLAGGKPHSLGGSFFEPTVLGEATPEMLVAREETFGPLAPIFRFRSEAEAIQMANDTEFGLASYLYTRDLSRAWRVSEALEYGMVGVNEGVISTEIAPFGGIKESGTGREGSKFGIDDYVELKYLCFGIDA

SEQ ID NO: 6946 - protein, 119 aa, Triticum aestivum
  misc_feature (51)..(51): Xaa can be any naturally occurring amino acid
  misc_feature (63)..(63): Xaa can be any naturally occurring amino acid
  misc_feature (70)..(70): Xaa can be any naturally occurring amino acid
  misc_feature (85)..(85): Xaa can be any naturally occurring amino acid
  misc_feature (91)..(91): Xaa can be any naturally occurring amino acid
  misc_feature (99)..(99): Xaa can be any naturally occurring amino acid
  misc_feature (110)..(110): Xaa can be any naturally occurring amino acid
MSDTDEHHFESKADSGASKTYPQQAGAIRKGGHIVIKARPCKVVEVSTSKXLGKHGHAKCHFXVAIDIFXMGKNFEDIVPSSHNXDFPHVXRQDYQLIXDITDDGIQPSXTEIGNTKDD

SEQ ID NO: 6947 - protein, 216 aa, Thermoanaerobacter tengcongensis MB4
MKFFLDTANIEEIKEAYSLGVISGVTTNPSLVAKEGRDFKEVIREIAEIVDGPISAEVISDDHEGMVKEARELAKIHKNIVIKIPMTAEGLKAVNILSKEGIKTNVTLIFSANQALLAARAGATYVSPFVGRLDDINTDGMQIIEDIVTIFTNYDIQAEIITASVRHPIHVLEAAKLGAHIATVPYKVLMQMIKHPLTDIGIERFKEDWKKAGLKI

SEQ ID NO: 6948 - protein, 109 aa, Brassica napus
  misc_feature (14)..(14): Xaa can be any naturally occurring amino acid
  misc_feature (28)..(28): Xaa can be any naturally occurring amino acid
  misc_feature (47)..(47): Xaa can be any naturally occurring amino acid
  misc_feature (52)..(52): Xaa can be any naturally occurring amino acid
  misc_feature (69)..(69): Xaa can be any naturally occurring amino acid
  misc_feature (78)..(78): Xaa can be any naturally occurring amino acid
  misc_feature (89)..(89): Xaa can be any naturally occurring amino acid
RHKVDMHSGCTYNXHSYVKGNTIEVDNXSWMSTVFYCYGEYLSLHFXHFNFXLAPVYMAFLHYMGDETXTWCYNYSLXVGGYGRKPIWXGTLRCVRYSHWKVRDSHDGL

SEQ ID NO: 6949 - protein, 178 aa, Streptomyces avermitilis MA-4680
MTTGATIWLTGLPSAGKTTIAYELAGRLREEGHLVEVLDGDEIREFLTADLGFTRADRHTNVQRIGYLADLLARNGVKALVPVIAPYADSREAVRKRHGASGAAYLEVHVATPVEVCSQRDVKGLYAKQAAGEISGLTGVDDPYEAPASPDLRIESHTQTVQESAAALHALLTERGLA

SEQ ID NO: 6950 - protein, 294 aa, Zea mays
  misc_feature (185)..(185): Xaa can be any naturally occurring amino acid
  misc_feature (222)..(222): Xaa can be any naturally occurring amino acid
MTMYSQSVRAPPPPPCRFVPRPCYVMARPLLVFTPSGALLKAAVRDVWASNFDEELSNLSAVLPRYPCVCVDTEFPGAVHDSDLPRYMRGPRESYELVKRNVDDLKLLQVGIALSGPAGRFPIAWQFNIRGFDPALHPHAPASIAMLREQGMDFAMLNEFGIDPEDFAAGFRCSGLACGRLTWTXFSGSYDFGYLAKALTGGQPLPDTVDGFLALVRRLFGXSVFDVKHLARCCAMRGGLEQVATALGVKRAAGRAHCAGSDSLLTTDVLLLMLHRFFRNVDVLAHAGTIVDLT

SEQ ID NO: 6951 - protein, 411 aa, Bacillus halodurans
MSTATLSQETKQIVKATVPILAEHGEAITKHFYKRMFSHHPELLNIFNQTHQKQGRQPQALANSIYAAAEHIDNLEAILPVVSRIAHKHRSLNIKPEQYPIVGENLLAAMREVLGDAASDDVLEAWREAYELIADVFIQVEKKMYEEASQAPGGWREFRSFVVEKKQRESATITSFYLKPEDGKALASYKPGQYITVKVTIPGHEHTHMRQYSLSDAPEKGYYRITVKREEGDGDLPPGIVSNYLHQHIHEGDVLEITAPAGDFTLQEEGERPIVFISGGVGITPLMSMFNTLMQRGVKREVIFIHAAINGFYHAMHDHLAQTASQQENVHYAVCYERPTPGDRMNPFMKKEGFIDESFLRSILHDREADFYFCGPVPFMKTIAQILKDWDVPEQQVHYEFFGPAGTLASS

SEQ ID NO: 6952 - protein, 275 aa, Bifidobacterium longum NCC2705
MAIQSTIMLNNGTVIPQVGLGVFQTPDGDTTVNAVQTALENGYRHIDTAMIYHNEASVGEGIRRAGVPRSDFFLTTKLWNDDIRARRGKDAFQESLDRLGVDYVDLYLIHWPADGWQQAWDDLQEIYASGRAKAIGVSNFQKHHIDELLTHSDVVPAVDQVESSPQFTNQELIGQLRAKGIHTEAWSPLGGTGGNLLSNPVLAGIGAKYGRSAAQVVIRWHIQRGIVVLPKSTHAERIKQNFEVFDFNLSVDDMTAISAINTGKRNGADPDNFNF

SEQ ID NO: 6953 - protein, 160 aa, Arabidopsis thaliana
MAGNYHSFQNPIPRYQNYNFGSSSSNHQHEHDGLVVVVEDQQQEESMMVKEQDRLLPIANVGRIMKNILPANAKVSKEAKETMQECVSEFISFVTGEASDKCHKEKRKTVNGDDICWAMANLGFDDYAAQLKKYLHRYRVLEGEKPNHHGKGGPKSSPDN

SEQ ID NO: 6954 - protein, 277 aa, Halobacterium sp. NRC-1
MRMAQDTQQRAAVVEEMPEFGLGTWENEDPSACADSVRTALEMGYRHIDTAQIYENEDAVGDGIAAADVDREDVFLATKVWTSELGDGDVAPATEQSLEKLGVDYVDLLYVHWPANQYDATETLAALADLQADGVTERIGVSNFEPRHLDEAEDVLGELPFANQVEFHPLLQQEELREYADGEDIELVAYSPLARGEVFDVPEIQAVAEKHGVSEAQVSLAWVRRKGVTAIPKATGEDHIADNWASLDLELDDEDVAKIDGIDRRERQVDPEFGPWN

SEQ ID NO: 6955 - protein, 415 aa, Neurospora crassa
MSFANMLNRLHGQPESYDKKSKYSFGRTLGAGTYGIVREASGPTGRVAVKIILKKNVKGNEQMVLDELEMLQRLKHPHIVKFVDWFESRDKYYIVTQLATGGELFDRICEQGKFTEKDASQTIKQVLGAVNYLHENNVVHRDLKPENLLYLTRDADSDLVLADFGIAKMLDNKDEVLTTMAGSFGYAAPEVMLKQGHGKPVDMWSMGVITYTLLCGYSPFRSENLQDLIDECSSGSVVFHERYWKDVSNDAKDFILRLLQPKPENRWTSQVRLTLAHPWLRGDSATNHNLLPEIKAYLTKARLRRGIEMVKLANRIEALKMQEDDPENTDMPGDATLAADQAQSRHRALSLASTKGGSSDAENATAPAEKRTLSKTIKTAIFREVVLAKVREMKEAEEANKLKEEAETKAKSFQA

SEQ ID NO: 6956 - protein, 220 aa, Zea mays
  misc_feature (208)..(208): Xaa can be any naturally occurring amino acid
MARRAASSLVSRCLLARAPAGAPPAAPSAPRRTVPADGMHRLLPGVLQRFSTAAAVEEPITPSVHVNYTKLLINGNFVDSASGKTFPTLDPRTGEVIAHVAEGDAEDINRAVAAARKAFDEGPWPKMTAYERFRILLRFADLIEKHNDELAALETWDNGKPYEQAAQIEVPMVARLMRYYAGWADKIHGLIVPADGLHHVQILHEPIXIAGPLIPLISYL

SEQ ID NO: 6957 - protein, 453 aa, Persea americana
MDNKGGILMQRFELGRLLGQGTFAKVYHARNLKSSQSVAIKVIDKEKVLKVGMIDQIKREISTMRLASHPNVVQLYEVMATKTKIYFVLEYVKGGELFNKVAKGKLKEDVAWKYFQQLVSAVDFCHSRGVYHRDLKPENLLVDENENLKVTDFGLGALAESKRQDGLLHTTCGTPAYVAPEVISRKGYDGAKADIWSCGVILFVLLAGYLPFHDSNLMELYRKVGKAEYKCPNWFPPEVRRLLARILDPNPNTRISIAKIKDNSWFKRGFEAKFAKGETKSKELAPLDTDAAFASSDTGVAARKPELVKPQHLNAFDIISLSAGFDLSGLFEDTNCRKEARFASKQPASAIISKLEDIAKRLRLKVKKKDEGILKLEGSKEGRKGVLSIDAEIFVVNPSFHLVEVKKSSGDTLEYQKLWNQDMRPALTDIVWAWQGDQQQQQESLVCSLGQSL

SEQ ID NO: 6958 - protein, 101 aa, Glycine max
  misc_feature (15)..(15): Xaa can be any naturally occurring amino acid
  misc_feature (55)..(55): Xaa can be any naturally occurring amino acid
  misc_feature (66)..(66): Xaa can be any naturally occurring amino acid
  misc_feature (75)..(75): Xaa can be any naturally occurring amino acid
  misc_feature (90)..(90): Xaa can be any naturally occurring amino acid
MRTKRKEMASSMISXPADTSGNRASSGLDARFAVLKSMAGFPTSETNKDITLIAXNCGRVLCMQVXSPIVMMKFXTLCYLPDLDDAQLAXEVRYLLKNGWI

SEQ ID NO: 6959 - protein, 189 aa, Leptospira interrogans serovar Copenhageni str. Fiocruz L1-130
MKEGASFMYSKYFIWFMTLGIFLPLAGIFAKGSFYDFKVKDIKGNEVSLSKYKGKVVMVVNVASKCGYTYQYEHLEKVYKKYKDQGFAVVGFPANNFGGQEPGTDQEIETFCRIQKGASFDMMSKISVKGKDIHPLYFYLIQNSPNPGEVEWNFEKILISKSGTIEARYRSSVEPDSSAVTQKIETLLK

SEQ ID NO: 6960 - protein, 457 aa, Mesorhizobium sp. BNC1
MLYHRAKNSWEQRDQENVFHGFTDLETLNQNGPVVLTHGEGIHVFDVHGKSYMDANSGLWNNVAGFNHKGLIEAICDQARRFPGYHAFFGRIADTTVALSEKLIEISPFPSGRVYYTNSGSEANDTVVKMLWLLHRRNGQPQRRKIITRVNAYHGVTVATASMTGKTYNAEFGLPLPGFLHADCPHHWRYGEPGESEAAFSQRLARKLEELIIKEGPDTIAGMFAEPVQGAGGVIPPSRGYFEAIRPILRKYGIPLIADEVITGFGRTGEMWGGDKYNVEPDAIVASKCITAGYFPMGAIILGPELADALTRACEAAEEFPHGFTSGGNPLGSAIALKALEVIETEGLLDNVRRVSPRFLAGLDRLARHDHAGEARGVGLMGAVELVADKNSKAPLDGALRIPERIANKALEKGLICRPLGQAIVLGPPFIITEGQIGEIFDILEDTMAEVFADVGL

SEQ ID NO: 6961 - protein, 105 aa, Bacillus cereus G9241
MSKRDYYEVLGLSKGASKDEIKKAYRRLAKKYHPDVSKEENAIEKFKEVQEAYEVLSDDQKRAQYDQFGHAGANQGFGGFGGGGDFGGGFGFEDIFSSFFGGGGG

SEQ ID NO: 6962 - protein, 238 aa, Schedonorus arundinaceus
MCGIKREMSGESGLSCSGEYHSPSTSPEQQQGHSQKQTAWMKRPAGRTKFRETRHPVFRGVRRRGNAGRWVCEVRVPGRRGSRLWVGTFDTAEIAARAHDAAMLALAAGDACLNFADSAELLAVPASYRNLAEVRHAVTEAVEDFERRQELGEKDSLSGTSSSTPSSSSLTDDEEASSQADNSPFELEVLSDMGWDLYYSSLAQGMMLMAPPFLAASAAFGDYGEVNLADVPLWSYQS

SEQ ID NO: 6963 - protein, 382 aa, Burkholderia cepacia R1808
MMRDAANFEPVDSRVTHPAFWNALPERWTSDVEETLVCCHVRQETHDVKSFFFRSPQGRTFSFEPGQFITLELDIDGETINRCYTISSSPARPHTISITVKRVPGGKVSNWLHDNLQPGAPVRVLGPAGEFTCARHPARKYLFLSAGSGITPLMSMSRAHHDLAEDRDIMFVHSARTPDDIIFARELDLIASNHTNFRTSFVVERVGARTNWPGVTGFLTLPLLKLIAPDFMEREIFTCGPAPYMKAVRDLLDEAGFDRKQYHEESFSFETLAQTASDDVLAELVPAADGGDVATKQYTVSFAKSNREISCGSEQHVLDAARQSGVRLPASCTQGMCGTCKVKLVSGQVEMKHNGGIRQREIDQGMVLLCCSKPLSDLVIDK

SEQ ID NO: 6964 - protein, 285 aa, Burkholderia cepacia R18194
MSTTLLFHPTPDAAYGFPNARRLARVASPHQQIEVWETPQLGRLFTLDGRPMTSVGDEYVYHECMTHPAALAHPAPRRALVLGGGDGGAARQLLKHACIERIVIAELDDEVVGMARRYLDDVHQGALDDPRVEVVIGDAAHFVESTVEHFDLVVFDLTPPDSPAAGLYTRAFYARLKRILTPCGAISMHLGSPVFHAARIAALLDDLRACFAVVDPLSAHVPLYGSQWLMAIASDTLDAAALFAHDIDERLAARRVQGLRYYDARLHASLFALPCALRDTLGVRR

SEQ ID NO: 6965 - protein, 180 aa, Zea mays
MAEAPASPGGGGGSHESGSPRGGGGGGGGSVREQDRFLPIANISRIMKKAIPANGKIAKDAKETVQECVSEFISFITSEASDKCQREKRKTINGDDLLWAMATLGFEDYIEPLKVYLQKYREMEGDSKLTAKSSDGSIKKDALGHVGASSSAAQGMGQQGAYNQGMGYMQPQYHNGDISN

SEQ ID NO: 6966 - protein, 484 aa, Geobacter metallireducens GS-15
MMILKNSSLLKQQCYLDGHWCCADGGATIDVTNPATGEILGVVPKMGTQETRRAIEAANGALDGWKARTAKERSAILRRWFELIMENLEDLAVIMTAEQGKPLAESRGEIAYAASFIEWFAEEGKRIYGDTIPSYARDKRIVVIKEPIGVCAAITPWNFPAAMITRKAGPALAAGCTMVVKPATATPFSALALALIGEQAGIPAGVFSVITGSSKEIGDEMTGNPIVRKLTFTGSTEVGKQLTAQCAGTMKKVSMELGGNAPFIVFDDADLDAAVEGAIASKYRNTGQTCVCTNRILVQESVYEAFSAKLVAAVSKMTVGDGLKGEVQQGPLIDMTALEKVEEHIADAVAKGARVVLGGKRHALGGTFFEPTIITDVTPGMLVAREETFGPLAPLFKFSTDEEAIRMANDTEFGLASYFYSRDIRRVWKVSEALEYGMVGINTGLISSEVAPFGGVKESGVGREGSKYGIEEFVEVKYLCMGGI

SEQ ID NO: 6967 - protein, 128 aa, Rickettsia sp. TwKM03
GPAHGGANEAVINMLKEIGSSENIPKYIAKAKDKNDPFRLMGFGHRVYKNYDPRAAVLKETCKEVLKELGQLENNPLLQIAIELEAIALKDEYFIERKLYPNVDFYSGIIYKAMGIPSQMFTVLFAIA

SEQ ID NO: 6968 - protein, 280 aa, Zea mays
  misc_feature (133)..(133): Xaa can be any naturally occurring amino acid
QTNEDGLLHTACGTPNYVAPEVLADKGYDGMAADVWSCGIILFVLMAGYLPFDDANLMRLYKLICHATFSCPPWFSSGARKFIKRILDPNPDTRIKIAEILEDEWFKKGYKPPHFEQGEDVNLDDGDAAFNDXEDRLVAEKREKPESMNAFALISRSQGFNLGNLFEKEMMGMVKRETSFTSQCTAQEIMSKIEDACGPLGFNVRKQNYKMKLKGDKSGRKGHLSVATEVFEVAPSLHMVELRKTGGDTLEFHNFYKNFSSELKDIVWKAESDASMKQTK

SEQ ID NO: 6969 - protein, 495 aa, Escherichia coli O157:H7 EDL933
MNFHHLAYWQDKALSLAIENRLFINGEYTAAAENETFETVDPVTQAPLANIARGKSVDIDRAVSAARGVFERGDWSLSSPAKRKAVLNKLADLIEANAEELALLETLDTGKPIRHSLRDDIPGAARAIRWYAEAIDKVYGEVATTSSHELAMIVREPVGVIAAIVPWNFPLLLTCWKLGPALAAGNSVVLKPSEKSPLSAIRLAGLAKEAGLPDGVLNVVTGFGHEAGQALSRHNDIDAIAFTGSTRTGKQLLKDAGDSNMKRVWLEAGGKSANIVFADCPDLQQAASATAAGIFYNQGQVCIAGTRLLLEESIADEFLALLKQQAQNWQPGHPLDPATTMGTLIDCAHADSVHSFIQEGESKGQLLLDGRNAGLAVAIGPTIIVDVDPNASLSREEIFGPVLVVTRFTSEEQALQLANDSQYGLGAAVWTRDLSRAHRMSRRLKAGSVFVNNYNDGDMTVPFGGYKQSGNGRDKSLHALEKFTELKTIWISLEA

SEQ ID NO: 6970 - protein, 539 aa, Zea mays
MGNCCVTPKAADDAGGGKKPKEPKQKKGKKPNPFSIDYNRSGQASAPKLVVLRDPTGRDIAARYELGAELGRGEFGVTYLCTDRASGEALACKSISKKKLRTAVDLEDVRREVEIMRHLPKHPNVVTLRDTYEDDNAVHLVMELCEGGELFDRIVARGHYTERAAALVLRTIVEVVQMCHKHGVMHRDLKPENFLFANKKESAALKAIDFGLSVFFTPGERFSEIVGSPYYMAPEVLKRNYGPEVDVWSAGVILYILLCGVPPFWAETEQGVAQAIIRSVIDFKRDPWPRVSDNAKDLVREMLNPDPKRRLTAHQVLGHPWLQNIKKAPNVNLGETVKARLQQFSVMNKFKKHALRVIAEHLSVEEAADIKDMFEKMDLNKDQMLSFEELKLGLHKFGHQMPDADVQTLMEAADADGNGSLNYGEFVTLFVHLRKIGNDEHLHKAFAYFDRNQSGFIEIDELRESLADDLGQNREEIINAIIRDVDTDKDGKISYDEFATMMKAGTDWRKASRQYSRERFTSLSLKLQKDGSLQMTSTR

SEQ ID NO: 6971 - protein, 279 aa, Triticum aestivum
MNIQVDPSSQVQWPQQQPVPQPHQPFSQQPQQTFPQPQQTFPHQPQQQFPQPQQPQQQFLQPQQPFPQQPQQPYPQQPQQLFPQTQQPQQLFPQSQQPQQQFSQPQQQFPQPQQPQQSFPQQQPPFIQPSLQQQVNPCKNFLLQQCKLVSLVSSLWSMIWPQSDCQVMRQQSCQQLAQIPQQLQCAAIHTVIHSIIMQQEQQQGMHILLPLYQQQQVGQGTLVQGQGIIQPQQPAQLEAIRSLVLQTLPTMCNVYVPPECSIIKAPFSSVVAGIGGQYR

SEQ ID NO: 6972 - protein, 106 aa, Arabidopsis thaliana
MDNTDRRRRRKQHKIALHDSEEVSSIEWEFINMTEQEEDLIFRMYRLVGDRWDLIAGRVPGRQPEEIERYWIMRNSEGFADKRRQLHSSSHKHTKPHRPRFSIYPS

SEQ ID NO: 6973 - protein, 141 aa, Triticum aestivum
MGERVKGTVKWFNVTKGFGFISPEDGSEDLFVHQSAIKADGYRSLNENDVVEFEVITGDDGRTKAADVTAPGGGALAGGSRPGDGGGDRGGRGGGGYGGGGYGGGGGGYGGGGGGYGGGGGGCFSCGESGHFSRECPNKTN

SEQ ID NO: 6974 - protein, 487 aa, Mesorhizobium loti MAFF303099
MRAQPTASHYVNGRYIDDEQGAPLPVIYPATGETIAMLRSATPNVLELAIEAARAAQPAWARLKPVERGRILRRAADILRARNADLARIETLDTGKAIQETLVADAPSAADCLEYFGGAVAAYNGEAVDLGGPFAYTRREALGVCVGIGAWNYPIQIAGWKSAPALAMGNAMVFKPSENTPLSALALAEIYSEAGLPDGLFNVVQGYGDVGAGLVGHDVVAKVSVTGSVPTGRKVLSLAGSKMKHATMELGGKSPLIVFDDADIENAIGGAMLGNFYSTGQICSNGTRVFVQSGIHDRFVERLVERTKKIRIGNPLDPETQMGPLVSKAQHEKVVGYIGIGKQDGAVLACGGNVPSLQGFDGGFFVEPTVFTGVTDTMRIAREEIFGPVMSVLKFDGEDEVIDRANDTEFGLAAGVFTRDLPRAHRVIAELQAGTCWINAYNLTPVEIPFGGFKQSGIGRENSLAALALYSQLKSIYVETGDVASPY

SEQ ID NO: 6975 - protein, 505 aa, Gibberella zeae PH-1
MAHELPFKIPTLQVKQQAPSQVQPLTSSVILPSNSLTTLTTPDPGTNKPWAKVKDNSADDVDHTVQVAYDAFQTFKKTSPRLRAQWLLKWDALIREHKADLATLLVYETGKPYAEAIGEMDYSLTFTSWFAGEAERIQGTCFMPSAPNRRVFTIKQPLGVAVALVPWNFPVAMVLRKAAAALAAGCTMVVKPSPETPVTAMALAKLASEAGFPNGVLNILPTSLDNTPSLSEALCKHDLVKKVTFTGSTRVGTLVANLCSLGLKKVVLELGGNCPCLIFNDADIEAALRELVGLKWRHAGQACVTVNRFLVQSAVYDKFLQRFAEETAKYVVGHGASEGTTLGPVTKPESLDRAERLIKDAVSKGARIVTGGNRLSPKDGEGGYFFEPTILADMTHDTLISCEECFAPIAAFYKFETEEEAVRVANDTPMGLASYAFTKDADRIWRLFENLEAGMIALNTGNSSAAESPFGGIKMSGYGKEAGKDVAVNEYMIQKTGTITVDGLV

SEQ ID NO: 6976 - protein, 492 aa, Gibberella zeae PH-1
MALTVELSTPVTGTYQQPIGLFIDGKWVEGVDKGKFEVINPSTEEVITSVCEGTEKDIDLAVAAARKAFDGEWKNTAPQTRGNLLLKLADLAEKNLDLLAAVESLDNGKSITNARGDVGAVVGCLRYYGGWADKIEGKTIDIAPDMFHYTRSEPIGVCGQIIPWNFPLLMLAWKIGPALATGNTVVMKTAEQTPLSALVFTQFIEQAGFPAGVFNLVSGYGKTAGAALSSHMDVDKIAFTGSTVIGRQIMKAAASSNLKKVTLELGGKSPNIVFEDADIEEAINWVNFGIYYNHGQCCCAGTRIFVQESIYDKFLAAFKKRAEENKVGDPFNEETFQGPQVSQLQYDRIMGYIKAGKDEGATVEIGGERLGDKGYFIKPTIFSNVRPDMKIMQEEIFGPVCAISKFKDEAEVIDLAHDTAYGLAAAVHTKNLNTALRVSNALKAGTVWVNCYNMLHHQLPFGGYKESGIGRELGEAALANYTQNKSVAIKLY

SEQ ID NO: 6977 - protein, 376 aa, Zea mays
  misc_feature (99)..(99): Xaa can be any naturally occurring amino acid
MAAASWSAPTTSFAPAPAPPWGPWRTKAAPLPIRTLPRRVLLNAVGESAMVAAGDTLLGLYEKERLGLLQYADDESKEERYWETLDADLRYWTRSLRPXGQWYPGHIAKTEKELKEQLRLMDVVIEIRDARIPLSTSHPKMDSWLGNRKRIIVLNRKDMISTEDMNAWATYFGNQGIKVVFSNGQLGMGTMKLGRMAKSVASVANTKRKEKGLLPRPVRAGIVGYPNVGKSSLINRLLKRRMCPAAPRPGVTRELKWVRFGTDLELLDSPGILPMRISDQTSAIKLAICDDIGERSYDFADVAAILVQMLIRHPAVGSEAFRRRYKIDVDSECGKTFVTKLSVHLFNGDTSQAAFRILSDYRKGKFGWVALERPPT

SEQ ID NO: 6978 - protein, 171 aa, Triticum aestivum
  misc_feature (126)..(126): Xaa can be any naturally occurring amino acid
MAAFLRSKCSSVGRTLMGGVGNNLYGGINSSVETVTRPSRCDAISQQIRTFIQMRTNLKVVDNSGAKRVMCIQSLRGKKGARLGDMIIGSVKEAQPRGKVKKGDVVYGVVVRAAMKKGRSDGSEVXKFDDNAIVIVNNKGELIGTRVFGPVPHELKKKKHLKILALAEHIV

SEQ ID NO: 6979 - protein, 179 aa, Brassica napus
VDPASGLEQRARWKSKQLETEFNILRQNYNDLASQFESLKKENQGLVSELDRLNEAMQKKRVEGRECCGDQTVVALSSTDHESEKEENTNPEPEEVRPDMEVYEKGHHDDYGYNSHIKREYFGGFEEEADHLMNIVEPADSCLTSSVGWRGFKPNTNILDQSSSNYPWWHFLVITYIRL

SEQ ID NO: 6980 - protein, 347 aa, Burkholderia cepacia R18194
MCVVIHGPNDLRVEEQDAGEIGPGQVRVDVAMGGICGSDLHYFRHGGFGAIRLQQPMVLGHEVAGTVAEVAPDVTSVKVGDRVAVNPSRPCGACRYCLEGLPNQCLDMRFYGSAMRMPHVQGAFRNALVCDAVQCVKVADHVPLSLAALAEPFAVGLHAVSRAGPLIGKRVLVSGCGPIGVLAVAAARVHGAAEIVATDVVEAPLEVASALGADRTINAATDAGWVERYAADKGTFDVMIECSGNARALRDGLDVMRPRGVVVQLGLGGDVSLPQNVVVAKELSICGSFRFHAEFALAVQLINAGRVDLRPAVTRVFPMRDANLAFELAGDRQRAMKVLIDFADEAA

SEQ ID NO: 6981 - protein, 263 aa, Prunus ilicifolia
AHYKTEVDVGNAIAEAIRSGLVKREELFITSKASNHGHVVEACKNSLEKLQLDYLDLYLVHYPLATKHSGVGTTASLLDENKVLDIDVTVSLESTWHDMEKTVSLGLVRSIGLSNYELFLTRDCLSYAKIKPQVSQFETHPYFQRESLVRFCKKHGVTPMAHTPLGGATANVKSFGSISPLEDPVLLGLAKKYKKSVAQIALRWNIERDTPVIPKSSKVERLKENLEVLNFKLEKEDIELINTIDKKSRTTLPSKTWGLDVYA

SEQ ID NO: 6982 - protein, 215 aa, Arabidopsis thaliana
MTEESPEEDHGSPGVAETNPGSPSSKTNNNNNNNKEQDRFLPIANVGRIMKKVLPGNGKISKDAKETVQECVSEFISFVTGEASDKCQREKRKTINGDDIIWAITTLGFEDYVAPLKVYLCKYRDTEGEKVNSPKQQQQRQQQQQIQQQNHHNYQFQEQDQNNNNMSCTSYISHHHPSPFLPVDHQPFPNIAFSPKSLQKQFPQQHDNNIDSIHW

SEQ ID NO: 6983 - protein, 170 aa, Zea mays
  misc_feature (37)..(37): Xaa can be any naturally occurring amino acid
MAPTVMMASSATAVAPFQGLKSTASLPIARRSSRSLXNVSNGGRIRCMQVWPAYGNKKFETLSYLPPLSTDDLLKQVDYLLRNGWIPCLEFSKVGFVYRENSTSPCYYDGRYWTMWKLPMFGCNDATQVYKELQEAIKSYPDAFHRVIGFDNIKQTQCVSFIAYKPPGSD

SEQ ID NO: 6984 - protein, 250 aa, Prunus andersonii
LKSEADVGNAIAEAIQSGLVKREELFITSKASNHGHVVEACKNSLKKLQLDYLDLYLVHYPLATKHSGVGTTASLLDENKVLDIDVTVSLETTWHDMEKTVDLGLVRSIGLSNYELFLTRDCLSYAKIKPQVSQFETHPYFQRESLVRFCKKHGVVPMAHTPLGGATANVNAFGSISPLEDPVLIGLAKKYQKSVAQIALRWNIERGTPVIPKSSKVERLKENLEVLNFKLEKEDIELINTIDKKSRTTL

SEQ ID NO: 6985 - protein, 355 aa, Burkholderia multivorans
MKIAVLPGDGIGPEIVTEAVKVLNALDEKFELEQAPVGGAGYEARGHPLPDATLKLAKEADAILFGAVGDWKYDSLERALRPEQAILGLRKHLELFANFRPAICYPQLVDASPLKPELVAGLDILIVRELNGDIYFGQPRGVRAAPDGPFAGEREGFDTMRYSEPEVRRIAHVAFQAAQKRAKKLLSVDKSNVLETSQFWRDIMIDVSKEYADVELSHMYVDNAAMQLAKAPKQFDVIVTGNMFGDILSDEASMLTGSIGMLPSASLDKNNKGLYEPSHGSAPDIAGKGIANPLATILSAAMLLRYSLNRAEQADRIERAVKTVLEQGYRTGDIATPGCKQVGTAAMGDAVVAAL

SEQ ID NO: 6986 - protein, 232 aa, Brassica oleracea var. botrytis
MASSSYAPFSAVFSGFAATKPNPPPTCSAFLVPKRRSNSRNLKNGVSLKSWNKHGFQFKSRNLSVYARATEEKTVHDFTVKDISGKDVSLDKFKGKPLLIVNVASKCGLTSSNYTELSQLYDKYRNQGFEILAFPCNQFGGQEPESNPDIKRFVCTRFKAEFPIFDKVDVNGPSTAPIYQFLKSKSGRFLGDLIKWNFEKFLVDKKGNVVQRYPPTTPPLQIEKDIQKLLVA

SEQ ID NO: 6987 - protein, 115 aa, Bartonella sp. BM51YN
MLQEIGSIKRIPEFIARAKDKNDPFRLIGFGHRVYKNYDPRAKIMQKTCHKVLKELNIQDDPLLDIAIELEKIALSDEYFIEKELYPNVDFYSGIILKALGFPTEMFTVLFACPH

SEQ ID NO: 6988 - protein, 217 aa, Triticum aestivum
  misc_feature (46)..(46): Xaa can be any naturally occurring amino acid
  misc_feature (51)..(51): Xaa can be any naturally occurring amino acid
  misc_feature (57)..(59): Xaa can be any naturally occurring amino acid
  misc_feature (61)..(61): Xaa can be any naturally occurring amino acid
  misc_feature (63)..(65): Xaa can be any naturally occurring amino acid
  misc_feature (68)..(68): Xaa can be any naturally occurring amino acid
  misc_feature (71)..(72): Xaa can be any naturally occurring amino acid
  misc_feature (74)..(75): Xaa can be any naturally occurring amino acid
  misc_feature (77)..(83): Xaa can be any naturally occurring amino acid
  misc_feature (85)..(87): Xaa can be any naturally occurring amino acid
  misc_feature (89)..(89): Xaa can be any naturally occurring amino acid
  misc_feature (91)..(91): Xaa can be any naturally occurring amino acid
  misc_feature (93)..(93): Xaa can be any naturally occurring amino acid
  misc_feature (96)..(98): Xaa can be any naturally occurring amino acid
  misc_feature (100)..(101): Xaa can be any naturally occurring amino acid
  misc_feature (103)..(104): Xaa can be any naturally occurring amino acid
  misc_feature (108)..(109): Xaa can be any naturally occurring amino acid
  misc_feature (111)..(113): Xaa can be any naturally occurring amino acid
  misc_feature (116)..(122): Xaa can be any naturally occurring amino acid
  misc_feature (125)..(125): Xaa can be any naturally occurring amino acid
SSPSAGRKIDDHGGHGQLHRHHPRHHPPAPRRLPQVRLRARVLDLXAAHLXRVHPGXXXEXVXXXPRXDSXXGXXGXXXXXXXRXXXGXAXGXGDXXXGXXAXXLWGXXWXXXAPXXXXXXXAGXISLVISVVAAESLLSSTASPPSTDRVKSSPSAGTSTTMAGTANCIDIILAIILPPLGVFLKFGCGHEFWICLLLTFLGYIPGIIYAIYAITK

SEQ ID NO: 6989 - protein, 405 aa, Chromobacterium violaceum ATCC 12472
MTKPRAVYLQSGGPTAVLNASAQGAIETARRLGLSLYAAYDGLAGLLDGRLCDTDGVSDTAIAQLAFMPGGSFGVSRRMIGTFEEAPEDWLRLRDVLAKHDIHYLLINGGNGSLGCAERLVDFEKHTGYKLGVIGIPKTIDNDLVGTDNSPGYGSSAKFLASAMREVGLDMTSMGWGRVFIMETMGRHTGWLAAACAAASRNPHEAPHLLLLPEVPFDQARFLAALDASLAKYGQCAIAVAEGITGQDGRFVAEAKKSETYGHEQLGGAGHWLAQLILRERGISAHVAQVDYLQRAGGHLASATDVRQAYVMGERAVEWLLAGKTGLMAGIRRLNDHPYCWDVAEVPLSAVGDKEKRLPPEFIGADGFSVTQAFLDYVKPLIEGERIPPFKDGLPDYRPIAWPRV

SEQ ID NO: 6990 - protein, 250 aa, Zea mays
MVKAYPTVSEDYLKAVDKAKRKLRGLIAEKNCAPLMLRLAWHSAGTFDVATKTGGPFGTMKNPAEQAHGANAGLEIAVRLLEPIKEQFPILSYADFYQLAGVVAVEVTGGPDVPFHPGRQDKPEPPPEGRLPDATQGSDHLRQVFSTQMGLSDQDIVALSGGHTLGRCHKDRSGFEGAWTSNPLIFDNSYFTELLSGEKEGLLQLPSDKALLSDPSFRPLVDKYAADEDAFFADYAEAHLKLSELGFAEA

SEQ ID NO: 6991 - protein, 168 aa, Zea mays
MNERSSGTHQSLSHSRRADPLSLVRDYRVKEQLAAEGIDVQSFNADLLYEPWEVLDEDRRPFTMFAPFWNRCLCMPDPAAPLLPPKRINSGDLSRCPWDELVFEDESERGSNALLARAWSPGWQNADKALTAFLNGPLMDYSVNRKKADSASTSLLSPYLHFGELRRR

SEQ ID NO: 6992 - protein, 412 aa, Glycine max
MGNCWGSPPHNPTPTTTGNLSTGTTGTSQAISSGSYTTTTTTTTNSSGSGSSSINSKFSVSSGDQPYPNGQILPTSNLRIFTFAELKAATRNFKADTVLGEGGFGKVFKGWLEEKATSKGGSGTVIAVKKLNSESLQGLEEWQSEVNFLGRLSHTNLVKLLGYCLEESELLLVYEFMQKGSLENHLFGRGSAVQPLPWDIRLKIAIGAARGLAFLHTSEKVIYRDFKASNILLDGSYNAKISDFGLAKLGPSASQSHVTTRVMGTYGYAAPEYVATGHLYVKSDVYGFGVVLVEILTGLRALDSNRPSGQHKLTEWVKPYLHDRRKLKGIMDSRLEGKFPSKAAFRIAQLSMKCLASEPKHRPSMKDVLENLERIQAANEKPVEPKFRSTHAASRQGHQAVHHRSPRQDGSN

SEQ ID NO: 6993 - protein, 297 aa, Acinetobacter sp. ADP1
MIEPKLKIETAQTNPMSIEKNIPDLILHDGHSIPALGFGTYTLKGQQGVDTMLRALGHGYRMLDSAFNYENEGAVGAAVRQSGLLRDEIFITSKLPGRHHAYDKAMETIEESLYRMQFDYLDLYLIHWPNPQQGLYIEAWQALIDAQKKGYIRSIGVSNFLPKHIETLRRETGVIPVINQVELHPYFNQAEQRAYDESQQIITMAWSPLGRAKAILDDAVLKQIAQETSRTVVQVVLRWQVQMGVIPIPKAASDQNQMANQAIFDFSLSDDQVQRINALTCADGRIRNQDPAVYEEF

SEQ ID NO: 6994 - protein, 345 aa, Zea mays
MMSSQQQQQQMARPDRQAMYGAPVLPEIPTRFVYMPQTATDVMSGSSSLWKTGAPPHDTLAESAAMYTATLSSQQQQQMARPGPTGDVRGAPVPPPMNMRFIPNTMPAADAMDRTPSPLQRVEVRQVWAHNFDSEAKLIESLLPKFRYVAVETEFPGTVYRPAGPAYKLEPAERYRLLRCNVDALHPVQLGLTLFDAGCVLPGGATRYVWQFNFRDFDVRRHRHVAESVTALRSRGVDLDRTRQYGVAAAAAFGPRLRKWTRAGLGRAAVRVAVQLPGFRCPAAPSRGGVRRGAAEQRRGSRLGRGSTASPRRRRSARACASGRVPASAAPAVSHVPRRLRPSRT

SEQ ID NO: 6995 - protein, 483 aa, Acinetobacter sp. ADP1
MDLQQQPLFRQKALVAGQWCDADNAEKTPIFNPATQELIGYVPNMGRAETERAIEAAYASWEMWKTKTAKERSALLKKWYDLILLNLDVLAEILTTEQGKPFNEAKGEIIYAASFIEWFAEEAKRIYGDIIPSPYPDARIVVNKQPIGVVAAITPWNFPAAMITRKVAPALAAGCPCIVKPAPETPFTALALADLAIQAGIPAEIMSVVTGDAAQIGDAIFASDHVRKFTFTGSTPIGKLLLEKSAKTLKKVSLELGGNAPFIVFDDADIEAAVEGALIAKFRNAGQTCVCVNRFLVQSGVYEKFIQVFKAKIESLKIGNGLEAGSEIGPLINAQAVAKVQSHIEDALSKNGRLITGGQVHATGELFFEPTLIADANTEMMVATQETFGPLAAIFKFDTEQQAIQMANDTEFGLAAYCYTRDLGRAWRMSEQLEYGMVGINKGLISNEVAPFGGIKHSGLGREGSKYGIEDYLEIKYTLFGGL

SEQ ID NO: 6996 - protein, 505 aa, Alteromonas sp.
MIYAKPGSEGSVVSFKESYGNFINGEWVAPVKGEYFTATSPVDGSDIAQVPRSTSEDVELALDAAHAAKKGWAEKSVAERSNVLLKIADRIEENLELLAVAETWDNGKAVRETLNADIPLCADHFRYYAGCIRSQEGTIGEIDKNTVAYHFHEPYGVVGQIIPWNFPLLMAAWKLAPALVTGNVVVLKPAEQTPVSILLFAELIQDLLPPGVLNIVNGFGAEAGQALATSTRIAKIAFTGSTPVGGHILRCAAENLIPSTVELGGKSPNLFFADIMDHEPEFIDKCAEGLVLGYFNQGEVCTCPSRAIIQEDIYDAFMEKVLEKIQKIKRGNPLDTETMVGAQASNEQFEKILKYIDIGKSEGAQVVTGGEKEQLPGFDDGYYIQPTILKGENHMRVFQEEIFGPVIAVQTFKTEEEAIEIANNTSFGLGAGVWSRDANVAFRVGRAIEAGRVWTNCYHLYPAHAAFGGYKKSGIGRETHKMMLDHYQQTKNLLVSYDINPLGFF

SEQ ID NO: 6997 - protein, 354 aa, Prunus armeniaca
MGSVRASHELLQAQAHIWNHIFSFINSLSLKCAVQLDIPDVIQKHGQPMTLSELVSALPISPTKAHFIPRLMRILVHSGFFAKESLSGCGEQGYILTDASALLLKDNPMSARPFLLAMLSPILTDPYQYLTTWFQNDNPTPFHVVNGMTCWDYVNQDPTLAHFFNDAMASDAQLISSLVIDDCKEVFQGVDSLVDVGGGTGTVAKSIADAFPHMKCTVLDLPHVVADLKGSKNLEYVAGDMFEAVPAADAIFLKWILHDWSDEECVKILERCKAAVTREGKKGKVIIVEMTVENKNTDKESGETQLFFDMHMMVMSTGKERNEKEWAKLFSDAGFSQYKITPLFGFKSLIEVYP

SEQ ID NO: 6998 - protein, 251 aa, Prunus andersonii
AHYKSEADVGNAIAEAIQRGLVKREELFITSKASNHGHVVEACKNSLKKLQLDYLDLYLVHYPLATKHSVGTTASLLDENKVLDIDVTVSLETTWHDMEKTVDLGLVRSIGLSNYELFLTRDCLSYAKIKPQVSQFETHPYFQRESLVRFCKKHGVVPMAHTPLGGATANVNAFGSISPLEDPVLIGLAKKYQKSVAQIALRWNIERGTPVIPKSSKVERLKENLEVLNFKLEKEDIELINTIDKKSRTTL

SEQ ID NO: 6999 - protein, 488 aa, Acinetobacter sp. ADP1
MQQFQLYINGKFEDGAAQFDSINPATGEIWAKMPEARTDQVNRAVDAAEQAFYDSSWSGLTASQRGKLLYKLADLVEKSAPRLAALETTDTGKIIRETSSQIAYVAEYYRYYAGLADKIEGSFIPVDKPDMQAWLVREPVGVVAAIVPWNSQLFLSAVKVGPALAAGCTVVLKASEEAPAPLLEFAKLIDEAGFPAGVVNVITGFGPECGAVLSAHPKVAHIAFTGGPETAKHIVRNSAENLAKVSLELGGKSPFIVFADTDINSALNAQIAAIFAATGQSCVAGSRLLIEESIKDEFLQRLAERVQSIKMGLPDDMQTEYGPLCTLKQREKIQQVVQRSVEQGAKLITGGQVCDGAGYYYPPTILDCSGVSDAQSIHTELFGPVLSVDTFSTEAEAIQKANSTPYGLASGVFTSNLTRAHRMTRAIRSGIVWLNTYRVVSPLAPFGGYGLSGHGREGGLSAALEYTTTKTVWLRMSDQPIDDPFVMR

SEQ ID NO: 7000 - protein, 252 aa, Prunus mexicana
AHYKSEADVGNAIAEAIQSGLVKREELFITSKASNHGHVVEACKNSLKKLQLDYLDLYLVHYPLATKHSGVGTTASLLDENKVLDIDVTVSLETTWHDMEKTVDLGLVRSIGLSNYELFLTRDCLSYAKIKPQVSQFETHPYFQRESLVRFCKKHGVVPMAHTPLGGATANVKAFGSISPLEDPVLIGLAKKYQKSVAQIALRWNLERGTPVIPKSSKVERLKENLEILNFKLEKEDIELINTIDKKSRTTL

SEQ ID NO: 7001 - protein, 78 aa, Zea mays
FVFEKNLVQSFRLLVDYACTPEEVQQHFQACGTVNRVTILTDKFGQPKGFAYVEFLEQEAVQEALNLNESELHGRQIK

SEQ ID NO: 7002 - protein, 83 aa, Zea mays
MTCLLGCLSLFCLKVRAGIVGYPDVGKSSLINRLLKRRMCPAAPRPGVTRELKWVRFGTDLELLDSPGILPMRISDQTSAIKL

SEQ ID NO: 7003 - protein, 501 aa, Burkholderia cepacia R1808
MTRRAVANLEILMSVYGLQRLYIGGAYVDATSGKTFDTFDPATGELLAQVQQASAADVDRAVASAQQGQREWAALTAMQRSRILRRAVDLLRERNDELAAIETRDTGKPIGETLAVDIVTGADVIEYYAGLATAIEGLQVPLRAESFVYTRREPLGVCAGIGAWNYPIQIACWKTAPALAAGNAMVFKPSEVTPLTALKLAEIYTEAGVPAGVFNVVQGDGSVGALLTGHPDIAKVSFTGGVETGKKVMSLAGASSLKEVTMELGGKSPLIVFDDADLDRAADIAVIANFFSSGQVCTNGTRVFVQRSIKDAFTAKVLERVKRIRVGKPTDADTNFGPLVSAAQLDKVLGFIASGKAEGAKLLAGGTRLTDGHFADGQYVAPTVFGDCRDDMKIVREEIFGPVMSILDFESEDEVIARANDTHYGLAAGVVTENLSRAHRTIHRLEAGICWINTWGESPAEMPVGGYKQSGVGRENGITTLEHYTRIKSVQVELGRYNPVF

SEQ ID NO: 7004 - protein, 303 aa, Zea mays
  misc_feature (15)..(15): Xaa can be any naturally occurring amino acid
WYPRFCRELIYIENXYFLGSSYGWKPEGINPQEIGALHLIPKELSLKIVSKIEAGERFTVYVVVPMWPEGVPESASVQAILDWQRRTMEMMYTDIAQALEANGIEANPKDYLTFFCLGNREVKQEGEYEPEEHPEPDTDYIRAQEARRFMIYVHTKMMIVDDEYIIIGSANINQRSMDGARDSEIAMGAYQPYHLATRQPARGQIHGFRMSLWYEHLGMLEDVFQRPESVECVQKVNEVAEKYWDLYSSDDLEQDLPGHLLSYPIGVTADGSVTELPGMENFPDTRARVLGNKSDYLPPILTT

SEQ ID NO: 7005 - protein, 251 aa, Prunus fasciculata
AHYKSEADVGNAIAEAIQSGLVKREELFITSKASNHGHVVEACKNSLKKLQLDYLDLYLVHYPLATKHSGVGTTASLLDENKVLDIDVTVSLETTWHDMEKTVSLGLVRSIGLSNYELFLTRDCLSYAKIKPQVSQFETHPYFQRESLVRFCQKHGVVPMAHTPLGGATANVKAFGSISPLEDPVLIGLAKKYQKSVAQIALRWNIERGTPVIPKSSKVERLKENLEVLNFKLEKEDIELINTTDKKSRPL

SEQ ID NO: 7006 - protein, 67 aa, Triticum aestivum
MAESTAIAPPPPPDGTTTFLCLILAFFIPPLGVFLKYKCEIEFWICLILTFLAYAPGIIYAVWVIVK

SEQ ID NO: 7007 - protein, 485 aa, Agrobacterium tumefaciens
MQNKVQFITYVDRLTRGGFRQLKELVDGKFAGLFGGVHVLPFFNPIDGADAGFDPTDHTIVDPRLGDWEDVRALSGSVEIMADLIVNHVSSQSGAFTDFIAKGSASEFADMFMTFDKVFPDPATEEDLLRIYRPRPGLPFSKVTLADGTQRMLWTTFTPEQIDIDVHSAKGTTYLETILDRFSEANVTAIRLDAAGYAIKKAGSSCFMIDDTYAFLEEVAGKARNRGMEVLVEIHSYHRDQIEIAKKVDRVYDFALPPLILHALFTGDATPLAKWLAISPRNAITVLDTHDGIGVIDVGAHSDGRAGLLEPQAIDNLVGEIHRRSDGQSRQATGAAASNLDLYQVNCTYYDALGRNDNDYLIARAIQFFAPGIPQVYYVGLLGGVNDMDLLAKTGVGRDINRHYYGNDEIGTALETPLFHRLSNLIRFRNTHPAFGGALKATIADAGALVLSWQHGDAFAELKISFADRKASIAASGQSEMQIVE

SEQ ID NO: 7008 - protein, 252 aa, Prunus fasciculata
AHYKSEADVGNAIAEAIQSGLVKREELFITSKASNHGHVVEACKNSLKKLQLDYLDLYLVHYPLATKHSGVGTTASLLDENKVLDIDVTVSLETTWHDMEKTVSLGLVRSIGLSNYELFLTRDCLSYAKIKPQVSQFETHPYFQRESLVRFCQKHGVVPMAHTPLGGATANVKAFGSISPLEDPVLIGLAKKYQKSVAQIALRWNIERGTPVIPKSSKVERLKENLEVLNFKLEKEDIELINTIDKKSRTTL

SEQ ID NO: 7009 - protein, 293 aa, Oryza sativa (japonica cultivar-group)
MSDPTAAVIPKPGGIGVGGGGGDDEEPVEIREVWADNLEEEFALIRDVVDEFPFVAMDTEFPGIVCRPVGAFRSPADYNYATLKANVDMLHLIQLGLTFSSPRGELPALGPGRRRCVWQFNFREFDDARDIFASDSIELLRRSGIDFRRNSERGVDARRFAELLMSSGVVLNDSVYWVTFHAGYDFGYLLKILTCSSLPDTQAGFFKLMKIYFPTVYDIKHLMKFCNSLHGGLNKLAELLDVERVGESHQAGSDSLVTSCAFWKLKDSFFAGSTEKYAGVLYGLNAENVVSAH

SEQ ID NO: 7010 - protein, 334 aa, Triticum aestivum
  misc_feature (237)..(237): Xaa can be any naturally occurring amino acid
MGSTATDMAASADEEACMYALQLVSSSILPMTLKNAIELGLLETLVAAGGKLLTPAEVAAKLPSTANPAAADMVDRMLRLLASYNVVSCTMEEGKDGRLSRRYGAAPVCKFLTPNEDGVSMAALALMNQDKVLMESWYYLKDAVLDGGIPFNKAYGMSAFEYHGTDPRFNRVFNEGMKNHSIIITKKLLEVYKGFNGLDTLVDVGGGIGATVGAITAHYPTVKGINFDLPHVISEAXILHDWSDEHCATLLKNCYDALPAHGKVVLVECILPVNPEATPEAQGGFHLDMIMLAHNPGGRERYEREFEALAKGAGFGAIKTTYIYANIWVIEFTK

SEQ ID NO: 7011 - protein, 366 aa, Thermosynechococcus elongatus BP-1
MQGTTIFRGDAFAKVSMKAQVFRGVNQLSYEEIPIPEIAADEVLVRVRVVGLCQSDIKKIRYPLYEPPRIFGHETAGEIAAVGDAVTGWQVGQRVVVMHHIPCMHCAYCLNENYSMCHVYKTVTTTAGFIPSGGGFAEYVKVPGHIVEHGGLIPIPDPISDEEASFVEPTNCCLKAVKKAGIAPGQTVLITGAGPIGLMFIMLVNLFGARAIATDLLPSRIAKAKEVGAAAAFDARDPDLSAKVQALTHGLGVDVSLLAVPSEKAFFQALECTRKGGKILFFAEFPDEVEIPLNPNILYRREIDLMGSYSSSYRLQSLACDIIFNRRIDVKTLVSDRYPLSKLAEAVEQAVHPTPETYKILIYPES

SEQ ID NO: 7012 - protein, 252 aa, Prunus subcordata
AHYKSEADVGNAIAEAIHSGLVKREELFITSKASNHGHVVEACKSSLKKLQLDYLDLYLVHYPLATKHSGVGTTASLLDENKVLDIDVTVSLETTWHDMEKTVDLGLVRSIGLSNYELFLTRDCLSYAKIKPQVSQFETHPYFQRESLVRFCKKHGVVPMAHTPLGGATANVKAFGSISPLEDPVLIGLAKKYQKSVAQIALRWNIERGTPVIPKSSKVERLKENLEILNFKLEKEDIELINTIDKKSRTTL

SEQ ID NO: 7013 - protein, 175 aa, Triticum aestivum
MAPTVMASSATSVAPFQGLKSTAGLPVSRRSNGASLGSVSNGGRIRCMQVWPIEGIKKFETLSYLPPVSTEALLKQVDYLIRSKWVPCLEYSKVGFIFREHNASPGYYDGRYWTMWKLPMSGCTDATQVINEVEEVKKEYPDAYVRIIGYHNMRQVQCVSFIAFKPPGCEESGKA

SEQ ID NO: 7014 - protein, 130 aa, Glycine max
MGYGRSRASSVLDGFSLNPVPYPVLLILSLILLFLGISWYLSYEEVVEAAEEQLGWMLLATPVVLILVVRWLSSVDTSEWFFFNSSPWERRRRTHHFPSEGSSPWGVAALILLVLVLLHYHSTFLDAWFV

SEQ ID NO: 7015 - protein, 87 aa, Zea mays
  misc_feature (17)..(17): Xaa can be any naturally occurring amino acid
FGQPKGFAYVEFLKLNXFQEAIKLNESELPGRQLKVAPKRTNVLGMKHPPGRGFNPYHGPPYMRPDGYSPYGYGRFPRFPRPRSPYF

SEQ ID NO: 7016 - protein, 168 aa, Avena agadiriana
VMASSATSVAPFQGLKSTAGLPVSRRSNAGLGSVSNGGRIRCMQVWPIEGIKKFETLSYLPPLSEEALLKQIDFLIRSKWVPCLEFSKVGFIFREYGSTPGYYDGRYWTMWKLPMFGCTDASQVIKEVEEVKKEYPDAYVRIIGFDNIRQVQCVSFIAFKPPGCEESG

SEQ ID NO: 7017 - protein, 373 aa, Triticum aestivum
  misc_feature (202)..(202): Xaa can be any naturally occurring amino acid
MAASAWAALPRPAPGRPSRPLTAQIKDMALKAPGLSLSVGQRGRACARSPAAGCSRASPARGGSGAGCRRWTSRRRTRTSSMPARAWEALPRPAPGRPSRRSRPRSRTWRSRRRARTGTASPAPAPPRGRRGATTRTTTAAAAACRDADDVLQLPLTRTAALRAGEAARRSAETCANVTALYNVQRFNHQSVPLPTTPKSEXDESSKEDSPVTPPLDKERVPRSLQRPTSGGGAMGYSSSDSLEHHSNHYCNGLHPHHGHQCYDSVGLASTPKLSSISGAKTETSSMDASMRTSSSPEEVDRSGELSVSISNASDQEREWVEEDQPGVYITIRALPGGIRELRRVRFSREKFSEMHARLWWEENRARIHEQYL

SEQ ID NO: 7018 - protein, 308 aa, Azotobacter vinelandii
MTSKLEQLKQHTTVVADTGDLDAIARLQPVDATTNPSLLLKAASLPRYAGLLEHAITGCSGDLGLACDRFAVAVGQEILGVIPGRISTEVDARLSFDSQATIGRAERLIGLYEQAGITRERVLIKIAATWEGIRAAERLEKAGIQTNLTLLFSFAQAAACADAGVFLISPFVGRIYDWYKKAEGRDFASVEDPGVQSVTRIYNYYKANGYDTVVMGASFRNLGQIEQLAGCDRLTISPELLQQLAGEQGSLERKLAPGSSGEPRQTLDEPTFRWALNEDAMATEKLAEGIRLFARDQIKLEALLSEKI

SEQ ID NO: 7019 - protein, 436 aa, Helicobacter pylori 26695
MNFQENLAALDLEYLWHPCSQMQEHQNFPIIPIKKAQGIYLYDFNDNAYMDLISSWWVNLFGHNNAYISQQLKNQIDDLEHVLLASFSHKPIITLSQRLCQLTHMDKCFYADNGSSCVEIALKMSYHAHFLKNQTRRKKLFLSLSNSYHGETLGALSVGDVKLYKDTYTPLLLKNLTTPVPKNDHEIENSLNALKRLLDKHSEEICAFIAEPLLQCAGNMHIYSARYLKQAVLLCKQKNIHIIFDEIATGFGRTGSMFAYEQCEIKPDFLCLSKGISGGYLPLSALLTHNEIYNQFYAPYEENKAFLHSHSYTGNALACACANATLDIFEKENVIEKNKALSGFIFNTLQNALKPLMEQQVVSDLRHLGMVFAFEVFIQTKERLSLAVFKKTLKKGLLLRPLNNTIYLMPPYIITHEEVKKAVAGLVEILDELRKG

SEQ ID NO: 7020 - protein, 54 aa, Brassica napus
MGTATFIDILLAILLPPLGVFLRYGCGVEFWICLVLTLLGYLPGIIYALFVLTK

SEQ ID NO: 7021 - protein, 456 aa, Pseudomonas fluorescens PfO-1
MTTSRETRDYQAADAAHHIHAFVDQKALNDEGPRVMVRGDRLHLWDNDGRRYLDGMSGLWCTNLGYGRKDLNAAASRQLEQLPYYNMFFHTTHPQVIELSELLFSLLPGHYSHAIYTNSGSEANEVLIRTVRRYWQVLGKPEKKIMIGRWNGYHGSTLAATALGGMKFMHEMGGMIPDIAHIDEPYFFAHEGNLTPAEFGLRAAQQLEAKILELGADKVAGFIAEPFQGAGGMIFPPESYWPEIQRICRQYDVLLCADEVIGGFGRTGEWFAHEYFGFEPDTLSIAKGLTSGYIPMGGLILSKKMADVLVEQGGVFAHGLTYSGHPVAAAVAIANLKALRDEGVVTRVKDDIGPYLQQCLREVFGNHPLVGDIQGTGMVAALQLAEDKATRKRFANENDIAWRCRTIGFEEGVIIRSTLGRMIMAPALIASREEIDELVGKTLKALDRTAQEYGRL

SEQ ID NO: 7022 - protein, 279 aa, Exiguobacterium sp. 255-15
MAKARREVTEKLKLIDVVIELVDARLPMSSRNPMVEQITAGKPRLIVLNKSDMADARLTEKWMHALRKDGVDVIAVDAKHSKGLGQIHEGALRLMKDKHDRMRDKGRNPSAIRALIIGIPNVGKSTLINRLAGRNIAITGDRPGVTKRQQWIKMKTGEMELLDTPGILWPKFDDQLVGYRLAATGAIKDDILNIDDIALFAIRELKSRYPEQLKARYRLQDVSGEAVEVLEAIGKNRGFVTGGYVDFERTSEMLLHELRTEKIGRVTLETVEEWATVTE

SEQ ID NO: 7023 - protein, 400 aa, Lycopersicon esculentum
RILGLGDLGCQGMGIPVGKLALYTALGGVRPSACLPITIDVGTNNEKLLNDEFYIGLRQRRATGQEYYDFLHEFMSAVKQNYGEKILVQFEDFANHNAFELLAKYRNSHLVFNDDIQGTASVVLAGLIASLKLLGGALCDHTFLFLGAGERGTGIAELIALEISNKTNIPVEETRKKIWLVDSKGLIVSGRKETLQAFKKPWAHEHEPVNNLLDAVKAVKPTVLIGTSGTGRTFTKEVVEAMACMNKRPLIMALSNPTSQAECTAEEAYSWSEGRAVFASGSPFPSFEYDGKLNIPGQANNCYIFPGFGFGLVMSGTIRVDDDMLLAASEALAAQVTEEHYAKGMIYPPFADIRKISAHIAASVARKAYELGVATSLPRPADLVKYAESCMYTPNYRSYR

SEQ ID NO: 7024 - protein, 297 aa, Zea mays
  misc_feature (221)..(221): Xaa can be any naturally occurring amino acid
MDPMDIVGKSKEDVSLPKSTMVKIIKEMLPPDVRVARDAQDLLVECCVEFINLLSSESNEVCSREEKKTIAPEHVIKALSDLGFREYIEEVYAAYEQHKLETLDSPKAGKFTRIEMTEEEAVAEQQRMFAEARARMNNGAPKPKEPEQEPPQLPQAQPQLQLHTEPQQPMQSQVQLHSQTQHSLQPQLQLHHQPQQLPQVQLHSQPQLQPQVHLHPQPQLXPQLQVHQQLQQSPQVQVHEQPQVQPQEAQLQSSAQQTSQPQPQVQLQSQGHSQAQLQAGLLGQLQTQAQTGPGMDS

SEQ ID NO: 7025 - protein, 254 aa, Oryza sativa (indica cultivar-group)
MEAGYPGAAANGAAADGNGGAQQAAAAPAIREQDRLMPIANVIRIMRRVLPAHAKISDDAKETIQECVSEYISFITGEANERCQREQRKTITAEDVLWAMSRLGFDDYVEPLGVYLHRYREFEGESRGVGVGVGAARGDHHHGHVGGMLKSRAQGSMVTHHDMQMHAAMYGGGAVPPPPHPPPHHHAFHQLMPPHHGQYAPPYDMYGGEHGMAAYYGGMYAPGSGGDGSGSSGSGGAGTPQTVNFEHQHPFGYK

SEQ ID NO: 7026 - protein, 397 aa, Magnaporthe grisea 70-15
MATKAMQLEECFEHLNVNDENDHGDRLVQKSKISMSTAQISHGSSRPNLFKVALQSQSANTVTSVTLPSQAAQRKMAPPPKSREPPSPSKHKKDSVSSSVDELANEEVEASAPRVPKEFHLGMFEIGRPLGKGKFGRVYLARERTTGFICALKVLYKKELESGSVEKQVRREIEIQTNLCHPNILKMYGHFHDNKRIFLILEFAGKGELYKHLRKENRFPEWKAAQYVAQMASALKYLHRKHVIHRDIKPENILVGLHGELKISDFGWSVHAPNNRRKTLCGTLDYLPPEMIKSGNKDNTYDEKVDLWSLGVLTYEFVVGEAPFEDTPVMTQRRIARADMTIPSFVSPECRDLIKKLLVLDPVKRLSLDAVQKHPWIIKHCVKGERATNREKGRGSD

SEQ ID NO: 7027 - protein, 246 aa, Arabidopsis thaliana
MVDVIVTTTGGVEEDLIKCLAPTFKGDFSLPGAYLRSKGLNRIGNLLVPNDNYCKFEDWIIPIFDEMLKEQKEENVLWTPSKLLARLGKEINNESSYLYWAYKMNIPVFCPGLTDGSLGDMLYFHSFRTSGLIIDVVQDIRAMNGEAVHANPKKTGMIILGGGLPKHHICNANMMRNGADYAVFINTGQEFDGSDSGARPDEAVSWGKIRGSAKTVKVYCDATIAFPLLVAETFATKRDQTCESKT

SEQ ID NO: 7028 - protein, 377 aa, Hypocrea jecorina
MSPSAVDDAPKATGAAISVKPNIGVFTNPKHDLWISEAEPSADAVKSGADLKPGEVTIAVRSTGICGSDVHFWHAGCIGPMIVEGDHILGHESAGEVIAVHPTVSSLQIGDRVAIEPNIICNACEPCLTGRYNGCEKVEFLSTPPVPGLLRRYVNHPAVWCHKIGNMSWENGALLEPLSVALAGMQRAKVQLGDPVLVCGAGPIGLVSMLCAAAAGACPLVITDISESRLAFAKEICPRVTTHRIEIGKSAEETAKSIVSSFGGVEPAVTLECTGVESSIAAAIWASKFGGKVFVIGVGKNEISIPFMRASVREVDIQLQYRYSNTWPRAIRLIESGVIDLSKFVTHRFPLEDAVKAFETSADPKSGAIKVMIQSLD

SEQ ID NO: 7029 - protein, 252 aa, Zea mays
  misc_feature (186)..(186): Xaa can be any naturally occurring amino acid
  misc_feature (198)..(198): Xaa can be any naturally occurring amino acid
  misc_feature (227)..(227): Xaa can be any naturally occurring amino acid
MAVLRGRLTLVLILSLSCCFSFPTVLSSVTSDGFLQCLSDNIPVGLIYTQGSTNFTDELVSSVRNPRLFTSATVRPLCIVTPVDASHVQAAVRCGRASGVRLRVRSGGHDYEGLSYRSERPEVFSVVDLSNLRAITVSADDDERPVPPTASAWVDSGATLGELYYTVAKNNPELAFPAGICPTIGXSAGTWSGGGIGXMMRRFGLSVDNVLDAKLVNASGDLVDGRXMGEDHFWAIPGGGGESFRVRGVVGK

SEQ ID NO: 7030 - protein, 252 aa, Prunus besseyi
AHYKSEADVGNAIAEAIQSGLVKREELFITSKASNHGHVVEACKNSLKKLQLDYLDLYLVHYPLATKHSGVGTTASLLGENKVLDIDVTVSLETTWHDMEKTVDLGLVRSIGLSNYELFLTRDCLSYAKIKPQVSQFETHPYFQRESLVRFCKKHGVVPMAHTPLGGATANVNAFGSISPLEDPVLIGLAKKYQKSVAQIALRWNIERGTPVIPKSSKVERLKGNLEILNFKLEKEDIELINSIDKKSRTTL

SEQ ID NO: 7031 - protein, 462 aa, Thermosynechococcus elongatus BP-1
MVKLTPTPAYSLTLRLETSLDPTELGTVLQIIGGQQGQVGSIRLLEKTANRILRELVVVAASQEHGQAIVNAVKSDGQATVLEVSDRTFRLHEGGKITIKSKHPLQEYDDLAMAYTPGVGRVSQAIADDPDLVHKLTIKSHTVAIVSDGSAVLGLGNIGPEAALPVMEGKAMLFQEFAGLDAFPICLATQEVDEIVATVKRIAPVFGGINLEDISAPRCFDIEARLQAELDIPVFHDDQHGTAIVTLAALKNALQFVGKSLETVRIVINGAGAAGIAVARLLRKAGAKDLILCNRRGILSLQTDLTPAQKEFAVTQTGTLADALGDADVFIGLSAPGVLTVEMVQRMAKEAIVFAMANPVPEIQPELIYNHVAVVATGRSDYPNQINNVLAFPGVFKGTLACRAPRMTEEMFLAAAEAIAGLVSPSERHSAYIVPSVFDPRVAPAVAKAVEDCARSLGLARA

SEQ ID NO: 7032 - protein, 252 aa, Prunus salicina
AHYKSEADVGNAIAEAIQSGLVKREELFITSKASNHGHVVEACKNSLKKLQLDYLDLYLVHYPLATKHSGVGTTASLLDENKVLDIDVTVSLETTWHDMEKTVDLGLVRSIGLSNYELFLTRDCLSYAKIKPQVSQFETHPYFQRESLVRFCKKHGVIPMAHTPLGGATANVKAFGSISPLEDPVLIGLAKKYQKSVAQIALRWNLERGTPVIPKSSKVERLKENLEILNFKLEKEDIELINTIDKKSRTTL

SEQ ID NO: 7033 - protein, 328 aa, Blumeria graminis
MDTKMEDVGKTPEPIRFQTTTEPASISTLDGWIENLMACKQLPEVDVLRLCEKAREVLHSESNVQPVKCPVTVCGDIHGQFHDLMELFRIGGPNPDTNYLFMGDYVDRGYYSVETVTLLVALKIRYPQRITILRGNHESRQITQVYGFYDECLRKYGNANVWKYFTNLFDFLPLTALIENQIFCLHGGLSPSIDTLDNIKSLDRIQEVPHEGPMCDLLWSDPDDRCGWGISPRGAGYTFGQDISEAFNHNNGLTLVARAHQLVMEGYNWSQDRNVVTIFSAPNYCYRCGNQAAIMEIDEHLKYTFLQFDPCPRAGEPMVTRRTPDYFL

SEQ ID NO: 7034 - protein, 252 aa, Prunus armeniaca
AHYKSEADVGNAIAEAIQSGLVKREELFITSKASNHGHVVEACKNSLKKLQLDYLDLYLVHYPLATKHSGVGTTASLLDENKVLDIDVTVSLETTWHDMEKTVDLGLVRSIGLSNYELFLTRDCLSYAKIKPQVSQFETHPYFQRESLVRFCKKHGVVPMAHTPLGGATANVKAFGSISPLEDPVLIGLAKKYKRSVAQIALRWNLERGTPVIPKSSKVERLKENLEILNFKLEKEDIELINTIDKKSRTTL

SEQ ID NO: 7035 - protein, 168 aa, Avena strigosa
VMASSATSVAPFQGLKSTAGLPVSRRSNAGLGSVSNGGRIRCMQVWPIEGIKKFETLSYLPPLSEEALLKQIDFLIRSKWVPCLEFSKVGFIFREHGSTPGYYDGRYWTMWKLPMFGCTDASQVIKEVEEVKKKYPDAYVRIIGFVNIRQVQCVSFIAFKPPGCEESG

SEQ ID NO: 7036 - protein, 220 aa, Prunus emarginata
  misc_feature (104)..(104): Xaa can be any naturally occurring amino acid
NAIAEAIQSGLVKREELFITSKASNHGHVVEACKSSLKKLQLDYLDLYLVHYPLATKHSGVGTTASLLDENKVLDIDVTVSLETTWHDMEKTVSLGLVRSIGLXNYELFLTRDCLSYAKIKPQVSQFETHPYFQRESLVRFCKKHGVIPMAHTPLGGATANVKAFGSISPLEDPVLLGLAKKYQKSVAQIALRWNIERDTPVIPKSSKIERLKENLEILN

SEQ ID NO: 7037 - protein, 168 aa, Avena clauda
VMASSATTVAPFQGLKSTAGLPVSRRSASSLGNVSNGGRIRCMQVWPIEGIKKFETLSYLPPLSEEALLKQIDFLIRSKWVPCLEFSKVGFIFREHGSTPGYYDGRYWTMWKLPMFGCTDASQVIKEVEEVKKEYPDAYVRIIGFDNIRQVQCVSFIAFKPPGCEESG

SEQ ID NO: 7038 - protein, 274 aa, Clostridium acetobutylicum ATCC 824
MLDINSFTVLNNGVKMPWLGFGTYKIEYEESSVDYIKTALKVGYRHLDTAAVYGNEPIVGKAVKESGIPRNEIFITSKVWNNKHGYDKTLKAFEDTLKRLDTDYLDLYLIHWPKTLNKETWKALEKLYKDGRVRAIGVSNFKVHHLEEILEDCEIVPMVNQVEYHPQFPQTEVHEFCKKNKIQLESWGPLMQGKIFDIPLMKELSLKYGKTISQIALRWDLQMGVVTIPKSINENRIKENCDLYDFEISKEDMKKIESLNTGVRIGHDPDTITF

SEQ ID NO: 7039 - protein, 223 aa, Lolium perenne
MCQIKKEMSGESGSPCNGEYCSPSTSSEQKQQTVWTKRPAGRTKFRETRHPVYRGVRRRGNAGRWVCEVRVPGRRGSRLWVGTFDTAEIAARAHDAAMLALAAGDVCLNFADSAELLDMPASSYRSLDEVRHAVTEAVEEFERRQALGEEDALSGTESSTLTDDEESSTPFELDVLSDMGWDLYYASLAQGMLMSSPFLAASAALGDYGEANLADVPLWSYLS

SEQ ID NO: 7040 - protein, 168 aa, Avena sterilis subsp. ludoviciana
VMASSATSVAPFQGLKSTAGLPVSRRSNAGLGSVSNGGRIRCMQVWPIEGIKKFETLSYLPPLTEEALLKQIDFLIRSKWVPCLEFSKVGFIFREHGSTPGYYDGRYWTMWKLPMFGCTDASQVIKEVEEVKKEYPDAYVRIIGFDNIRQVQCVSFIAFKPPGCEESG

SEQ ID NO: 7041 - protein, 77 aa, Zea mays
  misc_feature (11)..(11): Xaa can be any naturally occurring amino acid
MAHAYCCTFLXILLAIILPPFGVFLRFGCYRIEFCICVMLTILDYDPGIIYPMYVIVALDFDQHDSEYDTHDYSIWL

SEQ ID NO: 7042 - protein, 271 aa, Triticum aestivum
  misc_feature (64)..(64): Xaa can be any naturally occurring amino acid
TRPRTRGRTRGHHPWDAPASVLQAAGVELGSNYPLPIVELDTAQVRLQEALSEMWQLEAASRAXAMDTGMEEGLGDSSEVPPIEFPQDLQMEVHWEPARVAPNVLTTAQRRQDQMVPTMTASLNRVETEISADLGNSVDSRAEVPFRMHFEPRTEREEVIQSTGNAAGTNGIHHHNNFQQPQHRMRNIFAPSVSEASSSWTGRDGGVVPVWSPPAASGHSETYGADEADVSSRSYLDRHPQSHRIMNWHQLSQSLTTGRDVENSVQPNFIG

SEQ ID NO: 7043 - protein, 192 aa, Chromobacterium violaceum ATCC 12472
MGWLGRENAMKRWGAMLMLWGQAALAACPALLNHSVPGLMGGQINLCQYADRPLLVVNTASHCGFTPQFTQLESLYKQYGPRGLMVIGFPSNDFFQELDKPSEIGAFCQANYGVTFPMAGKGHVRGADAQPLFKDLIAATDDAPSWNFHKYLILPGASKVISIGTRTKPDAPEVVNAFLPYLQPETQAAAKP

SEQ ID NO: 7044 - protein, 767 aa, Zea mays
MDGRRTILMGRYEIGKQLGQGTFAKVFYARNLTTGLAVAIKMINKDKVMKVGLMEQIKREISIMRLVKHPNILQLYEVMASKSKIYFVLEYAKGGELFNKIAKGGKLSEDAARKYFQQLVSAVDFCHSRGVYHRDLKPENLLLDENENLKVSDFGLSALAESKRQDGLLHTTCGTPAYVAPEVLSRKGYDGAKEERFTTRQPVTTVFTKLKELAKRLKLRVKKKENGTLKLAAPKEGKKGMLELDAEIFERNVSPGDIQRHPDMSPSKKQLTNNNDSLYWSNEKYDYSCSWLDDRAMISALLDVVIEEDSARALSPLPLVAGVEAELHPVSVGHKSMDAEMKQPLEGSMSLNIDSEGEPHIGNGSIVVENPASDLVKSESDRIKTFYQTVLSAIMVFVTAALSSYKDMKPLYSTTSHGKAHLSNLLVDEGLFIFMTFLCAMVLMMSEFVVHQHGRRGHVWCWVRTILVAVTGVMLIVADTILLIVTNRSNMLLSVLLVPEVLLFGVAVSVGAWMQESLPSSELGSRYDSAMKGTFDIATVGTIVSFTLQGGIVFGYLKTPDSNQVKHDPPLDLAACYATSTLSLTGMTMCAMPLAYLPNGMLEVLVRVVERLRSAVLAALAMMALVVSVEFLDGFVVVSFFPDAVTIALYYVVKLFSACQPREEISQLDFTFRIVAAAGFTLMTGLYAAFTGTDHYGFNLKTAMFILLLAVVSSLSRLAIPLHMPEAGVGGVIEFGIVSIALSFPLLALLAAIPLVFKVFVDHYINR

SEQ ID NO: 7045 - protein, 249 aa, Zea mays
  misc_feature (189)..(189): Xaa can be any naturally occurring amino acid
MAAAARQRGTVKWFNDTKGFGFISPEDGSEDLFVHQSSIKSEGFRSLAEGEEVEFSVSEGDDGRTKAVDVTGPDGSFVRGGGGGGGGGGGGYGSRGGGGSGGGGRSYGGSWGGGRRSGGGGGPGACYKCGEPGHMARDCPSADGGGYGGGGYGGGGYGGGGGGGGGGCFKCGEPGHMARDCSSGRRRLXGGGGGGGGGCYNCGQAGHMARDCPSGGGGGGGRFGGGGGGGDRSCYNCGEAGHIARDCPT

SEQ ID NO: 7046 - protein, 363 aa, Exiguobacterium sp. 255-15
MAGVVWYRKDLRVDDHEALTRACEEEKIVRAVFVRQTADGRGKQQMTFEEETLQSLNEHLVQLGIELTILQGETVEQLTSFIQPEDVVYFHRMTGEYEARQEQEVQKRFNTRMYETQTLHLRDDIGSDELKRVFTAFRKRVEQDGRFAEPIEAPGNIQYIELPQTRGGYDPRTAFPFIGGEAAGRNRLAAYLEQPIFTYKETRNGFNVDDSSKLSAWLANGSLSPRRVMAELQRTEQEHGANESTYWLYFELLWRDFFHLTMRETGHRLFRSNGLKDGRLTWKTDQAAIDSWMAGETGEPFVDAFMREIKDTGWMSNRGRQITASYLIHDLKQDWRIGARYFEQQLIDYDVASNYGNWAYIAG

SEQ ID NO: 7047 - protein, 496 aa, Amaranthus hypochondriacus
MRKINKVEAMKFLLFLVMGLLVSLISASSYPSVIVIGAGMSGISAAKTLHDNNIKDFIILEATNRISGRIHKTEFAGYTVEKGANWLHGAEGPEKNPMYEIAEKINLKNFYSDFSNVSLNTYKQNGEKYSMEEVEAAIALADDNEEFGTKLAEQFSANTKEDDDMSLLAAQRLNKKEPKTILERMVDFYFNDGEQAEAPRVSSLKHILPRPEFSLYGDGEYFVADPRGFEGITHTIAKSFLSYTNHTVTDPRLMFNQVVTEIEYKRRSVTVKTEDGNVYKAKYVIVSPSLGVLQSDLITFTPELPLWKRRAISEFSIGIYTKIFLKFPYKFWPTGPGTEFFFYVHARRGYYAIWQQLENEYPGSNILFVTVADEESKRVEQQPDEVTKAEAMEVLRKIFGEDIPEATDIMIPRWYSDRFYRGTFTNWPVGYTNKKHKNLRAPVGRVFFTGEHTHPELFGYADGAYFAGITTANDILARLKGGILPWHNQDMKLMKI

SEQ ID NO: 7048 - protein, 534 aa, Glycine max
  misc_feature (205)..(205): Xaa can be any naturally occurring amino acid
MDSNSSSPSPNNHASTTKINGFFHPKLGSQPATSSRSRLAMASPVNSDPKVVTGTAGYILEDVPHFTDYIPNLPTYPNPLQDNPAYSVVKQYFVHVDDSVPQKVVVHKDGARGVHFRRAGPRQKVYFEADEVQAAIVTCGGLCPGLNTVIRELVCGLHHMYGVKRVLGINGGYRGFYARNTITLTRYHTEETLTRCLRGTVCFGXQVIPRVNSTKVRGINKDYINGGDGTEKGASSIFEEVRWCGLKVSVVGFPKTIDSDIPVIDKSFGFDTAVEEAQRAINAAHVEAESVENGIGVVKLMGRNSGFIAMYATLASRDVDCCLIPESPFYLEGPGGLYEYIEKRLKENGHMVIVIAEGAGQELVSESVQSMSKQDASGNKLFQDVGLWISQKIRDHFAAQKTLPITLKYIDPTYMIRAIPSNASDNVYCTLLAQSAVHGAMAGYTGYTSGLVNGRQTYIPFYRITERQNHVVITDRMWARLLSSTNQPSFLDSKGDNEEKKEEEAALNQLPDGHCSKDTSLANKEINSIYPTTC

SEQ ID NO: 7049 - protein, 215 aa, Gracilariopsis lemaneiformis
MPFVSVRPVDYLFKVVLIGDAGVGKSNLLSRFTRNEFSLESKSTIGVEFATRSIQCEGKIIKAQIWDTAGQERYRAITSAYYRGAVGALLVYDITKKDSFDNVQRWLKELKDHADANIVIMLVGNKSDLQHLKAVTTDDASAFAESNGLSFIETSALDNSNVEEAFRSILSEIYRLGSKKALEKGSTSNFAPNATQTIVINPPADEGKTEKAKCC

SEQ ID NO: 7050 - protein, 74 aa, Glycine max
MAFVPICVQCGTRSNPCRCKVVGPTLGFVALVVAGVVEWPLGAAVYLFRHRKGRRIMGHPTTVVYPRVTGAIPI

SEQ ID NO: 7051 - protein, 149 aa, Glycine max
  misc_feature (106)..(106): Xaa can be any naturally occurring amino acid
MAHDTTVGLSMAGVVAPFTGLKCMAGFPTRKTNNDITSIASNGGRVQCMQVWPPVGKKKFETLSYLPDLDDAQLAKEVEYLLRKGWIPCLGFELEPRFVYREHNRXPGYYDGRYWTMWKLAMFGWPGASQEWNELKELPLYTGAGYCYH

SEQ ID NO: 7052 - protein, 273 aa, Panax ginseng
PYYVAPEVLLKHYGPEADVWTAGVILYILLGGVPPFWAETQQGIFDAVLKGHIDFESDPWPLISDSAKDLIRKMLCSRPSDRLTAHEVLCHPWICENGVAPDRALDPAVLSRLKQFSAMNKLKKMALRVIAESLSEEEIAGLKEMFKAMDTDNSGAITFDELKAGLRKYGSTLKDTEIRDLMDAADVDNSGTIDYGEFVAATIHLNKLEREEHLMAAFQYFDKDGSGYITVDELQQACAEHNMTDVFLEDIIREVDQDNDGRIDYGEFVAMMK

SEQ ID NO: 7053 - protein, 324 aa, Haemophilus ducreyi 35000HP
MAKEIKKIAVLTSGGDAPGMNAAIRGVVRAALNEGLEIFGVQDGYYGLYHDKVIPLDRRSVSEIINRGGTFLGSARFPQFKDIEVRKQAVKILAKYEIDALVVIGGDGSYMGAKLLTEEFGYPCIGLPGTIDNDIVGTDYTIGYQTALQTAVEAIDRLRDTSTSHQRISIVEIMGRHCGDLTISAALAGGCEYIIVPEKGLDKESLIHSIADNFRKGKRHAIIAITELMTDVHQLARELEEKFGHETRATVLGHIQRGGSPCPFDRILASRMGVYAVDLLRQGFGGRCVGIQNEHLVHHDIIDAINNMRRPFKQDIFEAASKLA

SEQ ID NO: 7054 - protein, 227 aa, Cicer arietinum
PEVLKRSYGPEVDVWSAGVILYILLCGVPPFWAETEQGVALAILRGVLDFKREPWPQISDSAKSLVRQMLEPDPKKRLTAEQVLEHPWLQNAKKASNVPLGDIVRTRLKRFSLMNRFKKRALRVIADHLSLEEVEIIKDMFTLMDTDKDGRITYEELKAGLQKVGSQLAEPEIKLLMDVADVDGNGVLDYGEFVAVTIHLQRMENDEHFRKAFKFFDKDGSGYIELS

SEQ ID NO: 7055 - protein, 127 aa, Escherichia coli
MADTKAKLTLNGDTAVELDVLKGTLGQDVIDIRTLGSKGVFTFDPGFTSTASCESKITFIDGDEGILLHRGFPIDQLATDSNYLEVCYILLNGEKPTQEQYDEFKTTVTRHTMIHEQITRLFHAFRR

SEQ ID NO: 7056 - protein, 317 aa, Burkholderia cepacia R1808
MTTALDQLKQYTTVVADTGDFQQLAQYKPQDATTNPSLILKAVQKDAYKPILEKTVRDHRNESTDFIIDRLLIAFGTEILKLIPGRVSTEVDARLSFDTQRSIDKGRELIKLYEAAGIGRERILIKLASTWEGIRAAQVLQQEGIKCNMTLLFSLVQAAACAEAGAQLISPFVGRIYDWYKKQAGADWDEAKDGGANDPGVQSVRRIYTYYKTFGYHTEVMGASFRTTSQIIELAGCDLLTISPDLLQKLQDSNDPVERKLSPDALHDKPTERVAIDEASFRFQLNDDAMATEKLAEGIRVFAADAVKLEKLIAALR

SEQ ID NO: 7057 - protein, 422 aa, Haemophilus ducreyi 35000HP
MGDLKQAALDFHEFPIPGKISVTPTKSLKTQHDLALAYSPGVAEPCLAIEKDPSTARRYTAKGNLVAVISNGTAVLGLGNIGALASKPVMEGKGVLFKKFAGIDVFDIEINEQDPDKLIDIIASLEPTFGGINLEDIKAPECFYIEQKLRERMGIPVFHDDQHGTAIIVGAAVLNGLQIVGKSLDQVRLVVNGAGASAIACTNLLCSLGIKKENITMCDSKGIIFKGRGDQIDQTKQAYAIVDNGWRTLSDAINGADVFLGCSKAGALTQAMVKKMAKDPLILALANPVPEITPDEVKQARLDAIVCTGRSDYRNQVNNVLCFPFLFRGALDVGATEINEEMKIAAAKAIADLAKQPVSLEVLSTYGELSFGPEYIIPMPFDPRLIVEVSTAVAKAAMASGVATRPISDCAVYAEKLKTLLA

SEQ ID NO: 7058 - protein, 252 aa, Prunus fremontii
AHYKSEADVGNAIAEAIQSGLVKREELFITSKASNHGHVVEACKNSLKKLQLDYLDLYLVHYPLATKHSGVGTTASLLDENKVLDIDVTVSLETTWHDMEKTVDLGLVRSIGLSNYELFLTRDCLSYAKIKPQVSQFETHPYFQRESLVRFCKKHGVVPMAHTPLGGATANVNAFGSISPLEDPVLIGLAKKYQKSVAQIALRWNIERGTPVIPKSSKVERLKENLEVLNFKLEKEDIELINTIDKKSRTTL

SEQ ID NO: 7059 - protein, 252 aa, Prunus dulcis
AHYKSEADVGNAIAEAIQSGLVKREELFITSKASNHGHVVEACKNSLKKLQLDYLDLYLVHYPLATKHSGVGTTASLLDENKVLDIDVTVSLETTWHDMEKTVSLGLVRSIGLSNYELFLTRDCLSYAKIKPQVSQFETHPYFQRESLVRFCKKHGVVPMAHTPLGGATANVKAFGSISPLEDPVLIGLAKKHQKSVAQFALRWNLERGTPVIPKSSKVERLKENLEVLNFKLEKEDIELINTIDKKFRTTL

SEQ ID NO: 7060 - protein, 233 aa, Prunus persica
NAIAEAIQSGLVKREELFITSKASNHGHVVEACKNSLKKLQLDYLDLYLVHYPLATKHSGVGTTASLLDENKVLDIDVTVSLETTWHDMEKTVSLGLVRSIGLSNYELFLTRDCLSYAKIKPQVSQFETHPYFQRESLVRFCKKHGVVPMAHTPLGGATANVKAFGSISPLEDPVLIGLAKKYQKSVAQIALRWNIERGTPVIPKSSKVERLKENLEVLNFKLEKEDIELINT

SEQ ID NO: 7061 - protein, 168 aa, Avena maroccana
VMASSATSVAPFQELKSTAGLPVSRRSNAGLGSVSNGGRIRCMQVWPIEGIKKFETLSYLPPLSEEALLKQIDFLIRSKWVPCLEFSKVGFIFREHGSTPGYYDGRYWTMWKLPMFGCTDASQVIKEVEEVKKEYPDAYVRIIGFDNIRQVQCVSFIAFKPPGCEESG

SEQ ID NO: 7062 - protein, 491 aa, Escherichia coli
MTEPHVAVLSQVQQFLDRQHGLYIDGRPGPAQSEKRLAIFDPATGQEIASTADANEADVDNAVMSAWRAFVSRRWAGRLPAERERILLRFADLVEQHSEELAQLETLEQGKSIAISRAFEVGCTLNWMRYTAGLTTKIAGKTLDLSIPLPQGARYQAWTRKEPVGVVAGIVPWNFPLMIGMWKVMPALAAGCSIVIKPSETTPLTMLRVAELASEAGIPDGVFNVVTGSGAVCGAALTSHPHVAKISFTGSTATGKGIARTAADHLTRVTLELGGKNPAIVLKDADPQWVIEGLMTGSFLNQGQVCAASSRIYIEAPLFDTLVSGFEQAVKSLQVGPGMSPVAQINPLVSRAHCDKVCSFLDDAQAQQAELIRGSNGPAGEGYYVAPTLVVNPDAKLRLTREEVFGPVVNLVRVADGEEALQLANDTEYGLTASVWTQNLSQALEYSDRLQAGTVWVNSHTLIDANLPFGGMKQSGTGRDFGPPLAGRAGC

SEQ ID NO: 7063 - protein, 252 aa, Prunus maritima
AHYTSEADVGNAIAEAIQSGLVKREELFITSKASNHGHVVEACKNSLKKLQLDYLDLYLVHYPLATKHSGVGTTASLLDENKVLDIDVTVSLETTWHDMEKTVDLGLVRSIGLSNYELFLTRDCLSYAKIKPQVSQFETHPYFQRESLVRFCKKHGVVPMAHTPLGGATANVKAFGSISPLEDPVLIGLAKKYQKSMAQIALRWNLERGTPVIPKSSKVERLKENLEILNFKLEKEDIELINTIDKKSRTTL

SEQ ID NO: 7064 - protein, 404 aa, Sinorhizobium meliloti
MAKKKVAMLTAGGLAPCLSSAVGGLIERYTDIAPDYELVAYRSGYQGLLLADRIEITPAMREKAHVLHRHGGSPIGNSRVKLTNTADCVKRGLVKEGENPLRVAAERLASDGISILHTIGGDDTNTTAADLAAYLGANGYDLTVVGLPKTVDNDVVPIRQTLGAWTAAEYGARFFDHVSNEQSAAPRTLVVHEVMGRHCGWLTAATARAYIHLAGNKEYVDGFMMNAQLKNIDGLYLPEMAFDLEAEAARLREVMDRAGFVTLFVSEGACLDAIVAEREAAGETVKRDAFGHVKIDTINVGNWFSKQFAALLGAERSMVQKSGYYARSAPANVDDLRLIQSMVDLAVESALNKVSGVTGHDEDQGGRLRTIEFPRIKGGKHFDTSAKWFGEVMDVVGQKWQTAD

SEQ ID NO: 7065 - protein, 96 aa, Brassica napus
IFFFVPTKTVKMDRRRRRQSKAKASCSEEVSSIEWEAVKMTEEEEDLISRMYKLVGDRWELIAGRIPGRTPEEIERYWLMKHGVVFANRPRDFVRR

SEQ ID NO: 7066 - protein, 168 aa, Avena maroccana
VMASSATSVAPFQGLKSTAGLPVSRRSNAGLGSVSNGGRIRCMQVWPIEGIKKFETLSYLPPLSEEALLKQIDFLIRSKWVPCLEFSKVGFIFREHGSTPGYYDGRYWTMWKLPMFGCTDASQVIREVEEVKKEYPDAYVRIIGFDNIRQVQCVSFIAFKPPGCEESG

SEQ ID NO: 7067 - protein, 231 aa, Prunus maritima
  misc_feature (6)..(7): Xaa can be any naturally occurring amino acid
NAIAEXXQSGLVKREELFITSKASNHGHVVEACKNSLKKLQLDYLDLYLVHYPLATKHSGVGTTASLLDENKVLDIDVTVSLETTWHDMEKTVDLGLVCSIGFSNYELFLTRDCLSYAKIKPQVSQFETHPYFQRESLVRFCKKHGVVPMAHTPLGGATANVKAFGSISPLEDPVLIGLAKKYQKSVAQIALRWNLERGTPVIPKSSKVERLKENLEILNFKLEKEDIELI

SEQ ID NO: 7068 - protein, 404 aa, Oryza sativa (japonica cultivar-group)
MASAAAEVPSYFVCPISLQLMRDPVTLPTGISYDRAAIARWLAAPGARRTCPVTRQPLEHGLELTPNHTLRRLIQSWAASVSPGSAVDEEVAALRPVSSDEVASLLSDAAAAQVGALRRLRELAAECEDSRAMLESQGGVFDVLSRVVTSGSACSTAREEAVGVLASLRIPEQELIGVSTRHGNLAESLTAVLRSSNLQSRAHAVQLVRTLADAVVPAWVIGLNAELLAEVVGVVRDRVSARATKASLHALAALCPYGRHRVKIVGAGAVAALVELLLDEPERRVCELALAVLDRLCTCAEGRAELVAHAAGVAVVGKKVLRVSEAASERAVRVLRSVARHAATPAVLQEMAQCGVVGKLCLALRSEQCGVKTKEKAHEVLKLHSRVWRASPCLSPSFLALYPS

SEQ ID NO: 7069 - protein, 141 aa, Brassica napus
MRNLRTISSHLSRGLRSIQPHPIQSHRSYSSQSENVSKIVTELSNLTLLETMDLTELLRKKLGVTEMPVMAAMAFPGSGGGGSPGAAAGGKGEEKKKAEAKTAFDVMLQGFESASKIKVIKEVRTVTDLGLKEAKDLVEKA

SEQ ID NO: 7070 - protein, 163 aa, Rubrivivax gelatinosus PM1
MITTTIYDFEARSIDGRTVSLADYRGKVLLIVNTASACGFTPQFAGLQSLWQAYGERGLAVLGFPSNEFGGQDPGSNDEIASFCQLNYGVSFPMMAKVEVNGAGAHPLYRWLTGEVKGLLGTRAIKWNFTKFLVGRDGRVLGRYAPTDKPESLTRDIEAALAA

SEQ ID NO: 7071 - protein, 595 aa, Zea mays
MAGPEKTVVWFRRDLRIEDNPALAAAAKGGSVLPIFIWCPSDYGQYYPGRCSRWWLKQSLAHLGKSLELLGCPLVLIRAEDSTLAALLECVRSISATRVVYNRLYDPISLVLDNKIKNELPAHGISVQSFNGDLLYEPWDVYDENGQAFTTFNKYWEKCMNLPIEISQYLAPTRLVAAPGLANVRCCSIDDLGLESSKDVESSNALLSRAWSPGWRNAENMLEEFVSYGLPEYSEHGMKVGGSTTSLLSPYLHFGELSVRMIYQLVKMRQVKWQNEGKSEAEESVRLFLRSIGFREYSRYLCFNYPFTHERSFLGNLKHYPWLLDEGRFKSWRQGMTGYPLVDAGMRELWATGWTHNRIRVIVSSFAVKFLQIPWIWGMKYFWDVLLDADLESDILGWQYISGSLPDGHELSRLDNPEVQGQKYDPDGEYVRTWIPELARMPTEWIHSPWAAPNSILQVAGVELGFNYPKPIVELHMARECLDDAISTMWQLDTAAKLAELDGEVVDDNLNNIRNFDIPKVVLNKKLSPSTSSMEHRVLSTNGKDEKSQPTEVKALYKQIIRDDMMNDSNMDDTCSTANLKVTRKRSSSDSAARA

SEQ ID NO: 7072 - protein, 127 aa, Corynebacterium efficiens YS-314
MPVGTVKWYDPERGFGFVSNPGGEDCFVGKQVLPKGVTELHQGQRIEFDFAAGRKGPQALRVKVLETPRRRPQHTYKPEELNGIISDMVTMLEGTVQPALLKGHYPDRKVGEQVAKILRAVAKELEA

SEQ ID NO: 7073 - protein, 97 aa, Glycine max
  misc_feature (24)..(24): Xaa can be any naturally occurring amino acid
  misc_feature (27)..(27): Xaa can be any naturally occurring amino acid
  misc_feature (59)..(59): Xaa can be any naturally occurring amino acid
  misc_feature (76)..(76): Xaa can be any naturally occurring amino acid
MACRKMITLCLIDCLSLFSLTKNXGLXAKVPFLDKNFIGVAMNMDPDYKMIKQEHCRIXKCVLKRPFDDEERPYLXRHGMQLMEQVSDVSGYGWMHG

SEQ ID NO: 7074 - protein, 136 aa, Glycine max
MQHRNLTSGRPSGTDGSDYSYRMVVDSRYQLVAKGKKRLSLYFITEAVLLLIGVTLTYLPGIEADAPNTVAYSSVIVSVVSLIIGNIGRRRSRSGLLRFYAAVSSIAMLLLIASLAQQHLLLKAIQDSKLWKTGKV

SEQ ID NO: 7075 - protein, 355 aa, Cryphonectria parasitica
MSRSQAPNPAGSRKISFNVSEQYDIKDVVGEGAYCVVCSAIHKPSGQKVAIKKITPFDHSMFCLRTLREMKLLRYFNHENIISILDIQRPRNYESFNEVYLIQELMETDMHRVIRTQDLSDDHCQYFIYQTLRALKAMHSANVLHRDLKPSNLLLNANCDLKVCDFGLARSAASQEDKSGFMTEYVATRWYRAPEIMLTFKEYTKAIDVWSVGCILAEMLSGKPLFPGKDYHHQLTLILDVLGTPTMEDYYGIKSRRAREYIRSLPFKKKVPFKTLFPKTSELALDLLEKLLAFNPVKRITVEEALKHPYLEPYHDPDDEPTAPPIPEEFFDFDKHKENLSKEQLKQLIYQEIMR

SEQ ID NO: 7076 - protein, 396 aa, Salmonella typhimurium
MLDAQTIATVKATIPLLVETGPKLTAHFYDRMFTHNPELKEIFNMSNQRNGDQREALFNAIAAYASNIENLPALLPAVEKIAQKHTSFQIKPEQYNIVGTHLLATLDEMFNPGQEVLDAWGKAYGVLANVFIHREAEIYHENASKDGGWEGTRPFRIVAKTPRSALITSFEFEPVDGGTVAEYRPGQYLGVWLKPEGFAHQVFRQYSLTRKPDGKGYRIAVKREDGGQVSNWLHHHASVGDVVHLAAPAGDFFMNVAADTPVSLISAGVGQTPMLAMLDTLAKEQHTAQVNWFHAAENGDVHAFADEVSELGRTLPRFTAHTWYREPTEADRAQRLFDSEGLMDLSKLEAAISDPAMQFYLCGPVGFMQFAAKQLVSLGVNNENIHYECFGPHKVL

SEQ ID NO: 7077 - protein, 54 aa, Glycine max
NSDRFRLTKWPYTARDVMFLRGNLRHTYASNDMAKKLWRLLNNHQSYGTVSKTF

SEQ ID NO: 7078 - protein, 316 aa, Vibrio cholerae O1 biovar eltor str. N16961
MSNKLAQLRKLTTVVADTGEIDAIKKYQPEDATTNPSLILKAAQIAEYAPLIDQAIAYAKTQSNDKAQQVQDTCDMLAVNIGKEILKTIPGRISTEVDARLSYDTERSVAKARQLVKMYNDAGISNDRILIKLASTWEGIRAAEILEKEGINCNLTLLFSFAQARACAEAGVFLISPFVGRIMDWYKAKEGRDFAASEDPGVLSVTKIYNYYKEHGYKTVVMGASFRNIGEILELAGCDRLTIAPSLLAELEAAEGELVAKLVDSKGSKARPAPMTHSEFLWEHNLDAMAVEKLAEGIRNFAVDQGKLEAMIAAKL

SEQ ID NO: 7079 - protein, 226 aa, Gossypium hirsutum
MLQCLDGLKHLFASVLHCCDIDLCKQSRGLEDPELLARETVFSVSEIEALYELFKKVSSAVIDDGLINKEEFQFALFKTNKKESLFADRVFDLFDTKHNGILGFEEFARALSVFHPNAPIDNKIDFSFQLYDLKQQGFIERQEVKQMVVATLAESGMNLSDDVIESIIDKTFEEADTKHDGRIDKEEWRSLVLRHPSLLKNMTLQYLKDITTTFPSFVFHSQVDDT

SEQ ID NO: 7080 - protein, 93 aa, Glycine max
MFFIQVLVVGGGDGGVLREVARHSSVEHIDICEIDKMVIDVSRKFFPQLAVGFEDSRVHLHVGDAVDFLKSAPEGKYDAIIVGSSDPVGMSFQ

SEQ ID NO: 7081 - protein, 243 aa, Schizosaccharomyces pombe
MVLEATMILIDNSEWMINGDYIPTRFEAQKDTVHMIFNQKINDNPENMCGLMTIGDNSPQVLSTLTRDYGKFLSAMHDLPVRGNAKFGDGIQIAQLALKHRENKIQRQRIVAFVGSPIVEDEKNLIRLAKRMKKNNVAIDIIHIGELQNESALQHFIDAANSSDSCHLVSIPPSPQLLSDLVNQSPIGQGVVASQNQFEYGVDPNLDVELALALELSMAEERARQEVAAQKSSEETEDKKMQE

SEQ ID NO: 7082 - protein, 392 aa, Picrophilus torridus DSM 9790
MDRIMFENGSWIVPEKPVILYANGDGIGPEIMDATRKVVDAATAMEKKSIAWKEILLGDRAEELKGDRFPEESIKAINDYRVLLKAPLNTPVGKGFKSINVRIRMLLDLYANIRPVKFMPGLESPLKNPEKVNLTIFRENTDDLYLGYEWSYDTDEAKRIRKFLKDEFNIDISDDSGIGIKPMSRYKTQRITRLAVKYAMDNNLKKITIMHKGNVMKYTEGAFREWAYETALNEFSDYVSRDDDKKIIINDIIADNMFQQIITRPDEYQLILAPNVDGDYISDAAGALIGNIGTLGGANIGDNGAMFEAVHGTAPKYAGKNVADPLGLIRGAQLMLRYMGWNRAADAIEKAIQASINEKKVTNDLARFFNVEPLGTREYGDYLVDKIKVLVS

SEQ ID NO: 7083 - protein, 365 aa, Picrophilus torridus DSM 9790
MDVDLGLENTYIKHTKLTYIDGELGVLRYRGYDINDVVNNLSFMETAYLMLYGRIPDPKELKLFSSYIGDGKLPERIFSMIDTFPEGDPLSMASSVFAALAIDNNMKWSIDENKRNAGRIIGLSFNVFANIYLHIKGKKLYNIDLGDPVSGFLRVTNNMDQKNVKAFEAAMILYMDHEIPASTTAALVTASTLSDMLSSLSSAMNALKGPLHGGAAENAFLEFLDIGSPENVKPWFNEHIIKNRERLIGFGHRVYKTYDPRIKKFRELSMSLCDEKNRIILDTALELERVALDYFMEKKIYPNTDFFSGLLFNELGFEHWFFTSLFALSRVTGILAHIIEYNENEQRLIRPRAIYNGDGERFIKR

SEQ ID NO: 7084 - protein, 87 aa, Glycine max
DSSMISSPMLPLSTVARAGMYAPFSGLESMAVFPTRMTNNDITSFASYLGILQCMSGCAPDVKKTFDTLSYLPDLDDALLDYEVSIL

SEQ ID NO: 7085 - protein, 277 aa, Bacillus cereus ATCC 10987
MSLTSLKDYTTLHNGVKMPWFGLGVFKVEDGSEVIESVKAAIKNGYRSIDTAAIYQNEEGVGQAIRESGVSREELFITSKVWNSDQGYETTLQAFETTLEKLGLEYLDLYLVHWPVKGKYTESWKALEKLYKDGRVRAIGVSNFHIHHLQDVFEIAEIKPMVNQVEYHPRLAQEELHAFCKEHNIQLEAWSPLMQGQLLDNPTLQEIATKYNKSTAQIILRWDLQNEVVTIPKSIKEHRIIENANIFDFELSADDMKAIQALNEDRRVGPDPDNFNF

SEQ ID NO: 7086 - protein, 291 aa, Lactobacillus gasseri
MTEVPTITLNDGNKMPQVGLGVFRIPDHDKARQTVEMALANGYRMIDTAEAYDNQIAVGEAIAESAVNRDDIFLTTKIWVSNMSFEKATKAIDHDLKELGTDYIDLVLLHQPYGDTFGAWNALEAAKSAGKIRSIGLSNFYPDQYMNLELAHEDKPAINQIEISPWFQQANDVKFFQGRNVAVEAWAQFANGKHDIFNNKVLTEIAETHHKTVGQVILRWLTQKSIIVIPKAVHDEHQKENINIFDFELTQDEMAKIGELDKGESQFFDHRDPAAIDDIFGESLKQLRDSE

SEQ ID NO: 7087 - protein, 214 aa, Zea mays
PAVPVRNSRVPNLSIGFKDPRVRLHVGDAVDFLRNSPEGKYDAIIVDSSDPIGPAQALVEKPFIQTIARALKPGGVLCNLAESMWLHTHLIQDMLAICRQTFKGAVHYAWTSVPTYPSGVIGFLLCAKEGRAVNFLTPVNPIEKIEGTSKAGRELRFYNSEIHRAAFVLPTFVRRELEAYTSPSTSAENEKPKESVSEPQKIKILSNNAILTAS

SEQ ID NO: 7088 - protein, 198 aa, Gossypium barbadense
MAPKKDGVSKRVFNKGSWTAEEDRRLAKYIEIHGAKRWKTIAIKSGLNRCGKSCWLRWLNYLRPNIKRGNISDEEEDLIIRLHKLLGNRWSLIAGRLLGRTDNEIKNYWNSHLSKKIINHDVRTEQTSSSEQIVPHKAWETVQMEEEEVVKGSDEIENSEFSIDVDEFFDFTTEGCFSLDWVNKFLELDDQQDPLAMV

SEQ ID NO: 7089 - protein, 152 aa, Zea mays; identical to SEQ ID NO: 357

SEQ ID NO: 7090 - protein, 194 aa, Saccharomyces cerevisiae
MVTSNVVLVSGEGERFTVDKKIAERSLLLKNYLNDMHDSNLQNNSDSESDSDSETNHKSKDNNNGDDDDEDDDEIVMPVPNVRSSVLQKVIEWAEHHRDSNFPDEDDDDSRKSAPVDSWDREFLKVDQEMLYEIILAANYLNIKPLLDAGCKVVAEMIRGRSPEEIRRTFNIVNDFTPEEEAAIRRENEWAEDR

SEQ ID NO: 7091 - protein, 252 aa, Prunus maritima
AHYKSEADVGNAIAEAIQSGLVKREELFITSKASNHGHVVEACKNSLKKLQLDYLDLYLVHYPLATKHSGVGTTASLLDENKVLDIGVTVSLETTWHDMEKTVDLGLVRSIGLSNYELFLTRDCLSYAKIKPQVSQFETHPYFQRESLVRFCKKHGVVPMAHTPLGGATANVKAFGSISPLEDPVLIGLAKKYQKSVAQIALRWNLERGTPVIPKSSKVERLKENLEILNFKLEKEDIELINTIDKKSRTTL

SEQ ID NO: 7092 - protein, 252 aa, Prunus maritima
AHYKSEADVGNTIAEAIQSGLVKREELFITSKASNHGHVVEACKNSLKKLQLDYLDLYLVHYPLATKHSGVGTTASLLDENKVLDIDVTVSLETTWHDMEKTVDLGLVRSIGLSNYELFLTRDCLSYAKIKPQVSQFETHPYFQRESLVRFCKKHGVVPMAHTPLGGATANVKAFGSISPLEDPVLIGLAKKYQKSVAQIALRWNLERGIPVIPKSSKVERLKENLEILNFKLEKEDIELINTIDKKSRTTL

SEQ ID NO: 7093 - protein, 416 aa, Polytomella sp. Pringsheim 198.80
MPAPSAHADRWTGISRVFSEKDVERLRGSVTIEHTLARIGAEKFWKLLHTEDYVPALGALTGHQAVEMISAGLKAIYLSGWQVAGDNNSAYQTYPDQSLYPADSVPKVVKRINNAFQRADQIQHSQGSTEVDFFAPIVADAEAGFGGVLNAYELMLGMIEAGAACVHFEDQLASAKKCGHMGGKVLVPTNEFIQKITAARLAADVANVPTLIIARTDALGAYLLTSDIDERDKAFCTGERTAEGFYRVRGGIDAAIARGLSYAPYADLVWFETGEPNMEEAKKFAAAIHAKFPGKLLAYNCSPSFNWKKLLSDEEIGAFQKTLGALGYKFQFVTLAGFHALNYGMFSLAKEYSKTGMTAYSELQANEFASEKDGYKATTHQRFVGTGYFDALSQVITEGTSSVTALSGSTEEEQFH

SEQ ID NO: 7094 - protein, 505 aa, Populus balsamifera subsp. trichocarpa x Populus deltoides
MDLLLLEKTLLGSFVAILVAILVSKLRGKRFKLPPGPIPVPVFGNWLQVGDDLNHRNLTDLAKKFGDIFLLRMGQRNLVVVSSPDLSKEVLHTQGVEFGSRTRNVVFDIFTGKGQDMVFTVYGEHWRKMRRIMTVPFFTNKVVQQYRYGWEEEAAQVVEDVKKNPEAATNGIVLRRRLQLMMYNNMYRIMFDRRFESEDDPLFNKLKALNGERSRLAQSFDYNYGDFIPILRPFLRGYLKICQEVKERRLQLFKDYFVDERKKLASTKNMSNEGLKCAIDHILDAQKKGEINEDNVLYIVENINVAAIETTLWSIEWGIAELVNHPEIQKKLRHELDTLLGPGHQITEPDTYKLPYLNAVIKETLRLRMAIPLLVPHMNLHDAKLGGFDIPAESKILVNAWWLANNPAHWKNPEEFRPERFLEEEAKVEANGNDFRYLPFGVGRRSCPGIILALPILGITLGRLVQNFELLPPPGQSKIDTAEKGGQFSLHILKHSTIVAKPRSF

SEQ ID NO: 7095 - protein, 200 aa, Schizosaccharomyces pombe
MTTELRRKLVIVGDGACGKTCLLIVFSKGTFPEVYVPTVFENYVADVEVDGRHIELALWDTAGQEDYDRLRPLSYPDSHVVLICFSVDAPESLDNVQEKWISEVLHFCSNLPILLVGCKVDLRNDPKTIEELSKTSQKPITFEEGQVVAQKIGAYKYLECSAKLNEGVNEVFETAARASMLKFKPASVPKTKKKKHCILL

SEQ ID NO: 7096 - protein, 231 aa, Prunus maritima
AHYKSEADVGNAIAEAIQSGLVKREELFITSKASNHGHVVEACKNSLKKLQLDYLDLYLVHYPLATKHSGVGTTASLLDENKVLDIDVTVSLETTWHDMEKTVDLGLVRSIGLSNYELFLTRDCLSYAKIKPQVSQFETHPYFQRESLVRFCKKHGVVPMAHTPLGGATASVKAFGSISPLEDPVLIGLAKKYQKSVAQIALRWNLERGTPVIPKSSKVERLKENLEILNF

SEQ ID NO: 7097 - protein, 252 aa, Prunus takesimensis
  misc_feature (18)..(18): Xaa can be any naturally occurring amino acid
AHYKSEADVGNAIAEAIXSGLVKREELFITSKASNHGHVVEACKNSLKKLQLDYLDLYLVHYPLATKHNGVGATASLLDENKVLDIDVTVSLETTWHDMEKTVSLGLVRSIGLSNYELFLTRDCLSYAKIKPQVSQFETHPYFQRESLVRFCKKHGVIPMAHTPLGGATANVKAFGSISPLEDPVLLALAKKYQKSVAQIALRWNLERDTPVIPKSSKVERLKENLEVLNFKLEKEDIELINTIDKKSRTTL

SEQ ID NO: 7098 - protein, 121 aa, Triticum aestivum
  misc_feature (54)..(54): Xaa can be any naturally occurring amino acid
GPMLIYPMLKSKWDPNTSVALPEGEVFYLVALLRFCPGGSGAAVEELVARRHRXAGGCRSSGYDFKTYFPHYRTEADWARHFGAKWARFVDRKARYDPLAILAPGQKIFARTPSSSRTDRS

SEQ ID NO: 7099 - protein, 490 aa, Oryza sativa (japonica cultivar-group)
MAIFLVLALSIAQLLPSLVAGTGRPRVIIVGAGISGISAGKRIWEAGIADVLILEATDRIGGRMHKQSFAGVNVEIGANWVEGVNGEKKNPIWPIVNSTLKLRSFRSDFDSLAQNVYKDGGLCDEAYVQKRMDRADEVDKSGENLSATLHPSGRDDMSILSMQRLNDHLPNGPSSPVDMAVDYFTYDYEFAEPPRVTSLQNTVPLPTFTDFGDDTYFVADQRGYESVVHHLAGQYLNADKSGNIADARLKLNKVVREISYSSTGVTVKTEDNSTYQADYVMVSASLGVLQSDLIQFKPQLPSWKILAIYQFDMAVYTKIFVKFPKKFWPEGAGREFFLYASTRRGYYGVWQEFEKQYPDANVLLVTVTDEESRRIEQQPDSQTKAEIMEVVRCMFPDEDVPDATDILVPRWWSDRFFRGSFSNWPIGVSRYEYDQLRAPVGRVYFTGEHTSERYNGYVHGAYLAGIDSAEILINCAQKKMCKYNVGGKHG

SEQ ID NO: 7100 - protein, 470 aa, Corynebacterium efficiens YS-314
METFVSRNNILAARDASDLVIESGDLPQPGGTDKKFEREIVASDNNKAVLHYPGGEFEMGIKQATEGNSGVILGKMLSETGLVTFDPGYVSTGSTESKITYIDGDAGILRYRGYDIADLAENATFNEVSYLLIKGELPTPEELHKFNDEIRHHTLLDEDFKSQFNVFPRDAHPMATLASSVNILSTYYQDQLDPLDEAQLDKATVRLMAKVPMLAAYAHRARKGAPYMYPDNSLNARENFLRMMFGYPTEPYEVDPIMVKALDKLLILHADHEQNCSTSTVRMIGSAQANMFVSIAGGINALSGPLHGGANQAVLEMLEEIAANGGDATDFMNRVKNKEKGVRLMGFGHRVYKNYDPRAAIVKDTAHEILEHLGGDPLLDLALKLEEIALNDDYFISRKLYPNVDFYTGLIYRAMGFPTDFFTVLFAIGRLPGWIAHYREQLADPGAKINRPRQIYTGETARKIIPREER

SEQ ID NO: 7101 - protein, 122 aa, Lotus corniculatus var. japonicus
MIQPQTHLNVADNSGARKLMCIRIIGASNRRYAYIGDIVVAVIKEAVPNTPLERSEVIRAVIVRTCKELKRSNGIIIQYDDNAAVVIDQEGNPKGTRIFCAIARELRQFNFTKIVSLAPEIL

SEQ ID NO: 7102 - protein, 102 aa, Zea mays; identical to SEQ ID NO: 326

SEQ ID NO: 7103 - protein, 322 aa, Paenibacillus macquariensis
MTIKKIAVLTSGGDSQGMNAAVRAVVRSGLFYGLEVYGIQRGYQGLLNDDIFSMDLRSVGDIIQRGGTVLQSARCKEFMTPEGQQKGADILRKRGIDGLVVIGGDGSYHGANKLSKLGINTMALPGTIDNDISYTDFTIGFDTSVSIVVDAINKLRDTMSSHERSSIVEVMGRHCGDIALYAGLASGAETIIVPEVPFDMDEIAERMKQNFAHGKRHSIVVVAEGAGNGENVAKQLVERCETLEPRVTVLGHIQRGGTPTPADRNLASRLGDFAVRMLIAGESAKACGIISNELVLTDIDKVVNSKKEFNMELYELAARLSQ

SEQ ID NO: 7104 - protein, 284 aa, Corynebacterium efficiens YS-314
MSPTPSPTLSLSDGSEIPQIGLGTWQMHGEEAYRTVREAIGMGYRHIDTAKLYDNEVEVGRAVTDAIRSGEVTRDELFITSKVWNDDQGREQAARAFQASLARLGLDYLDLYLVHWPCPRKGLYNETFEAVARIQGLGQVQSIGVANFYAGVLEDLVVTTGIVPAVNQVELHPGFSQAPLRALHDRLGVVTTAWAPLARGGVLSHPVIKGIAGRYGVPASAVVLRWLVQLGVVAIPKSSDPGRLRSNLDVHGFQLSVEEVERITALDEGPGMGRLFHDPEEFPA

SEQ ID NO: 7105 - protein, 168 aa, Glycine max
  misc_feature (151)..(151): Xaa can be any naturally occurring amino acid
  misc_feature (158)..(158): Xaa can be any naturally occurring amino acid
  misc_feature (160)..(160): Xaa can be any naturally occurring amino acid
MGSLALETEDVISDIYLSLGLKESDKGVGVPRVLSLLSSLLERSVQRNETLLEAKHVKDVVTVFHGLRAPTLSVRKYIDRIFKYSGCSPSCFVVAHIYVDRFIQHTEIKLTSLNVHRLLITSIMLAAKFIDDAFYNNAYYAKVGGVSTSEXNRLEMSXLXGIEFRLQF

SEQ ID NO: 7106 - protein, 326 aa, Medicago sativa
MEQAVLDDIINRLLEVRCRPGKQVQLSETEIRQLCSTAREIFLQQPNLLELEAPIKICGDIHGQYSDLLRLFEYGGLPPQANYLFLGDYVDRGKQSLETICLLLAYKIKYPENFFLLRGNHECASINRIYGFYDECKRRFNVRIWKVFTDCFNCLPVAALIDEKILCMHGGLSPDLHNLDQIRNLQRPTDVPDTGLLCDLLWSDPSKEVQGWGMNDRGVSYTFGADKVSEFLQKHDLDLICRAHQVVEDGYEFFANRQLVTIFSAPNYCGEFDNAGAMMSVDETLMCSFQILKPADKKTKLNFGSTTTTKPGNSPAGVKSFLGTKV

SEQ ID NO: 7107 - protein, 325 aa, Medicago sativa
MEQSVVDIINRLLEVRNRPGKQVQLSESEIRQLCNVSRDIFLKQPFLLQLEAPIKICGDVHGQYSDLLRLFEYGGFPPEANYLFLGDYVDRGKQSLETICLLLAYKIKYPENFFLLRGNHECASINRIYGFYDECKRRFNVRLWKTFTDCSNCLPVAALIDEKILCMHGGLSPDLHNLDQIRNLQRPTDVPDTGLLCDLLWSDPSKDVQGWGMNDRGVSYTFGADKITEFLEKHDLDLICRAHQVVEDGYEFFANRQLVTIYSAPNYCGEFDNAGAMMSVDETLMCSFQILKPADKKTKLNFGSTTTAKPENSPAGVKYLLGAKV

SEQ ID NO: 7108 - protein, 154 aa, Rickettsia conorii str. Malish 7
MTFIITSTAFKHNDRIPDKFTCKGQNVSPHLEWSNAPSDTKSFALIMDDPDAPVEIAPPHGIWDHWVIYNISASITKLSEGQIDSSIKILNNSWQEKKYGGPCPPAGKPHRYFFKLYALNDYLELDENASKPDLVLALQKHLLAEAALIGIYSI

SEQ ID NO: 7109 - protein, 483 aa, Streptomyces coelicolor A3(2)
MRHRLSELSELSDLSEPSERLPDELRVLNPATEEVVATVPAASAADVDAAVARAARAQTAWAALAPGDRARLLRRFAVTVDEHLEELARLEVRQAGHLLGNARWEAGNVRDLLDYAAGGVERLTGRQIPVAGGLDVTLLEPLGVVGVIAPWNFPMPIAAWATAPALAAGNAVLLKPAETTPLTALRLAELALVAGLPEDLFQVLPGHGPVAGDALVEHPDVAKIVFTGSTAVGRQVAAKGAALLKPVTLELGGKSPNIVFADADVEAAAAATPMSFLDNSGQDCCARTRILVQRSVHDRFLELLAPAIEAVRVGDPADESTEMGPLISRAQLERVRSHVPADAAGIRGRAPRGGPGFWFPPTVLTGVDAHARVAVEEVFGPVAVVLPFDDEADAVRLANATDYGLAGSLWTRDVGRALRVSGAVRAGNLSVNSHASVRYWTPFGGFKQSGIGRELGPDALTAFTETKNVFFSTTPSSTEGPAQ

SEQ ID NO: 7110 - protein, 453 aa, Pirellula sp. 1
MNSRSRTSTSKQPSPLLTGRRNSKDSIGSWKIHAFASLELSEPILMSIKRVGILTAGGLAPCLSSAIGALIEAYTEQAPEIEILCYRSGYKGLLLGDSFVVDAHSRKNAAILHQHGGSPIGNSRVKLTNVADCVKRGLVSEGQDPLQVAAERLQSDEVDVLHTIGGDDTNTTAADLAAYLAKHEYQLTVVGLPKTIDNDVIPIKQSLGAWTAAEEGAKFFENVVGEHNANPRMLIIHEVMGRNCGWLTAATAAKYRERLQKLNFLPEMGLSQERRDVHGVFVPEMSFDLEEEAKRLRAIMDEIDCVNIFISEGAGVDTIVKEMESRGESVPKDAFGHYKLDAVNPGKWFGKQFADMLGAEKTLVQKSGYFSRAAAANAEDIALIGRCAKKAVECAMQGIGGVVGEDEDQNNELRAIEFERIAGGKPFDINVEWFGDLLSQMGQPKGEVLETSH

SEQ ID NO: 7111 - protein, 132 aa, Ehrlichia canis str. Jake
MSTVDIDSLVEQICSLDLCKAAELVDKMEQKLGFPKGGLLTAVPAAGGGQAESSAAEEKTDFSVIFDSYAADKKISVIKAVRECTNLGLKEAKEFVEKEGAKELIEGKKYKKEEAEEIKKKLEDAGAKVIIK

SEQ ID NO: 7112 - protein, 332 aa, Glycine max
  misc_feature (89)..(89): Xaa can be any naturally occurring amino acid
  misc_feature (140)..(140): Xaa can be any naturally occurring amino acid
  misc_feature (166)..(166): Xaa can be any naturally occurring amino acid
TTLAPTPLPSLPHPSPDMDRRTGSTRNILFNKYEIGKLLGQGNFAKVYHGRNLSTNESVAIKVIKKERLQQKERLVKQIKREVSVMSLXCVTPTSSNKKRVMANKAKIFLVVEYVKGGELFAKVAKGKMKEDVARKYFQXQLISAVEFCHSRGVTHRDLKPENLLXDENEDLKVSDFGLSALPDQRRSDGMLLTPCGTPAYVAPEVLKKKGYDGSKADIWSCGVILFALLSGYLPFQGENVMRIYSKSFRADYAFPEWISPGAKNLISNLLVVDPQKRYSIPDIMKDPWFQIGFMRPIAFSMKESAVEDNIDFSGDDVSIITIRLGLDLLPM

SEQ ID NO: 7113 - protein, 365 aa, Phaeosphaeria nodorum
MPSHNIVVLAGDGVGPEVVAEAFKILKVVEKHTDNTFNFQEHLFGGCSIDAHNNPLTDEALAAAKGADAIILGAVGGPKWGTGKVRPEQGILKLRKELGTFGNLRPCFFASDSLVDSSPLKAENVRGVNFNIIRELTGGIYFGERKEDEGDGKAMDTEPYSVEEIERVVRLAGSLASAENPPVPVWSLDKANVLATSRLWRKTFERIMKDEYPHLKSGTHLIDSAAMLMIKNPRALNGVVVTSNLFGDIISDEASVIPGSLGLLPSASLGGIPDGKTKLNGIYEPIHGSAPDIAGQGIVNPIATILSISMMFKYSLCLPELALKIDEATKITIDKGVRTGDIGGTSKTAEVGDAIAAELETLLKK

SEQ ID NO: 7114 - protein, 252 aa, Prunus fruticosa
VDYKSEADVGNAIAEAIQSGLVKREELFITSKASNHGHVVEACKNSLKKLQLDYLDLYLVHYPLATKHNGVGATASLLDENKVLDIDVTVSLETTWHDMEKTVSLGLVRSIGLSNYELFLTRDCLSYAKIKPQVSQFETHPYFQRESLVRFCKKHGVIPMAHTPLGGATANVKAFGSISPLEDPVLLALAKKYQKSVAQIALRWNLERDTPVIPKSSKVERLKENLEVLNFKLEKEDIELINTIDKKSRTTL

SEQ ID NO: 7115 - protein, 319 aa, Burkholderia cepacia R18194
MPLNPKIAQVLDMIERAKRPSYHHQTPQQARAAYEKSAPILDVASAPMHSVEECVVPTRDGRTIGARLYLPVEPSLAEPLPALVYYHGGGFTVGSVDTHDALCRMFARDAQCAVLSVGYRLAPEHRFPTAVNDADDALQWLHREAATFGIDAARLAVGGDSAGGTLATVCAVLARDAGIRLALQMLIYPGVTGYQDTESHARLANGYLLTQDTIQWFFTQYVRDRADRDDWRFAPLDGTRDAPSFAGVAPAWIATAEYDPLSDEGAAYAEKLRAAGNVVTLVCYPGMIHEFFKMGGYVPEVRAAHADAVAALKAAFDDV

SEQ ID NO: 7116 - protein, 226 aa, uncultured bacterium
MAGVQLGAGCWICEYLSPWDVYAHGVAKTLVHRKTKFQEMHIIETGTFGKALILDGFWQSCTGDEFLYHEPLVHPAMLLHGRPRRVLVLGGAEGAAVREVLRWKSVEQVVMVDIDGEVVEACRQHLPEMHQGACDDPRVEVRIQDALVYLDETRSTFDVIISDLSDPIEDGPSFKLFTRETFERARGSWRRRGCSSCKPAASRRPSCTCTPAWSARSDGCSPTPPH

SEQ ID NO: 7117 - protein, 502 aa, Delphinium grandiflorum
MSISLFLAGAAILFFVTHLLLSPTRTRKLPPGPKGWPVVGALPMLGNMPHVALANLSRRYGPIVYLKLGSRGMVVASTPDSARAFLKTQDLNFSNRPTDAGATHIAYNSQDMVFADYGPRWKLLRKLSSLHMLGGKAIEDWAVVRRDEVGYMVKAIYESSCAGEAVHVPDMLVFAMANMLGQVILSRRVFVTKGVESNEFKEMVIELMTSAGLFNVGDFIPSIAWMDLQGIVRGMKRLHNKFDALLDKILREHTATRSERKGKPDLVDVLMDNRDNKSEQERLTDTNIKALLLNLFSAGTDTSSSTIEWALTEMIKNPSIFRRAHAEMDQVIGRNRRLEESDIPKLPYLQAVCKETFRKHPSTPLNLPRVAIEPCEVEGYHIPKGTRLSVNIWAIGRDPNVWENPLEFNPDRFLTGKMAKIDPRGNNSELIPFGAGRRICAGTRMGIVLVEYILGTLVHAFEWKLRDGEMLNMEETFGIALQKAVPLAAVVTPRLPPSAYVV

SEQ ID NO: 7118 - protein, 468 aa, Oryza sativa (japonica cultivar-group)
MAIFLSIVLLSMAQLPSLVAGTGRPRVIIIGAGISGISAGKRLSEAGITDILILEATDHIGGRMHKQRFAGVNVEIGANWVEGVNGEKMNPIWPIVNSTLKLRNFLSDFDSLAQNVYKDGGLCDAAYVQKRIDLADEADKSGENLSATLHPSGRDDMSILSMQRLNNHLPNGPSSPVDMVVDYFTYDYEFAEPPRVTSLRNTVPLPTFTDFGDDNYFVADQRGYEAVVYYLAGQYLEADKSGNIVDARLQLNKVVREISYSSTGVTVKTEDNSTYQADYVMVSASLGVLQSDLIQFKPQLPSWKILAIYQFDMAVYTKIFVKFPKKFWPEGAGREFFLYASTRRGYYGVWQEFEKQYPDANVLLVTVTDEESRRIEQQPDSQTKAEIMEVVRSMFPDEDVPDATDILVPRWWSDRFFQGSFSNWPIGVSRYEHDQLRAPVGRVYFTGEHTSERYNGYVHGAYLAGIYA

SEQ ID NO: 7119 - protein, 443 aa, Botryotinia fuckeliana
GWKRAYPSSVMARKLFNLIKEREANGKPIHTMGAIDPVQMTQQAANQEVLYISGWAYSSVLTTTNEVSPDFGDYPYNTVPNQVQRLAKAQSMHDRKQWDARRKLSKEERAKTPYTDYLRPIIADGDTGHGGLSAVLKLAKLFAENGAAAVHFEDQMHGGKKCGHLAGKVLVPVGEHINRLVAARFQWDVMGSENLVIARTDSESGKLLSSAIDVRDHEFIKGVAEDGIESLAETLQAMELAGATGADIDIFEAEWVKKTELMTCDEAVVKQLKEQGVSESSINGYLEATKKDRDMSITKRKDLATKYSKTPIIFNIDIPRTREGFYHYKAGMEAATKRAIQYAPYADLLWVETGDPNVENAAKFSGEIRAKYPGKGLVYNLSPSFNWMGHGFTDETLKSFIWDIAKHGFVLQLISLAGLHSTATITSELSKAFKDEGTLASNR

SEQ ID NO: 7120 - protein, 562 aa, Glycine max
MAPSTTVPNGTLPSGSVTGRLASVYSEVQKTRVDHALPLPSVLKHPFTILHGPPSSAAGNPDEIAKLFPHLFGQPSAALARSDAAQTQKKLKIGVVLSGGQAPGGHNVISGIFDYLQERAPGSTLYGFKGGPAGIMKCKYVELTSEYIYPYRNQGGFDMICSGRDKIETPEQFKQAEETAKKLDLDGLVVIGGDDSNTNACLLAENFRSKNLKTSVIGCPKTIDGDLKCKEVPTSFGFDTACKIYSEMIGNVMIDARSTGKYYHFVRLMGRAASHITLECALQTHPNITIIGEEVAAKKLTLKNVTDYIVDVVCKRAEINYNYGVILIPEGLIDFIPEVQHLIAELNEILAHDTVDEGGLWKKKLTDQSLKLFDFLPQAIQEQLMLERDPHGNVQVAKIETEKMLIQMVETELEKRKQEGKYKGEFKGQSHFFGYEGRCGLPTNFDATYCYALGYGAGALLHSGKTGLISSVGNLCAPVKEWTVGGTALTSMMDVERRHGKFKPVIKKAMVELEGAPFKKFASLRDEWALKNCYISPGPIQFSGPGSEVINHTLLLELEAQA

SEQ ID NO: 7121 - protein, 57 aa, Zea mays
MKEGTANCVDILIAIILPPLGVFLKFGCKVEFWLCLLLTFLAYLPGIIYAIYAITKD

SEQ ID NO: 7122 - protein, 217 aa, Volvox carteri
MARIPGRPDYDALIKLLLVGDSGVGKSCLLLRFTDDMFTSSFITTIGIDFKIKKVDVDGKLVKLQIWDTAGQERFRTITSAYYRGAQGIILVYDITDEASFNNVRNWMRNIEQHASDNVNKILVGNKLDLAEDKRVVSIARGQALADEFGFRFYETSAKDNVHVEEAFIAVAKDVLARMEGEHANQQLLQQQQLSAAQPVRLTSGSPSPAQGKSCCR

SEQ ID NO: 7123 - protein, 480 aa, Zea mays
  misc_feature (239)..(239): Xaa can be any naturally occurring amino acid
SVPPRLLHGKSSRAYGSIWESTVRNVKFVSDKTVKPVYIITPTEAAHIQATVACGRKHGLRVRVRSGGHDYEGLSYRSAKPETFAVVDLSMMRQVRIDGKAATAWVDSGAQLGELYYAVAKMTPSLGFPAGVCATIGVGGHFSGGGFGMLLRKYGTAGDNVIDAKVVDANGTLLDRKSMGEDYFWAIRGGGGESFGIVVSWQVQLVPVPPKVTVFQIHGGGVKDGAIDLINKWQQVAPXLPDDLMIRIMAMEQDAMFEALYLGTCKDLLPLMASRFPELGVKQEDCNEMPWIQSVAFIPMGKSATVMDLLNRTSNIKAFGKYKSDYVKDPIPRDVWEKIYTWLAKPGAGVMIMDPYGARISSIPQDATPFPHRQGVLFNIQYVSYWFGEGDGAAPTQWSRDMYAFMEPYLSKNPRQAYANYRDLDLGVNEVVGDVSTYDSGRVWGEKYYNGNFERLARTKAKVDPCDYFRNEQSIPPLLK

SEQ ID NO: 7124 - protein, 181 aa, Brassica napus
MASSMLSSAAVATSPAQATMVAPFTGLKSSAAFPVTRKSNTDITSIASNGGRVSCMKVWPPVGKKKFETLSYLPDLTDVELAKEVDYLLRNKWIPCVEFELEHGFVYREHGSTPGYYDGRYWTMWKLPLFGCTDSAQVLKEVQECKTEYPNAFIRIIGFDNNRQVQCISFIAYKPPSFTGA

SEQ ID NO: 7125 - protein, 461 aa, Erwinia amylovora
  misc_feature (7)..(7): Xaa can be any naturally occurring amino acid
  misc_feature (11)..(11): Xaa can be any naturally occurring amino acid
  misc_feature (16)..(18): Xaa can be any naturally occurring amino acid
  misc_feature (20)..(20): Xaa can be any naturally occurring amino acid
  misc_feature (23)..(23): Xaa can be any naturally occurring amino acid
  misc_feature (25)..(25): Xaa can be any naturally occurring amino acid
  misc_feature (27)..(27): Xaa can be any naturally occurring amino acid
  misc_feature (30)..(30): Xaa can be any naturally occurring amino acid
  misc_feature (36)..(36): Xaa can be any naturally occurring amino acid
  misc_feature (47)..(47): Xaa can be any naturally occurring amino acid
  misc_feature (437)..(437): Xaa can be any naturally occurring amino acid
MKNVSSXVAVXRNPAXXXVXARXPXAXIDXVARALXLTHGAFQDWRXSVMSDRVRLLRNVAGALRQQARELAEMMTSEMGKPVDQGLAEVEKSARLCEWYAEHGPAFLQREPTLVEGNKAFVDYLPLGPVLSVMPWNFPVWQVLRGAVPILLAGNSYLLKPAPNVMGCALLLQQILSRAGVPQGLFAVVNADNDGVAQAINDRRIAAVTVTGSVRAGAAIAALSGAAIKKCVLELGGSDAFIVLAEADIDAAVKGAIAGRFMNNGQLCISAKRIIVEAAVFETFRDKFVCAVREMKIGDPRESGTWIGPMARYDLRDELDAQVQATLKEGATLLLGGHVLPGEGNYYAPTVLSDVKPGMTSFVQELFGPVASLIMADDAGHAVAMANDSEFGLGGSLWSRDLAVAQKLASRIETGSVFINSPSFSDPRVPIGGVKKXGFGRELSHFGLREFTNAQTVWMEG

SEQ ID NO: 7126 - protein, 148 aa, Novosphingobium aromaticivorans DSM 12444
MRIASEHAKTIVKATAPAIEKHGVDITTAMYKRLFQNDEVKAMFDQAAQDSGEQPRRLAGAILAYAKNIDKLENLGSAVQRMVQRHVDTGVKAEHYPYVAEALLPAIRDVLGAEVATDEVLAAWGEAYWMLADILIAAEKQAYLEAVA

SEQ ID NO: 7127 - protein, 396 aa, Salmonella typhimurium LT2
MLDAQTIATVKATIPLLVETGPKLTAHFYDRMFTHNPELKEIFNMSNQRNGDQREALFNAIAAYASNIENLPALLPAVEKIAQKHTSFQIKPEQYNIVGTHLLATLDEMFNPGQEVLDAWGKAYGVLANVFIHREAEIYHENASKDGGWEGTRPFRIVAKTPRSALITSFEFEPVDGGTVAEYRPGQYLGVWLKPEGFAHQEIRQYSLTRKPDGKGYRIAVKREDGGQVSNWLHHHASVGDGVHLAAPAGDFFMNVAADTPVSLISAGVGQTPMLAMLDTLAKEQHTAQVNWFHAAENGDVHAFADEVSELGRTLPRFTAHTWYREPTESDRAQRLFDSEGLMDLSKLEAAISDPAMQFYLCGPVGFMQFAAKQLVSLGVNNENIHYECFGPHKVL

SEQ ID NO: 7128 - protein, 486 aa, Pseudomonas putida
MKEFLNFINGEYVRNASGKTFQDINPVNGQVIGNIYEAGQVEVDAAVAAARAALKGDWGRLSVAERCKLLDAVAGEINRRFDDFLQAEIADTGKPHHLASHVDIPRGAANFQIFIDTIKSTATESFNMRTPDGKTALSYGVRVPRGVIAVVCPWNLPLLLMTWKVGPALACGNTVVVKPSEETPATATLLGEVMNAVGMPKGVYNVVHGFGPASAGEFLTKHPGVNGITFTGETRTGTAIMKAAADGVRPVSLEMGGKNAAVVFADCDFQVTIDTLTRSCFENAGQVCLGTERVYVERPIFDKVVAALKERAEAMKPGLPFDHDTRIGPLISKKHQAKVLGLYKTAKDEGATIVTGGGIPDMPEELKNGSWVQPTIWTGLPETATVVTEEIFGPCCHISPFDSEEEVLGKVNANRYGLATAIFTQDIARANRLAHQIEVGLCWINAWFLRDLRTPFGGSKQSGIGREGGVHSLEFYTELRNVMVKF

SEQ ID NO: 7129 - protein, 176 aa, Triticum aestivum
  misc_feature (9)..(9): Xaa can be any naturally occurring amino acid
  misc_feature (79)..(79): Xaa can be any naturally occurring amino acid
  misc_feature (87)..(87): Xaa can be any naturally occurring amino acid
  misc_feature (108)..(108): Xaa can be any naturally occurring amino acid
QPGRPLMAXSATSLAPFQGLKSPAGFPVKRRSKGGSLGRVRNGGRIRCMQVWPIEGIKKFETLFYLPPLSTEALLKQVXYLIRSKWXPCLEFSKVGFIFREHNGSPGXYDGRYWTMWKLPMFGCTDATQVINEVEEVKEEYPDGYVRIIGFDNMPQVQWVSFIAFKPPGCEESGKA

SEQ ID NO: 7130 - protein, 600 aa, Glycine max
MWKVVRFAAARSRRFSTAIPGPCKVHKRGTDILHDPWFNKDTGFPLTERDRLGLRGLLPPRVISFEHQYDRFMNSYRSLEKNTQGQSDRFVSLSKWRILNRLHDRNETLYYRVLIDNIKEFAPIIYTPTVGLVCENYSGLFRRPRGMYFSAKDKGEMMSMIYNWPSDQVDMIVLTDGSRILGLGDLGVQGIGIPIGKLDMYVAAAGINPQKILPVMLDVGTNNQKLLEDPLYLGVRQPRLEGEEYLLIVDEFMEAVHARWPKAIVQFEDFQMKWAFETLKRYRERFCMFNDDIQGTAGVALAGLLGTVRSQGQPLSDFLKQKIVVVGAGSAGLGVLSMAVQAVSRMSGGSGTDANSQFFLIDKDGLVTTERSNLDPAAVPFAKNPRDLEGLSEGASIIEVVKKVKPHVLLGLSGVGGVFNTEVLKAMRESVSTKPAIFAMSNPTMNAECTAIEAFSHAGENIVFASGSPFENVDLGNGEVGHVNQANNMYLFPGIGLGTLLSGARHITDGMLRAAAECLASYMTEDDVRKGILYPSIDCIRDVTAEVGAAVVCAAVAEKQAEGHGDVGFKELENMSKEETVEYVRGNMWYPEYCPLVHEK

SEQ ID NO: 7131 - protein, 201 aa, Pseudomonas fluorescens PfO-1
MPPRSDVLAPTASISRAQREARNGHRGTAMLLTGLPAAGKSTLAQALHAELFSRGLQSVVLDGDGLRVGLNRDLGFTDADRLENIRRASELAALLVENGQIVILAMIAPLAELREVFARRLGEDYREVWCSAALAVCEQRDPKGHYARARRGELAGFTGVSAPYEAPAQASLVLDTGTLTVEACLDRLLTWLGESAVLPKA

SEQ ID NO: 7132 - protein, 129 aa, Triticum aestivum
  misc_feature (55)..(55): Xaa can be any naturally occurring amino acid
  misc_feature (71)..(71): Xaa can be any naturally occurring amino acid
  misc_feature (79)..(79): Xaa can be any naturally occurring amino acid
  misc_feature (100)..(101): Xaa can be any naturally occurring amino acid
  misc_feature (108)..(108): Xaa can be any naturally occurring amino acid
  misc_feature (116)..(116): Xaa can be any naturally occurring amino acid
  misc_feature (120)..(120): Xaa can be any naturally occurring amino acid
MDAAAAAVTTLSALAVFASTLHQGAVRSVHGYRVVAMGGRCAWDRWVEREVRLLXPPPGREVPLPAAAPRXILPVEWRXRPGYREGASCWGALGAGVPGXXIPIRRPXAVSGPKPXPRFXWPPSGEPGG

SEQ ID NO: 7133 - protein, 229 aa, Thermococcus kodakaraensis
MNVEEMKKAVAKEALKFIEDEMVVGLGTGSTTAYFINYLGKLLMEGELEDVYGVPTSHQARLLALEAGIPVVSLDEVDAIDIAVDGADEVDPHMNLIKGRGAALTMEKIIEYRAGMFIVLVDESKLVEYLGQKMPVPIEVIPAAWRAIAEELEVFNATAELRMAVKKDGPVVTDNGNFILDAKFARIEDPLDLEIELNTIPGVVENGIFADIADIILVGTPEGVKRMER

SEQ ID NO: 7134 - protein, 304 aa, Glycine max
MALNYNIALAFSAVLTLLLFPLPTVGELVEEQPLVLKYHNGQLLKGRITVNLIWYGTFTPIQRSIIVDFINSLSSAPNAPLPSTATWWKTTEKYKVGGGSSALVVGKQFLHSAYSLGKNLKGKDVLALASKFNELKSITVVLTAKDVAVEGFCMSRCGTHGSTRNVKNAARTAYIWVGNSETQCPGQCAWPFHQPIYGPQTPPLVAPNGDVGVDGMVINLATLLAGTVTNPFNNGYFQGPPTAPLEAVSACTGVFGSGSYPGYPGRVLVDKATGASYNAHGANGRRYLVPAMWDPQTSTCKTLV

SEQ ID NO: 7135 - protein, 425 aa, Thermococcus kodakaraensis
MNPLEFHRDNFPGNGKIEVIPKVPVNRETLSLAYTPGVAEPSKAIANGADPDEYTVIPNTVAVVTDGSAILGLGDIGPVAGMPVMEGKAVLFKALAGVDAFPILINTKDVDEIVRTVELISPGFGGINLEDISAPRCFEIEERLRERLDIPVFHDDQHGTAVVTLAGLINALKLVGKKFSEIKVAISGAGAAGIAIAKILHSVGVKEIVTVDRKGIIHEGREDLNPYKREVAEYNVHGIEGGLKEAMEGADVFIGVSAGGIVTPDMVRAMADDAIVFAMANPIPEIMPEEAKRAGARIVATGRSDFPNQINNVLGFPGIFRGALDVKAEDITPSMKLAAAEAIASVVSDDELGEDYIIPSPLHPDVFPKEARAVAEVAMKEGVAGRKVSGEWVEEHTRRLREFYSAFIEPLNEKRKTFSGRGSSP

SEQ ID NO: 7136 - protein, 663 aa, Zea mays
MISARTAAASPASLWKQGGRSEGGGSCDGCRTYRNTLRRAAAAKVRALPSRAVEAVKMGSAAEMEQEEAEVAAAAAGVVVEDHYGEDSATEELPILPWAFSVARYVSFSWLKKYAEESYFYISGYTLLRDPHHNKGLAFMEKERDAHHLRGLLPPAVVPQELQIKKIMHNLRQYQVPLQRYMAMMDLQERNERLFYKLLIDNVEELLPVVYTPTVGEACQKYGSIFRQPQGLYVSLRDKGKVLEVLRNWPHRNIQVICVTDGEAILGLGDLGSQGMGIPVGKLALYTALGGVRPSACLPITIDVGTNNEKLLNDEFYIGLRQKRATGEEYHELMEEFMAAVKQIYGEKVLIQFEDFANHNAFNLLAKYSKSHLVFNDDIQGTASVVLAGLLAALKVVGGTLAEHTYLFLGAGEAGTGIAELIALEISKQTSAPIEECRKKIWLVDSKGLIVDSRKNSVQSFKKPWAHEHEPLTTLYDAVQSIKPTVLIGTSGVGRTFTKEVVEAMASFNERPIIFSLSNPTSHSECTAEEAYNWTQGRAIFASGSPFDPVEYDGKVFVPGQSNNAYIFPGFGLGLVISGAIRVHEDMLLAASEALAAQATQENFDKGSIFPPFTNIRKISARIAAAVAAKAYELGLATRLPPPRDLVKYAQSCMYTPVYRNYR

SEQ ID NO: 7137 - protein, 479 aa, Mesorhizobium loti MAFF303099
MKSMSLTTLDRGKTTVDAATIETLSAQLRGTLLQQGDAAYNEARTVWNATVDRRPGLIVCCVGASDVIRAVNFARENRLLVSVRGGGHNIAGSAVCDGGLMIDLSPMKSVRVDPVARRAWVGPGATLADVDRETQAFGLAVPTGINSTTGISGLTLGGGFGWITRKFGLTIDNLVSADVVTADGKLLRASQTENPDLFWALRGGGGNFGIVTAFEFQLHQMGPQVLSGLVVHPFADAEKVLEEYRNALETAPDELTCWVVMRQAPPLPFLPAEWHGKDVLVLAMCYCGDLQAGEKATKKLRAIGSPIADVVGPNPFTGWQQAFDPLLAPGARNYWKSHDFTELSDRAAEIVTEAIRELPGPECEIFIGHVGGAAGRVAQNATAFPQRSSHFVMNVHARWRDPAMDRACIGWARGLYEAAKPYAAGTAYVNFMPEDEVDRVEAAYGGNYQRLLEIKQRYDPLNLFRMNQNLRPKQSQRAA

SEQ ID NO: 7138 - protein, 581 aa, Zea mays
MGNTCIGPSAPSDRHSFFNTVSLAVLWRTPAAADPAEPSPTAEPSSSTPCSPPSRAPNPVTISDSEHPPHSTSTALGPAAPPNPNGKPKPKPKVKRVQSAGLLAGSVLKRDSERLKDVYTLGKKLGQGQFGTTYQCVEKATGKHFACKSIAKRKLVTDEDVEDVRREIQIMHHLAGHPNVVSIVGAYEDAVAVHLVMELCAGGELFDRIIQRGHYSEKAAAQLARVIIGVVEACHSLGVMHRDLKPENFLFVNQKEDAPLKAIDFGLSIFFKPGEIFSDVVGSPYYVAPEVLKKRYGCEVDVWSAGVIIYILLSGVPPFWAESEQGIFKQVLKGGLDFSSDPWPSISESAKDLVRKMLNRDPRKRLTAHDALCHPWVCVDGVAPDKPLDSAVLTRLKQFSAMNKLKKMALRVIAENLSEDEIAGLKEMFKMLDTDNSGQITLEELKIGLKRVGANLKDSEITTLMEAADIDNSGSIDYGEFLAATLHLNKVEREDNLFAAFSYFDKDGSGYITHDELQKACEEFGIEDAHLEDIIHDVDQDNDGRIDYNEFVTMMQKGNNPLGKKGHCQMSFGLREALKLG

SEQ ID NO: 7139 - protein, 136 aa, Glycine max
HASDHAYGCELRRRSKWLPSMISSPAVTTVNRAGAGMVAPFTGLKSMAGFPTTKTNNDITSIASNSGRVPCMQVWPPACTKNFETLSYLPYLDDAQLAKAVVYLPKKAWISCWAFELEHVYLYREHIMSPGYYYGR

SEQ ID NO: 7140 - protein, 72 aa, Glycine max
SSSQVLRTRNRAGAGMGAPFTGLKSMAGLKTRKTNDDITYIASNGCRVQCMHETTPIGMKNLETLDYLPDDL

SEQ ID NO: 7141 - protein, 155 aa, Mesorhizobium loti MAFF303099
MKARFCAALLVLMLALGFAGTALAVKPDEMLADPALEARARALSEGLRCMVCQNQSIDESDADLARDLRILVRQRLVAGDTDQQVMDYVVSRYGEFVLLKPRFDLRNALLWGTPVLLLLVGGVFIVLTARSRRTLATKTLSADEQAALDAILHRD

SEQ ID NO: 7142 - protein, 278 aa, Zea mays
  misc_feature (24)..(24): Xaa can be any naturally occurring amino acid
  misc_feature (48)..(48): Xaa can be any naturally occurring amino acid
  misc_feature (197)..(197): Xaa can be any naturally occurring amino acid
  misc_feature (212)..(212): Xaa can be any naturally occurring amino acid
GCGTHKAPINGNFVDSASGKTFPXLDPRTGEVIAHVAEGDAEDINRAXIEVPMVARLMRYYAGWADKIHGLIVPADGPHHVQILHEPIGVAGQIIPWNFPLLMYAWKVGPALACGNTLVLKTAEQTPLSALYISKLLHEAGLPEGVVNVVSGFGPTAGAALASHMDVDKIAFTGSTDTGKIILELAAKSNLKTVTLXELGGKSPFIIMDDAXDVDLAVELAHFALFFNQGQCCCAGSRTFVHERVYDEFVEKAKARALKRVVGDPFRKGVEQGPQVHL

SEQ ID NO: 7143 - protein, 117 aa, Brassica napus
MAQCIDGFKHLCTSVLGCFDLDLYKQPGGLGDPELLARDTVFSVSEIEALYELFKKISSAVIDDGLINKEEFQLALFKTNKKESLFADRVFDLFDTKHNGILGFEEFARALSVFHPN

SEQ ID NO: 7144 - protein, 168 aa, Xylella fastidiosa Temecula1
MSSIYTFTFTRLDGRPQALADWRGQVLLLVNVASRCGFTPQYAGLEMLWQRYRDAGLIVIGFPCDQFAGQEPGDEAKIAEFCTLTYGVDFPMAAKIKVNGADAHPLWQWLKHRRRGLFGVAAIKWNFTKFLIGRNGQPIARYSPIKSPEQLEVHIVRALGEEGGGNTH

SEQ ID NO: 7145 - protein, 368 aa, Glycine max
  misc_feature (119)..(119): Xaa can be any naturally occurring amino acid
MPGHRSKSEKHDVDGGGGEKQLRRDPYEVLGVSRNSTDQEIKTAYRKMALKYHPDKNANDPKAADMFKEVTFSYNILSDPDKRRQYDSAGFEAVESDNQELELDLSSLGAVNTMFAALXFPIKTTVSATVLEEALNGLVTIRPLPLGHNIAKRVEKQCAHFYSVTITEEEAQAGFVCRVQSPDKSKFKLLYFDQEDNSGLSLALQEDSAKTGKVTSAGMYFLGFPVYRLDQTMNSIAAAKDPDTSFFRKLDAFQPCELTELKAGTHVFAVYGDNFFKSANYTIEALCAAPFSEEKENLRNIEAQILSKRAEISKFEAEYREVLAQFSDMTNRYAHEMQAIDELLKNRNEIQASYTSAPLKRTTSRSKK

SEQ ID NO: 7146 - protein, 218 aa, Bacteroides thetaiotaomicron VPI-5482
MKFFIDTANLEQIQEAYDLGVLDGVTTNPSLMAKEGIKGTENQREHYIKICKIVNADVSAEVIATDYEGMIREGEELAALNPHIVVKVPCIADGIKAIKYFTEKGIRTNCTLVFSVGQALLAAKAGATYVSPFVGRLDDICEDGVGLVGDIVRMYRTYDYKTQVLAASIRNTKHIIECVEVGADVATCPLSAIKGLLNHPLTDSGLKKFLEDYKKVNG

SEQ ID NO: 7147 - protein, 254 aa, Oryza sativa (japonica cultivar-group)
MEAGYPGTAANGAAADGNGGAQQAAAAPAIREQDRLMPIANVIRIMRRVLPAHAKISDDAKETIQECVSEYISFITGEANERCQREQRKTITAEDVLWAMSRLGFDDYVEPLGVYLHRYREFEGESRGVGVGVGAARGDHHHGHVGGMLKSRAQGSMVTHHDMQMHAAMYGGGAVPPPPHPPPHHHAFHQLMPPHHGQYAPPYDMYGGEHGMAAYYGGMYAPGSGGDGSGSSGSGGAGTPQTVNFEHQHPFGYK

SEQ ID NO: 7148 - protein, 435 aa, Rickettsia conorii str. Malish 7
MTNENNNDSEFAELKIRGKIFKLPILKASIGEDVIDISRVSAEADCFTYDPGFMSTASCQSTITYIDGDKGILRHRGYDIKDLAEKSDFLEVAYLLIYGELPSGEQYNNFTKQVAHHSLVNERLHYLFQTFCSSSHPMAIMLAAVGSLSAFYPDLLNFKEADYELTAIRMIAKIPTIAAMSYKYSIGQPFIYPDNSLDFTENFLHMMFATPCTKYTVNPIIKNALNKIFILHADHEQNASTSTVRIAGSSGANPFACISTGIASLWGPAHGGANEAVINMIKEIGSSEYIPKYIAKAKDKNDPFRLMGFGHRVYKNYDPRAAVLKETCKEVLKELGQLDNNPFLQIAIELEAIALKDEYFIERKLYPNVDFYSGIIYKAMGIPSQMFTVLFAIARTVGWMAQWKEMHEDPEQKISRPRQLYTGYVHREYKGIRER

SEQ ID NO: 7149 - protein, 363 aa, Candida milleri
MSTTKTIVVLPGDHVGTEITEEATKVLNAIAEKRPNIKFDFQHHLIGGAAIDATGVPLPDEALEASKKADAVLLGAVGGPKWGTGDVRPEQGLLKIRKELGLYANLRPCNFAFDSLLDMSPLKPEYARGTDFTVVRELVCGIYFGKRKEDTGDGVTWDSEQYSVPEVQRITRMAASLALQHNPPLPIWSLDKANVLASSRLWRKTVEETIKNEFPTLSVQHQLIDSAAMILVKNPTKLNGLVITSNMFGDIISDEASVIPGSLGLLPSASLASPPDTNKAFGLYEPCHGSAPDLPKGKVNPVATILSVAMMLKLSLDMVEEGIAVEKAVRKVIDNGIRTADLRGTNSTTEVGDAIAAAVKEFL

SEQ ID NO: 7150 - protein, 427 aa, Coxiella burnetii
MTELTGVSIVTYQHIKVPSQGEKITVNKAVLVVPDRPIIPFIEGDGIGIDIAPVMKNVVDAAVEKSYAGKRKIEWMEIYAGEKATKVYGKDNWLPDETLEAIKEYQVAIKGPLTTPVGGGIRSLNVALRQQLDLYVCLRPVRYFTGVPSPVKTPEKVNMVIFRENSEDIYAGIEWPAGSPEAVKLINFLQNEMGVKKIRFPETAGIGIKPVSKEGTSRLVRRAIQYAIDNDRDSVTLVHKGNIMKFTEGAFKDWGYEVAVKEFGAKPLDGGPWHVFENPKTGQKITIKDVIADAFLQQILLRPAEYSVIATLNLNGDYISDALAAEVGGIGIAPGANLSDTVGLFEATHGTAPKYAGQDKVNPGSLILSAEMMLRYLGWKEAADLVVQGIEGAIESKTVTYDFARLMTGAKEVSTSQFGKAIIKHIL

SEQ ID NO: 7151 - protein, 471 aa, Bacillus megaterium
TIKEMPQPKTFGELKNLPLLNTDKPVQALMKIADELGEIFKFEAPGRVTRYLSSQRLIKEACDESRFDKNLSQALKFVRDFAGDGLFTSWTHEKNWKKAHNILLPSFSQQAMKGYHAMMVDIAVQLVQKWERLNADEHIEVPEDMTRLTLDTIGLCGFNYRFNSFYRDQPHPFITSMVRALDEAMNKLQRANPDDPAYDENKRQFQEDIKVMNDLVDKIIADRKASGEQSDDLLTHMLNGKDPETGEPLDDENIRYQIITFLIAGHETTSGLLSFALYFLVKNPHVLQKAAEEAARVLVDPVPSYKQVKQLKYVGMVLNEALRLWPTAPAFSLYAKEDTVLGGEYPLEKGDELMVLIPQLHRDKTIWGDDVEEFRPERFENPSAIPQHAFKPFGNGQRACIGQQFALHEATLVLGMMLKHFDFEDHTNYELDIKETLTLKPEGFVVKAKSKKIPLGGIPSPSTEQSAKKVR

SEQ ID NO: 7152 - protein, 440 aa, Zea mays
MSTTKVKRRVGKYELGRTIGEGTFAKVRFARDTVTGEAVAIKILDKEKVLRHKMVEQIKREISTMKLIKHPNVVRIYEVMGSKTKIYIVLEFATGGELFDTIVNHGRMREDEARRYFQQLINAVDYCHSRGVYHRDLKPENLLLDSYGNLKVSDFGLSALSQQIKDDGLLHTTCGTPNYVAPEVLEDQGYDGAMADLWSCGVILFVLLAGYLPFEDSNLMTLYKKISNAEFTFPPWTSFPAKRLLTRILDPNPMTRITIPEILEDEWFKKGYKRPEFDEQYDTTLDDVDAVFNDSEEHHVTEKKEEEPVALNAFELISMSAGLNLGNLFDSEQEFKRETRFTSKCPPKEIVRKIEEAAKPLGFDVQKKNYKLRLEKVKAGRKGNLNVATEILQVAPSLHMVEVRKAKGDTLEFHKFYKNLSKTLKDVVWKSDDLQTQHAS

SEQ ID NO: 7153 - protein, 238 aa, Oryza sativa (japonica cultivar-group)
MGEEAPEEYELGGGEDERVMEWETGLPGADELTPLSQPLVPAGLAAAFRIPPEPGRTLLDVHRASAATVSRLRRASSSSSSSFPAFASKGAGTGADEAESGGGADGGNGNTNNSSSKRARLVWTPQLHKRFVEVVAHLGMKNAVPKTIMQLMNVEGLTRENVASHLQKYRLYVKRMQGLSNEGPSPSDHIFASTPVPHASLHDQVPSPYHPHPHHHSYNNAAYAATVSSYHHYHHANH

SEQ ID NO: 7154 - protein, 427 aa, Coxiella burnetii
MTELTGVSIVTYQHIKVPSQGEKITVNKAVLEVPDRPIIPFIEGDGIGIDIAPVMKNVVDAAVEKSYAGKRKIEWMEIYAGEKATKVYGKDNWLPDETLEAIKEYQVAIKGPLTTPVGGGIRSLNVALRQQLDLYVCLRPVRYFTGVPSPVKTPEKVNMVIFRENSEDIYAGIEWPAGSPEAVKLINFLQNEMGVKKIRFPETAGIGIKPVSKEGTSRLVRRAIQYAIDNDRDSVTLVHKGNIMKFTEGAFKDWGYEVAVKEFGAKPLDGGPWHVFENPKTGQKITIKDVIADAFLQQILLRPAEYSVIATLNLNGDYISDALAAEVGGIGIAPGANLSDTVGLFEATHGTAPKYAGQDKVNPGSLILSAEMMLRYLGRKEAADLVVQGIEGAIESKTVTYDFARLMTGAKEVSTSQFGKAIIKHIL

SEQ ID NO: 7155 - protein, 471 aa, Bacillus megaterium
TIKEMPQPKTFGELKNLPLLNTDKPVQALMKIADELGEIFKFEAPGRVTRYLSSQRLIKEACDESRFDKNLSQALKFVRDFAGDGLFTSWTHEKNWKKAHNILLPSFSQQAMKGYHAMMVDIAVQLVQKWERLNADEHIEVPEDMTRLTLDTIGLCGFNYRFNSFYRDQPHPFITSMVRALDEAMNKLQRANPDDPAYDENKRQFQEDIKVMNDLVDKIIADRKASGEQSDDLLTHMLNGKDPETGEPLDDENIRYQIITFLIAGHEATSGLLSFALYFLVKNPHVLQKAAEEAARVLVDPVPSYKQVKQLKYVGMVLNEALRLWPTAPAFSLYAKEDTVLGGEYPLEKGDELMVLIPQLHRDKTIWGDDVEEFRPERFENPSAIPQHAFKPFGNGQRACIGQQFALHEATLVLGMMLKHFDFEDHTNYELDIKETLTLKPEGFVVKAKSKKIPLGGIPSPSTEQSAKKVR

SEQ ID NO: 7156 - protein, 71 aa, Triticum aestivum
MASRSCTFLEILLAIILPPLGVFLHYGCCSMEFCICLLLTILGYIPGIIYAVYMLVALGSEERDRDYNTLA

SEQ ID NO: 7157 - protein, 88 aa, Brassica napus
MRVHDQRLRFDVTPKPMGLTGSSFITARSIAVLLFVSLSLLILPPFLPPLPPPPATFLLLPLILMILLIFLAFSPSNEPSLAVESLYP

SEQ ID NO: 7158 - protein, 371 aa, Triticum aestivum
  misc_feature (211)..(211): Xaa can be any naturally occurring amino acid
  misc_feature (277)..(277): Xaa can be any naturally occurring amino acid
  misc_feature (311)..(311): Xaa can be any naturally occurring amino acid
  misc_feature (316)..(316): Xaa can be any naturally occurring amino acid
  misc_feature (338)..(338): Xaa can be any naturally occurring amino acid
  misc_feature (359)..(359): Xaa can be any naturally occurring amino acid
YNKFVQKSRLVPVRNSRDIVDPRVRGRVGNRAARKGAPTTPLITIAMTKIVASVFEKNNLPSAIFTAFCGGAEIGQAIALDTRIPLVSFTGSTKVGQMVQQQVSARFGKCLLELSGNNAIIVMDDADIPLAVRSVLFAAVGTAGQRCTTCRRLLLHESIYQTFLDQLVEVYKQVRIGDPMEKGTLLGPLHTTTSKESFLKGIQTIQSQGGXILLGGSAIESEGNFVQPTIVEISPAAPVVREELFGPVLYAMKFLALNNPDLCVIHLLYMALISLSXAYVPWLSIILQTLKEAIEINNSVPQGLSSSIFTXEPDAXFKWIGPHGSDCGIVNVNIPTNXAEIGGALGGKKATGGGQEQEXPWKQYMRRATVN

SEQ ID NO: 7159 - protein, 272 aa, Thellungiella halophila
MATQPPSSSSAREEFVYMAKLAEQAERYEEMVEFMEKVAKAVDKEELTVEERNLLSVAYKNVIGARRASWRIISSIEQKEESRGNNDHVSLIRDYRTKIETELSGICDGILKLLDTMLIPAAASGDSKVFYLKMKGDYHRYLAEFKTSQERKDAAEHTLNAYKAAQDIANAELAPTHPIRLGLALNFSVFYYEILNSPDRACNLAKQAFDDAIAELDTLGEESYKDSTLIMQLLRDNLTLWTSDMQDDDDVIKEAAAAAPAAPKPAEEQQQS

SEQ ID NO: 7160 - protein, 258 aa, Triticum aestivum
  misc_feature (242)..(242): Xaa can be any naturally occurring amino acid
MSATCAADLAPLLGAAAMNATDYLCNRFADTTSAVDSTYLLFSAYLVFAMQLGFAMLCAGSVRAKNTMNIMLTNVLDAAAGALFYYLFGFAFAFGTPSNGFIGKHFFGLKDMPQTGFDYSFFLFQWAFAIAAAGITSGSIAERTQFVAYLIYSAFLTGFVYPVVSHWIWSVDGWASAARTSGPLLFKSGVIDFAGSGVVHMVGGIAGFWGALIEGPRIGRFDHAGRSVALKGHSASLVVLGXFLLWFGWYGSTGVLRH

SEQ ID NO: 7161 - protein, 526 aa, Glycine max
  misc_feature (122)..(122): Xaa can be any naturally occurring amino acid
  misc_feature (235)..(235): Xaa can be any naturally occurring amino acid
FGSRSLVSHLRLLVLLLSVSLGNSASLQENFVQCLNLNSDRTFPFNPLIYTPKSPSFTSVLDSSGKNQRLLVPSTPKPKFIFTPTRDSHVQAAVICSKKLGIHLRVLSGGHDFEGVSYVSEXQSPFIVVDLIKLRDINVDIKSNTAWVQAGATNGELYYRIYEKSSLHGFPAGTCTSLGIGGHITGGAYGSMVRKYGLGADNVLDAKIVDANGRILDRKAMGEDLFWAIRGGGGXGSFGILLWWKVKLVPVPPTVTVFTVKKTLEQGATKLLHRWQEVAPFLDENLFIRVRIQRAQSTVTTSYEGLFLGGARKLLKIMKTSFPELGVTRKDCMETSWIKSVLYIAGFPSGTPPEVLLKGKPIAKFFFKGKSDFVRKPIPETGLEGLRQRLLVEDSPLILWSPYGGRMNQFSESDTPFPYRNGTLFISLYISLWQEGEKNVAKHIDWIGNLHNYMGAYVPSFPRGQYVNYRDLDLGINTKNNTGNIQESAWGYRYFKNNFDRLVKIKTKVDPQNVFRHEQSIPPLPK

SEQ ID NO: 7162 - protein, 254 aa, Zea mays
MRKKLGTRFPAARIKKIMQADEDVGKIALAVPVLVSRALELFLQDLIDRTYEITLQSGAKTLNSFHLKQCVKRYSSFDFLTEVVSKVPDLGGADSCGDERVLPRRRKSNGSDPENDESRSSKMAIRNANISPRGRGRGRGRGRGRPPTKRKEVGYVQFEDESSMFAEQGEPLPGEETVQEINGNETMPQSTQPPVEAPPTALAQATTSSKAEEANSDHQSDWPMPDAIGSIGVVPSGFGHLTVQVEDEDYDNED

SEQ ID NO: 7163 - protein, 435 aa, Erwinia carotovora subsp. atroseptica SCRI1043
MTTSRTQQVQHIEKEWKTARWEGITRPYSAEDVINLRGSVNPECTLAQLGAARLWSLLHGEARKGYVNCLGALTGGQALQQAKAGIEAIYLSGWQVAADANLASSMYPDQSLYPANSVPAVIERINNTFRRADQIQWANHIEPGDKRHTDYFLPIVADAEAGFGGVLNAFELMKSMIEAGAAAVHFEDQLASAKKCGHMGGKVLVPTQEAVQKLVAARLAADVMGVPTLVVARTDADAADLMTSDCDEYDRDFITGERTVEGFYRTRAGIEQAISRGLAYAPYADLVWCETSTPDLSLARRFAEAIHAKFPGKLLAYNCSPSFNWKKNLDDSTIARFQDELSAMGYKYQFITLAGIHSMWFNMFDLAHAYAQGEGMRHYVEKVQQPEFEAIKDGYTFSSHQQEVGTGYFDKVTNIIQGGQSSVTALTGSTEEQQF

SEQ ID NO: 7164 - protein, 496 aa, Crocosphaera watsonii WH 8501
MRSLTYFGSLIKEQPLINDHCMYEKLTAPTTGSKITFEDGNPIVPNDPIIPFIRGDGTGIDIWPATEKVIDAAVKTAYGDSKKINWFKVYAGDEACDQYGTYQYLPEDTLTAIKEYGIAIKGPLTTPVGGGIRSLNVALRQIFELYACVRPCRYYPGTPSPHKSPEKLNVIVYRENTEDIYLGIEWTEGTEIAQKLINYLNNELIPATAEHGKKQIRIDSGIGVKPISKTGSQRLVRRAIEHALRLPKAKQMVTLVHKGNIMKYTEGAFRDWGYELATSEFRDVCVTERESWILSNKEGKADISIEDNARKVEPGYDSLTPEKKQEICDEVKGVIDAIWDSHGDGKWKEKIMVNDRIADSIFQQIQTRPDEYSILATMNLNGDYLSDAAAAVVGGLGMGPGANIGDTCAIFEATHGTAPKHAGLDRINPGSVILSGVMMLEYMGWQEAADLIKKGIGNAIANRQVTYDLARLMEPKVDPPLKCSEFAQAIIDYFND

SEQ ID NO: 7165 - protein, 498 aa, Rhodobacter sphaeroides 2.4.1
MTLLTTEDYKAIAAGLTLPTGAFIDGRFRPAQSGATFETRNPATGQLLAEVAACGPADVDLAVQKARDAFEDGRWSRLPPRARKEVLIRLAKLLKRHARELAVMESLDSGKTIYDCETVDLPETIHCLTWHAELIDKIYDQTAPASDDHLALVLREPVGVVGLVLPWNFPLLMLAWKIGPALAAGCSVIVKPAEETPLTALRVAELATEAGVPPGVFNVLPGHGPEVGEPIGRHMDIDAVSFTGSTETGRRFLRYAAESNLKEVTLEMGGKNPAVVLDDAENLDRVAAHVVTGAFWNMGENCSAASRLIVQSGVKEALIARILAHAREWPMGDPLDPANRVGALVSPAHLDKVRSYLAEGPTVLLGGKAHGAFVEPTILEITDREAAPAREEIFGPVLSVLTVESFDEAIALANDTPYGLAASIFTANVKKALRGARALRAGTVTVNSFGEGDITTPFGGFRQSGFGGRDNGIHAHDQYTQLKTIWIDLADDAAEAVS

SEQ ID NO: 7166 - protein, 86 aa, Glycine max
MASSMISSPAVTTVNRAGAGMVAPFTGLKSMAGFPTRNTNSDITCVASNGGRVRWVRVWPPIGEREWESVCSLPNVPDRAVRGDVQ

SEQ ID NO: 7167 - protein, 570 aa, Triticum aestivum
MWRHAAARRSAQIRRLLSTSAPSAGAVRGPCIVHKRGTDILHDPWYNKDTAFPLTERDRLGLRGLLPPRVMSFEQQYERFINSYHSLEHNTQGEPDSVVSLAKWRILNRLHDRNETLYYRVLIDNIKDFAPIIYTPTVGLVCENYSGLFRRPRGMYFSAKDKGEMMSMIYNWPAEKVDMIVVTDGSRILGLGDLGVQGIGIPIGKLDVYVAAAGINPQKVLPIMLDVGTNNEELLEDKLYLGLRQPRLEGEEYLAVVDEFMEAVHARWPKAIVQFEDFQMKWAFETLQRYRSRFCMFNDDVQGTAGVALAGLLGAVRAQGRPLADFTKQKIVVVGAGSAGIGVLNMAKHAMLRMPGTHKIGELGEGHNQFWVLDKDGLITKSRKDLDPAVARFARGYGPEEVEDLHEGASLVEVVKKVKPHVLLGLSGVGGIFNEEVLKAMKESDSPCPAIFAMSNPTTKAECTPEDVFKHVGENAVFASGSPFSNVTLSNGRKGYANQANNMYLFPGIGLGALLSGARHISDGMLHAAAECLASYITDDAIRKGILFPSISSIRHITARARRCSRPCCR

SEQ ID NO: 7168 - protein, 564 aa, Zea mays
MAAAAVTSNGGAVAANGPAPGRLASVYSEVQTNRLLHALPLPSVLRSNFSVVDGPASSAAGNPDEIAKLFPNLFGQPSASLVPSAEPAATRPLKVGVVLSGGQAPGGHNVICGIFDYLQERAKGSTLYGFKGGPAGIMKCKYVELTSDFVYPYRNQGGFDMICSGRDKIETPEQFKQAEDTANKLDLDGLVVIGGDDSNTNACLLGEYFRSRNMKTRVIGCPKTIDGDLKCKEVPTSFGFDTACKIYSEMIGNVMTDARSTGKYYHFVRLMGRAASHITLECALQTHPNAALIGEEVAAKKQTLKNVTNYITDIICKRADLGYNYGVILIPEGLIDFIPEVQKLIAELNEILAHDVVDEAGAWKSKLQPESRELFEFLPNTIQEQLMLERDPHGNVQVAKIETEKMLISMVETELEKRKAEGRYSAHFRGQAHFFGYEGRCGLPTNFDSNYCYALGYGAGALLQSGKTGLISSVGNLAAPVEEWTVGGTALTSLMDVERRHGKFKPVIKKAMVELDAAPFKKYASMRDEWAIKNRYISPGPIQFSGPGSNDSNHTLMLELGAAL

SEQ ID NO: 7169 - protein, 198 aa, Trillium camtschatcense
QVTFSKRRNGLLKKAFELSVLCDAEVGVIVFSPRDKLYEFSSTSMQSTIDRYRMHTKCVNTNMPTEHNTQQWKYEAVSMANKIELLEASKRKLMGESLEPCTVDELQELESQIERSLSNIRGRKDYLLEQQIEELKEKERRLLEDNELLRHKSEEETELQLATPKGVQYDHGSQQMELETELHIGWPPKVATQCISHA

SEQ ID NO: 7170 - protein, 179 aa, Glycine max
  misc_feature (122)..(122): Xaa can be any naturally occurring amino acid
  misc_feature (125)..(125): Xaa can be any naturally occurring amino acid
  misc_feature (162)..(162): Xaa can be any naturally occurring amino acid
MASSMISSPAVTTVNRAGAGMVAPFTGLKSMAGFPTRKTNNDITSIASNGGRVQCMQVWPPVGKKKFETLSYLPDLDDAQLAKEVEYLLKKGWIPCLEFELKHSFIYHKHNKSPKYYDRRYXNHXKLPIFNYTNTSQVLKELQQAKTTYPNHFIHIIKFDNXVRQVHYIIFITYKPPSF

SEQ ID NO: 7171 - protein, 297 aa, Triticum aestivum
IDGGFSWVQIKDMALKASGAYRHCKPCAGSSAGASGRHHPYHHRGGSGFRGSDASDRFHYAYRRAAGGGSSGEATPSMSARTDFPAGDEEEEEEEDGMSSGGGGGKEDNAKEWVAQVEPGVLITFVSLPQGGNDLKRIRFSREMFNKWQAQRWWAENYDKVMELYNVQRFNHQSVPLPTTPKSEDESSKEDSPVTPPLDKERVPRSLQRPTSGGGAMGYSSSDSLEHHSNHYCNGLHPHHGHQCYDSVGLASTPKLSSISGAKTETSSMDASMRTSSSPEEVDRSGELSVSISNASD

SEQ ID NO: 7172 - protein, 175 aa, Triticum aestivum
MAPAVMASSATSVAPFQGLKSTAGLPVSRRSNGASLGSVSNGGRIRRMQVWPIEGIKKFETLSYLPPLSTEALLKQVDYLIRSKWVPCLEFSKVGFIFREHNASPGYYDGRYWTMWKLPMFGCTDATQVINEVEEVKKEYPDAYVRIIGFDNMRQVQCVSFIAFKPPGCEESGKA

SEQ ID NO: 7173 - protein, 234 aa, Yersinia pestis KIM
MPWFAVISHIGVRVICWGVNSVPAHQLDDHNQETRSDDENIVWHPHAITRQDREQQHGHQGVVLWFTGLSGSGKSTLAGALEQALFARGVSTYLLDGDNVRHGLCRDLGFSDADRRENIRRVGEVAKLMVDAGLVVLTAFISPHRAERKMVQDMLASGQFIEVFVDTPLAICEARDPKGLYKKARAGELKNFTGIDSVYESPASPDIHLQGEQLVTNLIEQLLDVLRGRAIIKS

SEQ ID NO: 7174 - protein, 469 aa, Streptococcus pyogenes MGAS8232
MVSVMWFRRDLRIDDQKALAHVIASQSPTLCVFQFNKEQLNLLHSRNQSSFITSVLAFRKLLKCEGIDLYLMYGDLMTCFEQLLTQLKDWTDVYFNYDESGYGRLRDQKAAQFFKKNGIAVHTYQDHYLHGSQEIINQSGQPYKVFTPYYRIWQNYPKETPIKVELSQGRWLNLETPDDVLRTVESFKDEKYQDVATFDEASKQLNRFIQDQLAAYHANRDFPAQLGTSRLSPFLRIGAIGIRTVYHAVRQAPNSLGQATFLKELAWRDFYNMVYVAYPDQKTQPIQKAFSQIEWVNNPDWFQLWKEGKTGYPIVDAAMLQLQKTGWMHNRLRMIVASFLTKDLLCDWRLGEQYFQQQLIDYDAASNIGGWQWAASTGTDAVPYFRIFNPVTQGKRFDPKGEFIKAYLPQLEHVPEKYLHEPWKMPKNLQESVSCIIGTDYPQPIVDHAKQREQAIAKYEWAKEKAKIE

SEQ ID NO: 7175 - protein, 175 aa, Triticum aestivum
MAPAVMASSATSVAPFQGLKSTAGLPVSRRSNGASLGSVSNGGRIRCMQVWPIEGIKKFETLSYLPPLSTEALLKQVDYLIRSKWVPCLEFSKVGFIFREHNASPGYYDGRYWTMWKLPMFGCTDATQVINEVEEVKKEYPDAYVRIIGFDNMRQVQCVSFIAFKPPGCEESGKA

SEQ ID NO: 7176 - protein, 112 aa, Bartonella sp. af82up
AYETCLKMLQEIGAVQKIPEFIARAKNKNDRFRLMGFGHRVYKNYDPRAKIMQQTCHEVLKELNIQDDPLLDIAMELEKIALNDEYFIEKKLYPNVDFYSGITLKALGFPTE

SEQ ID NO: 7177 - protein, 283 aa, Triticum aestivum
  misc_feature (114)..(114): Xaa can be any naturally occurring amino acid
PRVRPRVRRWVGTINDFVYAVIDKKMEQMGRDGHEFAKKGDILSRFLLEREKDPGCFGNKYLRDIILNFVIAGRDTTAGTLSWFLHVLCRDQRIQDKIAREVREATSTGDRQGXAGVREFTARLTEDAIGSMHYLHAALTETLRLYPAVPVDVKCCFSDDTLPDGHAVRRGDMVNYQPFAMGRMKFLWGDDAEESRPERWLDDDGVFVPESPYKFTAFQAGPRICLGKEFAYRQMKIFAAVLLYLFRFEMSEHNSTVGYRPMLTLKMDGPLYVCVSPRRSTGN

SEQ ID NO: 7178 - protein, 173 aa, Triticum aestivum
MAPAVMASSATTVAPFQGLKSTAGLPVSRRSSEPRPRHNGGRIRCMQVWPIEGIKKFETLSYLPPLSTEALLKQVDYLIRSKWVPCLEFSKVGFVFREHNSSPGYYDGRYWTMWKLPMFGCTDATQVLNEVEEVKKEYPDAYVRVNGFDNLRQVQCVSFIAFRPPGCEESGKA

SEQ ID NO: 7179 - protein, 112 aa, Bartonella sp. ma106up
LNEACLKMLQEIGSIERIPEFIARAKDKNDPFRLMGFGHRVYKNYDPRAKIMQKTCHEVLKELNIQDDPLLDIAIELEKIALSDEYFIEKKLYPNVDFYSGITLKALGFPTE

SEQ ID NO: 7180 - protein, 395 aa, Campylobacter jejuni subsp. jejuni NCTC 11168
MKMDYKEQSHIIPTYKRFDIVLEKGQGVYLFDDKAKKYLDFSSGIGVCALGYNHAKFNAKIKAQVDKLLHTSNLYYNENIAAAAKNLAKASALERVFFTNSGTESIEGAMKTARKYAFNKGVKGGQFIAFKHSFHGRTLGALSLTANEKYQKPFKPLISGVKFAKYNDISSVEKLVNEKTCAIILESVQGEGGINPANKDFYKALRKLCDEKDILLIADEIQCGMGRSGKFFAYEHAQILPDIMTSAKALGCGLSVGAFVINQKVASNSLEAGDHGSTYGGNPLVCAGVNAVFEIFKEEKILENVNKLTPYLEQSLDELINEFDFCKKRKGLGFMQGLSLDKSVKVAKVIQKCQENALLLISCGENDLRFLPPLILQKEHIDEMSEKLRKALKSF

SEQ ID NO: 7181 - protein, 91 aa, Brassica napus
MDTVAPRLSRSSTRYGPISSSAASFSGPVRKWRKAWVPLTGTGTGTAGSGGGSSRGDNKVVLFRWTPVNGCSGGGGGTDGGMELAAAGAST

SEQ ID NO: 7182 - protein, 168 aa, Glycine max
MAGVREQDQYMPIANVIRIMRRILPAHAKISDDAKETIQECVSEYISFITAEANERCQREQRKTVTAEDVLWAMEKLGFDNYAHPLSLYLHRYRESEGEPASVRRASSAMGINNNMVHPPYINSHGFGMFDFDPSSQGFYRDDHNAASGSGGFVAPFDPYANIKRDAL

SEQ ID NO: 7183 - protein, 112 aa, Bartonella sp. af170up
ANEACLKMLQEIGSVERIPEFIARAKDKNDPFRLMGFGHRVYKNYDPRAKIMQKTCHEVLKELNIQDDPLLDIAIELETIALNDEYFVEKKLYPNVDFYSGITLKALGFPTE

SEQ ID NO: 7184 - protein, 189 aa, Zea mays
MGVYTKIFLKFPERFWPVGEGKQFFMYASSRRGYYALWQSFEREYPGANVLLATVTDDESRRIERQSDDQTKAEVAEVLRDMFPAADVPGPDQIDIYVPRWWSDRFFKGSYSNWPVGVSRYEYDQLRAPVGKVYFTGEHTSERYNGYVHGAYLAGIDSANILINYIFKNEEYKVRGKYDVEDDLIAQAR

SEQ ID NO: 7185 - protein, 112 aa, Bartonella sp. sa192up
ANEACLKMLQEIGSVERIPEFIARAKDKNDPFRLMGFGHRVYKNYDPRAKIMQKTCHEVLKELNIQDDPLLDIAIELEKIALSDEYFVEKKLYPNVDFYSGITLKALGFPTE

SEQ ID NO: 7186 - protein, 498 aa, Nostoc punctiforme PCC 73102
MTTPLSCRNYINGQWLNAVGEATLESRNPADKTEIVATYPRSQVNDVDTAVASARKAYRSWRTVPAPARAEYIFRVGEILLQHKEELAQLISREMGKPLTEARGDVQEGIDCAFYSAGEGRRLFGQTTPSEMSNKFAMTVRMPIGVCALITPWNFPVAIPCWKAMPALVCGNTVILKPAEDTSACATKLIEIFQQAGLPPGVINLVHGVGEEAGKALVEHPNVDLVSFTGSSETGAFVGATCGRTHKRVCLEMGGKNAQIVMEDADLELALDGAVWGAFGTTGQRCTATSRLILHRDIKEKFTTMLYERTSKLRLGAGNDTDTDIGPIINEKQLQQVSKYLDIAREEGAKVLIGGEIASEGSLKNGYFFQPTILDRVTPDMRVAREEIFGPVVALIEVSSFEEAIAILNDSNYGLSSSVYTRDINRAFTAMRDIEAGITYINGPTIGAEVHLPFGGVKQTGNGHREAGTTALDVFTEWKSVYVDFSGSLQRAQIDNRS

SEQ ID NO: 7187 - protein, 381 aa, Xylella fastidiosa Ann-1
MPLLAEHGTTIIEAMYHQLFEDPQIEALFNQANQKNGTQIHALAGAILAYARNIDNPGVLASAIERISQKHVGYAIHPEHYPHVATALLGAIKQVLGDVATSEVLQAWGEAYWFIANLLKDREAVIREGIMTKNGGWIHWRRFVISKRIPESETITSFMLHPDDGGPVVPHQAGQYLTFRFDAAGMPGMKRNYSISCGPNSDHYRITVKREHGTGASAFLHDQAKVGTIIECTPPVGDFFLPSVIERPIVLLSGGVGLTPMVSMMEQIAEAYPDAQVWYVHGTQNRETHAMDAHIRALVSRHKHMKATTFYTQRSEADDAEAGFITIDWLRANTPFQKADFYLCGPRPFLRTFVRDLIGAGVPAAQVHYEFFGPMDEEMAA

SEQ ID NO: 7188 - protein, 390 aa, Onion yellows phytoplasma OY-M
MNIKEKALEIHEKNKGKVGIVSKVKVQNLDDLALAYTPGVAEPCLKIKENPSDVYRYTMKGNMVGVVTNGTAVLGLGNIGPKASLPVMEGKAILFKELAGIDSFPICIDSTDSQEIVNIVSKISTVFGAINLEDIKSPQCIEVEDALEAKLDIPVFHDDQHGTAIVVAAGILNSLKVVKKSIEDVQVVINGAGSAGMAIAKMLLLLKVNNIVLVDKTGALYKGVANLNEPQKKLVEVTNKYQEKGTLKEVLKGKDIFVGVSAPGIVTAEMVSTMAKDAIVFALANPVPEIMPDEAKKGGARIVATGRSDFPNQVNNCLAFPGVFRGALDAKATKITEEMKKAAIYALKNIIKEQDLNENNILPTSFNKEVVKQIALAVCKVAKETGVVRK

SEQ ID NO: 7189 - protein, 204 aa, Glycine max
  misc_feature (91)..(91): Xaa can be any naturally occurring amino acid
  misc_feature (127)..(127): Xaa can be any naturally occurring amino acid
  misc_feature (144)..(144): Xaa can be any naturally occurring amino acid
  misc_feature (164)..(164): Xaa can be any naturally occurring amino acid
  misc_feature (186)..(186): Xaa can be any naturally occurring amino acid
MAEEESPSVMPKVITFLSSLLERVAESNDHNQQHQKISVFHGLTRPNISIHSYLERIFKYANCSPSCFVVAYVYLDRFTQRQPSLPINTFXNVHRLLITSVMVAAKFMDDMYYNNAYYAKVGGITKXEMNFLELDVSCFGFGFXLNVTPGTFQAYCVNLQREMXLIQQPLNFADSTLNFGKSTKGXLCFNEDESSHQKQKQQQH

SEQ ID NO: 7190 - protein, 108 aa, Zea mays
VDYACTPEEVQQHFNSCGTVNRVTILTDKFGQPKGFAYVEFVEVEAVQEAIKLNESELHGRQLKVAPKRTNVPGMKQPRGRGFNPYHGHPYMTPYGYSPYGYGQVVTG

SEQ ID NO: 7191 - protein, 146 aa, Triticum aestivum
MDPMDIVGKSKEDVSLPKSTMTKIIKEMLPPDVRVARDTQDLLVECCVEFINLLSSESNDVCSRDDKKTIAPEHVMMFLGKSCTSGARAKQTTSSPPSMSLQNEGDADHGRRISLVVLFVKKIECATVVTVVKVIDWYLVWCVVQR

SEQ ID NO: 7192 - protein, 403 aa, Onion yellows phytoplasma OY-M
MFDFMINHLSSKSLMYQDFKKNHNNSQYKDFFLRWEKFWQQVGPNRPTKQDVDSIYKRKDKAPTHLIEFDDGTTEHLWNTFGTDQIDLNVKEPIVKEFIKTTLTNMVKQGASIIRLDAFAYACKKADTSFFVEPDIWQLLDEVRDVLKPLDVELLPEIHENHSISHKISEHGYFIYDFALPLVVLYTLYSKNPQRLVEWLKKSPMKKFTTLDTHDGIGVIDAYDILTDKEIKYTSEQLYKQGANVKKVYSSSLYNNLDIYQINFTYYSALGNDDDAYLLSRAFQIFAPGIPQVYYVCLFAGENDIKLLESSKEGRNTNRHYYSRQEIKEEVKRPVVANLFKLLAWRNKSNAFDLDGVMECSAYASKIKILRKDKLGNNVAVLDADLMNKKFVIVENDKQIFSN

SEQ ID NO: 7193 - protein, 387 aa, Chloroflexus aurantiacus
MQIEYTLARMGAERLWNLLHTEPYINALGALTGNQAMQQVKAGLKAIYLSGWQVAADANLAGQMYPDQSLYPANSGPQLVRNINNALRRADQIYHSEGRNDIYWFAPIVADAEAGFGGPLNVFEIMKAYIEAGAAGVHFEDQLASEKKCGHMGGKVLIPTQAAIRNLVAARLAADVMGVPTIIVARTDANAATLLTSDIDERDRPFCTGERTSEGFYRVRAGLDQAIARGLAYAPYADMIWCETSEPNLEEARRFAEAIHAQFPGKLLAYNCSPSFNWKKKLDDATIAAFQRELGAMGYKFQFVTLAGFHALNYSMFELARNYRDRGMAAYSELQQAEFAAEAYGYTATRHQREVGTGYFDEVAQVIAGGEISTTALTGSTEEEQFH

SEQ ID NO: 7194 - protein, 495 aa, Rhodospirillum rubrum
MPEGTTRIAALDIVREAGLLKDKAYIDGAWVGADDGGDFPVLDPATGREIGRVPNMGAAETRRAIDAAAAAWPAWRARTAKDRAAVLRRWYGLIMDNQEALAVLMTAEQGKPLGEARGEIAYGASFVEWFAEEGKRLYGEVVPAHGTDKRILTLREPIGVVAAITPWNFPSAMITRKVAPALAAGCPVVLKPAEDTPLSALALVELAERAGLPKGLINVVTTHEAKAVGGEMTANPIVRKLSFTGSTEVGKILMAQCAGTVKKVSLELGGNAPFIVFDDADLEAAVAGAIASKYRNAGQTCVCANRLYVQEGIYEAFTEKLKAKVEAMRVGPALEGDVQQGPLINKKGLDKVDGLVRDALDKGATAVLGGKVHALGGTFYEPTILTGVTAAMRMATEEIFGPVAPLYRFSTEAEAIALANATRFGLAAYFYTRDIGRVWRVAEGLEYGIVGINEGIISTESAPFGGVKESGIGREGSRHGIDDFVEIKYLCMGGI

SEQ ID NO: 7195 - protein, 222 aa, Phanerochaete chrysosporium
TLTFVIYFLTQHPDVLQRLRQEILDVVGPSNLPTYDDIKQMKYLRAVLNETQRLYPPVPWNMRYAVEDSIVPNSEPEGKPWFIPAGASVSYSVHCMHRRKDYWGPDAEEFDPDRFLDERLHKYLTPNPFIFLPFNAGPRICLGQQFAYNEMSFFLVKLLQTFEDISFERDAFEPNALPPAEWAKFPGRKGKEKFWPRAHLTLYSEGGMWVKMREAQAMGQVA

SEQ ID NO: 7196 - protein, 123 aa, Glycine max
  misc_feature (12)..(12): Xaa can be any naturally occurring amino acid
MEAVGSRLSRAXSRYGAPTVFSGPVRKWKKKWVHVTPSSLPNNNSHSHTNNFTTTTTNDSSRLLLRRWTPTTADDSAGAVSDDPPRRKFRYTPIAVLEEQKKMNVVKAEHEPTIEADQLAFRQ

SEQ ID NO: 7197 - protein, 107 aa, Triticum aestivum
  misc_feature (41)..(41): Xaa can be any naturally occurring amino acid
  misc_feature (43)..(43): Xaa can be any naturally occurring amino acid
  misc_feature (65)..(65): Xaa can be any naturally occurring amino acid
  misc_feature (81)..(81): Xaa can be any naturally occurring amino acid
  misc_feature (88)..(88): Xaa can be any naturally occurring amino acid
  misc_feature (93)..(93): Xaa can be any naturally occurring amino acid
  misc_feature (103)..(103): Xaa can be any naturally occurring amino acid
ETVTRPSHCDAISQQIRTFIQMRTNLKVVDNSGAKRVMCIXGXGGKKGARLGDMIIGFCEGSATXGKVKKGDVGYGVVVRXAMKKDVXDGSEXHFDDNAISSXNNKS

SEQ ID NO: 7198 - protein, 414 aa, Azotobacter vinelandii
MTIDFKKTALDYHEFPTPGKIGIELSKPAETAAHLSLAYSPGVAEPVREIARDPENAYRFTAKGNLVAVISNGSAILGLGNLGPLASKPVMEGKALLFKRFAGINAVDIEVTAESPAAFIDTVVRIADTFGGINLEDIKAPDCFEIEQLLIEQCSIPVFHDDQHGTAIVTAAGMLNALEIQGKRLEEARIVCLGAGAAATACMRLLISLGARKDNLYMIDSRGVIHSGRDGLNRYKQEFVNDGGARTLLEAMQGADVFLGLSGANLLPPEALLAMAPRPIVFACSNPDPEIDPELAKATRQDLILATGRSDYPNQVNNVLGFPFIFRGALDVRARRVDEAMKIAAVEALRQLAKEPAPAEVLKAFAIDRLQFGPDYILPKPMDARLLGAVAGAVAKAAVESGVARLPYPAHYPL

SEQ ID NO: 7199 - protein, 328 aa, Rubrobacter xylanophilus DSM 9941
MIRAVTVKCVEDYGYEVVGIKRGWRGLLAPQEDSVEKLTVDGVRYILDEGGTVLLSSRTNPYKKEGDAEKVVKNMQEFGIDALVAIGGDDTLGVASRLHKDFGVQVVGCPKTIDNDLSGTDICFGYDTAVSIATEALDRVRTTAKSHERILVVEIMGRHAGWITYGAGLAGAANVTLIPEVEPDIDAIADLFKKRAERGERWGVVAVSEGVTIGEEYITQSAERDEFGHVRLGGIGETLAKELKERTGIDTRHVVLGHLQRGGTPTAYDRILSTRYGLRAAEAVKNGEWGKMVALRGSDIVTVPLEEATGETRTVPEDLYGVLKTFFG

SEQ ID NO: 7200 - protein, 333 aa, Pantoea agglomerans
NGIAGSYAEYVPVVHIVGAPRLTSQRKGELLHHTLGDGEFCHFMRMSAPVSVAQASLTPENALAEIDRVIEEVMYSSRPGYLLLPSDVPALPVSTRAHALPARQPPFSPSSLEAFTAAAQTQLRGANRVSLLADFLADRFKVKKALEQWMEEVPLGTSTLLMGKGLFNEQQAHFAGTYSGAASAPSTKEAIEGADVVITVGVKFTDTITAGFYQQRPSGNASTSALFAARAIRSSITGRSKNGQRDAPPPPLNLAFRPGRLILLNTTHCRWSRDNSLGQYAFWQQIQDSLQPGDVLVAEQGTACFAAAALNLPQDLQFVVQPLWGSIGYTLAA

SEQ ID NO: 7201 - protein, 332 aa, Enterobacter cloacae
NGVAGSYAEYVPLLHIVGAPCSGVQQRGELLHHTLGDGDFHHFYRMSEPVTAARAILTAQNACYEIDRVLEVMLMQSRPGYLMLPADVAKKPATPPVNALTTPPFPVNEACLNAFRQHAQAMLSVGSSVALLADFLAAFGFIQMLQCWMTDQLPTHTTVILGKGIVKRKHGGFSYPYHGAGGQRGPVPAIEGADTVICIGTRFTDTVTAGFTQQFARERTIEIQPFAARVGDVWFSGIPMREAINALIPLVRARAHAAANHRPPQAARAPVHQGTLNQETLWQTVQQFIRPDDILLADQGTAAFGAASLRLPAGAELLVQPLWGSIGYTLAA

SEQ ID NO: 7202 - protein, 480 aa, Pseudomonas fluorescens PfO-1
MQLKDTQLFRQQAFIDGAWVDADNGQTIKVNNPATGEILGTVPKMGAAETRRAIEAADKALPAWRALTAKERAGKLRRWFELMIENQDDLARLMTLEQGKPLAEAKGEIVYAASFIEWFAEEAKRIYGDVIPGHQPDKRLIVIKQPIGVTAAITPWNFPAAMITRKAGPALAAGCTMVLKPASQTPFSAFALAELAQRAGIPKGVFSVVSGSAGDIGSELTSNPIVRKLSFTGSTEIGRQLMSECAKDIKKVSLELGGNAPFIVFDDADLDKAVEGAIISKYRNNGQTCVCANRLYIQDSVYDAFAEKLKVAVAKLKIGNGLEEGTTTGPLIDEKAVAKVQEHIADAVSKGATVLAGGKPMEGNFFEPTILTNVPKDAAVAKEETFGPLAPLFRFKDEADVIAMSNDTEFGLASYFYARDLGRVFRVAEALEYGMVGVNTGLISNEVAPFGGIKASGLGREGSKYGIEDYLEIKYLCLGI

SEQ ID NO: 7203 - protein, 448 aa, Methanococcus maripaludis S2
MQLEVVAIGGYEEVGRNMTAVNIDGEIIIFDMGVRLDRIMIHEDTDISKMHSLNLIEMGVIPDDTVMKNIEGEVKAIVLTHGHLDHIGAITKLAHRYNAPIIGTPYTLELVKREILSEKKFDVRNPLITLENGNKLDLTANITLEFVKITHSIPDAAMAVLHTPYGAVVYGNDFKFDNFPVVGEKPDYKALKRIGKQGVIAMVSESTRVDFEGKTASEGVAANLLKNDLLGTDNEDNAVVVTTFSSHIARIKSITDIASKMGRIPVLVGRSMSKYCGIAQDIGLVKFPKETKICWDPSSIDKTFHQIMKDGKENYLMVVTGHQGEEGAVLSRMATNKTPFRFEKYDQVVFSADVIPNPMNAAQRYLLEARLNLAGVRLFKGAHVSGHAAKEDHRDILRWLQPEHLIPAHGDFNLTSAYAKLAEEEGFRLGEDVHLLRNGQSLKFERVI

SEQ ID NO: 7204 - protein, 382 aa, Yersinia pestis KIM
MCDKKPLKESSMSHENLKGAQMAEGIPETMRAVVAYGPRDYRFERVPVPTIDAKEILVKVEGCGICAGDTKAFEGAPSFWGDDKQPAYIKAPMIPGHEFIGHVVGLGADVEGFELGDRVTSEQIVPCWGCRFCNHGQYWMCEKHDLYGFQSNVNGAMAEYLKFTKEAINYHVPDHLPLEKAILIEPYACAFHAVQRAKIKLGDVVVLAGSGTLGLGMIGAIKKSGAAKLIVLDLSDDRLALAKKFGADLVLNPSRDDVNTLIKEMTGGYGCDIYIDATGAQKAVEQGLTLLRKLGTFVEFSVFKDPVTVDWSIISDRKELDVLGSHLGPYCFPLVIEGISNGDLPTEGVVTHILPLEKYAEGIELVKRGVDSLKVVLNPNLT

SEQ ID NO: 7205 - protein, 211 aa, Leuconostoc mesenteroides subsp. mesenteroides ATCC 8293
MTPLKAEILPEIHEHYSIPKKINDHGYFTYDFALPMTTLYTLYSGKTNQLAKWLKMSPMKQFTTLDTHDGIGVVDARDVLTDEEIDYASEELYKVGANVKKTYSSASYNNLDIYQINSTYYSALGNDDAAYLLSRIFQVFAPGIPQIYYVGLLAGENDIELLESSKEGRNINRHYYSVDEVKEEVKRPVVAKLLKLLSWRNNFAAFDLDGS

SEQ ID NO: 7206 - protein, 646 aa, Zea mays
MTRGLGAAPVSSCLALGAAAVVLLVAAALPSPASGVDVTAVLSVFPNFADFARLLASTPVASELSGRSSLTLLAVPNANLPQSPSAFVASAGADIADVLRYHVLLEYLSPSDLARLSPSGKLVTTLFQTTGRAPSDFGAVNLTVGGNSTVVVRSPAPSLGSNATVLGAVTAVPYNLSVLAVGGLIIPSGFDLAASESRPPPPVNITRVLTDARGFNVAASMLQASGVASEFEADEHGAGITVFVPTDDAFAGLPATDRLQSLPAERKAVVLRFHVLHSYYPLGSLEGPRRDLAVDPAAARAALVTCGGLCPGLNTVLRELVVGLQELYGVRHRFVALDRGSLRHPQWQEVAEVVSSRDSYSKAPKSDVQCKNRIDTLKKKYKVEKAKHDSDWRYFDRLDDLLAPVLLKPNSSSSSAAAATAAAAARSAGPMVPPRINFPQRTRTPLHSSAGAKWRMPSPLPQPSASSDSSDGFPPSAVANGKRQRVEEPAAAAADNGAESSVSRAQGLRELAQAIRRLGEVYERVESAKRDQELRMERERLDSARQLEEQRVQFSTSMPRSSRITRTAQAPPGAMTTAATRTRKLRRMRKTKRKRASDCSPLQQWNGNSTQKSGEREGKTRSKKAWRRETHPGKKRREGKTRKEIC

SEQ ID NO: 7207 - protein, 273 aa, Synechococcus elongatus PCC 6301
MSEAGTPAEALTYEQAIANLRQTADTGDRYYAAWWLGRFRMKQPEAIALLIEALDDSLDRAPDGGYPLRRNAARALGKLESPEAIAPLIACLQCEDYYVREAATQSLGELQATVAVPALLKLLEGGPEAIAAIPGKPHLTQPADAVMETLGQLRATVAVPVVQAFLEHPIDKIRLAAARSLYQLTGDDHYAERVVQGLSDPKLQRRRSALMDLGAIGYLPAAPQIAQTLAENSLKLISLKGLLDTHLRQQTPEAIAELDESAIALMDLMDGLL

SEQ ID NO: 7208 - protein, 464 aa, Listeria monocytogenes str. 1/2a F6854
MLYSKENKESYLEPVFGSSAEDRDIPKYTLGKEPLEPRIAYRLVKDELLDEGSARQNLATFCQTYMEDEATKLMSETLEKNAIDKSEYPRTAELENRCVNIIADLWHAPKDQKFMGTSTIGSSEACMLGGMAMKFAWRKRAEKLGLDIYAKKPNLVISSGYQVCWEKFCVYWDIDMRVVPMDKEHMQLNTDQVLDYVDEYTIGVVGILGITYTGRYDDIYALNEKLEEYNSKTDYKVYIHVDAASGGFFTPFVEPDIIWDFRLKNVISINTSGHKYGLVYPGIGWVLWKDESYLPEELIFKVSYLGGEMPTMQINFSRSASHIIGQYYNFLRYGFEGYRTIHQKTSDVAQYLAHAVEQTGYFDIFNDGSHLPIVCYKLKNDANVKWTLYDLADRLQMRGWQVPAYPLPKSLENIIIQRYVCRADLGFNMAEEFIQDFQASIQELNNAHILFHNTQQSGVHGFTH

SEQ ID NO: 7209 - protein, 507 aa, Triticum aestivum
  misc_feature (158)..(158): Xaa can be any naturally occurring amino acid
  misc_feature (194)..(194): Xaa can be any naturally occurring amino acid
MDSPLLVAALSSLLLLLALYLLGGKRRRRSYPPVAGAMLQQLLHWGRLPEYMTELSRRYGTFRMLTLTCNWVYTVDPANVEHILRTNFANYGKGPMTHGVLGDLLGDGIFNVDGAKWRHQRKVASFEFTTRALREYSSGVFRDMAAELAGIVAAAAAXGERLDMENLFMRSTLDSIFTVGFGGHLGALSQSTRXGAAFARAFDDASEQVLYRFFDPLWKAKRLLNVLSEAAMKRSVRTINDFVYAVIDKKIEQMGRDEHEFAKKQDILSRFLLEREKDPGCFDNKYLRDIILNFVIAGRDTTAGTLSWFLYVLCRDQRIQDKIAREVREATTGDRQNVGGVQEFTACLTEDAISSMHYLHAALTETLRLYPAVPTDVKCCFSDDTLPDGHTVRRGDMVNYLPYAMGRMKFLWGDDAEEFRPDRWLDDEGVFVPESPYKFTAFQAGPRICLGKEFAYRQMKIFAATLLYLFRFEMWERDSTVGYRPMLTLKMDGPLCVRASPRRSTGN

SEQ ID NO: 7210 - protein, 510 aa, Picrophilus torridus DSM 9790
MKMDMNVFHDLGLEEVNSGVYDGEWARPSGKMIDVKSPIDGSDIARVSMATESDYERIISRAVEEFKKWRMIPAPKRGIIIKEIGDELRKEKKNLGKIVTMEVGKTASEGEGEIQEMIDVSDLALGLSRQLYGLTIASERPYHRMYEQWIPLGPVAVISSFNFPASVWSWNAFIAAVDGDVVIWKPSSKAALTAVAVMRVIESVLKRNNAPNIFFLMVSPGHDGGEWITNDKRIPLVSFTGSVAVGKKISENVAKRLGKTILELGGNNGAIVSDKSDINIALRGVVFGALATAGQRCTTTRRVIVQENIYDDFLERLKNAYSTIKVGDPRDKGVLVGPLIDEDAVKNYERAIETAIKQGGKLVFGGRRIKISGCENGHYVMPAIIEAKPDMAIVSEETFAPILYVMKYRNIEEAIEIHNSVPQGLSSSIFTNDLREEEAFLSAYGSDCGLANVNTSTAGAEIGGAFGGEKDTGGGRESGSDAWKYYMRRQTVTKNWGKTLPLAQDVVFDF

SEQ ID NO: 7211 - protein, 160 aa, Brassica napus
  misc_feature (117)..(117): Xaa can be any naturally occurring amino acid
  misc_feature (137)..(137): Xaa can be any naturally occurring amino acid
  misc_feature (144)..(144): Xaa can be any naturally occurring amino acid
  misc_feature (146)..(146): Xaa can be any naturally occurring amino acid
MTKVCPETEERTLQEPVLTVSTDVSFASNHFPTYKLGPDNEIVDEPKEDEKGPSVKETVEEESQLLSDQHKRLSVRDLASKFDKKLAAAVSLADEAKLKEVASLEGHVMLKKLRDAXEYMRGRTDGQNREDVEKAIXMVEALAXEXTQNEGELIQEKFEV

SEQ ID NO: 7212 - protein, 78 aa, Brassica napus
  misc_feature (12)..(12): Xaa can be any naturally occurring amino acid
  misc_feature (18)..(18): Xaa can be any naturally occurring amino acid
AILMESKMILSXDELLTXMIIDKTFADADADKAGKISKEEWKVYVLKHPTLLKNMTLPYLKDVTTAFPSFIFNTEVED

SEQ ID NO: 7213 - protein, 294 aa, Glycine max
MSEALEEVVPSMKGGCEEEGLNLKATELRLGLPGCESPEREGVFKSVVVSGAKRGFSDAIDGNWNGGGSEKDAAALFSPTSRGAVSVSVSAAKSLTLTATDCTNQPTALGASVLKETVPRSPKPLHENKPQISAPAAKAQVVGWPPIRSFRKNSMASQPQKNDAAADAEAKSGCLYVKVSMEGAPYLRKVDLNSFTTYKDLSLALEKMFSCFTLSQCGSYGVSSRENLSESRLMDLLHGSEYVLTYEDKDGDWMLVGDVPWEMFTESCKRLRIMKSSEAIGLAPRAMEKCKSRY

SEQ ID NO: 7214 - protein, 415 aa, Tradescantia virginiana
TTPISIEDVRREVKILKALSGHKHLVKFYDACEESLNVYLIMELCEGGELLDRILSRGGKYTEEDAKAIVMQILNVVAYCHLQGVVHRDLKPENFLFINRDENAPMKLIDFGLSDFTRPDERLNDIVGSAYYVAPEVLHRSYSMEADIWSIGVITYILLCGSRPFWARTESGIFRSVLRADPNFDDSPWPTASPEAKDFVKRLLNKDYRKRMTAAQALSHPWLRDKEPQIPLDILIYKQTKLYLRATPLKRAALKALSKALTEDELVYLRLQFKLLEPNNDGRVSLENFHTALAQNATEAMKESRVLDILNSLESLAYRRMDFEEFCAAAISCYQLEALEHWEQIASTAFEYFEQDGNRVVSVEELAQDLNLPQNAYAILKDWIRQSDKKLSFLGYTRYTRYLHGVTPRPNTRQH

SEQ ID NO: 7215 - protein, 405 aa, Thermoplasma acidophilum
MAYIQVKEDGTLQVPDRVTIGYIEGDGIGPDISKTTINVLNAALDIAYGGKRSIEWKKILAGDEAYDKTGDRLPQSSLDELKKCVVSLKGPLTTPIGEGFRSLNVTLRQYLDLYANIRPVRYFPGVPSPVVHPEYMNMVVFRENTEDLYAGIEWRYDSDGAKKVREFLASTFNINLTSDTGIGIKPISKFKSTRLVRKAIQYAIANKRKSVTLVHKGNIMKYTEGAFKEWGYEVAKTEFGNYTVTETEYLQDPEKYSNKIVIKDRITDNMFQQVLTRTQEYDVIATPNLNGDYLSDALAAQVGGIGLAPGANIGDHYAVFEAVHGTAPKYAGMDVANPTSLILSGEMMLQHIGWNEAANILDEAIMQTYRDQKLTQDIARLLNVKALKCSEFGEEIINRMKKPVH

SEQ ID NO: 7216 - protein, 166 aa, Bordetella parapertussis 12822
MNTMYDFSAPTITGAERALADFRGQVALVVNVASRCGFTPQYSGLEELYRSYRNEGFVVLGFPCNQFGRQEPGDEAAIAQFCETQYAISFPLFAKIDVNGAHAHPLYRWLKAHKPGLLGTRAIKWNFTKFLVGRDGLPLRRYAPAHTPESLRHDIARACAAPGPTP

SEQ ID NO: 7217 - protein, 328 aa, Capsicum annuum
MASQSFVPPIFENPFLNIEELAGDTIVRKPEPLTQANSDPNGTSLVVSKDVDLDINKKTWLRIYVPQRIITNHNDDEKLPVIFYYHGGGFVFFHANSFAWDLFCQGLAGNLGAMVISLEFRLAPENRLPAAYDDAMDGLYWIKSTQDEWVRKYSDLSNVYLFGSSCGGNIAYHAGLRVAAGAYKELEPVKIKGLILHQPYFSGKNRTESEEKLKDDQLLPLHAIDKMFDLSLPKGTLDHDHEYSNPFLNGGSKHLDDVIAQGWKILVTGVSGDPLVDNARNFANFMEEKGIKTFKLFGDGYHAIEGFEPSKAAALIGATKDFICATTN

SEQ ID NO: 7218 - protein, 365 aa, Glycine max
MGSTGETQITPTHVSDEEANLFAMQLASASVLPMVLKSALELDLLEIIAKAGPGVHLSPTDISSQLPTHNPDAPVMLDRILRLLACYNILSFSLRTLPDGKVERLYGLAPVAKYLVRNEDGVSIAALNLMNQDKILMESWYYLKDAVLEGGIPFNKAYGMTAFEYHGTDPRFNKVFNKGMADHSTITMKKILETYTGFEGLKSLVDVGGGTGAVVNMIVSKYPTIKGINFDLPHVIEDAPSYPGVEHVGGDMFASVPKADAIFMKWICHDWSDEHCLKFLKNCYEALPDNGKVIVAECILPVAPDSSLATKGVVHIDVIMLAHNPGGKERTEKEFEALAKGSGFQGFRVLCCAFNTYVMEFLKKV

SEQ ID NO: 7219 - protein, 476 aa, Photorhabdus luminescens subsp. laumondii TTO1
MPVPTLRHFINSQYVESKSSEYFDLISPVTGETYARSPNATIADVNEAYASAKEAFKIWGRSTPSARQQALLALADAVEKNSERLIEAQSRNTGQLKHLIASEEVAASVDHIRFFAGAARFLEGKATAEYLPDMTTSIRREPLGVVGQVTPWNYPLMMAVWKIAPALAAGNTVVLKPSDTTPESTLLLAELAAPFFPTGAFNVVLGNASAGALVVSHKTPAMVSITGSVRAGLQVASSAAANLTRAHLELGGKAPVVVFADADMDKAVETIATAGYFNAGQDCTAASRVLVHESVYDTFVAKLVAAAKATRFGYPEDEEALYGPLNNARQLEQVKGFIARLPAHACIETGGRQAERSGYYFEPTVITGLEQHDEAIQTEIFGPVITVQKFRDEQDAIEKANDVKYGLASSVWTRDHGRALRLSRELDFGTVWINTHIPLTAEAPHGGFKSSGYGKDLSAYGFDEYTRIKHVMSSND

SEQ ID NO: 7220 - protein, 238 aa, Wolinella succinogenes
MSLYDRNYLNSSAQDQGAFGGARESLSESALVGFVKQTYQLFAGSLLAATVGAYVGLGMAPVIASWYWGLVILEFALLFGMFFLKDKPGINLVVLFAFTFMTGLTLTPLLSRIFNMPGGASIVANAFLLTTAIFGIMSIFALKTKSDLASMGKMLFIALIVVVVASIINLFLGSPLLQVIIAGAGAILFSLYIAYDTQNIVRGVYDSPVMAAISLYLSFLNLFISLLQLLGILGNSDE

SEQ ID NO: 7221 - protein, 122 aa, Staphylococcus epidermidis ATCC 12228
MANQEQIIEAIKEMSVLELNDLVKAIEEEFGVTAAAPVAAAGAAGGGDAAAEKTEFDVELTSAGSSKIKVVKAVKEATGLGLKDAKELVDGAPKVIKEAMPKEDAEKLKEQLEEVGASVELK

SEQ ID NO: 7222 - protein, 280 aa, Synechococcus sp. WH 8102
MGGWIDEEHRGVRYGLAGDVLVEETSPFQRISVIRSERYGKGLLLDGCWMTAEQQERHYHEALVHPALCSAEAIERVLVIGGGDGGTARECLRYPEVIHLDLVEIDGRVVELSQEHLPGIGGAVWSDSRCQLTVGDGIAWAANAPDQSYDVVLVDGSDPAGPAEGLFNRAFFEHCRRILKPGGVFATQSESPEAFREVHVAMVRLLREVFGHADPLYGWVPMYPSGWWSWTFAAVDGPRYRTVQPARAALVAEGCEIWSPRWQQGALDAVPAFIARELAP

SEQ ID NO: 7223 - protein, 71 aa, Glycine max
MAETRRSTGTVKWFNAHKGFGFITPQDGTDDLFVHFTSIRSDGYRSLSDGQSVEFLLDDSDDRRAMGVEGS

SEQ ID NO: 7224 - protein, 339 aa, Streptomyces tenebrarius
MKALSFEAPGEAVFGTREVPVPAPGEALIHLGYNSICGSDLSLYRGVWHGFSYPVVPGHEWSGTVVEVNGPGAELVGRDVVGDLTCACGSCAACGRGTPVLCENLQELGFTRDGACAEYMTIPTGNLHVLPEGLSLRAACQVEPVAVALHAVSTVGVEPGERVAVLGAGGIGLMLMQVARQRGGVITTVGEPVAERRAVAAQLGARTVTTGRPGELAELVAKHPDLTPDVVLEASGYPVAVQEAIEVVRPGGRIGLVGYRVEEVGPMATHHVAVKALTIRGSLGPGGRFPEAIDLLARGEIEVEPLLSHEFALDDHARALDLALRRAEGNVRSFFNLRA

SEQ ID NO: 7225 - protein, 112 aa, Bartonella sp. RT222SM
NEACLKMLQEINSVKRIPKFIARAKDKNDPFRLMGFGHRVYKNYDPRAKIMQQTCHEVLKELNIQDDPLLDIAIELEKIALNDEYFVEKKLYPNVDFYSGITLKALGFPTEM

SEQ ID NO: 7226 - protein, 511 aa, Erwinia carotovora subsp. atroseptica SCRI1043
MAHDNLEGRSAFGEVGSLDLKKRYDNFIGGTWVPPDAGQYFVNLTPVTGQPMCEVASSSTRDIDHALDAAHKAKAEWGGLSVQERALVLNRIADRMEQNLERLAQVETWDNGKPIRETSGADVPLAIDHFRYFAACIRAQEGAISEIDGDTVAYHFHEPLGVVAQIIPWNFPLLMACWKMAPALAAGNCIVLKPAKLTPMSVLILMELIQDLLPAGVINVVNGSGSEIGEYLATSKRVAKVAFTGSTEVGQQIMSYAAQNVTPVTLELGGKSPNIFFADVMDKEDSFFDKALEGFTLFAFNQGEVCTCPSRALVQESIYDRFMERAIKRVEAIRIGNPLDSKTMMGAQVSAGQLETILNYIDIGKKEGARVLTGGQRKAMPGGLAEGYYLEPTILFGKNSMRVFQEEIFGPVLAVTTFKTMEDALEIANDTEYGLGAGVWSRNGNVAYRMGRGIQAGRVWTNCYHAYPAHAAFGGYKQSGIGRENHKMMLDHYQQTKCLLVSYSDKPMGLF

SEQ ID NO: 7227 - protein, 494 aa, Bacillus cereus ATCC 10987
MLTKNIELKPKVKAFLNEEIKMFINGEFVPSISGKTFETYNPATEDVLAVVCEAQEEDINVAVKAARSAFESGPWAEMTTAERAHLIYKLADLIEEHGEELAQLEALDNGKPYQVALDDDIAATVENYRYYAGWATKIIGQTIPISKDYLNYTRHEPVGVVGQIIPWNFPLVMSSWKMGAALATGCTIVLKPAEQTPLSLLYTAKLFKEAGFPKGVVNFVPGFGPEAGAAIVNHHDIDKVAFTGSTVTGKYIMRQSAETIKHVTLELGGKSPNIILEDADLEEAINGAFQGIMYNHGQNCSAGSRVFVHRKHYETVVNELVKMANNVKLGAGMEKETEMGPLVSKKQQERVLHYIEQGKAEGATVAAGGERAFEKGYFVQPTVFTNVTDDMTIVKEEIFGPVVVVLPFDSTEEVIERANRSSYGLAAGVWTQNIKTGHQVANKLKAGTVWINDYNLENAAAPFGGFKQSGIGRELGSYALDNYTEVKSVWVNIK

SEQ ID NO: 7228 - protein, 304 aa, Glycine max
MTLNYNIALAFSAVLTLLLFPLLTVGELVEEQPLVLKYHNGQLLKGRITVNLIWYGTFTPIQRSIIVDFINSLSSAPNAPLPSTATWWKTTEKYKVGGGSPALVVGMQFLHPAYTLGKNLKGRDLLALASKFNEINSITVVLTAKDVAVEGFCMSRCGTHGSTRNVKSNARTAYIWVGNSETQCPGQCAWPFHQPIYGPQTPPLVSPNGDAGVDGMVINLATLLAGTVTNPFNNGYFQGPPTAPLEAVSACTGVFGSGSYPGYPGRVLVDKATGASYNAHGANGRRYLVPAMWDPQTSTCKTLV

SEQ ID NO: 7229 - protein, 514 aa, Zea mays
RCPWEDHIFEDQSERGSNALLARAWSPGWQSADKALTAFLNGPLVDYSANHKKADSASTSLLSPYLHFGELSVRKVFHLVRMKQLMWSNDGDRAGEESCTLFLRAIGLREYSRYLTFNHPCSLEKPLLSHLRFFPWVVDEVHFKVWRQGRTGYPLVDAGMRELWATGWVHDRIRVVVSSFFVKVLQLPWRWGMKYFWDTLLDADLESDALGWQYISGSLPDGRELDRIDNPQFEGYKFDPHGEYVRRWLPELARLPTEWIHHPWDAPESVLQAAGVELGSNYPRPIVELDAANSRLQGALSEMWELEAASRAAIENGMEEGLGDSTDEPPIDFPQELRMEVDRQPAQPAIIHTPVVAGWRREDQRVPSMTSSLIRAETELTADFGNTSEDSRPEVPSNIHLQARPEREETVDGGTGNAVRVHGNHHQQNLQNNMHRVLGIAPSISEASSSWTGRDGGVVPVWSPPAASGHSDPYAADEADISSRGYLDRHPQSHTMMNWSQLSQSLTTGWEVDN

SEQ ID NO: 7230 - protein, 339 aa, Schizosaccharomyces pombe
MAELEFTDEKFTKVDPELKEILKKHPAGTENITNIWQMRAMDEECRKQLAETILPLPDDVSVTDILIPTRDGTEIDGRVFTPVSVPADYRSLMVFYHSSGWCMRGVRDDDSLFKILTPKFGCVCVSVDYRLAPESKFPVAHNDAIDSFKWVASNIEKLGANPKRGFFLGGASAGGNFVSVLSHIARDEKIKPELTGLWHMVPTLIHPADLDEETMAQFRSYKETIHAPVITPKIMDIFFENYQPTPKSPLVNPLYYPTGHKDLPPSFFQCCGWDPLRDEGIAYEKALKAAGNETRLIVYEGVPHCFWVYYPMLSLRKKYFEDAIDGFTWLLSHVKKEDD

SEQ ID NO: 7231 - protein, 352 aa, Leptosphaeria maculans
MPPTGSGSSRKISFNVSEQYDIQDVVGEGAYGVVCSALHKPSGQKVAIKKITPFDHSMFCLRTLREMKLLRYFNHENIISILDIQKPRNYETFTEVYLIQELMETDMHRVIRTQELSDDHCQYFIYQTLRALKAMHSANVLHRDLKPSNLLLNANCDLKVCDFGLARSAASTEDNSGFMTEYVATRWYRAPEIMLTFKEYTKAIDVWSVGCILAEMLSGKPLFPGKDYHHQLTLILDVLGTPTMEDYYGIKSRRAREYIRSLPFKKKIPWKAMFPKTNDLALDLLERLLAFNPVKRITVEEALKHPYLEPYHDPDDEPTADPIPEEFFDFDKNKDNLTKEQLKLLIYQEIMR

SEQ ID NO: 7232 - protein, 309 aa, Zea mays
SVRPASAQRPPSVRRCAGAARRSPSEPTTNPMPPHRAGGAAGGGDTSAFFAATLVLWAVSVGFEIGVRGRRELAPVAAGFAFFQAANTAVRGSVSRDPLFVNTAVSLLHSSLTSVSVIFVLANQWRNKGLENMFEHEELFGGSWIGAYSALCFSCGYFAYDQLDMLRYRLYSGWLPGILMHHLILLICFTLALYRNVTINYLILSLVCELHSIFLHVRKVRRMGGFRDFDRTMVKLEWLLNWTTFVAARVICHILITYKLVADAHKFGKGIELPLALLGMAGMNLLNIFLGLDLLKAFTRERNQQSHQD

SEQ ID NO: 7233 - protein, 481 aa, Rhodobacter sphaeroides 2.4.1
MTDFRREKILVGGDWIQADAGGRIEVTNPATGAVIGTVPDAGAAETARAVAAAEAAFGPWRALTAAERATHLRRLAQAILDHREALAELLTEEQGKPLAEARGEVGMSAAYIQWFAEEARRVYGEVIPSPWPDRRLLVTRQPVGVVAAITPWNFPSSMLARKIGPALAAGCTVVAKPASQTPFSGLAWGVLGEMAGLPAGVLNIVTGSARAIGGELTANPSVRKITFTGSTPVGKVLLAQAAGTVKKMSMELGGNAPFLVFDDADLDRAVEGAIAAKFRNAGQTCVCTNRFYAQAGIHDEFVKRLAAATAALKVGPGAQDGSEIGPLIDAAAVAKTEEMVADATAKGGRIVTGGRRHTAGAGFYEPTVIADATDAMTFAREEIFGPVAPVFRFETEEEAIRRANATEYGLACYFYTSDLGRAFRVSEALDYGIVGVNEGLVTTEVAPFGGVKESGFGSEGSHHGMQDYLTLKYTAMGGLGR

SEQ ID NO: 7234 - protein, 337 aa, Rhodobacter sphaeroides 2.4.1
MKAAIFDGSPTLRLTDLPIQEPGPDEVLIRIDSATICGTDQHILEGKFWAKPPVVLGHEFAGYVERVGERVQNCRPGDLVSVEPHVYCGCCKPCRLGKPHLCLDRLAWGINLNGGFEQYATVRMDTVYQVPEGIGPEEAALGEITGCCMHGIDRVGVELGDLVVILGGGAAGLILARLAELRGAARIVISEPNAARREQIRAFGYPDVVDPLNEDLAARIGALTDGLGADVVIEAAGRAETAAQAVELVCHGGRVLFFGVAAPGTMAAIEPNRIFAREITVVGSIRNPYTHHRVMEILPRLRLKDIVTHRFPLENIAEAFDAAHRGEGLKICIKPNG

SEQ ID NO: 7235 - protein, 284 aa, Bacillus halodurans C-125
MTIQWFPGHMAKARREVTEKLKLIDVVIELLDARVPLSSRNPMMDEIVAHKPRLVLLNKDDLADPSKTKEWTRFFEEGGATVLPINAQTGQGVSRISPACQTLAQALIEKQRAKGMKPRAIRAMILGIPNVGKSTLINRLASKRIAKVGDRPGITKQQQWIKVGKELELLDTPGILWPKFDDQATGFRLAATGAIKDELLDFQDVALFVLRYMREMYPDRLMDRYKLNELPEDGVTLFDAIGKKRGHLLSGGYIDYDKTAEMILRELRAGTLGRITLEVPGKTV

SEQ ID NO: 7236 - protein, 307 aa, Sinorhizobium meliloti
MDSKTTKPMPTEAGIRAFHERCEAFYPADAVNASVEQQRQWYDALCAEFDAPSPEGLTRRDERVAGRIPVRYYRPAEVASGTRVFYIHGGGFVVGSLESHDAICAELAHGAQVELVSVDYRLAPEHLWPAAFEDCCDVLEALLADGRPLVVAGDSAGGNLSAGIVLKAKAEGLAGIVGQVLIYPGLGGDLTRGSYIEMAQAPLLSTADVDYYREVLKAPADEPFAHPLRAADLSGLPPAYVSGAYFDPLRDDARAYAARLAQAGVDVTYREEPQMVHSWLRARRMSPGAREGFVRLVQAVARLAGTA

SEQ ID NO: 7237 - protein, 469 aa, Vibrio cholerae O1 biovar eltor str. N16961
MRLVWFRRDLRSFDNTALTAALNSGDPVAAMYIATPEQWHQHHLAPIQADLIWRRLAELQQELAALNVPLFYQQVADFQAAAVAVSQLAKTLNATQVLANRDYELDEQQRDQLAQQLLSEQGIIWSAFDDKCVLPPGSVRTKQGEFFKVFTPFKRAWLTLFQPPVIGKNRPVALWNVPSALAELVWHPEQAFDYPRIDSTPWAADFETVRAQLRDFCRERVQDYHQARDFPAREGTSSLSPYLAIGVLSARQCVARLYHESSMGELSEGAQVWLSELIWREFYQHLVAIEPNLSKSRDFVEWGARLEWWNDNEKFQLWCEGKTGYPIVDAAMRQLNQTGWMHNRLRMIVASFLTKDLHIDWRWGERYFMSRLIDGDYAANNGGWQWCASTGCDGQPYFRIFNPVSQGEKFDPNGDFIRRWVPELRSVSSAYIHQPWTYPAVNSVLYPARLVDHKQEREVTLRLYKTAKG

SEQ ID NO: 7238 - protein, 340 aa, Micromonospora echinospora
MGGRMRALQFHGGHKAQIIDTPRPEAPPGWAVVKVHYCCLCGSDLWLYRGKWHGNRYPIVPGHEWAGVVDSAPEGYESWVGRPVTGDLIVGCQGCGPCRDGLPVMCENLIEIGFTVDGGCAGYVAVPITNLYLLPEGMDLAAASQTEPLAVALHAVDRINLRPAERVAVLGAGGIGQLILQSARATGATVTLATDLVAERRKIAEESGAAAAVHPSELPELTSYADKVDVVFEASGDPESVVRALDLVRPGGRVCLVGYQVGAEHALETARLPLSYASLVGVMGPGGKYREAVDLLANGAIDTQPILTDIVTLDDYAPAIDRAINRTDGTVRVVFDLRNE

SEQ ID NO: 7239 - protein, 492 aa, Oryza sativa (japonica cultivar-group)
MVLSKAVSESDMSVHSTFASRYVRASLPRYRMPENSIPKEAAYQIINDELMLDGNPRLNLASFVTTWMEPECDKLIMAAINKNYVDMDEYPVTTELQNRCVNMIAHLFHAPLGEDETAVGVGTVGSSEAIMLAGLAFKRRWQNKRKAEGKPFDKPNIITGANVQVCWEKFARYFEVELKEVKLRDGYYVMDPEKAVDMVNENTICVAAILGSTLNGEFEDVKLLNDLLDKKNKETGWETPIHVDAASGGFIAPFLYPELEWDFRLPWVKSINVSGHKYGLVYAGIGWCIWRNKEDLPEELIFHINYLGTDQPTFTLNFSKGSSQVIAQYYQLIRHGFEGYRNIMENCHENAMVLKEGLVKTGRFDIVSKDEGVPLVAFSLKDRSRHDEFEISDMLRRFGWIVPAYTMPPDAQHVTVLRVVIREEFSRTLAERLVLDIEKVMYQLDALPSRLMPPVPPAPLLVVAKKSELETQRSVTEAWKKFVLAKRTNGVC

SEQ ID NO: 7240 - protein, 277 aa, Thermoanaerobacter tengcongensis MB4
MELWFTEHQDENLRFSIKVKETLVVEKTPYQHLAILDSYQFGRVLVLDGILQTTEKDEFVYHEMIVHVPLFTHKNPKDVLIIGGGDGGSVREVLKHSSVERVVLAEIDEAVIRNSKKYLPTISSALDDPRVEIMIGDGIKYVNEHKNEFDVVIVDSTDPIGPAVGLFTSDFYRAVYECLREDGIIVAQTESPFIYGKLINKISKMFKEIYPITKAYIATVPTYPGSLWTFTMGSKKYDPEEVDINSIPRIQTKYYTPEIHKAAFVLPKFVKDIFDEV

SEQ ID NO: 7241 - protein, 343 aa, Mycobacterium leprae TN
MRIGILTGGGDCPGLNAVIRAIVRTCDARYGSSVVGFQDGWRGLLENRRMQLCNDDRNDRLLAKGGTMLGTAHVHPDKLRAGLHQIKQTLDDNGIDVLIPIGGEGTLTAAHWLSQEDVPVVGVPKTIDNDIDCTDVTFGHDTALTVATEAIDRLHSTAESHQRVMLVEVMGRHAGWIALSSGLASGAHMTLIPEQPFDVEEVCCLVKRRFQRGDSHFICVVAEGAKPVPGSITLRQGGMDEFGHERFTGVAAQLGAEVEKRINKDVRVTVLGHVQRGGTPTAFDRVLATRFGVNAADASHAGEYGQMVSLRGQDIGRVPLEDAVRQLKLVPESRYDDAAAFFG

SEQ ID NO: 7242 - protein, 466 aa, Magnetospirillum magnetotacticum MS-1
MSMSDELRDAALEYHRLPTPGKISVTPTKPLATQRDLALAYSPGVAAACELIVADEDSAADVTARGNLVAVVTNGTAVLGLGPIGPLAAKPVMEGKGVLFKKFAGIDVFDMELAELDPDKLVDIIAAMEPTFGAINLEDIKAPECFEVERKLQERVKIPVMHDDQHGTAIVVGAAMVNALRVVGKDIGEVKLVASGAGAAALACLNLLCKLGVKRENVWVTDIKGVVYEGRTELMDQYKSIYSKKTDMRTLAEVIEGADIFLGLSAPRVLTGEMVDKMAQKPIVFALANPTPEILPDEVKAVRPDAIIATGRSDYPNQVNNVLVFPYIFRGALDVGATQINDEMKLACVYALANLAMAESDERVRAAYGTAPLTFGPEYLIPKPFDSRLIIKIAPAVAKAAMESGVARRPIIDFDVYMDRLNQFVFRSGLVMKPVFDRARQDMRRIVYTEGEGRRVLHAVQTVVDE

SEQ ID NO: 7243 - protein, 408 aa, Methanococcus maripaludis S2
MATADLFADPTNIVTGLSTLATSGDVMFLVLMGVLVFSMQLGFALLEGGQVRKKNVNNVMMKNMADWLIGAVSWLFIGGVLSVSLVPADFFSWWGQIFTTNFANNGIDLANWFFGLVFAATAATIVSGGVAERIKFKSYLLMSIIITAILYPLFVYLGPWGSGMIPFNDYAGSFVVHGLGGFLALGAIAALGPRIGKFVNKKAISIPGHNIPMSVFGAFVLAIGWYGFNVGSSFAVADISGLVCATTTLAMAGGGIGALLASKDDVLFTANGIVAGLVAICSGTDVVSPIGALIIGLVAGIQVPIVYKIVEKMGLDDVCGVIPVHGTAGILGGILTGVFGMAALGGAGGVSLVNQLIAAGLTVVYGTGLGFGLGKLVGGFTGGLRVTEEEEKMGLDLAEHKLPAYPDE

SEQ ID NO: 7244 - protein, 312 aa, Triticum aestivum
  misc_feature (24)..(25): Xaa can be any naturally occurring amino acid
  misc_feature (29)..(30): Xaa can be any naturally occurring amino acid
  misc_feature (32)..(32): Xaa can be any naturally occurring amino acid
  misc_feature (34)..(38): Xaa can be any naturally occurring amino acid
  misc_feature (40)..(40): Xaa can be any naturally occurring amino acid
  misc_feature (42)..(42): Xaa can be any naturally occurring amino acid
  misc_feature (45)..(45): Xaa can be any naturally occurring amino acid
  misc_feature (50)..(50): Xaa can be any naturally occurring amino acid
  misc_feature (53)..(53): Xaa can be any naturally occurring amino acid
  misc_feature (61)..(64): Xaa can be any naturally occurring amino acid
  misc_feature (67)..(68): Xaa can be any naturally occurring amino acid
  misc_feature (73)..(74): Xaa can be any naturally occurring amino acid
  misc_feature (194)..(194): Xaa can be any naturally occurring amino acid
  misc_feature (240)..(240): Xaa can be any naturally occurring amino acid
  misc_feature (256)..(257): Xaa can be any naturally occurring amino acid
NGYFFFFNEKKLKAGKGCTRVSRXXYTAXXVXLXXXXXRXKXAPXTKWPXKLXWRTLKAHXXXXRAXXTFGAXXPVQVKIMAKHLNTIYVSGWQCSSTHTSTNEPGPDLADYPYDTVPSKVEHLFFAQQYHDRKQQEARMSLPRAERAHAPFVDFLKPIIADGDTGFGGATATVKLCKLFVERGAAGVHLEDQXSSVTKKCGHMAGKVLVAVSEHVNRLVAARLQFDIMGVETVLVARNXTPVAATLIKNNIHARXXKFILGATNPRLKKPASTGNSGPSARRNGGFKAIQGWTQRGKKNLPRVGKIAKGKL

SEQ ID NO: 7245 - protein, 447 aa, Glycine max
RPTRSGHRAAAADPRVQYHRPRAWVTAWERQRIWLRAADLFEKHNDDLAALETWDNGKPYEQSAQIEIPMLVRLFRYYAGWADKIHGLTVPADGPYHVQTLHEPIGVAGQIIPWNFPLVMFAWKVGPALACGNTIVLKTAEQTPLSALYASKLLHEAGLPPGVLNIISGFGPTAGAAIASHMDIDKLAFTGSTETGKIVLELAARSNLKPVTLELGGKSPFIVCEDADVDEAVELAHFALFFNQGQCCCAGSRTFVHERVYDEFIEKAKARALKRAVGDPFKGGIEQGPQIDSEQFQKILKYIRSGVESGATLETGGDRFGNSGFYIQPTVFSNVKDDMLIAKEEIFGPVQTILKFKDLDDVIQRANNTHYGLAAGVFTKNINTANTLTRALRAGTVWVNCFDTFDAAIPFGGYKMSGQGREKGEYSLKNYLQVKAVVTSLKNPAWL

SEQ ID NO: 7246 - protein, 373 aa, Bacillus sp. KSM-K16
MQVEQTYHPGLDGVIAAETDLSFLDTEQGQIIIHGYDLIQLSKTNGYLDIVHLLLKGELPSEQERLALAERLSGSYDLPEAVLDVLKRLPASTHPMDALRTGVSVLGGFDTRLDDRSEEANRERAYELLAKLPAVVANSYRILEKKQVLTPKDSLSYSANFLYMITGNVPSELEERVFDQSLLLYSEHEMPNSTFAARVIASTLSDMYGALTGAVASLKGHLHGGANEAVMYMLLDANSPEEFETLLSNKLKKKEKIMGFGHRVYMKKIDPRALIMKEALAELSQAAGDDRLLQMCEAGEALMAKEKGLYPNLDYYAAPVYWMLGIPISLYTPIFFSSRTAGLSAHVIEQHRNNKLFRPRVKYTGPRYTSVQK

SEQ ID NO: 7247 - protein, 464 aa, Zea mays
MVNGEQRADAECTRASLLGRYEIGRTLGEGNFGKVKYARHIATGGHFAIKILDRSKILSLRIDDQIRREIGTLKLLKHPNVVRLHEVAASKTKIYMVLEFVNGGELFDKIAIKGKLSEHEGRRLFQQLIDGVSYCHDRGVYHRDLKPENVLVDRKGTIKISDFGLSALPQHLGSDGLLHTTCGSPNYIAPEVLQNRGYDGSLSDLWSCGVILYVMLVGCLPFDDRNLVVLYQKIFKGDCQIPKWLSPAAQDLLKRILQPNPMKRINVAGIREHEWFKKDYVPAVPHDDDEDVLPSPAPSIKEPIDEPAQEKCTPINAFQLIGMASSLDLSGFFEEEDAAQRKIRFTSTHPPKDLFDKIESVVMEMGFKVHRGAGKLKVLKNSKCSRNSRNPSSLLVCTEVFELGPSLYVVELRKSHGDSTLYRQLCERLSDELGACKTDQIARTESSSDDLSSLDGEAFPLSGF

SEQ ID NO: 7248 - protein, 391 aa, Clostridium tetani E88
MSLDVKEEALRIHEEKKGKLEIIGTMSVETPRDLSLAYTPGIAAPCLEISKDKEKAYKYTIKGKTVAVITNGTAVLGLGDIGPEAGLPVVEGKALLLKRFGGVNAVPISIDSKDADDIVNTIKNISPGFGGIHLEDIKAPECFYIEDKLKEKLNIPVYHDDQHGTSIAVLAGLYNSLKILKKDIEDIKVVINGAGASGIAIAKLLIKAGVKEIILCDLQGALVEGDSTLNNAQKEIAKVTNRNFEKGSLEDVIKNKDVFIGVSDGNLLTKEMVNSMNKDSIVFALANPVPEIMPEEAKKGGARIIATGRSDFPNQINNVLVFPGIFKGALKVGAKDICNEMKIAAAKGLANLIKDNELNEEYIVPSVFEDGVADAVANEVISIAKKLNLTR

SEQ ID NO: 7249 - protein, 506 aa, Brassica napus
MTSINVKLLYHYVITNLFNLCFFPLTAIVAGKAYRLTIDDLHHLYYSYLQHNLITIAPLFAFTVFGSVLYIATRPKPVYLVEYSCYLPPTHCRSSISKVMDIFYQVRKADPSRNGTCDDSSWLDFLRKIQERSGLGDETHGPEGLLQVPPRKTFAAAREETEQVIIGALENLFKNTNVNPKDIGILVVNSSMFNPTPSLSAMVVNTFKLRSNVRSFNLGGMGCSAGVIAIDLAKDLLHVHKNTYALVVSTENITYNIYAGDNRSMMVSNCLFRVGGAAILLSNKPGDRRRSKYELVHTVRTHTGADGKSFRCVQQGDDENGKIGVSLSKDITDVAGRTVKKNIATLGPLILPLSEKLLFFVTFMGKKLFKDKIKHYYVPDFKLAIDHFCIHAGGRAVIDVLEKNLALAPIDVEASRSTLHRFGNTSSSSIWYELAYIEAKGRMKKGNKVWQIALGSGFKCNSAVWVALNNVKASTNSPWEHCIDRYPVKIDSDSGKSETRVQNGRS

SEQ ID NO: 7250 - protein, 504 aa, Triticum aestivum
  misc_feature (470)..(470): Xaa can be any naturally occurring amino acid
MGSNEGGGCDGKPVVVVPEIKYTKLFINGEFVDAASGKTFETRDPRTGDVLAHIAEADKADVDLAVEAAREAFEHGKWPRMSGYERSRAMNKLADLMEQHIEELAALDGADAGKLLLLGKIIDIPSAVQMLRYYAGAADKIHGESLRVSGKYQGYTLKEPIGVVGIIIPWNFPSLMFFLKISPALAAGCTVVVKPAEQTPLSALYYAHLAKLAGIPDGVINVVPGFGPTAGAAIASHMDVDSVAFTGSGEVGRLIMEASARSNLKTVSLELGGKSPLIIFDDADVDMAVELSRLAIFFNKGEVCVAGSRVYVQEGIYDEFVKRAVVAAQNWKVGDPFDVATNMGPQVDKEQFERVLRYIEHGKSEGATLLTGGKPASDKGYYIEPTIFADVKEDMKIAQDEIFGPVMSLMKFKTVDEAIEKANCTKYGLAAGIITKNLDIANRVSRSVRAGTVWVNCYFAFDPEAPFGGXYKMSGFGRDQGMMAIDKYMQVKSVITAVPDSPWY

SEQ ID NO: 7251 - protein, 382 aa, Aspergillus nidulans FGSC A4
MAPTITALQYYGAKNVRLQQVQPRPCHADEVRIQIAYCGICGSDIHEYLGGPVFSPPPGKKNPYTGAELPVTLGHEISGTIVELGSSVPASDPNLKLGMRVAVNPAMNDRHHGVEKCTACQLGLPNICKRYTSYGFSAAGGGLASEIVVKHYACIPLPDSISLKVGALLEPLAVAWHCIRISGFQRDQTVLILGAGPIGLAILMILRVWGVKTVVISEVAASRKRMARELGADLVLDPTELGSSKDGLDPVVVATQKAMKADGADVTFDCTGLQSTLDTAIAATRPGGTVFNVAIHEKPLMVNLNELTLGERRLTGGICYTDVDFQELIAALEAGKIQAERLITSIVDLDDVIDKALMELIHNKAAHVKILVKPNHVRSVRL

SEQ ID NO: 7252 - protein, 198 aa, Gossypium barbadense
MCGGAIISDFVAPKYDRKLTGDDLWSELDIFSDLLGFDNNGKSFVNHQFHNNNNNKLINPKDNQLNKERSETIQKTSQVTKKVEKTQRTRKNFYRGIRQRPWGKWAAEIRDPQKGVRVWLGTYNTAEEATRAYDEAAKRIRGDKAKLNFPQTPTKNQAASPALTLLPPAKKRCIVPGVNSTEFTRLDSPPISLWVLGV

SEQ ID NO: 7253 - protein, 634 aa, Glycine max
  misc_feature (479)..(479): Xaa can be any naturally occurring amino acid
MGSNRTIVWFRRDLRIEDNPALAAAAKEGSVLPVYIWCPKEEGQFYPGRVSRWWLKQSLAHLDQSLKSLGSRLVLIKTHSTVTALVECVKAIQATKVVFNHLYDPVSLVRDHNIKEKLVEQGISVQSYNGDLLYEPWEVYSESGRAFTTFNAFWKKCLHMQMDIVSVVPPWQLIPAEGKVEECPLEELGLENESEKPSNALLGRAWSPGWRNADKALTEFVEQHLLDYSKKRLKVGGDSTSLLSPYLHFGELSVRKVFQVTRMKQILWTNEGNSAGEESVNLFLRAIGLREYSRYLCFNFPFTHEKALLGHLKFFPWNPDADIFKNWRQGRTGFPLVDAGMRELWATGWIHNRIRVIVSSFAVKMLLLPWKWGMKYFWDTLLDADLESDILGWQYISGGLPDGHELERLDNPEIQGVKFDPQGEYVRQWLPELARMPTEWIHHPWDAPLTVLRAAGVELGQNYPKPIIDIELARERLTXAIFKMWESEAAAKAAGSEPRDEVVVDNSNSLENLDTQKVVVLGKAPCATISANDQKVPALQDSKNEPPTRKRPKHMIEEGQNQDHSQNHNKDTGLSSIDQDICSTADSSSCKKQCASTSSYSFSVPQQCSSSSNLKWPWQDQIDMEQSSSKDGAM

SEQ ID NO: 7254 - protein, 475 aa, Sinorhizobium meliloti
MDTQLLIGSRFEAGTEAEEHILNPRTGAGIIDLAEASHAQIDAAVDAAERAFVGWSQTTPAERSNALLKIADAIEKEADEFAALEALNCGKPINAVKNDELPAIIDCWRFFAGAVRNLHAPAAGEYLPGHTSMIRRDPIGIVGSIAPWNYPLMMMAWKLAPAIGGGNTVVFKPSEQTPLTALKLARLIADILPEGVVNVITGRGETVGNALINHPKVGMVSITGDIATGKKVLAAAAKTVKRTHLELGGKAPVIVYGDADLEAVVNGIRTFGYYNAGQDCTAACRIYAEAGIYEKLVADLTSAVSTIRYNLDDDTENEIGPLISRRQRDRVASFVERAADQKHIEITTGGRTGSDEGFFFQPTVVAGATQEDEIVRREVFGPVVSVTRFTGKDDAVAWANDSDYGLASSVWTKDISKAMRAASRLQYGCTWINTHFMLTNEMPHGGIKQSGYGKDMSVYALEDYTAVRHIMINHG

SEQ ID NO: 7255 - protein, 449 aa, Bacillus cereus G9241
MKTKQTDELLAKDEQYVWHGMRPFSPNSTMVGAKAEGCWVEDIQGKRYLDGMSGLWCVNSGYGRKELAEAAYKQLQTLSYFPMSQSHEPAIKLAEKLNEWLGGEYVIFFSNSGSEANETAFKIARQYYAQKGEPHRYKFMSRYRGYHGNTMATMAATGQAQRRYQYEPFASGFLHVTPPDCYRMPEIERENIYDVECVKEVDRVMTWELSETIAAFIMEPIITGGGILMPPQDYMKAVHETCQKHGALLISDEVICGFGRTGKAFGFMNYDVKPDIITMAKGITSAYLPLSATAVKKEIYEEFKGKGEYEFFRHINTFGGNPAACALALKNLEIMENENLIERSAQMGSLLLEQLKEEIGEHPLVGNIRGKGLLVGIELVNDKETKEPIDNDKIASVLNACKEKGLIIGRNGMTTAGYNNVLTLAPPLIISSEEIAFVVGTLKTAMERI

SEQ ID NO: 7256 - protein, 159 aa, Capsicum frutescens
MSMIPSFFGGRRSNIFDPVSLDLWDPFEGFPISSTIANTPSSARETSAFPNARIDWKETPQAHIFKVDVPGIKREEVKVQVEEGRILQITGERSREQEEKNDQWHRMERSSGKFLRRFRLPENTKMGEIKAAMENGVLTVTVPKEEEKRSEVKAIDISG

SEQ ID NO: 7257 - protein, 489 aa, Halobacterium sp. NRC-1
MPAAQPPGMQLFWHRRDLRTTDNRGLAAAAPGVTAVDGGHDQGPVAAVFCFDDEVLAHAAPPRVAFMLDALAALRERYRDLGSDLIVRHGDPAAVLPAVANDLDATRVVWNHDYSGLATDRDAGVRDALDAAGVAHAQFHDAVHHRPGEIRTNAGDPYSVYTYFWRKWQDREKNPPAPEPEPADLAADTALADTSPLPSVQELGFAEPEAAVPDAGTAAARSLLDAFRESGDIYRYEDRRDYPHEEPTSRLSPHLKFGTIGIRTVYEAARAAKSDADTDDERENVAAFIGQLAWREFYAQVLYFNQNVVSENFKAYEHPIEWRDDPAALQAWKDGETGYPIVDAGMRQLRAEAYMHNRVRMIVAAFLTKDLLVDWRAGYDWFREKLADHDTANDNGGWQWAASTGTDAQPYFRVFNPMTQGERYDPDADYITEFVPELRDVPADAIHSWHELSLSERRRHAPEYPDPIVDHSQRREDAIAMFERARGDE

SEQ ID NO: 7258 - protein, 318 aa, Thermobifida fusca
MPLDPETRALIDELVSGSPPGEAVGVPDASLHSSLRERRIVGPGVALVRDLTIPSPAGGIPARLYHPAPDNPATGCAVFFHGGGYVFGNLDTHDHIARLLAAESRAAVVAVDYRLAPQHRFPAAVEDAFTATRWVAEHATRLGVDAARLAVVGDSAGGGLAAAVALLVRDGGPPLAAQVLIYPVIDLTGYPVTADTPYPSRIAHGEGCFLTTAAMQHVVEQYLADPADAADFRASPIRAADLSGAAPALVVSAEFDPLRDEAEAYARALAAVGVPATTVRINGGVHGMFGLGPVLPLSRHAELPVIALLRDTLQPPQR

SEQ ID NO: 7259 - protein, 334 aa, Arabidopsis thaliana
  misc_feature (26)..(26): Xaa can be any naturally occurring amino acid
  misc_feature (51)..(51): Xaa can be any naturally occurring amino acid
  misc_feature (54)..(54): Xaa can be any naturally occurring amino acid
  misc_feature (109)..(109): Xaa can be any naturally occurring amino acid
  misc_feature (149)..(149): Xaa can be any naturally occurring amino acid
  misc_feature (155)..(155): Xaa can be any naturally occurring amino acid
  misc_feature (242)..(242): Xaa can be any naturally occurring amino acid
  misc_feature (278)..(278): Xaa can be any naturally occurring amino acid
SDAKETSATDLKRPREEDDNGGAATXETENGDQKKEPACFSTVIPGWFSEXSPXWPGEAHSLKVEKVLFQGKSDYQDVIVFQSATYGKVLVLDGVIQLTERDECAYQEXITHLPLCSIPNPKKVLVIGGGDGGVLREVARHASIEQIDXCEIDKXVVDVSKQFFPDVAIGYEDPRVNLVIGDGVAFLKNAAEGSYDAVIVDSSDPIGPAKELFEKPFFQSVARALRPGGVVCTQAESLWLHXDIIEDIVSNCREIFKGSVNYAWTSVPTYPSGVIGFXLCSTEGPDVDFKHPLNPIDESSSKSNGPLKFYNAEIHSAAFCLPSFAKKVIESKAN

SEQ ID NO: 7260 - protein, 267 aa, Triticum aestivum
  misc_feature (2)..(2): Xaa can be any naturally occurring amino acid
  misc_feature (56)..(57): Xaa can be any naturally occurring amino acid
  misc_feature (192)..(192): Xaa can be any naturally occurring amino acid
  misc_feature (203)..(203): Xaa can be any naturally occurring amino acid
  misc_feature (230)..(230): Xaa can be any naturally occurring amino acid
MXFLIFVLLAMAMKIATAARELNPSNKELQSPQQSFSYQQQPFRQPQQPFYQQPQXXFPQPQQAFPHQPQQQFPQPQQPQQQFPQPQQPQQPFPQPQQAQLPFPQQPQQPFPQPQQPQQPFPQSQQPQQPFPQPQQPQQSFPQQQQPLIQPYLQQQMNPCKNYLLQQCNPVSLVSSLVSMILPRSDCQVMQXQQCCQQLAQDXPAKLQVCKPSISVVHSNRHASKEQQQXNTRFSGQLVQAPSKGKGIIQPQQPGIGGRFGPFQNKV

SEQ ID NO: 7261 - protein, 122 aa, Cucumis sativus
MIQPQTLLNVADNSGARELMCIRIIGASNRRYAHIGDVIVAVIKKAVPNTPLERSEVIRAVIVRTCKELKRENGMIIRYDDNAAVVIDQEGNPKGTRIFGAIARELRQLNFTKIISLAPEVL

SEQ ID NO: 7262 - protein, 411 aa, Methanococcus maripaludis S2
MVTADLFNNPTNIMDALNTLANSSDVMFLIFTGAFIFIMHLGFAMLEGGQVREKNVNNAMMKNMGDWIIGCISWLLVGSVIARTLNPADFFIWWGKIASATPFLTNNGLELANWFLGLVFAATAATIVAGGIAERIKFKSYILISIVITALLYPFFSYLGPWGAGVIPFHDYAGSLMVHGVGGFLALGLIAAIGPRFGRFVNKKAITIPGHNIPMSILGAYILAFGWYGFNVGSSLALSDISGLVCATTTLAMAGGGLGGCLFSKNDVLYTANGLLAGTVAICAGTDIVSPLGALIIGFIAGSQVPLIFKIVEKMGLDDVCGVIPVHATSGALGAILAGIFGMTAFGGVGGVSLTEQIIATLICAVYGTGAGFILGKLVGAVTGGLRVKESEEKAGLDISIHKLPAYPKEN

SEQ ID NO: 7263 - protein, 494 aa, Bacillus anthracis str. Ames 0581
MLTTNIELKPKVKAFLDEEIKMFINGEFVPSISGKTFETYNPATEDVLAVVYEAQEEDIDVAVKAARSAFESGPWVEMTTAERAHLIYKLADLIEEHGEELAQLEALDNGKPYQVALDDDIAATVENYRYYAGWATKIIGQTIPISKDYLNYTRHEPVGVVGQIIPWNFPLVMSSWKMGAALATGCTIVLKPAEQTPLSLLYTAKLFKEAGFPNGVVNFVPGFGPEAGAAIVNHHDIDKVAFTGSTVTGKYIMRQSAETIKHVTLELGGKSPNIILEDADLEEAINGAFQGIMYNHGQNCSAGSRVFVHRKHYETVVNELVKMANNVKLGAGMEKDTEMGPLVSKKQQERVLHYIEQGKAEGATVAAGGERAFEKGYFVQPTVFTDVTDDMTIVKEEIFGPVVVVLPFDSTEEVIERANRSSYGLAAGVWTQNIKTGHQVANKLKAGTVWINDYNLENAAAPFGGFKQSGIGRELGSYALDNYTEVKSVWVNIK

SEQ ID NO: 7264 - protein, 274 aa, Mesorhizobium sp. BNC1
MQTVTAHGATIPALGFGVFRMSDAEVERIIPAALEAGFRHFDTAQIYQNEAALGRALERAGARREDLFLTTKVWVDNYSADKFAASVDESLEKLKVDQVDLLLLHWPAHEVPVAAQIERLNAVKDAGKTRFIGVSNQNIAQMRESIARSAAPIVTNQVELHPYLPQHSLVAAARDSAVAVTAYYGMADGAVPKDPVLQQIGARYGKSAAQVGLRWLVQQGYVALSKTANPARVAENIAIFDFALDETDMAAIAKLARPDGRLVSPPGLAPDWDA

SEQ ID NO: 7265 - protein, 482 aa, Rhodococcus rhodochrous
MSMQYDSLFIGGDWIAPSSSKRITAISASTEQPIGSVPEAQEADVDAAVAAARRALDDPAGWAHWAPAARAAAIERLADVLERRAEDVVQCVSAQNGMPVAVARQLEGVFPVVLLRYYAGLARDTATEETRPGLFGGSTLVCREPLGVVGAIVPWNFPQTLAAFKYAPALAAGCTLVIKPSPETVLDAFVFAEAVAEAGIPAGVVNVVPGGREVGAYLVEHPGVDKISFTGSTAAGRSIGEVCGRLLRPVTLELGGKSAAIVLDDAGLDLQTMSEKLFAATLLNNGQTCFLGTRVLAPRSRYSEIVDLFTDLAGTLKVGDALDDTTQIGPMATAAQRDRVEQYIAKGLGDGARITIGGGRPADQDKGWFVEPTIFADVENNHTIAQEEIFGPVLSVIPYSDEDEAVRIANDSDFGLGGTVWTNDPDRGLALAKRVQTGTIGINGYLPEPTAPFGGVKASGLGRELGPEALSNYQQLKSIYLD

SEQ ID NO: 7266 - protein, 280 aa, Vigna radiata
GEGTYGVVYKARDRVTNEAIALKKIRLEQEDEGVPSTAIREISLLKEMQHRNIVRLQDVVHSGKRLYLVFEYLDLDLKKHMDSSPEFAKDLRQVKMFLYQILCGIAYCHSHRVLHRDLKPQNLLIDRSTNSLKLADFGLARAFGIPVRTFTHEVVTLWYRAPEILLGSPRYSTPVDIWSVGCIFAEMVNQRPLFPGDSEIDELFKIFRILGTPNEDTWPGVTSLPDFKSAFPKWQPKDLKTVVPNLDPAGLDLLSRMLHLDPSKRITGRSALEHEYSERH

SEQ ID NO: 7267 - protein, 499 aa, Escherichia coli
MTEPHVAVLSQVQQFLDRQHGLYIDGRPGPAQSEKRLAIFDPATGQEIASTADANEADVDNAVMSAWRAFVSRRWAGRLPAERERILLRFADLVEQHSEELAQLETLEQGKSIAISRAFEVGCTLNWMRYTAGLTTKIAGKTLDLSIPLPQGARYQAWTRKEPVGVVAGIVPWNFPLMIGMWKVMPALAAGCSIVIKPSETTPLTMLRVAELASEAGIPDGVFNVVTGSGAVCGAALTSHPHVAKISFTGSTATGKGIARTAADRLTRVTLELGGKNPAIVLKDADPQWVIEGLMTGSFLNQGQVCAASSRIYIEAPLFDTLVSGFEQAVKSLQVGPGMSPVAQINPLVSRAHCDKVCSFLDDAQAQQAELIRGSNGPAGEGYYVAPTLVVNPDAKLRLTREEVFGPVVNLVRVADGEEALQLANDTEYGLTASVWTQNLSQALEYSDRLQAGTVWVNSHTLIDANLPFGGMKQSGTGRDFGPDWLDGWCETKSVCVRY

SEQ ID NO: 7268 - protein, 160 aa, Triticum aestivum
  misc_feature (100)..(100): Xaa can be any naturally occurring amino acid
  misc_feature (113)..(113): Xaa can be any naturally occurring amino acid
  misc_feature (116)..(116): Xaa can be any naturally occurring amino acid
  misc_feature (118)..(118): Xaa can be any naturally occurring amino acid
  misc_feature (131)..(131): Xaa can be any naturally occurring amino acid
  misc_feature (134)..(134): Xaa can be any naturally occurring amino acid
PAVMASSATTVAPFQGLKSTAGLPVSRRSGSAGLSSVSNGGRIRCMQVWPIEGIKKFETLSYLPPLSTEALLKQVDYLIRSKWCPASIQQVGSVSVSTTXPRYYDGRYWDMWXLPXFXCTDQPSAQQVEEXRRXLTLAVQFDKQMLTHASGTARASKSIE

SEQ ID NO: 7269 - protein, 499 aa, Ruegeria sp. PR1b
MNAASFTKSFWHDEAKKLEFRTKHLINGEWVDSEDGTTFDTINPATGETIAKVASGKAADIDKAVKNARETFKSGVWSMLAPRERLAVIERFSALIEENAVEFALLDCLDMGKPVMDMINIDIPESVKNLKFFAETADKVHGSLTATDPSVVHYILRQPLGVVGLITPWNYPLMMAAWKLGPALITGNSVVLKPAEQAPLSCALLGDLFLKAGGPAGVLNVVQGLGEEAGKAIGLHPDVDKIGFTGSTEVGKLLMTYAGQSNMKRVTTECGGKTPQIVFADYDNLDKAVTSAVYGIYGNMGEMCNAGSRILVQRPIYDEFIKRFSELTASNMVVGDPLDPDTTIGPLVTVEQQERVLEYIEIGKKEGATLALGGGRGLNSGCYVEPTLFTDVTNSMRVAQEEIFGPVGTVIPFDTAEEALEIANDSLYGLAAAVWTNDLKTAHRFGRDLESGFVWVNTFDIGDMTSIWGGYKQSGNGRDTCIEALSQYTQTKSVWMDMA

SEQ ID NO: 7270 - protein, 146 aa, Clostridium tetani E88
MFDMIPFKRNNSMKRDSYFDEFFDNFFNNDFLVPIKFPKNNFRADLKETNNEYIIEADLPGISKDAVKVNYSNNNLVISAKREDIIENKDENYIRRERSYGEFKRAFYVDNVDENNIKASFKNGVLRINLTKLEDTTKARKQIEIE

SEQ ID NO: 7271 - protein, 110 aa, Triticum aestivum
  misc_feature (76)..(76): Xaa can be any naturally occurring amino acid
MDSQFGALERGGSRQRRGPALARPNTAKRHMQQQRANAADKKVVIPNYFGIEAFFVLACLTVSLLILPLVLPPLPXPPSLLLFVPVCLLILLMVLAFMPNDVRSMATSYL

SEQ ID NO: 7272 - protein, 230 aa, Triticum aestivum
MKTLLILTILAMATTIATANMQVDPSGQVQWPQQQPFPQPQQPFCQQPQRTIPQPHQTFHHQPQQFPQTQQPQQPFPQPQQTFPQQPQLPFPQQPQQPFPQPQQPQQPFPQSQQPQQPFPQPQQQFPQPQQPQQSFPQQQQPAIQSFLQQQMNPCKNFLLQQCNHVSLVSSLVSIILPRSDCQVMQQQCCQQLAQIPQQLQCAAIHSVAHSIIMQQEQQQGVTILRPLFQ

SEQ ID NO: 7273 - protein, 292 aa, Zea mays
MPSVEVEVQVGGAGGWRPKQQHHHPLEIRQVWADNVDREFKLIRAAIERFPYVSMDTEFPGVIHHPPPAVHHSTLTAPQRYALLKSNVDALHLIQVGLALAPSPGSPPALAFQINLRGFDPRVHRHAPDSVRLLAASGLDLAAHRARGVPARAFAALLASSGLICNPAVAWVTFSSAYDFAYLVKLLMGRKLPRALPDFLRYVRVYFGAAVYDVKHMARVACASHGEVALLGGLERVAAALRVRRAAGQGHQAASDSVLTWDTFREMARIYFPKEGSLEPCAGVLYGLELPN

SEQ ID NO: 7274 - protein, 272 aa, Leptospirillum ferrooxidans
GPQDRKNTPKMAKSNAHCGPKHSPLLFLGTFILWLGWFGFNPGSTLMATTPSVGYFAYIAMTTNLAAAAGALAAMFTAWKILGAPDMSMVANGAIAALVAITASCAFVDPWASVVIGAVAGVIAVVGVLAIDRIHIDDPVGAVSVHGMAGIWGTLSNGLFATPDRVKLLAVGTPGLFYGGGFHQLLVQAEGVSASLAYVFFVSLLVFYVIKVTIGLRVSEHDEVSGLDISEHKMWGYPEMFSGGFGGGTAPGELAGRSEMSMSAAKPVTQRT

SEQ ID NO: 7275 - protein, 506 aa, Bacillus sp. KSM-K16
MAYQQPNTEGALVHFKERYDNFIGGEWVAPVNGRYFENRSPVTGKPFCEVARSSAEDVELALDAAHNAKASWGKMPAAQRANLLNKVADRIEENLEMLAVAETWDNGKPIRETLNADIPLAVDHFRYFAGVIRAQEGTLSQIDENTVAYHFQEPLGVVGQIIPWNFPILMAVWKLAPALAAGNCVVLKPAEQTPASIFVLLELLSDLLPPGVVNVVSGFGLEAGKPLASSPRIAKIAFTGETTTGRLIMEYASANLIPVTLELGGKSPNIFFRDVMEKEDDFLDKAIEGFVLFALNQGEVCTCPSRALIDETIYDAFIEKALQRVAAIKQGNPLDPETMMGAQASEEQLEKILSYLAIGKEEGAEVLAGGNQRQLSGDYSGGYYVEPTVFKGTNNMRIFQEEIFGPVVSVATFKDADEALRIANDSLYGLGAGVWTRNINTAYRFGRQIEAGRVWVNCYHAYPAHAAFGGYKKSGVGRETHLMMLNHYQQTKNMLVSYNDDSQGFF

SEQ ID NO: 7276 - protein, 219 aa, Coxiella burnetii RSA 493
MYRYGNLFQTPILRSPLEDQFSDYVLWRLDCEPFVEVLERTCRMNDEKLRTQNVEATLFDSAKKPEISFADYIWRIVAYARLTHSQMIHTLIYLDRCQENFFLTSLNFYRLFLVAALVAQKFHQDDSFSNKSFADLVGITVKELNILEAKFLFAISFSLYVLPKTYKEYNRIVGGQRINRQLVEARRSNLSFFSLFPHTVNTFPHRKRNSYHFLHRPRF

SEQ ID NO: 7277 - protein, 430 aa, Oryza sativa (indica cultivar-group)
AAAGAKEDVKEDGAAAAAAAADYDGSPPPPRGKKKKDDEERSSSLPEEKDAKNGGGDEVLSAVTTEDSSAGAAKSCSPSAEGHSKRKPSSSSSSAAAGKNSHGKRKVKVDWTPELHRRFVQAVEQLGIDKAVPSRILELMGIECLTRHNIASHLQKYRSHRKHLMAREAEAASWTQKRQMYTAAAAAAAVAAGGGPRKDAAAATAAVAPWVMPTIGFPPPHAAAMVPPPPHPPPFCRPPLHVWGHPTAGVEPTTAAAPPPPSPHAQPPLLPVWPRHLAPPPPPLPAAWAHGHQPAPVDPAAYWQQQYNAARKWGPQAVTPGTPCMPPPLPPAAMLQRFPVPPVPGMVPHPMYRPIPPPSPPQGNKLAALQLQLDAHPSKESIDAAIGDVLVKPWLPLPLGLKPPSLDSVMSELHKQGIPKVPPAASGAAG

SEQ ID NO: 7278 - protein, 186 aa, Thermus thermophilus
ATGPRYKVPMRRRREARTDYHQRLRLLKSGKPRLVARKSNKHVRAQLVTLGPNGDDTLASAHSSDLAEYGWEAPTGNMPSAYLTGLLAGLRAQEAGVEEAVLDIGLNSPTPGSKVFAIQEGAIDAGLDIPHNDDVLADWQRTRGAHIAEYDEQLEEPLYSGDFDAADLPEHFDELRETLLDGDIEL

SEQ ID NO: 7279 - protein, 262 aa, Triticum aestivum
  misc_feature (234)..(235): Xaa can be any naturally occurring amino acid
  misc_feature (241)..(242): Xaa can be any naturally occurring amino acid
  misc_feature (248)..(249): Xaa can be any naturally occurring amino acid
  misc_feature (253)..(255): Xaa can be any naturally occurring amino acid
MERKSAILMNRYELGRMLGQGTFAKVYHARSLATNQSVAIKVIDKDKVLRVGMIDQIKREISIMRLVRHPNIVQLHEVMASKSKIYFAMEYVRGGELFARVAKGRLKEDAARKYFQQLIGAVDFCHSRDVYHRDLKPENLLVDEHGNLKGSDFGLSALKECQKQDGLLHTTCGTPAYVAPEIINKKGYDGEKADIWSCGVILFVLLAGYLPFQDSNLMEMYRKISKGDVRYPQXXSSDARXXLSRLLXXNPNXXXTMDKLIE

SEQ ID NO: 7280 - protein, 430 aa, Brucella suis 1330
MSDKTASFTLDGKTFDLPVRKGTVGPDVVDIGPLYKNSHAFTYDPGFTSTASCESKITYIDGDEGVLLYRGYPIDQLAEHGDFLETCYLLLYGELPTATQKADFDYRVTRHTMLHEQMTKFFTGFRRDAHPMAVMVGCLGAMSAFYHDSTDITDPHQRMVASIRLIAKVPTLAAMAYKYHIGQPFVYPKNDLDFASNFLHMCFTVPCEEYKVNPVLARAMDRIFILHADHEQNASTSTVRLAGSSGANPFACIAAGVACLWGPAHGGANEAALNMLSEIGSVDRIPEYIARAKDKNDPFRLMGFGHRVYKNYDPRAKIMQKTCHEVLGELGIKDDPLLDVAMELERIALTDEYFIEKKLYPNIDFYSGITLKALGFPTEMFTVLFALARTVGWVAQWKEMIEDPQQKIGRPRQLYTGATERDYVPLAKRK

SEQ ID NO: 7281 - protein, 325 aa, Triticum aestivum
  misc_feature (146)..(146): Xaa can be any naturally occurring amino acid
  misc_feature (165)..(165): Xaa can be any naturally occurring amino acid
MKTLLILTIIAVALTTTTANIQVDPSGQVQWPQQQQPFPQPQQPQQIFPQPQQTFPHQPQQAFPQPQQTFPHQPQQQFPQPQQPQQPFPQQPQQQFPQPQQPQQPFPQQPQQQFPQPQQPQQPFPQPQQPQLPFPQQPQQPFPQPXQPQQPFPQLQQPQQPLPPXPKQHWLTPIPPCKTFLVFALLALAAASAVAQISQQQQQPPFSQQQQPPFSQQQQSPFSQQQQQPPFLQQQQPPFSQQPPISQQQQPPFSQQQQQGIQIMRPLFQLVQGQGIIQPQQPAQLEVIRSLVLGTLPTMCNVFVPPECSTTKAPFASIVADIGGQ

SEQ ID NO: 7282 - protein, 95 aa, Zea mays
YPPVHPGNVGRLRMRLTKGKSVVAKEFYSSSMQLCGVRGGGEAASQAMFWRPRNDLSLVLAFESTRERNAAIMLARRFAVDCNIILAGPGDKTPW

SEQ ID NO: 7283 - protein, 267 aa, Escherichia coli K12
MAIPAFGLGTFRLKDDVVISSVITALELGYRAIDTAQIYDNEAAVGQAIAESGVPRHELYITTKIWIENLSKDKLIPSLKESLQKLRTDYVDLTLIHWPSPNDEVSVEEFMQALLEAKKQGLTREIGISNFTIPLMEKAIAAVGAENIATNQIELSPYLQNRKVVAWAKQHGIHITSYMTLAYGKALKDEVIARIAAKHNATPAQVILAWAMGEGYSVIPSSTKRKNLESNLKAQNLQLDAEDKKAIAALDCNDRLVSPEGLAPEWD

SEQ ID NO: 7284 - protein, 472 aa, Rhodobacter sphaeroides 2.4.1
MRNIDRFFIGGAWTAPLGTDRHRLVNPATEEEIAAIPMASTEDVDRAVTAARAAFEGWQASSKEERLLLLRRLLDLYNEAYDELAELMTREMGTVARFSREAQAWVGRAHLEAAIEALEAESFEEMRGSTLISKEPIGVCALITPWNWPMNQLVVKVAPALAAGCTVVAKPSEFSPLSSIRFAELVEAAGFPPGVYNHITGAGPVAGEALARHPDVDMISITGSTRAGIAVARAAADTVKRVTQELGGKSANIILPDADLATAVRQGVLDCFGNAGQACKAPARMLVPAERMEEAAALAGAAAEALTVGAPEGEVDLGPVVNESQWRRIQSLIEAGIAEGARLVTGGPGRPDHLPRGWYVRPTVFADVAHGSTIATEEIFGPVVALIPYRDEEEAVRIANDSIYGLAGYIQTGDPETARRIARKLRVGMVYINGAGWDARAPFGGYKQSGNGREHGAWGLADYLETKATAGL

SEQ ID NO: 7285 - protein, 170 aa, Triticum aestivum
MAAFLRSKCSSVGRAMMGSLGNNLYGGATSSIETVARPSRSDAVCQQIRTFIQMRTNLKVVDNSGAKRVMCIQSLRGKKGARLGDMIIGSVKEAQPRGKVKKGDVVYGVVVRAAMKKGRSDGSEVQFDDNAIVIVNNKGELIGTRVFGPVPHELRKKKHLKILALAEHIV

SEQ ID NO: 7286 - protein, 488 aa, Listeria innocua Clip11262
MSIKETSLPKVQTKLFINGKWIDGDNKETKDIVNPANGEVIAKIAQAGPKETKQAIKAAKDAFPDWAKMELADRVKLLHNIADLMEERADTLAKIMTLEQGKPLKESKGEVLTGAENFRFAAEEARRLYGETIPAPNNHAFIVKKQPIGVVAAITPWNFPGGMVTRKLAPALATGNTIVLKPSGDTPLSALAIFEIFEEAGLPKGVANIVMGSSKEIGETLTDSDDVRKLTFTGSTKVGQTLFKQSADTLKKISLELGGHAPFIVFADANLEAAVDDLITAKFRNNGQVCVSPNRIFVAKEIKEKFTKTLVAKVEKLKVGNGLDDVNVGPLIREDAIDKIDKQLKNATDKGAKVLTGGERLTGSDYDKGNFYKPTVLDNVTREMDIFYEETFGPVIPLIVFENEDEAIEMANDSEFGLASYFYTKDLARVEKVGAALEYGMVGANEIAISNPETPFGGVKHSGFGRENGHYGMEEYIQVKFINLKYRD

SEQ ID NO: 7287 - protein, 133 aa, Triticum aestivum
  misc_feature (28)..(28): Xaa can be any naturally occurring amino acid
  misc_feature (49)..(49): Xaa can be any naturally occurring amino acid
  misc_feature (90)..(90): Xaa can be any naturally occurring amino acid
  misc_feature (110)..(110): Xaa can be any naturally occurring amino acid
  misc_feature (113)..(113): Xaa can be any naturally occurring amino acid
  misc_feature (117)..(117): Xaa can be any naturally occurring amino acid
  misc_feature (125)..(125): Xaa can be any naturally occurring amino acid
MAPTVMASSATSVAPFQGLKSTAGLPVXRRSNGASLGSVSNGGRIRCMXVWPIEGIKKFETLSYLPPLSTEALLKQVDYLIRSKWVPCLXFNKVGFIFREQNATPGYYHXRYXWTMXWKLPMFGXCTDPTQGD

SEQ ID NO: 7288 - protein, 440 aa, Glycine max
  misc_feature (184)..(184): Xaa can be any naturally occurring amino acid
  misc_feature (268)..(268): Xaa can be any naturally occurring amino acid
  misc_feature (295)..(295): Xaa can be any naturally occurring amino acid
MSGKQAVRPRTRVGKYELGKTIGEGSFAKVKFAKNVENGNHVAIKILDRNHVLRHKMMEQLKKEISAMKMINHPNVVKIYEVMASKTKIYIVLELVNGGELFNKIAKNGKLKEDEARRYFHQLINAVDYCHSRGVYHRDLKPENLLLDSNGVLKVTDFGLSTYAQQEDELLRTACGTPNYVAPXEVLNDRGYVGSTSDIWSCGVILFVLMAGRRRQGYWDGRSIFFPFVLILLCNECSTRAYPAWKIVIALFDQLSKLKKEELKKDHXWFKKGYKPTTFVEEEDVKVDDVAAAFXDSKENLVTERKEKPVSMNAFELISRSQSFNLENLFEKQTQGIVKRETHFTSQRPANEIMSKIEEAAKPLGFNVHKRNYKMKLQGDKSGRKGHLSVATEVFEVAPSLHMVELRKTGGDTLEFHKFYKSFSSSSGLQDIVWHSEAKQ

SEQ ID NO: 7289 - protein, 170 aa, Glycine max
MADSDNDSGGAHNGGKGSEMSPREQDRFLPIANVSRIMKKALPANAKISKDAKETVQECVSEFISFHSPGGLAGECQKEKRKTINGDDLLWAMTTLGFEEYVEPLKVYLHKYRELEGEKTAMMGRPHERDEGYGHATPMMIMMGHQQQQHQGHVYGSGTTTGSASSARTR

SEQ ID NO: 7290 - protein, 377 aa, Lactuca sativa
MGEVVKEAGVIENLRSVVFKESESLEGSCAKIQGYDFNTGINYSQILKSLISTGFQASNLGDAIETVNQMLDWRLSHEQVTEDCSEEESNPAYRESVKCKIFLGFTSNLISSGVRDIIRYLTQHHMVDVIVTTTGGIEEDLIKCLADTYRGEFSLPGAALRSKGLNRIGNLLVPNDNYCKFEDWIIPIFDQMLQEQNTQHVLWTPSKVISRLGKEINNESSYLYWAYKNDIPVFCPGLTDGSLGDMLYFHSFRNPGLVIDVVQDIRAINSEAVHANPRKTGMIILGGGLPKHHICNANMMRNGADYAVFINTAQEFDGSDSGARPDEAVSWGKIRGSAKSVKVHCDATIAFPLLVAETFAAKREGEMKNVESTKALV

SEQ ID NO: 7291 - protein, 388 aa, Ajellomyces capsulatus
MFSLRTAQPAQSLFRAATNTYSTSLPRSAIAARSFATVQSDIFKPTKYGGKYTVTLIPGDGIGTEVAESVKTIFKADNVPIEWEQVDVSGLDAGNKHSEDLFKESIASLKRNKLGLKGILHTPVERSGHQSFNVALRQELDIYASIVLIKNIPGYKTRHDNVDLCIIRENTEGEYSGLEHQSVSGVVESLKIITRAKSERIAKFAFSFALANNRKKVTCIHKANIMKLADGLFRSTFHKVAESYPTLETNDMIVDNASMQAVARPQQFDVMVMPNLYGGILSNVGAALVGGPGIVPGCNMGRDVAVFEPGCRHVGLDIKGKDQANPTALILSGSMLLRHLGLDEHANRISKAVYDVIGEGVTRTRDMGGQASTHEFTRAVLDKMESAL

SEQ ID NO: 7292 - protein, 1807 aa, Phytophthora infestans
MPGPDDDVREPTAAARTNNSGYGLRAAPSSITSGLDSVVSVNSYRSSELNAEEVNVDDQECADSDILESPNDGMTIMNDDDADLSEEEEEVMENSIDFSVNRATVTKAGVIPCCVFVGRVRWGTTDWEIYFGQKQLLRLHFNLHLYSLFNRHKLLRGVHLPCTIWREKRAEKRVMDVYVVQDYIRQLLKDRDLRNSEPLLSFLEVSPSRAMLRLGPSLKEGYVHMRINGPFQLPLYTCFNRTIEALYRHLYRAWMRIAFVSAIVGFIFPICLVIVTSLPTFFSPQKELVNSDSGTKEVSTKLNTAGVFLGLAVLGGILFFAVFVYKFFQHRLGVIRRWVVLKPSCFAAYRNRNDREPSEVFLFDKNFTARKGSYRQGVSWMPSGLVVGSKAGDIEIDTGHYYTRLTAFVALMGVCYGIMRLSNSIYDFEYLSLDKSMGVPITNASGYENWTESRDAEYCGYYFIVPKGTTVYVESKDDSAVISQLQMPSSNSMTANLGFFWQSDSMGYSLNVITNAVGAGTMVSVVKPIDAKNDRFFESGTNYSMPTVGNLTLEGVKTDIDVQSFSNVESFCAITVRIAPLTWRSYVYYILFLFAGGIIAPVVGFLANYFVTYLGIWHPHVRRDHWFRCVRRLQKLKRQETSTRFNSFAPQHISTIDDDESATITAKAKAAKLAIGNTPTSNINQVVDSVVKQEAETASRMGTGNLAPASSRVDSSTQSEDSFEAPKPPPSSVSWHVDAEDTYAAMYKAISNAKYEILIAGWWVCPDLFLLRPGRKLPPREADEDPDGQQVNKTMLRQVLMKKAEAGVKIYVLIYREVKLALTLNSAYTKRSLMVHPNIRVLRDPIFQIQSLGFWSHHEKIVCIDQSLAFVGGLDLCFGRYDHHGHPISDPSDDPVWTGKDYSNPIIKDFVRVNKPFEDLIDRASQPRMPWHDVHCSISGPPVQDVAYHLIQRWNFVCSKNDYQLRTGWCICFRSRRFKFLPKCLVPMDFNGWTLQYPSSDPEPMRDGSTRTTIPLVREDSLSMVEPFQVVQSVNPMYPCTATGPQWPPTSSLHPINPMRPPLTSASTTTGPLDDGEVLRAQRGESILQVFHPSANICNIQVCRSVSMWSAGVPTEASIQAAYMDVIANSKHFLYIENQFFVSGMDGNGIVRNRILQALVDRIERAVQRDEKFRVYVVMPLLPAFEGNIRSHELTNLHAVMHWQFATICRGRYSLFEALKGVTNHPENYVAFFGLRKYGIMPNGCAATEQIYIHSKLMIADDRCAILGSANINDRSMNGDRDSEIALVIEDMQYEDGVMNEKPYRRGVAASKLRLQLFREHLGLADDDLSVADPTSDHTWQAIKSTASSNTKIFEAVFDCAPSNRMRAFVNFQSIEVTQIFENQRMNVLKVPGRSHVWDAQNLKDGDYAPWTDVNGVPIAADRVDLRDFEVDNYRDKKKKLFSMDHDGWCYARNFSIFQEVRTMKTDYKKREKLQHLVADRLMAQVRRRRWVKKGLLPPRDPRESSFSLASDDEEHGRFYSLWRRLQQGDFSRSNSVSTPTNFSQLDTDGGISGSVSVGGTNHGRRLYNSNSMPSNASILGDNPTTRPPVLGDAPSYPNSPSVASFQHTPQSPAIATGARSVRSARTSSLLCTGAGVRTRGNTRSARGSFYGMFSVTGNRNLDTDDESSDAGSEYGGGHGIRASLKRWYSTMDVLDFGRRSKFNAEYFDTDEDHLHSDDPLLEDGRGSYHAATREGLLTEEAVEGSDDEDAECQIGHVQTAATVRKEDETRARAQLSEIRGHLVEFPLDFLVEEILKPSVLPADIHI

SEQ ID NO: 7293 - protein, 158 aa, Escherichia coli CFT073
MKLISNDLRDGDKLPHRHVFNGMGYDGDNISPHLAWDDVPVGTKSFVVTCYDPDAPTGSGWWHWVVVNLPADTRVLPQGFGSGLVAMPDGVLQTRTDFGKTGYDGAAPPKGETHRYIFTVHALDVERIDVDEGASGAMVGFNVHFHSLASASITAMFS

SEQ ID NO: 7294 - protein, 178 aa, Glycine max
MASSMISSPAVTTVNRAGAGMVAPFTGLKSMAGFPTRKTNNDITSIASNGGRVQCMQVWPPVGKKKFETLSYLPDLDDAQLAKEVEYLLRKGWIPCLEFELEHGFVYREHNRSPGYYDGRYWTMWKLPMFGCTDASQVLKELQEAKTAYPNGFIRIIGFDNVRQVQCISFIAYKPPGF

SEQ ID NO: 7295 - protein, 107 aa, Brassica napus
MARMKKSLFAILLSSPLLIICLIAFLADPISVGARRLLEEIPKLEIPKLPELPHPELPKFEVPKLPELPKPELPKLPDFPKPELPKMPEIPKPELPKFPEIPKPELP

SEQ ID NO: 7296 - protein, 317 aa, Ralstonia solanacearum
MSWQNWVVSWLARNRIKKPTERLPFDPIATRVNAETRSMPMPVRLPPDWRIVRADGALPGEWIEPADSDSLGDAPPVVFYLHGGGYFFCSPRTHRSITIGLAVHARARVFALDYRLAPEHPFPAAVLDALAGYRGLLAQRVAPSRIVVAGDSAGGGLSLALLVALRDAGDPLPAGAILYSPWTDLAATGASLVENDASDVMFRGAWMARGATLYLGDSGVPADHPLASPLYADFTGLPPLHCYVSTSEVLRDDTLRMAERARAAGVSVSVELGRRLPHVWPIFYPFLPEARKALRQSGDAVRRMTAGRAVPAECAPA

SEQ ID NO: 7297 - protein, 466 aa, Mesorhizobium loti MAFF303099
MVEPALSLNETGAPTNERFHLIQAAPLAGSIGAEARELITSSEDIFVTDQSGRKLIDGPAGMWCINVGHRNQALADTLRDQAMSMTYSTPWYTSNAPAEKLAQMLAERAPGDLNHVFLTTGGSSAVETAIRLVQFYNNVRGLPQKKLLISRQGSYHGSTYLTASLNGRPRDHDWMDGAGDLVRKLTCPNPFHRPANLSLEAFEDFLVNEFRALIEHEGAQQIAAFIAEPIQASGGVLMSPPNYLKRMRALCTENDILFITDEVVTAFGRLGHIFASQDVFGIQPDMITFAKGVTSGYFPLGGVMVSDRLLSELRRLNHPKANFVHGLTYSSHPIGCAVAIRNIELLEDGLLHHAREIGPYFQEQLRTLEELPLVGEVRGAGLMAGIECVADAKTEDRLDLDLTVGKRIDFHCQENGLLVRPLINMCVMSPPLTISRSQIDMMTDALRKGIEATADDLIREGLWKPA

SEQ ID NO: 7298 - protein, 481 aa, Burkholderia cepacia R18194
MANVTYTDTQLLIDGEWVDAASGKTIDVVNPATGKPIGKVAHAGIADLDRALAAAQRGFDAWRKVPAHERAATMRKAAALVRERADAIAQLMTQEQGKPLTEARVEVLSAADIIEWFADEGRRVYGRIVPPRNLGAQQTVVKEPVGPVAAFTPWNFPVNQVVRKLSAALATGCSFLVKAPEETPASPAALLRAFVDAGVPAGVIGLVYGDPAEISSYLIPHPVIRKVTFTGSTPVGKQLAAMAGLHMKRATMELGGHAPVIVAEDADVALAVKAAGGAKFRNAGQVCISPTRFLVHNSIRDEFTRALVKHAEGLKVGNGLEEGTALGALANPRRLTAMASVVDNARKVGARIETGGERIGTEGNFFAPTVIADVPLEADVFNNEPFGPVAAIRGFDKLDDAIAEANRLPFGLAGYAFTRSFANVHLLTQRLEVGMLWINQPATPWPEMPFGGVKDSGYGSEGGPEALEPYLVTKSVTVMAV

SEQ ID NO: 7299 - protein, 269 aa, Archaeoglobus fulgidus DSM 4304
MVWFFEYYDGCGLAIKVKKKLYEAEGVQKVEIYETESMGKMLVIDGKIQLTELDEPFYHEMLVHVPMLSHENPRKVAVIGGGDGGALREVLKHNVERAVLVDIDRNVIDLSRKFLKIDHGAFEDERVEIAIMDGKEFLRDCEIFDVIIVDSTDPVGVSDTLFDREFFELARQKCDVISLQSQSPLIQKEYFRTLLVNSAPFERRDVYLSCVPTYPLALWSFIIGGEYDFSNLEERFERIKGKTVHYNPDVHRAAFALPEWLKKEVEACI

SEQ ID NO: 7300 - protein, 496 aa, Mesorhizobium loti MAFF303099
MPSAAEPMARTNNNLTGASMQSDNASKFYIDGQWVMPGGAGRMDVVNPATEQSFMQIAIGTTEDADLAVQAAFEAFPTFSQTSRTERVELLRNVLRCYNDRYDDIARAVSTELGAPLKFAREAQAWAGQIHLESTIAALEAFSFDELHGSSMITWEPIGVCALITPWNWPLNQIVCKVAPALAAGCTVVLKPSELAPLSAIIFAEVLEEAAIPKGVFNLINGTGPEVGQYLAGHPRVDMVSFTGSTRAGIMVAKTAAETVKRVAQELGGKSANIVLADADLENAVVKGVEACFSNSGQSCDAPTRLLIPADRHAEALDIARRVAAATRVGDPSSEDTDMGPVISQQQFDKIQRMIGLGIEEGATLVAGGPGKPEGLDVGFYVKPTIFGGVTPEMTIAREEIFGPVLSIIPYDTEADAIRIANDSIYGLAAYVQGGSLEGARAVARKLQAGSVYVNYAPWDTHAPFGGYKQSGNGREYSHWGIRDFMEVKGIVGWGA

SEQ ID NO: 7301 - protein, 388 aa, Nicotiana attenuata
MEVISTNTNGSTIFKNGAIPMNGYQNGTSKHQNGHQNGTSEHRNGHQNGISEHQNGHKNGTSEHQNGHQNGTSEQQNGTISHDNGNELQLLGSSNSIKPGWFSEFSALWPGEAFSLKVEKLLFQGKSDYQDVMLFESATYGKVLTLDGAIQHTENGGFPYTEMIVHLPLGSIPNPKKVLIIGGGIGFTLFEMLRYPSIEKIDIVEIDDVVVDVSRKFFPYLAANFNDPRVTLVLGDGAAFVKAAQAGYYDAIIVDSSDPIGPAKDLFERPFFEAVAKALRPGGVVCTQAESIWLHMHIIKQIIANCRQVFKGSVNYAWTTVPTYPTGVIGYMLCSTEGPEVDFKNPINPIDKETTQVKSKLAPLKFYNFDIHKAAFILPSFARSMIES

SEQ ID NO: 7302 - protein, 192 aa, Sinorhizobium meliloti
MADRTSSKDVIHNGEFGNDALDLIEITGVIKWFDVAKGFGFIVPDNGMQDVLLHVTCLRRDGYQTVLEGARVVALIQKRDRGYQAFRILSMDQSTAVHPSQLPPVRTHVQVTPTSGLERVLVKWFNRTKGFGFLTRGEGTEDIFVHMETLRRFGLTELRPGQVVLCRFGDGEKGLMAAEIHPDGPTPTTRSH

SEQ ID NO: 7303 - protein, 1106 aa, Neurospora crassa
MVDMLGTNANVLQSRDPISEFLQLLQDPFAAQLSSNSIYAALGSSVSITVAVALGFSLVRPLNTVVYAPKLKHADDKHAPPQLGKGFFSWIKPLWTTTEQDLVRLVGMDATIFMRFTRMCRNIFLCLAVLCCCIQIPINWYKNAAPESPWLQKVTPMNVWNQWQWATVVMSWVTTLIVCFFLWWNYRKVCELRIQYLRSEEYQQSLHARTLMLYDIPKNLTSDEGIARIIDSVAPSSSFSRTAVARDVKILPTLIEEHEKTVRKLEQVLAKYLKDPKNLPVTRPVCRPSKKDPSFSTYPKDKKLDAIDYLTQRIKLLELEIKEVRQRIDKRGSMPYGFASYSDISEAHAIAYLCRSKKPQGARVTLAPKPNDIVWENMPLSSASRATRRLWNNLWITVLTVVWVAPNAMIAIFLVNLSNLARVWPDFQKSLETNRNFWAIVQGIASPALTSLVYMVLPIIFRRLSMKAGDMTKTGRERHVVAKLYSFFVFNNLFVFSLFSALWSFGATVIKNTATDDDAWQAILDADFGTTVFVSLCGISPFWVVWLIQRQLGAAIDLSQLWKLIYGSIMRKFTNPTPRELIELTAPPPFDYASYYNYFLFYATAALCYAPIMPLVLPAAGMYFAIDVALKKYLLMYVFVTKTESGGMFWRILFNRILFGLMLSHLIVFLVVWVRGFGYKTQAYAVVPLPILIIIFKFVCSWIYDNKITYFSTRIIKHRNAEEGFGLKEQGPRNDRLASRFGHPALYKPLITPMVHAKAQNILASVYQGRLSDGRDAGLGDSMSVSGYSDTYALDSMASGKVGKLSSAVPGFEVVPESRLDFEFYKNRDEFAADHGAGELFGRASDIVRPDTPGTMATGSDNNSRPGTPVGGMGFSHNRRFFSNQSDMGNTAYVGGYMSPSQQYSSNNQAPYSPPILGPSEVPGRGRSPLYHMGDNGNDSSSNLVYNAAGMPTSTPAGFEVADDGLHRERSFDSTRSRGALGGFSIPNPRAPGVLGASRYGYGNVPQTDDDMMQTPPNAIQSSHFQPNQGQNDPMQYDYFRGNRRQGPPPGAPGRGKPRRTVNEVVELSTLNKGKKRDILRFWVRKTTAESEHERLASSAPGDEEN

SEQ ID NO: 7304 - protein, 217 aa, Methanocaldococcus jannaschii DSM 2661
MKFFLDTANVEEIKKYAELGLVDGVTTNPTLVAKEGRDFYEVVKEICEIVEGPVSAEVISTDAEGMVKEARELAKLADNIVIKIPMTKDGMKAVKILSAEGIKTNVTLVFSPLQALVAAKAGATYVSPFVGRLDDIGHVGMKLIEDVVKIYKNYDIKTEVIVASVRHPWHVLEAAKIGADIATMPPAVMDKLFNHPLTDIGLERFLKDWDEYLKSRK

SEQ ID NO: 7305 - protein, 226 aa, Davidia involucrata
SLPNNATFFLTYVALKFFVGYGLELSRIVPLIIYHLKRKYLCKTQAELKEAWSPGDLGYATRFPGDMLIITIVLCYSVIAPIIVPFGVLYFGLGWLVLRNQVLKVYVPSYESYGRMWPHMHTRILAALLLYQVTMFGYFGVKKFYYVPILIPLPILSLIFAFVCKKKFYHFFQATALEVACREMKETPNMELVFRSFIPPSLSAEKSDDDQFEDAKSQVSRAASFV

SEQ ID NO: 7306 - protein, 422 aa, Azotobacter vinelandii
MSDLKTAALEYHAQPRPGKLSVELTKPTQTARDLSLAYSPGVAEPVREIARDPELAYRYTGKSNLVAVISDGTAILGLGNLGPLASKPVMEGKGVLFKRFAGVDVFDIEVDAESPQAFIDTVKRISVTFGGINLEDIKAPECFEIERALIEQCNIPVFHDDQHGTAIVTAAGMLNALEIAGKSLPTARIACLGAGAAAISCMRLLVSLGARVENIHMIDRQGVIHAGRDDLNQYKAVFAHETDKRTLADALDGADVFVGLSGANLLSAENLLRMAPNPIVFACSNPDPEISPELAHATRGDVIMATGRSDYPNQVNNVLGFPFIFRGALDVRATRINEEMKIAAAHALRELAKLPVPKAVCEAYGVSGLEFGREYIIPKPMDPRLITVVSDAVARAAIESGVASLPYPRHYPLQSVEEVFNS

SEQ ID NO: 7307 - protein, 521 aa, Glycine max
MHHQHNTTMSKTTTSSEQTARNRLATLAAHLLPSDATSAAAILHPHRLSAPTGDLPPANLKGTLTVVDERTGKKYQIEVTPDGTVRASDFKKISSGKNDKGLKLYDPGYLNTAPVISRISYIDGDAGILRYRGYPIEDLAEKSTFTEVSYLILYGNLPSESQLAEWEFALSQHSAVPQGVLDMIESMPHDAHPMGMLVNAMSALSVFHPDANPALKGLDIYDSKQIRDKQITRVIGKITTIAAAVYLRLAGRPPVLPSNKLSYTENFLYMLDSFGNRSYKPNPRLTRALDIIFILHAEHEMNCSTSAVRHLSSSGVDVYTAIAGAVGALYGPLHGGANEAVLKMLSEIGTVENIPAFIEGVKARKRKLSGFGHRVYKNYDPRAKVLRKLTEEVFSIVGRDPLIEIAVALEKIALSDEYFIKRKLYPNVDFYSGLIYRAMGFQPEFFTVLFAIPRMAGYLAHWRESLDDPDTKIMRPQQVYVGEWLRHYAPINQRTASSNTDKLGQLAVSNASKRRLAGSGA

SEQ ID NO: 7308 - protein, 313 aa, Pyrobaculum calidifontis
MPLSPILRQILQQLAAQLQFRPDMDVKTVREQFEKSSLILVKMANEPIHRVEDITIPGRGGPIRARVYRPRDGERLPAVVYYHGGGFVLGSVETHDHVCRRLANLSGAVVVSVDYRLAPEHKFPAAVEDAYDAAKWVADNYDKLGVDNGKIAVAGDSAGGNLAAVTAIMARDRGESFVKYQVLIYPAVNLTGSPTVSRVEYSGPEYVILTADLMAWFGRQYFSKPQDALSPYASPIFADLSNLPPALVITAEYDPLRDEGELYAHLLKTRGVRAVAVRYNGVIHGFVNFYPILEEGREAVSQIAASIKSMAVA

SEQ ID NO: 7309 - protein, 487 aa, Zea mays
MDPNGLKTGGLLLPTIERRCTSPPSVIVIGGGISGVAAARALSNSSFKVTVLESRDRIGGRIHTDNSFGCPIDMGASWLHGVCNENPLAPLISYLGLRLYRTSDDNSVLYDHDLESYALFDKDGNQVPKETVDKVGETFERILEETVKVRDEQEHDMPLLQAISIVFERHPHLKLEGLDDQVLQWCVCRLEAWFAADADEISLKNWDQERVLTGGHGLMVNGYYPVIEALAQGLDIRLNQRVTEITRQHNGVKVTTEDGTSYLADACIISVPLGVLKANVIKFEPELPQWKSSAIADLGVGTENKIAMHFDRVFWPNVEVLGMVGPTPKACGYFLNLHKATGNPVLVYMAAGRFAQEVEKLSDKEAVGLVVSHLKKMLPDATEPTQYLVSRWGSDPNSLGSYSCDLVAKPADVCARFAAPVENLHFAGEAASAEHSGSVHGAYSSGIAAAEECRKRLLALKGIPDLVQVAAWEEMAGAVAPLQICRT

SEQ ID NO: 7310 - protein, 156 aa, Glycine max
ASATQLFRPSKRRTARASSKKESIESQAGVSRSMVAPLLVLTLVMYIVVIGLASWNLNHFINGTTNYAGVAGNGATFYFLLFAILAGVVGAASKLAGVHHVRTWRGDSLATSASSALVAWAITALAFGLACKEIHVGGHRGWRLRVLEAFIIILAF

SEQ ID NO: 7311 - protein, 129 aa, Kineococcus radiotolerans SRS30216
MPTGKVKWFDADKGFGFLAAEDGAEVFVHASALPAGTTTLSKGSRVEFGVVQGKNGTQALSVRLLDPVHSVARATRKKPEDVVPIVEDLIKLLDGVSGSLRRGRYPDKAGAKKVATVLRAVADDFEAGA

SEQ ID NO: 7312 - protein, 508 aa, Haloarcula marismortui ATCC 43049
MSSDSKQQSATERKSAIKKRHEQAANEVLPDRRELYIGGEWVQSSGGETFETIDPTTGETLAEVQAGTAEDIDSAVAAAWNAYDETYSELSTGERQAMLDGIADAIAERSEEFAKLESLDNGKPITEARIDIDLVIDHFRYFAGLARSGEGRTIETDDSRHVQTLREPYGVVGQIIPWNFPLLMAAWKLAPALSAGNTVVLKPAEETPLSILKLMEITEDVIPDGVVNVVTGFGPEAGEPLSKHPDIRKLAFTGSTEIGSKVMQSAAESITDVTLELGGKSPLVVFPDADLEQAVQTTITSIFFNTGECCCAGSRLFVHEDIKDEFLDELAAAAEDLTVDDPLLESTDLGPKVTAEQVERTLGYIEEAEREGAAFVTGGSQPDDEALSDGCFVAPTLIDEIDHDSKAVQEEIFGPVQEVFSWSEYDEMIELANDVDYGLAAGVLTEDLSKAHQCAKDIEAGNIWVNTYNDFPAGQPFGGYKQSGIGREIGQETIDHYTQTKTVNISLD

SEQ ID NO: 7313 - protein, 262 aa, Oryza sativa
MSQPAELSREENVYMAKLAEQAERYEEMVEFMEKVAKTVDSEELTVEERNLLSVAYKNVIGARRASWRIISSIEQKEESRGNEDRCTLIKEYRGKIETELSKICDGILKLLDSHLVPSSTAPESKVFYLKMKGDYYRYLAEFKTGAERKDAAENTMVAYKAAQDIALAELPPTHPIRLGLALNFSVFYYEILNSPDRACNLAKQAFDEAISELDTLSEESYKDSTLIMQLLRDNLTLWTSDISEDAAEEIKEAPKGESGDGQ

SEQ ID NO: 7314 - protein, 175 aa, Zea mays
  misc_feature (43)..(43): Xaa can be any naturally occurring amino acid
  misc_feature (67)..(67): Xaa can be any naturally occurring amino acid
  misc_feature (77)..(77): Xaa can be any naturally occurring amino acid
  misc_feature (83)..(83): Xaa can be any naturally occurring amino acid
MAGIGRNMVAPLLVLNLIMYIIVIGFASWNLNHFINGQTNYPXGVAGNGATFYFLVFAHPGPGVVGXAASKLAGVHXHVRAWXRHDSLATNAASSLIAWAITALAFGLACKEIHIGGHRGWRLRVLEAFVIILAFTQLLYVLMLHTGLFGGSGGYRDHDYGVGGAAGEPKGVTRV

SEQ ID NO: 7315 - protein, 361 aa, Triticum aestivum
MKTLLILTILAMAITIGTANIQVDPSGQVQWLQQQLVPQLQQPLSQQPQQTFPQPQQTFPQPQQTFPHQPQQQVPQPQQPQQPFLQPQQPFPQQPQQPFPQTQQPQQPFPQQPQQPFPQTQQPQQPFPQQPQQPFPQTQQPQQPFPQLQQPQQPFPQPQQQLPQPQQPQQSFPQQQRPFIQPSLQQQLNPCKNILLQQCKPASLVSSLWSIIWPQSDCQVMRQQCCQQLAQIPQQLQCAAIHSVVHSIIMQQQQQQQQQQGMHIFLPLSQQQQVGQGSLVQGQGIIQPQQPAQLEAIRSLVLQTLPSMCNVYVPPECSIMRAPFASIVAGIGALMMEHSGGTYTLHMDGRVCNTNDLIASN

SEQ ID NO: 7316 - protein, 121 aa, Glycine max
MASSMLSSAAVGTSPAQATMVAPFTGLKTSAAFPATRKANNDITSIASNGGRVSCMKVCPPDGKKKFETLSYLPDLTEVELGKEVDYLLRNKCTPCAEFQLEHEFVYRDHRSKPGYYDARY

SEQ ID NO: 7317 - protein, 188 aa, Zea mays
  misc_feature (71)..(71): Xaa can be any naturally occurring amino acid
  misc_feature (87)..(87): Xaa can be any naturally occurring amino acid
  misc_feature (106)..(106): Xaa can be any naturally occurring amino acid
  misc_feature (115)..(115): Xaa can be any naturally occurring amino acid
HSECQTDSVCHVFDHLYEEYGDVLEGMLDGVLFFALVDTRNKSCIAIGDALGFRPWCMGWALGGSLWMTAXMNDWKHYRELSITFLXWHMYCSMTRGLRRSCNPPXFHRLLIKPXYIALLLQKMVDKTVITKLTTDVPLCVLLYCGLDSSVAASDCLQTLDETQGDRQWRTKWLTLCVGSEGTADLKA

SEQ ID NO: 7318 - protein, 81 aa, Triticum aestivum
KGSYSNWPVGVNRYEYDQLRAPVGGRVYFTGEHTSEHYNGYVHGAYLAGIDSADILMNKVLNNVEFKVRPKYDEEQKAEAK

SEQ ID NO: 7319 - protein, 382 aa, Pinus radiata
MDSNMNGLAKSNGCEISRDGFFESEEEELQGQAEAWKCTFAFAESLAVKCVVLLGIPDMIAREGPRATLSLGEIVAKLPTESPDAACLFRIMRFLVAKGIFRASKSAREGGAFETRYGLTPASKWLVKGRELSMAPMLLMQNDETTLAPWHHFNECVLEGGVAFQKANGAEIWSYASDHPDFNNLFNNAMACNARIVMKAILSKYQGFHSLNSLVDVGGGTGTAVAEIVRAYPFIRGINYDLPHVVATASSLSGVQHVGGDMFETVPTGDAIFMKWIMHDWNDEDCIKILKNCRKAIPDTGKVIIVDVVLDADQGDNTDKKRKKAVDPIVGTVFDLVMVAHSSGGKERSEKEWKRILLEGGFSRYNIIEIPALQSVIEAFPR

SEQ ID NO: 7320 - protein, 319 aa, Clostridium tetani E88
MRKIAVLTSGGDAPGMNAAIRAVVRTGLDKGITVLGIERGFDGLLNGEIFEMTRRSVADIIQRGGTILRTARSEEFKTEEGQKKATDILRVFGVEGLVVIGGDGSFQGAKSLSELGVKTIGIPGTIDNDLAYTDYTIGFDTAVNTVLDAINKLRDTSTSHGRASVVEVMGRNCGDIALYAGLAGGAESIIVPELRFDIDKLCKTILEGKKNGKMHNLIIVAEGAGKANDIAKTIEKVTGVGTRATVLGHIQRGGSPTANDRILASRMGNRAVELLLEEKSSRVVGINDNRIVDMDIHEALSIEGKFDEKLYEIAKALSY

SEQ ID NO: 7321 - protein, 420 aa, Listeria monocytogenes str. 1/2a F6854
MSQKIQVENGVLKTPNNPVIPFIEGDGTGPDIWAAAKRVLDAAVKKAYNGEKEIAWKEVLAGEKAFKQTGEWLPQATLDTIDEYLIAIKGPLTTPIGGGIRSLNVALRQELDLYVCLRPVRYFKGVPSPVKRPEDTDMVIFRENTEDIYAGIEFKEGSIESKKLIDFLKSEFGVDKIRFPETSGIGIKPISKEGTERLVRSAIEYAIKEGRKSLTLVHKGNIMKFTEGAFKNWGYNLCEREYGDKVFTWNEYDRIKEAEGTEVADAKQNEALAAGKILVKDSIADIFLQQILTRPAEFDVVATMNLNGDYISDALAAQVGGIGIAPGANINYLTGHAIFEATHGTAPKYAGLDKVNPSSVILSGTLLLEHIGWGEAAALINQSMEKTIAAKTVTYDFARLMDGATEVKCSEFADELIKNF

SEQ ID NO: 7322 - protein, 184 aa, Physcomitrella patens subsp. patens
MASAVASTVVAPVSVTVASSSVAASRESSSVKAFSGLKSATLFTSKSQQLSSVQNGSRVQCMQVWNPIGQPKFETFSYLPPLSDDQIARQVDYMIQQNLIPCIEFDTVGAVSRTNFSGSGSSGYYDGRYWTMWKLPMFGCTDSSQVLREIQECKTSYPSCWVRVLGFDSKKQVQICGFLVARPN

SEQ ID NO: 7323 - protein, 337 aa, Aspergillus nidulans FGSC A4
MTTSRWWLYVQAVFWRCLMRLGMIFHNIPHPRPPSPSFSRSFPSGSSKVVLQFYCPPGYSQTRKEGRRLPVVVNFHGGGFTLGGPSDDSRWAQAVLSEVGAVVVSVGYRRAPEHPFPAAVDDGVLALQYLASHAVELGLDISRIALSGFSAGGNLAVTVPLRFRDMLIQAEHEGWLSRADSTVQLVSPTASDLHIVALFCWYPILDFEEPREHRRAMSIEPNKTLPSFFTNLFDESYLPDLEQRKSPYASPVHATDDALRDSLPHDIFFFICEWDMLLNEGQLFCRRLQDINKHVRAMMVEKARHAWDKSPNPFRNTTEVNILYKDACADMKAIFEK

SEQ ID NO: 7324 - protein, 371 aa, Nicotiana attenuata
MEVISTNTNGSTIFKNGAIPMNGHQNGTSKHQNGTSEHPNGHQNGTSEHQNGHQNGTSEQQNGTISHDNGNKLVGNSNCIKPGWFSEFSALWPGEAFSLKVEKLLFQGKSDYQDVMLFESATYGKVLTLDGAIQHTENGGFPYTEMIVHLPLGSIPNPKKVLIIGGGIGFTLFEMLRYPSIEKIDIVEIDDVVVDVSRKFFPYLAANFNDPRVTLVLGDGAAFVKAAQAEYYDAIIVDSSDPIGPAKDLFERPFFEAVAKALRPGGVVCTQAESIWLHMHIIKQIIANCRQVFKGSVNYAWTTVPTYPTGVIGYMLCSTEGPEVDFKNPVNPIDKETTQVKPKLAPLKFYNSDIHKAAFILPSFARSMIES

SEQ ID NO: 7325 - protein, 271 aa, Dunaliella salina
MGYVKVVKTSPYFSRYQVKYRRRRQGKTDYRARLRLVRQDKNKYNTHKYRLVVRFSNKNVTCQIVYSTIQGDVVMAAAYSKELPNYGLKVGLTNYSAAYCVGLLVARRILTKLNLADTYKGQEEPDGEDYNVEPVEDGPKPFYCLLDTGLKRTSTGSKVFAAMKGALDGGLDIPHNEKRFVGYADKKLDTEVLQKYIYGGHVAEYQETMQEEEPEKYQAHFSSYVENEIEPDGIEDMYKEVHAKIRENPCPPKKERTKPADAKRWSPQAHL

SEQ ID NO: 7326 - protein, 383 aa, Neurospora crassa
MATDGKSNLSFVLNKPLDVCFQDKPVPKINSPHDVLVAVNYTGICGSDVHYWLHGAIGHFVVKDPMVLGHESAGTIVAVGDAVKTLSVGDRVALEPGYPCRRCVHCLSGHYNLCPEMRFAATPPYDGTLTGFWTAPADFCYKLPETVSLQEGALIEPLAVAVHITKQAKIQPGQTVVVMGAGPVGLLCAAVAKAYGASKVVSVDIVPSKLEFAKSFAATHTYLSQRVSPEENARNIIAAADLGEGADAVIDASGAEPSIQAALHVVRQGGHYVQGGMGKDNITFPIMALCIKEVTASGSFRYGSGDYRLAIQLVEQGKVDVKKLVNGVVPFKNAEEAFKKVKEGEVIKILIAGPNEDVEGSLDTTVDEKKLNEAKACGGSGCC

SEQ ID NO: 7327 - protein, 180 aa, Escherichia coli
VPENPIIPYIEGDGIGVDVTPAMLKVVDAAVEKAYKGERKISWMEIYTGEKSTQVYGQDVWLPAETLDLIREYRVAIKGPLTTPVGGGIRSLNVALRQELDLYICLRPVRYYQGTPSPVKHPELTDMVIFRENSEDIYAGIEWKADSADAEKVIKFLREEMGVKKIRFPEHCGIGIKPCS

SEQ ID NO: 7328 - protein, 439 aa, Pyrobaculum aerophilum str. IM2
MAVDIEKIKQGIPNIVPYAGKYVDPPEGDYVEYTGPGQFKVPDKVVIGYIEGDGIGPEVAYAAIRVANAAVEKAYGKSRKVIWYEVVVGEKAEKIFGNRLPDQSINVLKKIRVFLKAPLETPVGGGFRSINVTLRQLFDLYANIRPVKYFPGLPSPLKRPEVVDLVIFRENTEDVYAGIEWPYNSPEASKIRDFLRREFGINIRDDAGIGIKPISKFGTQRIARLALKFAIENKRRVVTVMHKGNIQKYTEGAFKDWAFEVARNEFREHVVFEDELAQYGGQVPPGKVLVNDRIADNMLQQLLTRTGEYDVILAPNLNGDYVSDEAAGLVGGLGVAPGIDVGDWGMMAEPVHGTAPKYRGKNYVNPTATILALELLFRFLGWREAANYIIKGVETAYREGYFTGDLARQMDEEERKHRVKEVLGTQEFADKVVEIIKRL

SEQ ID NO: 7329 - protein, 424 aa, Methylobacillus flagellatus KT
MNILIKQGRLIDPRHRVDAVQDLYVSNGKVVGIDHAPDDFMPNEVIDASGLIVCPGLVDVSARLREPGNEYKASLKSELHAAVAGGVTSLACPPDTDPVLDESGLVEMLRHRAKQLHLSNVHPLGALTRQLAGKQLTEMSELTDAGCVGFSQADEPIMDTLVLWRALQYAATFGFTVWLRPQEPYLAQGGVAHDGEVAARLGLKTIPVAAETLALATILHIVRETGAKVHLCRLSSAEGVAMVREAKQQGLHISSDVSAHHLHLTEHDIGFFDANCHLRPPLRSQRDRDALRQGLADGTIDLVCSDHAPVDDDAKLVPFGEAEAGATGLELLLPLTLKWAEEQKVALVEALARITSTPANILGIAKGHLGLNAAADICIFDPAQYWKVTAANLRSQGKNTPLNGLELAGKVRYTIVNGGIAYRS

SEQ ID NO: 7330 - protein, 503 aa, Chrysanthemum lavandulifolium
MTTIPSRQLFIDGEWREPVKKNRIPVINPSTEQIVGDIPAATAEDVDVAVKAARKALKRNGGKDWASATGAHRAKYLRAIAAKITGKKELFSKLEAIDCGKPYDEAAWDIDDVAGCFEYNADLAEALDKKQNAPIELPMDTFKCHVIKEPIGVVGLITPWNYPLLMATWKVAPALAAGCAAILKPSELASLTCLELGEVCKEVGLPAGVLNILTGLGPDAGAPLAAHPDVDKIAFTGSSATGSKIMTAAAPNVKPVTLELGGKSPIVVFDDVDIDKAVEWTLFGCFWTNGQICSATSRLILHESIAKEFLDKLVKWAKNIKISDPLEEGCRLGPVVSSGQYERVLKFVETARSEGATILSGGQRPQHLKKGFFIEPAIITDITTSMQIWRDEVFGPVLCVKTFSSEEEAIELANDTHYGLGSAVISNDLDRCDRVTRAFDAGIVWVNCSQPCFCQAPWGGKKRSGFGRELGEWGLDNYLSVKQVTRYISNDAWGWYTPPSPKL

SEQ ID NO: 7331 - protein, 365 aa, Aegilops tauschii
MKTFLIFALLAVAATSAIAQMETSHIPGLEKPSQQQPLPLQQILWYHQQQPIQQQPQPFPQQPPCSQQQQPPLSQQQQPPFSQQQPPFSQQELPILPQQPPFSQQQQPQFSQQQQPFPQQQQPLLLQQPPFSQQRPPFSQQQQQPVLPQQPPFLQQQQQQPILPQQPPFSQHQQPVLPQQQIPYVQPSILQQLNPCKVFLQQQCSPVAMPQSLARSQMLWQSSCHVMQQQCCQQLPRIPEQSRYDAIRAIIYSIVLQEQQHGQGFNQPQQQQPQQSVQGVSQPQQQQKQLGQCSFQRPQQQQLGQWPQQQQVPQGTLLQPHQIAQLELMTSIALRTLPMMCSVNVPVYGTTTSVPFGVGTQVGAY

SEQ ID NO: 7332 - protein, 251 aa, Triticum aestivum
GAMEQGEEDGDWMVEPAAGKKGGAMIDRKKRFSEEQIKSLESMFATQTKLEPRQKLQLARELGLQPRQVAIWFQNKRARWKSKQLERQYAALRDDYDALLSSYDQLKKDKQALVNQLEKLAEMLREPGGAKCGDNAGAAARDDVRLAVAGMSMKDEFVDAGGASKLYSASEGCGGSGKLSLFGEDDDDAGLFLRPSLQLPTAHDGGFTASGPAEYQQQSPSSFPFHSSWPSSAAEQTCSSSQWWEFESPSE

SEQ ID NO: 7333 - protein, 384 aa, Rickettsia bellii
DISKVYSEADCFTYDPGFMSTASCRSTITYIDGDQGILRHRGYDIKDLAEKSDFLEVAYLLIYGELPNNKQYNDFTKKVAHHALVNERLHYLFQTFCSSSHPMAIMLAAVGSLSAFYPDLLNFFKEADYELTAIRMIAKIPTIAAMSYKYSIGQPFVYPDNSLDFTENFLHMMFATPCEKYKVNPVIKNALNKIFILHADHEQNASTSTVRIAGSSGANPFACVSTGIASLWGPAHGGANEAVINMLKEIGSVENIPKYIAKAKDKNDNFRLMGFGHRVYKNYDPRAAVLKETCKEVLKELGQLDNNPLLQIAIELEAIALKDEYFIERKLYPDVDFYSGIIYKAMGIPPQMFTVLFATARTVGWMAQWKEMHEDPEQKISRPR

SEQ ID NO: 7334 - protein, 1048 aa, Magnaporthe grisea 70-15
MTTAISSNHEPPYPPSSGDRGQAYPPVSRSQSTRHRPSTAQPPAPHRSVSHNHSGSMSSRPSSSARPVQDVLPNNDYETTNVAQKATKDSRPPQSSRDTATRQHRRSGSQRSGHHGHDGNAEAGPSTPSQASHGSSDPRTRKMRTVIPAQSGKWNLGKTIGAGSMGKVKLARKEDGTEQVACKIIPRVTPDDGHTPRAERERADLSKEVRTAREAAIVTLLSHPHICGLRDVVRTNFHWYMLFEYVNGGQMLDYIISHGKLKEKQARKFSRQIASALDYCHRNSIVHRDLKIENILISKTGDIKIIDFGLSNLFAPKSHLKTFCGSLYFAAPELLQARPYTGPEVDVWSFGIVLYVLVCGKVPFDDQNMPALHAKIKKGVVDYPNWLSSECKHLLGRMLVTDPKQRITMAEILSHPWMVKGYSGPPENYLPNREPLTLPLDQEVINGMTGFSFGPPEVIKAQLTRIIESEDYQRSIRAYQREKETQQTPKDPEKKRGFGFYRRRNSFSSKDTLTTPSSEGLALGNDPLNAFNPLVSVYYLVREKQEKDSASRRPATSARPNAVPEIAPPQEAHTNASAYEMPGENATGGRTRPRARTHGEDDAPTEPIRPPQLSPPAAPPPERLEPPKKESAAAGLLRRFSTRRRKEQPERLDKDRSHPPVVQVHSPAENSSQPTSAIRKSFSIRRGRRDREEQASAESQARMRAGSSQPQHSDLLSPPLSAGANTQTFRKGLGRSASVNSGEFSRRRAMGTARTSKDPPPTSGSDHSTIHEKPPKEQQEKRSPTTAGPSQSMTSRAKSLGHARQESIQARRQRREAEKKREANVPEETDAEVNGADDSSKERVTDFDLDKPVYLKGLFSVSTTSGKPVREIRTDIKRVLKQLGVDYTEIKGGFYCRHSPSIDLQNVADNGAASPAQTPSGAKRRFSFGALRSDGKEESNGERVPVTPRTPGRSGGGSGTDRDRHDSSSEVSENSEAREETSRRRDHPAGETRTHVRSDMGESMVSEFEIFIVKVPMISLHGIQFKRLGGNTWQYKNLADQILKELKL

SEQ ID NO: 7335 - protein, 471 aa, Rhodobacter sphaeroides 2.4.1
MMADAPLILWFRRDLRLADNPMLAEAAATGRPLIPLFILDPETEALGAAPKWRLGLGVEAFARALEGLGSRLVLRRGPALAVLEALVAETGAAGVHWSRLWEPDWRARDEGVKAGLRQAGIEAASHAGHTIFEPREVETGQGGFYRVYTPFWKAVKDRPVAASSPPPARLLSPAEWPVSERLACWDLGRAMHRGAAVVAPHLAVGEAAAAERLTRFLSGPLDRYAAERDRPDAPVTSRLSENLTYGEISARSLWHAGMRARAEGRAGAEKFLQELAWREFGWHLLYHTPEIARRNWRGDWDAFPWRGDNPDAERWRRGMTGEPFVDAAMRELFVTGTMHNRARLIAGSYLTKHLLTDWRVGQAWFEDCLIDWDPASNALGWQWVAGSGPDASPYFRIFNPATQAEKFDPESAYRQRFLAEIARRPGPEALAFFEAVPRSWGLRPDRCYPRPVVGLAEGRERALAAYGRRNN

SEQ ID NO: 7336 - protein, 506 aa, Chrysanthemum lavandulifolium
MTTTIPIPSRQLFIDGEWREPVKKNRISVINPSTEQIVGDIPAATAEDVDVAVKAARKALKRNGGKDWASATGAHRAKYLRAIAAKITEKKELFSKLEAIDCGKPYDEAAWDIDDVAGCFEYNADLAEALDKKQNAPIELPMDTFKCHVIKEPIGVVGLITPWNYPLLMATWKVAPALAAGCAAILKPSELASLTCLELGEVCKEVGLPAGVLNILTGLGPDAGAPLAAHPDVDKIALTGSSATGSKIMTAAAQNVKPVTLELGGKSPIVVFDDVDIDKAVEWTLFGCFWTNGQICSATSRLILHESIAKEFLDKLVKWAKNIKISDPLEEGCRLGPVVSSGQYEKVLKFVETARSEGATILSGGQRPQHLKKGFFIEPAIITDITTSMQVWREEVFGPVLCVKTFSSEEEAIELANDTHYGLGSAVISNDLDRCDRVTRAFDAGIVWVNCSQPCFCQAPWGGKKRSGFGRELGEWGLDNYLSVKQVTRYISNDAWGWYTPPSPKL

SEQ ID NO: 7337 - protein, 344 aa, Aegilops tauschii
MKTFLIFALLAIAATSAIAQMETSRVPGLEKPWQQQPLPPQQQPPCSQQQQPFPQQQQPIIILQQSPFSQQQQPVLPQQQPVIILQQPPFSQQQQPVLPQQPPFSQQQQPPFSQQQQPVLPQQPPFSQQQQPPFSQQQQPSSQQPPFPQQHQQFPQQQIPVGQPSVLQQLNPCKVFLQQQCSHVAMSQRLARSQMWQQSSCHVMQQQCCQQLPQIPEQSRYEAIRAIVYSIILQEQQQGFVQPQQQQPQQSGQGVSQHQQQSQQQQQLGQCSFQQPQQLQQFGQQPQQQQIPQGIFLQPHQISQLEVMTSIALRTLPTMCGVNVPLYSSTTSMPFSIGTGVGGY

SEQ ID NO: 7338 - protein, 396 aa, Triticum aestivum
MALSISAPTSSPFLPAPRQVGRWSSSPSSAKPAVFSLRRPVVVARAAAGNAPSSPAGAVVTEFDVPSGRSEIVPDTGVFDDFEKFAPTAATVSSSLLLGIAGLPDTKFKSAIDTALVDGECNTMEKPGDRMSCYLTKALGNVGAELALQVPGRVSTEIDARLAYDTQGIVQRVHELLQIYNEHDIPSERLLFKIPATWQGIEASRLLESEGTQTHLTFVYSFAQAAAAAQAGASVVQIFVGRIRDWAKNHSGDPEIDEALKKGEDAGLALVKKAYVYIHKNGYKTKLMAAAVRNKQDVFSLLGIDYIIAPLKILQSLDESVTDSDEKYGYVQRLTPSLDKMYNFSQEELVKWDHLSLAAAMGPAAEELLASGLEGYANQARRVEELFVKIWPPPNV

SEQ ID NO: 7339 - protein, 143 aa, Triticum aestivum
MAMAYKMATEGMNIKEECKRWFTEMKWKKVHRFVVYKIDERTRAVLVDKVGGPGEGYEELVAALPGDDCRYAVFDFDFVSVDNCQKSKIFFIAWSPAASRIRAKILYATSKQGLRRVLEGVHYEVQATERSEMGFDVIRERAQ

SEQ ID NO: 7340 - protein, 407 aa, Zea mays
MMSKTKAAVRPRSWHLPFLFLLLLAQTCSPQEQGGGGALHGSFVRCVARLSPATTDTSRLVHAPSAASYPSLLNATIQNLRFASPRTPRPALLLTPATVAEARACVTCCRRHGLTVRARSGGHDYEGLSYRSVAGARPFAVVDVAALRDVRVDAGRRVARAGPGATLGELYYAVTRESGGALGFPAGICPTVCVGGHLSGGGFGPMMRKHGLGADNVVDAEVVDAEGRLLDRAAMGEGLFWAIRGGGGGSFGVVVSWTVRLVPVPPVVGVFTVRRLVRRGDQRQTQAAVRLLTKWQRVAHALPEDLFVKVAMEPEVDDAGERHPSVTFKSLFLGNCSGMVAEMSAHLPELDVRAGDCREMSWIQSTLYFYGYTGEQAAEVLLDRSLQPKDYYKVKLDYLTSPIPAAG

SEQ ID NO: 7341 - protein, 213 aa, Zea mays
MAATRVSPVLLLLLTVQLSLLFRLPDSPSTLALALAAEPEQQNAKQHRQPALLVQSTCNSTSFYDLCIAALAADPASSTADVPGLGAIAVSAAANNASGTAAFLGNASDAAATPQADRALLRTCAGKYAAARDALVQARASLAEQAYDYAFVHVSAAGEYPAVCRTLFRRRQQQRGASRTAYPAELAKREEALRRLCTIALDIISLLQNQETY

SEQ ID NO: 7342 - protein, 240 aa, Glycine max
MHLSNLIHTVPTRDMRVVNGELCCLENPLPPTHFASSSSSFLCFVNTEMSAVNITNVTVLDNPASFLTPFQFEISYECLTALKDDLEWKLIYVGSAEDETYDQLLESVLVGPVNVGNYRFVLQADPPDPSKIREEDIIGVTVLLLTCSYLGQEFIRVGYYVNNDYDDEQLREEPPPKVLIDRVQRNILSDKPRVTKFPINFHPENNENEEQQPPPSEHPSETGEDPLAVVDRDPPDEKDS

SEQ ID NO: 7343 - protein, 243 aa, Schizosaccharomyces pombe
MSLAFTLLTSKDNTDEDEEHLELSSFNQEKLLEMISVFLSRLTRLNDSKQEATESDQIPLSPTSLKNPCLIFSAKNVPSISIQAYLTRILKYCPATNDVFLSVLIYLDRIVHHFHFTVFINSFNIHRFLIAGFTAASKFFSDVFYTNSRYAKVGGIPLHELNHLELSFFVFNDFNLFISLEDLQAYGDLLLSWYRQNGQNYNPTDVSCSIESPISHTPQQNQQDEQPRRPIMDRRLLSSHSIG

SEQ ID NO: 7344 - protein, 364 aa, Glycine max
  misc_feature (45)..(45): Xaa can be any naturally occurring amino acid
  misc_feature (64)..(64): Xaa can be any naturally occurring amino acid
  misc_feature (77)..(77): Xaa can be any naturally occurring amino acid
  misc_feature (101)..(101): Xaa can be any naturally occurring amino acid
MARRSLPLLKHLLSRRIPARSVTYMHRPGDGSPRPVTLIPGDGIXGPMVTGAVEQVMEAMHAPXYFEKFEVHGNMKXVPPEVLDSIRKNKVCLKGGLVTPXGGGVSSLNVQLRKELDLYASLVNCFNLPGLPTRHDNVDIVVIRENTEGEYSGLEHEVVPGVVESLKVITKFCSERIAKYAFEYAYLNNRKKVTAVHKANIMKLADGLFLESCREVATKYPGIKYNEIIVDNCCMQLVSKPEQFDVMVTPNLYGNLVANTAAGIAGGTGVMPGGNVGAEHAVFEQGASAGNVGSDKIREQKKANPVALLLSSAMMLRHLQFPAFADRLETAVEKVILEGKCRTKDLGGTSTTQEVVDAVIDALD

SEQ ID NO: 7345 - protein, 504 aa, Arabidopsis thaliana
MVVINSLRRLARTTQVHLHSRYATCMSGNSTSRRIFTTEAAPEKKNTVGSKGHDMLAPFTAGWQSADLDPLVIAKSEGSYVYDDTGKKYLDSLAGLWCTALGGNEPRLVSAAVEQLNTLPFYHSFWNRTTKPSLDLAKVLLEMFTANKMAKAFFTSGGSDANDTQVKLVWYYNNALGRPEKKKFIARKKSYHGSTLISASLSGLPPLHQNFDLPAPFVLHTDCPHYWRFHLPGETEEEFSTRLAKNLEDLIIKEGPETIGAFIAEPVMGAGGVIPPPATYFEKVQAVVKKYDILFIADEVICAFGRLGTMFGCDKYNIKPDLVTLAKALSSAYMPIGAILMSQEVADVINSHSSKLGVFSHGFTYSGHPVSCAVAIEALKIYKERNIPEYVAKVAPRFQDGVKAFASGSPIIGETRGTGLILGTEFVDNKSPNEPFPPEWGVGAFFGAECQKHGMLVRVAGDGILMSPPLIISPEEIDELISIYGKALKATEEKVKELKAQHKK

SEQ ID NO: 7346 - protein, 183 aa, Triticum aestivum
  misc_feature (93)..(93): Xaa can be any naturally occurring amino acid
PKHSTKFNNKQSNAVQPEEIDRARDQRARMAGMVFGLDAPMMAALQHLLDIPDGEAGAAGGEKQGPTRAYVRDARAMAATPADVKELPGAYAXVVDMPGLGSGDIKVQVEGEGVLVIGGERGREEKEDAKYRRMERRRKFVLPENADMEKISAVCRDGVLTVTVHKLPAPEPKKPKTIQVQVA

SEQ ID NO: 7347 - protein, 499 aa, Cicer arietinum
MEYNFLTYIIFLSLFLITTKLLFSKRKFKKLPPCPPSIPIIGNLHQVKQPIHHTFYNLSKKYGPIFTLKFGSQPVVVVSSASLVEECFTKNDIIFANRIHSAKTKYLGYNNTNMVSTSYGDLWRNLRRISSIEILSTHRLNSFSEIRKDETMRLIGKLAKKSHKDFTKVELRSLFGELTFNTIMRMVCGKRFYGEESDGTNAEEAKKFRDMMNEMQEFGLGSNLGDFVPLFKLFDFSGGHKKLKKVGEKMDALFQGLVDEHRNNKDKNLNTMIDHLLSLQESQPDYYSDQIIKGLIMALIVAGTETSSVTLEWAMSNLLNHPEILEKAKIELDNHIGQEHLIEEAEATKLQYLQNIISETLRLHPPVTMLLPHLSSHDCTIGGYDVPRNTMLMVNAWAIHRDPNLWADPMSFKPERFENGQGDIGGFIPFGMGRRACPGSGLALRTLGLTLGSLIQCFEWKRIGKEEVDMSEGSGTVVPKAIPLEAQCKARPIINKIFN

SEQ ID NO: 7348 - protein, 365 aa, Apium graveolens
MAKSSEIEHPVKAFGWAARDTTGLLSPFKFSRRATGEKDVRLKVLFCGVCHSDHHMIHNNWGFTTYPIVPGHEIVGVVTEVGSKVEKVKVGDNVGIGCLVGSCRSCESCCDNRESHCENTIDTYGSIYFDGTMTHGGYSDTMVADEHFILRWPKNLPLDSGAPLLCAGITTYSPLKYYGLDKPGTKIGVVGLGGLGHVAVKMAKAFGAQVTVIDISESKRKEALEKLGADSFLLNSDQEQMKGARSSLDGIIDTVPVNHPLAPLFDLLKPNGKLVMVGAPEKPFELPVFSLLKGRKLLGGTINGGIKETQEMLDFAAKHNITADVEVIPMDYVNTAMERLVKSDVRYRFVIDIANTMRTEESLGA

SEQ ID NO: 7349 - protein, 169 aa, Saccharomyces cerevisiae
  misc_feature (4)..(4): Xaa can be any naturally occurring amino acid
  misc_feature (39)..(39): Xaa can be any naturally occurring amino acid
  misc_feature (52)..(52): Xaa can be any naturally occurring amino acid
  misc_feature (105)..(105): Xaa can be any naturally occurring amino acid
  misc_feature (132)..(132): Xaa can be any naturally occurring amino acid
GAHXVTSNVVLVSGEGERFTVDKKIAERSLLLKNYLNDXGDDDDEDDDEIVXPVPNVRSSVLQKVIEWAEHHRDSNFPDEDDDDSRKSAPVDSWDREFLKVDQEXLYEIILAANYLNIKPLLDAGCKVVAEXIRGRSPEEIRRTFNIVNDFTPEEEAAIRRENEWAEDR

SEQ ID NO: 7350 - protein, 276 aa, Mesorhizobium loti MAFF303099
MPELITLNDGAAIPQLGLGVWQVDHGITADVVGWAIKAGYRLIDTAQGYQNEEGVGEAIRAADVARSELYITSKLRNGAHERDAALRAFDDTMEKLGIEQIDLFLIHWPVPSRDKYVEAWKTLIELKQAGRIKSIGVSNFNRDHLERIIGETGVVPVANQIELHPRFQQRELREFHAGHNIQTESWSPLGSGRLLGDPTIAGIAKKHGKSAAQTIIRWHLQQGLIVIPKSVRQDRIAANFDVFDFELDAQDLKTIAGMDSADGRDGPNPATAAFLF

SEQ ID NO: 7351 - protein, 383 aa, Rickettsia sp. COOPERI
DISRVSAEADCFTYDPGFMSTASCQSTITYIDGDKGILRHRGYDIKDLAEKSDFLEVAYLLIYGELPSGEQYNNFTKQVAHHSLVNERLHYLFQTFCSSSHPMAIMLAAVGSLSAFYPDLLNFKEADYELTAIRMIAKIPTIAAMSYKYSIGQPFIYPDNSLDFTENFLHMMFATPCTKYTVNPIIKNALNKIFILHADHEQNASTSTVRIAGSSGANPFACISTGIASLWGPAHGGANEAVINMLKKIGSSEYIPKYIAKAKDKNDPFRLMGFGHRVYKNYDPRAAVLKEACKEVLKELGQLDNNPLLQIAIELEAIALKDEYFIERKLYPNVDFYSGIIYKAMGIPSQMFTVLFAIARTVGWMAQWKEMHEDPEQKISRPR

SEQ ID NO: 7352 - protein, 357 aa, Anabaena variabilis ATCC 29413
MRKKIGILTSGGDCPGLNCVIRAVVSHATLTYDWEVFGIPYATQGLLERQAIALNMHGWDLRGIDPLLNMGGTILGTINKGDTLAHVDEMLASYEALALDALIVIGGDGSLGILHELASRGNWNLVAIPKTIDSDVALTERAVGFDTAVNTIVDALNRLTFTAASHDRVMIVEVMGRSAGHLALHAGIAGGADVILIPEISYTISGLCQYIAELRDRWQRKFAIVVVAEGAKLCLEDVQENIASACVSPKCGRGQYIAEQIARCSKNLIDTRVSVLGHIQRGGIPSALDRLTATVFGKTAVDLVAQGKFGQMVAWQNGEAIPVPIQDVVAQSPLHVNPQGSLVQSARCLGIYVGEKT

SEQ ID NO: 7353 - protein, 244 aa, Oryza sativa (japonica cultivar-group)
MFRYEKGGDVEAGTSGGARELYPGMTEPPEMRWALIRKIYVILSMQLLLTAAVAAVVVKVRAISHFFVSSHAGLGLYIFLIILPFIVLCPLYYYHQKHPVNLILLGLFTVAISFAVGMTCAFTSGKVILESAILTTVVVFSLTAYTFWAAKRGRDFSFLGPFLFASLIVLLVFAFIQILFPLGRISQMIYGGIASLIFSGYIVYDTDNIIKRYTYDQYVWAAVSLYLDVINLFLSLMTLFRAAD

SEQ ID NO: 7354 - protein, 478 aa, Bacillus anthracis str. A2012
MKIAGRNLNHHGTSAAFVKNKLLWKVEEMMKTKQTDELLAKDEQYVWHGMRPFSPNSTMVGAKAEGCWVEDIQGKRYLDGMSGLWCVNSGYGRKELAEAAYKQLQTLSYFPMSQSHEPAIKLAEKLNEWLGGEYVIFFSNSGSEANETAFKIARQYYAQKGEPHRYKFMSRYRGYHGNTMATMAATGQAQRRYQYEPFASGFLHVTPPDCYRMPGIERENIYDVECVKEVDRVMTWELSETIAAFIMEPIITGGGILMPPQDYMKAVHETCQKHGALLISDEVICGFGRTGKAFGFMNYDVKPDIITMAKGITSAYLPLSATAVKREIYEAFKGKGEYEFFRHINTFGGNPAACALALKNLEIIENENLIERSAQMGSLLLEQLKEEIGEHPLVGDIRGKGLLVGIELVNDKETKEPIDNDKIASVVNACKEKGLIIGRNGMTTAGYNNILTLAPPLVISSEEIAFVIGTLKTAMERI

SEQ ID NO: 7355 - protein, 198 aa, Zea mays
  misc_feature (83)..(83): Xaa can be any naturally occurring amino acid
MASSMLSSAAVVTSPAQATMGAPFTGLKSSAAFPVTRKANNDITSIASNGGRVSCMKVCPPAAKKKFETLSYLPDLTELELGXGEVDYLLRNKWIPCVEIRCWKHGILCNREHGSTPRNTTRARYWTMWEAFPLFRMALNSWLQGVERKTPKKGRNREVTPKTLPLHQGILRDFNTTTRPRPQGDSSFQSPQTSPHKL

SEQ ID NO: 7356 - protein, 438 aa, Pirellula sp. 1
MSPSLFFAAIFCGSCFLLFVGSADAIEEWEWKRLTRKRLPKLRSGKAIDAVSAKLADQSASAAKPDVTNHPSRWKGWRSASVQSVKDESLDCRSFVFVPTDGEPFPPFLGGQYLTVRLKDPSSGKNVSRCYSLSSGPDEPHYRITVKRVPGGTMSNLLHDTIDVGDRIEIQAPKGRFHYSVEESQSANLEPLNLVAAGIGITPMLSMLFQSLNERTDRDVNLFYQVRNAVDAPFLAPIREIAKMLEATTGVRVHLWFSKPEDDDLRPGDSVGRLSAERIVERLGHHRGEYLICGPDVFMNAIAEGLIECGASADRVMFESFGGKSKSAGALAVPACDPCSDASDVDESNSDDSVGWNVTFQTSGKSASFEAGMDGLLDVAESLDVDVDSGCRSGDCGACVRRLLSGEVRYAETPECDVEDGEAVLCVAKPVSEVVVDA

SEQ ID NO: 7357 - protein, 336 aa, Escherichia coli CFT073
MDKITQVLFSDIGKVTTQYVEVPHQQLKPHEVRIAPVFYGICGSDLHVLKGGHPFAKPPVVPGHEIAARVTEVGSDVKNVQPGDHVVVDPIMACMECRACKAGRFNLCEPPQVAGFRAPGFARSQHIVPARNCHVAPASLPLKVLAFAEPAACARHCVNRMPKASLESVLVIGAGTIGLSIVQALRIMGAGKITVIEPDAAKRALALKLGAAEVWAPGELAADVRFTGAIDVVAAQATLNDACTRVYAGGTVVCMGVPSGPREIPLPMMQRFERDLLNSGMYIPEDFDAVIEWLADGRFDTSELVTDLFAIEDAAAAFERAQQNDSIKVMLQFAPE

SEQ ID NO: 7358 - protein, 122 aa, Ureaplasma parvum serovar 3 str. ATCC 700970
MIQHMTRLKVADNTGAKEVGVIKVLGGSKKRYASVGDIVVVSVKKATPAGLIAKGQMAKAVIVRTKKSIRRESGLLIRFDENACVLIKEDKTPRGSRIFGPVAREIRDRGYTKIASLAPEVL

SEQ ID NO: 7359 - protein, 312 aa, Burkholderia cepacia R18194
MPLDPQAQALLAAFAQAPAIDFAQLTVPAYRASLADGGAFAPGDAVVAEEDWQIPASGRQLSARLYRPAVDGPLPLTVFFHGGGFVSCGIDTHANLCRSLAARARTLVLSVDYRLAPEARFPAAAHDACDAMRWAAASARDLGARAGALAVAGDSAGGNLAAVAALQLRGSGIAIAHQLLLYPVVDCATEHPSYETLGNGYFLTADMMRWFKRQYFDEGADRASPLASPLAAPDVAGAAPATIVSAEFDPLRDEAEAYALRLAQAGTPVTLVRWPGQLHGFASMLGAVDAADRVLTFGADALRRAFDATEAP

SEQ ID NO: 7360 - protein, 307 aa, Zea mays
MDGGRPEMRRTMTLSEQLSSTPDPAIRDFLKIPHDADVGGILHDGDSPSAVDAQGPRAGRTSGWKPLRDRLRLRRAAGAWQTPPKPGAAAAHAPTNSGNLSNRYNYNPGEAAAAFSRTFSRAPSLRAPSLRATPTFSRVASTRLGPASSRSSSRRPATYDFRDLDERRHDADADDGGEEEEEDDEGEEDDDEGDEEDEKEEAPAAQMSLMALLEQTDSQWDDDEDEEESGGGGGARKKGEGDDDEDDGEGREEEMVHVCCVCMVRHKGAAFIPCGHTFCRLCSRELWVSRGNCPLCNGFIQEILDIF

SEQ ID NO: 7361 - protein, 192 aa, Pirellula sp. 1
MSRFLLLTLALGCLMNAPQPVSAADSTADHECVLAHEAKTIEGKEVDLHDYEGKVVLIVNVASKCGYTKQYAGLQSLYEAHKDDGLVILGFPCNQFGSQEPGTNADILEFCSARYNVTFPMMGKVDVNGDDASPLYKQLTSVEAKPAGKGPISWNFEKFLIGRDGQVVGRYKSKVAPSDEELVSAIKSALKG

SEQ ID NO: 7362 - protein, 100 aa, Agrobacterium tumefaciens
MATGKVKWFDATKRFGFITPDDGGPDVFLHLSSITDPACPTLHPGFRLHYGVEQRGGKVTASDVRPAPVEQAVHRAPVTPPQGEEEFSDAFEREWGLRRG

SEQ ID NO: 7363 - protein, 327 aa, Triticum aestivum
  misc_feature (217)..(217): Xaa can be any naturally occurring amino acid
MPGDTEPRVVEDFLGVVQLLSDGSVVRGDEAVLRSNEPLPDVPGVQWKDVLYHAAHGLSVRVYRPASSVAGGSKLPVLVYFHGGGYCLGSFAEPNFHSFCLRAAAEISAVVLSVQYRLAPEHRLPAAIDDGASFLSWLRGQAELGAGADPWLAESADFAGTFLSGHSAGANLAHHVTVQVASGEIATTPVRIVGYILLSAFFAGADRTATEADPPGXVSLTTAMADQLWRMSLPVGASMDHPLANPFGPESPSLAPVELPPALVVAPLSDVLRDRVLGYGARLKDMGKAVEVVQFEGEQHGFSVRQPFGEAADELLRVIKRFVYSGN

SEQ ID NO: 7364 - protein, 94 aa, Zea mays
  misc_feature (22)..(22): Xaa can be any naturally occurring amino acid
  misc_feature (32)..(32): Xaa can be any naturally occurring amino acid
  misc_feature (41)..(41): Xaa can be any naturally occurring amino acid
ESSINKINTRDHQFIVRDTNPXGIKGQSLAAXLSAGISAGXSGRELQAIDDEWLDAARLKTFSECVRDAIAGLGVAGHVNHRTLQEWDRATGGV

SEQ ID NO: 7365 - protein, 143 aa, Glycine max
MAMAFKMATTGMWVTDECKNSFMEMKWKKVHRYIVFKIDEKSRLVTVDKVGGPGESYGDLAASLPDDDCRYAVFDFDFVTVDNCRKSKIFFIAWSPTASRIRAKMLYATSKDGLRRALDGISYEVQATDPTEMGFDVIQDRAK

SEQ ID NO: 7366 - protein, 455 aa, Rhodobacter sphaeroides 2.4.1
MRDDAPNSWESRADASSFYGFTDLPSVHQRGTVVLTHGKGPYIYDVHGRAYLDANSGLWNMVAGFDHPGLIEAAKAQYERFPGYHAFFGRMSDQTVMLSEKLVEVSPFARGRVFYTNSGSEANDTMVKMLWFLGAAEGHPERRKIITRVNSYHGVTAVSASMTGKPYNSLFGLPLPGFIHVGCPHYWRFGQAGETEAEFTQRLARELEATIIKEGPDTIAGFFAEPVMGAGGVIPPSEGYFQAVQPVLKRYGIPLIADEVICGFGRTGNTWGCQTYDFMPDGIISSKNITAGFFPMGAVILGPELADRLQAASEAVEEFPHGFTASGHPVGCAIALKAIDVVMNEGLAENVRALTPKFEAGLAYLAENPNIGEWRGKGLMGALEAVKDKATKTPFPGDLSVSERIANSCTDHGLICRPLGQSIVLCPPFIMTEAQMDEMFEKLGAALKKVFAEVA

SEQ ID NO: 7367 - protein, 363 aa, Methanothermobacter thermautotrophicus str. Delta H
MTYTSGRILGSMCTSSHPLARRVYCDFLESNLGDPGLFRGTRELESGVIGMLGELLSEPDAAGHIITGGTEANLMAMRAARNMAGAEKPEIIVPKSAHFSFRKAADILGLRLREAELDQDYRVDVESVRKLISENTVAVVGVAGTTELGRIDPVEELSEICLDEDIHLHIDAAFGGFIIPFLRETGAELPEFDFKLQGVSSITVDPHKMGLAPIPSGCILFRDASYLDAMSIETPYLTEKQQSTIVGTRTGASAAATWAIMKHMGREGYRKLALRVMGVTRRLRDGLVELDYQLVVEPELNIVAFNHPAMGPHELADRLEELGWAVSVSSCPPAIRVVLMPHIMEEHIELLLRDLEGIRLREE

SEQ ID NO: 7368 - protein, 250 aa, Rehmannia glutinosa
MVKNYPTVSEEYLNAVEKCKKKLRGLIAEKNCAPIMLRLAWHSAGTFDQCSKTGGPFGTMRFKAEQGHAANNGLDIALRLLQPIREQFPILSHADFYQLAGVVAVEVTGGPEVPFHPGRPDKEEPPVEGRLPDATKGSDHLRDVFTKQMGLSDQDIVALSGAHTLGRCHKERSGFEGPWTANPLIFDNSYFKELLSGEKEGLLQLPSDKALLADPSFRPLVEKYAADEDAFFADYAEAHLKLSELGFADA

SEQ ID NO: 7369 - protein, 441 aa, Lactococcus lactis subsp. lactis Il1403
MNKSAKLIVLSVIYERKKMTLLIKNGRLVDPKSNRDEVLDILIENDKIVKIGLNLSVENAEIVDARGLVVAPGLIDVHVHFREPGQTHKETIHSGAKSAAAGGFTRVVMMANTKPILSTPKVLTETLEIADKEDIKIDAVGSITQDFDGEHLTDFDELIKAGAIGFSDDGIPLTDAGVLRKALQKAKLTDSLISIHEEDPNLIGTLGVNDGEVAHKCGFTGAPTVSEYSMMARDSMIAYETGARLHIQHLSAGESVEVVRFAKNLGAKITAEVTPQHFSITEQMIFEQGTNAKLNPPLRSTTDIGKIIEGLKDGTIDVIATDHAPHTREEKNVSLDKAPSGMIGLETSLQLGLTNLVAKGHLTLSELLTKMTVNPAKLYNFDAGYLAENGPADLVIFDAENDYQVGETFDSKATNSPFIKQKVQGQVKYTICDGKIVYQAK

SEQ ID NO: 7370 - protein, 351 aa, Clostridium beijerinckii
MKGFAMLGINKLGWIEKERPVAGSYDAIVRPLAVSPCTSDIHTVFEGALGDRKNMILGHEAVGEVVEVGSEVKDFKPGDRVIVPCTTPDWRSLEVQAGFQQHSNGMLAGWKFSNFKDGVFGEYFHVNDADMNLAILPKDMPLENAVMITDMMTTGFHGAELADIQMGSSVVVIGIGAVGLMGIAGAKLRGAGRIIGVGSRPICVEAAKFYGATDILNYKNGHIVDQVMKLTNGKGVDRVIMAGGGSETLSQAVSMVKPGGIISNINYHGSGDALLIPRVEWGCGMAHKTIKGGLCPGGRLRAEMLRDMVVYNRVDLSKLVTHVYHGFDHIEEALLLMKDKPKDLIKAVVIL

SEQ ID NO: 7371 - protein, 427 aa, Campylobacter jejuni subsp. jejuni NCTC 11168
MQNQILKNLDLKHIWHPCTQMKDHETLPLIPIKKAKGVWLYDFDDKAYMDCVSSWWVNLFGHCNEKIANAIKKQVDELEHVILAGFTHEPIIKLSARLCEKVGRNFNKCFYADNGSSAIEVALKMSFHYHLNKGVKKSKFLSLSNSYHGETLGALSVGDVALYKDTYKALLLECLSTPVPQGKDYTKELEILKDILEKNASEICAFILEPLVQCAGNMHMYEARFIDEAIKLCHKFGVQVIFDEIAVGFGRTGTLFALHQCKQSPDFICLSKGITGGFMPLSVVLTRDEIYNAFYDTYESQKAFLHSHSYTGNTLACAAANAVLDIFEDENILVKNQILSEFIKKEFSRLEKFDFLGNFRTCGMISAFDILSTKYKRVGLFVFQKALEKGLLLRPLANTIYFMPPYIITKEQIVYVLESLEQIFKEF

SEQ ID NO: 7372 - protein, 486 aa, Azoarcus sp. EbN1
MTLALNDPDLFRSRCLVGGTWADADSGATIAIHNPATGEQLGTIPKMGAAETRRAIDAASRAWPAWRALTAGARARVLRKWFDLIVEHQEDLALLMTSEQGKPLGEARGEVLYAASFVEWFAEEAKRIYGDVIPGHQPDKRIVVTKEPVGVCAAITPWNFPLAMITRKAGPALAAGCTMVLKPATQTPYSALALAVLAERAGVPAGVFSVLTGSATEIGGELTANPIVRKLTFTGSTEVGIKLAAQCAPTIKKLSLELGGNAPFIVFDDADLDAAVDGALASKYRNTGQTCVCANRLLVQDSVYDAFAEKLTAAVAKLKVGNGVDEGVTQGPLIDMRAVEKVEEHIADALAKGARVVTGGGRHALGRTFFEPTILADVTPQMKVAREETFGPVAPLFRFKDEAEAIRMANDTEFGLAAYFYSVGMNRVWRVSGALEYGIVGINTGIISTEVAPFGGMKSSGLGREGSKYGIEDYLEIKYLCMGGVQ

SEQ ID NO: 7373 - protein, 356 aa, Verticillium fungicola
MSRANPPNNASASRKISFNVSEQYDIQDVVGEGAYGVVCSAIHKPSGQKVAIKKITPFDHSMFCLRTLREMKLLRYFNHENIISILDIQKPRGYDSFNEVYLIQELMETDMHRVIRTQDLSDDHCQYFIYQTLRALKAMHSANVLHRDLKPSNLLLNANCDLKVCDFGLARSAASQEDNSGFMTEYVATRWYRAPEIMLTFKEYTKAIDVWSVGCILAEMLSGKPLFPGKDYHHQLTLILDVLGTPTMEDYYGIKSRRAREYIRSLPFKKKVPFRTLFPKTSDLALDLLEKLLAFNPVKRITVEEALKHPYLEPYHDPEDEPTAPPIPEEFFDFDKHKDNLSKEQLKQLIYQEIMR

SEQ ID NO: 7374 - protein, 137 aa, Aspergillus nidulans FGSC A4
MPASVHSQDNDQSMLDAQAQNQDHIDETLLEQKRIIVLPGATDTAASFQFEGEGHTLGNALRFAIMKNPEVEFCGYTIPHPSESKMNIRIQTYDSTTAVEALEKGLDTLMDLCDVVTDKFTAARDEFNAEQANRMES

SEQ ID NO: 7375 - protein, 166 aa, Zea mays
MATSFQGTTTKCTACDKTVYLVDKLTADNRIYHKACFRCHHCKGTLKLANYNSFEGVLYCRPHFDQLFKRTGSLDKSFEGTPKVVKPERNVGNENATKVSSAFAGTREKCVGCSKTVYPTERVTVNNTMYHKSCFKCCHGGCTISPSNYIAHEGKLYCKHHHISVG

SEQ ID NO: 7376 - protein, 498 aa, Shewanella oneidensis MR-1
MSTPKTRSDWENLAVSLAINGKAFINGEYRDASSGNTFDCISPIDGRLLAPVASCDLMDANIAVANAREVFDSGVWSKAAPVKRKQVMIRFAELLEENANELALLETLDMGKPIRFSKAVDVAGAARAIRWSGEAIDKLYDELAPTAHNEIGMITREPVGVVAAIVPWNFPLLMACWKLGPALVTGNSVILKPSEKSPLTAIRIAELAVQAGIPKGVLNVLPGYGHTVGKALALHMDVDTLVFTGSTKIAKQLMIYAGESNMKRVWLEAGGKSPNIVFNDAPDLKAAAVAAAEAIGFNQGEVCTAGSRLLVESGVKDELVGLIAEELASWQPGHPLEPTTVSGAVVDKQQLDTILSYIKAGQNEGASLVYGGQQVLAETGGVYVQPTVFSNVKNQMKIASEEIFGPVLSVIEFNGMEEAIAIANDTIYGLAAGVWTADISKAHKTAKALRSGMVWINHYDGGDMTAPFGGYKQSGNGRDKSLHSFDKYTEIKATWIVL

SEQ ID NO: 7377 - protein, 446 aa, Shewanella oneidensis MR-1
MADSPNNLAHEHPSLEHYWMPFTANRQFKASPRLLAQAEGMYYTDINGNKVLDSTAGLWCCNAGHGRREISEAVSKQIRQMDYAPSFQMGHPIAFELAERLTELSPEGLNKVFFTNSGSESVDTALKMALCYHRANGQASRTRFIGREMGYHGVGFGGISVGGLSNNRKAFSGQLLQGVDHLPHTLDIQHAAFSRGLPSLGAEKAEVLEQLVTLHGAENIAAVIVEPMSGSAGVILPPQGYLKRLREITKKHGILLIFDEVITAFGRVGAAFASQRWGVIPDIITTAKAINNGAIPMGAVFVQDYIHDTCMQGPTELIEFFHGYTYSGHPVAAAAALATLSIYQNEQLFERSFELERYFEEAVHSLKGLPNVIDIRNTGLVAGFQLAPNSQGVGKRGYSVFEHCFHQGTLVRATGDIIAMSPPLIVEKHQIDQMVNSLSDAIHAVG

SEQ ID NO: 7378 - protein, 462 aa, Arabidopsis thaliana
MASNGVDEQIKLVEGPAGYVLEDVPHLSDYILDLPTYPNPLQSNAAYSVVRQYFVDEDDTVQEKIVVHKDSPRGTHFRRAGPRQKVYFKPSDVRACIVTCGGLCPGLNTVIREIVCGLHFMYGVTEVIGVDCGFRGFYSKNTVALTPKTVSDIHKRGGTILGTSRGGHDTSKIVDNIQDREINQVYIIGGDGTQKGANAIYKEIRRRGLKVAVAGIPKTIDNDIPVIDKSFGFDTAVEEAQRAINAAHVEATSVENGIGIVKLMGRYSGFIAMYATLASRDADCCLIPESPFYLEGKGGLYEFIAKRLRENGHMVIVIAEGAGQDLVAESIEQQDASGNKLLKDVGLWMSLKIKEYFAKHNVMDITLKYIDPTYMIRAIPANASDNVYSTLLAQSAVHGAMAGYTGFVSGLVNGRHTYIPFNRITERQNKVVITDRMWARMLSSTNQPSFMNPPKGTTEFTD

SEQ ID NO: 7379 - protein, 337 aa, Zymomonas mobilis
MKAAVITKDHTIEVKDTKLRPLKYGEALLEMEYCGVCHTDLHVKNGDFGDETGRITGHEGIGIVKQVGEGVTSLKAGDRASVAWFFKGCGHCEYCVSGNETLCRNVENAGYTVDGAMAEECIVVADYSVKVPDGLDPAVASSITCAGVTTYKAVKVSQIQPGQWLAIYGLGGLGNLALQYAKNVFNAKVIAIDVNDEQLAFAKELGADMVINPKNEDAAKIIQEKVGGAHATVVTAVAKSAFNSAVEAIRAGGRVVAVGLPPEKMDLSIPRLVLDGIEVLGSLVGTREDLKEAFQFAAEGKVKPKVTKRKVEEINQIFDEMEHGKFTGRMVVDFTHH

SEQ ID NO: 7380 - protein, 280 aa, Streptococcus pneumoniae TIGR4
MNTYQLNNGVEIPVLGFGTFKAKDGEEAYRAVLEALKAGYRHIDTAAIYQNEESVGQAIKDSGVPREEMFVTTKLWNSQQTYEQTRQALEKSIEKLGLDYLDLYLIHWPNPKPLRENDAWKTRNAEVWRAMEDLYQEGKIRAIGVSNFLPHHLDALLETATIVPAVNQVRLAPGVYQDQVVAYCREKGILLEAWGPFGQGELFDSKQVQEIAANHGKSVAQIALAWSLAEGFLPLPKSVTTSRIQANLDCFGIELSHEERETLKTIAVQSGAPRVDDVDF

SEQ ID NO: 7381 - protein, 266 aa, Glycine max
GNIISVMVYLAPVPTFYRIYKKKCTDGFHSLPYLLSLMSSMLWLYYAFLKIHDGVVPLITINSIGCVIELIYILTYIKYAHKDARNLTYTLFAAMNIGFLALVLSSRFALNGSHRVKVIGWICDAVSLSVFASPLSIMAKVIRTKSVQFMPFYVAFILTLNAITWFVYGLSMQDKCIYIPNVGGFALGLVQMVLYGIYRKGSESEKEQGLGEGVINIVVVNPLGPAEVFPIAVDDNKVKDLVVVDDVTVSQQEKEKNVEAKDDCPV

SEQ ID NO: 7382 - protein, 306 aa, Escherichia coli CFT073
MSSTMALEKGIAELVEEFIAAGRPSSRQQSITQRREGYIASAVLAGETETRVDIQTIELEGMTLRIVSPLNAPTLLPTIIYYYGGCFVSGGFATHDNQLRQLAYYGQCRIIAVQYRLAPEHTFPAAHDDAQRGAELVRQHAERLGVDKQRITLAGDSAGGHLALVTALRLKRAGEWQPAQLILIYPMLDATGHFESYIRNGHDYIITRDTLLSGFEMYLPGIERRHPEASPIWRNDFNGLPPVHIITAEYDPLCDEGEALYHRMTGQGVQCTCQRYLGVIHGFFQLGGISEAARSALRDVAWRAGR

SEQ ID NO: 7383 - protein, 327 aa, Glycine max
MRPPTRPPTRPPTRPGNPNNNNLFDGCQGESDHWSELDTDLYHWTKALRPVQWFPGHIAKAEKELKEQLKLMDVVIEVRDGRIPMSTSHPQMDLWLGNRKRILVLNREDMISTADRNAWADYFTRNGTKVVFSNGQLGMGTMKLGRLAKELAADVNVKRRSKGLLPRAVRAGIVGYPNVGKSSLINRLLKRRMCPAAPRPGVTRELRWVRFGKDLELLDSPGILPMRISDQSAAIKLAICDDIGERSYDVADVAAILVQMLSKLPTVGRDALCKRYKIDVDCRDGRIFIEKLAVRVFNGDVHQAAFRVLADFRKGKFGWTALERPPK

SEQ ID NO: 7384 - protein, 391 aa, Synechocystis sp. PCC 6803
MGKNLLEQLRQFTVVVADTGDIQAIETFTPRDSTTNPSLITAAAQMPQYQEIVDSTLLKAKDEAGENASIKDIVRLAFDRLAVAFGLKILQIIPGRVSTEVDARLSYDTEATIAKARYLIGEYAKAGIDKKRILIKIASTWEGIKAAEVLEQEGIHCNLTLLFGLHQAIACAEAKVTLISPFVGRILDWYKKSTGKEYDSHEDPGVQSVTTIYNYYKRFGYKTEVMGASFRNIGEIIELAGCDLLTISPQLLDQLRNTEGDLPRKLDPATVPQDIEKIVMDKATFDKMHAEDPMASEKLAEGIAGFTKALEVLEHLLEERLKVLDGQEHIKHGAEEIFHAYDLDGDGFITREEWAGTDVVFDALDRDHDGKITAAEMSAGLGAAFRLASVG

SEQ ID NO: 7385 - protein, 350 aa, Glycine max
  misc_feature (201)..(201): Xaa can be any naturally occurring amino acid
DQKSSILKHSNVRPGLACGNTIVLKTDEQTPLSALYASKLFHEAGLPAGVLNVVSGFGPTAGAALASHMEVDKLAFTGSTDTGKVVLELAAKSNLKPVTLELGGKSPFIVCEDADVDQAVELAHFALFFNQGQCCCAGSRTFVHESVYDEFVEKAKARALKRVVGDPFKGGIEQGPQIDSDQFEKILRYIRSGVESGATLXTGGDKLGNKGFYIQPTVFSNVKDGMLIAKDEIFGPVPSILKFKGLGEVVQRANNPRYGLSAGVFTKNMDPANPFTRALKVGTVWINCFDTFDAAIPFGGDKMSGQGREKGEYSLQNYLQVKAVVNPFKNPAWLLETLVPSLDPSPPGPP

SEQ ID NO: 7386 - protein, 250 aa, Lycopersicon esculentum
MGKCYPTVSEEYLKAVDKCKRKLRGLIAEKNCAPIMLRLAWHSAGTYDVCSKTGGPFGTMRFKAELQHGANNGLDIALRLLEPIREQFPTLSHADFHQLAGVVAVEVTGGPDVPFHPGREDKPEPPVEGRLPDATKGCDHLRDVFKKQMGLSDQDIVALSGAHTLGRAHKERSGFEGPWTANPLIFDNSYFTELLSGEKQGLLQLPSDKALLCDPAFRPLVEKYAADEDAFFADYAEAHLKLSELGFAEA

SEQ ID NO: 7387 - protein, 294 aa, Schizosaccharomyces pombe
MPFIKAVKSSPYFSRYQTKYRRRREGKTDYYARKRLIAQAKNKYNAPKYRLVVRFSNRFVTCQIVSSRVNGDYVLAHAHSSELPRYGIKWGLANWTAAYATGLLVARRALAKVGLADKYEGVTEPEGEFELTEAIEDGPRPFKVFLDVGLKRTSTGSRVFGAMKGASDGGLFIPHSPNRFPGFDIETEELDDETLRKYIYGGHVAEYMEMLIDDDEERYQKQFSGLIADGIESDQLEDIYAEAYAKIREDPSFQKSGKDAAAFKAESLKYTQRKLTAEERKERFNAKVIEAGRA

SEQ ID NO: 7388 - protein, 199 aa, Triticum aestivum
MEGVGARLGRSSARYGPAMTFTGPVRKWRKEWVTISAATATATSAAASSTGTGSRGNNLILFKWTPLNGANEGDEEQTAPAKTATRRRRYVPVSVVQDQRQESAKSDDENKANDGEPSSTETEQSIGKTNMDDILMDESQASDEVRDSGNFVGGTDINLNLGPKDPDREDEGDTGEQHEVRTEHRLKRKSVTPDLEMRM

SEQ ID NO: 7389 - protein, 257 aa, Brassica napus
IQFLLECDEARVDYEDLYAAVMRGDQESCLLYVDKLKQRCVDGFKEGVLSIEQLASVDGLCEWVLKAIGASDPVQTYNINLSVFTSIPDLWGIDQLFPIVPIHKLDQRPGARGVLSDLTCDSDGKIDKFIGGESSLPLHELDGGGGGRYFLGMFLGGAYEEALGGVHNLFGGPSVVRVSQSDGPHSFAVTRAMPGQSSADVLRAVQHEPEIMFQSLKHRAEKLMHTKGGGEDEDDEELNNVVACLDRSFNNMPFLAT

SEQ ID NO: 7390 - protein, 346 aa, Dictyoglomus thermophilum
MSKMRIGVLTGGGDCPGLNPAIRGIVMRALDYGDEVIGLKYGWAGLLKADTMPLSLEMVEDILEIGGTILGSSRTNPFKKEEDVQKCVENFKKLNLDALIAIGGEDTLGVASKFSKLGLPMIGVPKTIDKDLEETDYTLGFDTAVEVVVDAIKRLRDTARSHARVIVVEIMGRHAGWLALYGGLAGGADYILIPEVEPNLEDLYNHIRKLYARGRNHAVVAIAEGVQLPGFTYQKGQEGMVDAFGHIRLGGVGNVLAEEIQKNLGIETRAVILSHLQRGGSPSIRDRIMGLLLGKKAVDLVHEGKSGLFVAVKGNELVPVDITLIEGKTKNVDPAFYESVKTFFNK

SEQ ID NO: 7391 - protein, 500 aa, Atriplex centralasiatica
MAFPMPVRQLFIDGEWREPLLKNRIPIINPSTEEIIGDIPAATAEDVEVAVVAARKAFKRNKGRDWAATSGAHRARYLRAIAAKITERKDHFVKLETLDSGKPLDEAVLDIDDVATCFEYFAGQAEALDAKQKAPVTLPMDRFKSHVLRQPIGVVGLISPWNYPLLMATWKIAPALAAGCTAVLKPSELASVTCLEFGEVCNEVGLPPGVLNILTGLGPDAGAPIVSHPDVDKIAFTGSSATGSKIMASAAQLVKPVTLELGGKSPVIMFEDIDIETAVEWTLFGVFWTNGQICSATSRLLVHESIAAEFVDRMVKWTKNIKISDPFEEGCRLGPVISKGQYDKIMNFISTAKSEGATILCGGSRPEHLKKGYYIEPTIITDITTSMQIWKEEVFGPVICVKTFSTEDEAIELANDTEYGLAGAVFSKDLERCERVTKALEVGAVWVNCSQPCFVHAPWGGVKRSGFGRELGEWGIENYLNIKQVTSDISDEPWGWYKSP

SEQ ID NO: 7392 - protein, 425 aa, Blastocladiella emersonii
MTLIDKLMEKTKKVVGSSDKDAPAPASPSSPSTAAGAGSASSTASSTTTAAASGNLSIPSPLVAGSTTSSSISHAQKMATAAHTNSDYSPSPAATPSAPLDAVAERRRRKTTLADLELRQTLGTGSFGRVHLVRLRSTGKYYAMKVLKKAEVVKHKQVEHTLNEKGILEQIDHPFLVALHSSFQDSANLYMVMEYVTGGELFTYLRRSQRFSNNVAKFYAAEVVLAFEYLHSKDIIYRDLKPENLLLDAQGHVKITDFGFAKHVPDITWTLCGTPDYLAPEIIQSRGYGRAVDWYALGVLIFEMLAGYPPFYDEDHVRMYEKILQGKVKWPSHFDPAAKDLLKRLLTTDLTKRYGNLKGGSKDIKMHKWFAGLDWTKLFNKQIPPPYTPPNRGDGDTSNFDAYPEETEPYGKVQPDPYAQLFKDF

SEQ ID NO: 7393 - protein, 200 aa, Nicotiana tabacum
MATSGNKNMNAKLVLLGDVGAGKSSLLLRFVKGQFIEFQESTIGAAFFSQTVAVNDATVKFEIWDTAGQERYHSLPPMYYRGAAAAIIVFDITNQASFDRAKKWVQELQAQGNPNMVMALAGNKADLLDARKVAAEEAQTYAQENGLFFMETSAKTASNVNDIFYEIANRLPRLQPAQNPSGMVLMDRPAQTPASASCCS

SEQ ID NO: 7394 - protein, 500 aa, Atriplex centralasiatica
MAFPMPVRQLFIDGEWREPLLKNRIPIINPSTEEIIGDIPAATAEDVEVAVVAARKAFKRNKGRDWAATSGAHRARYLRAIAAKITERKDHFVKLETLDSGKPLDEAVLDIDDVATCFEYFAGQAEALDAKQKAPVTLPMDRFKSHVLRQPIGVVGLISPWNYPLLMATWKIAPALAAGCTAVLKPSELASVTCLEFGEVCNEVGLPPGVLNILTGLGPDAGAPIVSHPDVDKIAFTGSSATGSKIMASAAQLVKPVTLELGGKSPVIMFEDIETVVAVEWTLFGVFWTNGQICSATSRLLVHESIAAEFVDRMVKWTKNIKISDPFEEGCRLGPVISKGQYDKIMNFISTAKSEGATILCGGSRPEHLKKGYYIEPTIITDITTSMQIWKEEVFGPVICVKTFSTEDEAIELANDTEYGLAGAVFSKDLERCERVTKALEVGAVWVNCSQPCFVHAPWGGVKRSGFGRELGEWGIENYLNIKQVTSDISDEPWGWYKSP

SEQ ID NO: 7395 - protein, 449 aa, Triticum aestivum
MYRAKRAALSPKVKRRVGKYELGRTIGEGTFAKVRFAKNTETMEPVAIKILDKEKVQKLRLVEQIRREICTMKLIKHPNVVRLHEVMGSKARIFIVLEYITGGELFDTIYTNGRLKEEEARKYFQQLINAVDYCHSRGVYHRDLKLENLLLDAAGNLKVSDFGLSALTEQVKADGLLHTTCGTPNYVAPEVIEDRGYDGAAADIWSCGVILFILLAGFLPFEDENIIALYKKISEAQFTCPSWFSTGAKKLITRILDPNPATRITIPQILEDPWFKKGFKPPVFDDKYETSFDDVYAAFGDSEDQHVKEETEHKPTSMNAFELISLNQGLNLDNLFEAKEEHKRETRFTSQCPPKEIISKIAEAARPLGFDIQKKNYKMRMENPKAGRKGNLNVATEVFQVAPSLHVVELKKAKGDTLEFQMFYRSLSTQLKDVVWKCGGEVEDNGTAA

SEQ ID NO: 7396 - protein, 229 aa, Haloarcula marismortui ATCC 43049
MSVAVDRAGAVALTERVGKVRVRVQSLSSHAPVLGQQERGVFVDPRAVAHDLHVRRFGAEPQMAAGTTFLCLSVISPDMADLQLRSPAFDDGDRIPEEHGYSAANTNPPLEIENVPSDASSLLLIVDDPDAEEPAGKVWDHWLVWNIPPDIGRIPAGWEPDEATEGQNDFGEVGWGGPNPPDREHTYRFLLYALDTTLDRSPAADKDDVYDAASGHVVEKAQLNGTYPA

SEQ ID NO: 7397 - protein, 618 aa, Glycine max
DQLRRPPPQGVTLMMSDSTNVLSPGRTTSESVVADALLRNISAAKGRVITTQFASNIHRLGSVKAAADLTGRKLVFVGMSLRTYLDAAWKDGKSPIDPSTLVKAEDIDAYAPKDLLIVTTGSQAEPRAALNLASYGSSHAFKLAKEDVVLYSAKVIPGNESRVMKMLNRISEIGSTIVMGKNEGLHTSGHAYRGELEEILRIVKPQHFLPIHGELLFLKEHELLGKSTGIRHTTVIKNGEMLGVSHLRNRRVLSNGFISLGKENLQLMYSDGEKAFGTSSDLFIDERLKIALDGIIVVNMEIFRPQNLDSPVENTLKGKIRITTRCLWLDKGKLLDALHKAAHAALASCPVSCPLAHMEKIVSEMLRKMVRKYSGKRPEVIAIAIENPAAVLANEINTKLSGKLNVDGMSALRKVVDGHEKENQRTEMQIRDRIDVGGLLPTKDNAISSGAEDGLSDAEDPNDYFKPFVESSPVEKSIKTNNGYVPRKEKSSPLKDDCSEDTEECNSVNTSDSEPKSSKSAKRNKWKHEEVKKLIDMRGELNDRFQVVKGRMALWEEISQNLLANGISRSPGQCKSLWTSLLQKYEQEVKNEKKNKKKWPYFEDMERILADNKTLETK

SEQ ID NO: 7398 - protein, 433 aa, Porphyromonas gingivalis W83
MTIDEMLRLDRNHLWHPYTSTIDPLPVFPVKRAEGVRIYLEDGRELIDGMSSWWAAIHGYNHPRLNAAVERQLREMSHIMFGGFTHRPAVELAELLLSILPSELNKIFYADSGSVAVEVAMKMALQYQQACGQSRRTRFATIRSGYHGDTWHAMSVCDPVTGMHGIFSGALPVQYFLPQPKSRFGGEWLPADIEPLRDLLSAKGAELAALILEPIVQGAGGMYFYYPRYLVEARRLCSEAGVLLIFDEIATGFGRTGELFALRHAATVPDILCLGKSLTGGYMTLSATITTEAIARTICSGEAGCFMHGPTFMGNPLACAVAAESIRLLLESPWQERVRAIEAQLREELSPAISFDGVAEVRVLGAIGVVEMKRPVDMATLQQRFIREGIWVRPFGRLCYLEPPFIISPEDLRILTHGLLRVLGQDRSISFTR

SEQ ID NO: 7399 - protein, 434 aa, Pyrobaculum aerophilum str. IM2
MTEKWYQLSVEIHRKYGGKISITPKVPIRSMDDFAIYYTPGIAEVSRQIHKNPELAFELTSRWNIIGVITDGTRVLGLGNIGPEAAYPVMEGKALIFKYLGGVDAVPIPIRVKTQEEFVFVAKALEPALGGINLEDIESPKCFYLLERLREELRIPVWHDDQQGTATATLAGLINALKLVGKKISDVTIALIGAGASNIYTARILIKYGAKPGNLILVDSRGILHPERDDIDKLMIENPWKYKYAIETNAERRKGGIPEAMRGADVVIAASSPGPGVIKKEWVASMNKDAIVFALANPVPEIWPWEAKEAGAKIVATGRSDFPNQVNNSLIFPAVFRGALDVRATAITDEMLIAAAEEVAKFAEEKGIHEEYIIPKMTEWEVYVREAAAVAATASAQKVARIPRSYKEELEIAGSIIGKSIKMLEVLMMEKIIE

SEQ ID NO: 7400 - protein, 409 aa, Pyrobaculum aerophilum str. IM2
MSEQTVQVKTTGKILQSPCGPIIHGLEDVLIKSTSISDIDGEKGILWYRGYRIEELARLSTYEEVSYLILYGRLPTKRELEDYINRMKKYRELHPATVEVIRNLAKAHPMFALEAAVAAEGAYDEDNQKLIEALSVGRYKAEEKELAYRIAEKLVAKMPTIVAYHYRFSRGLEVVRPRDDLGHAANFLYMMFGREPDPLASRGIDLYLILHADHEVPASTFAAHVVASTLSDLYSSVAAAIAALKGPLHGGANEMAVRNYLEIGTPAKAKEIVEAATKPGGPKLMGVGHRVYKAYDPRAKIFKEFSRDYVAKFGDPQNLFAIASAIEQEVLSHPYFQQRKLYPNVDFWSGIAFYYMGIPYEYFTPIFAMSRVVGWVAHVLEYWENNRIFRPRACYIGPHDLQYIPLEQR

SEQ ID NO: 7401 - protein, 293 aa, Zea mays
CVSATPSTLAASSTSSSSAIIQDIIRGLADTTAARVRTDAEATARASTDFGTNATADDAARPAAVFYPSCAADIAALLRASSASASPFPVSARGRGHSTRGQATAPGGVVVDMASLAVAAGPARLAVSVDGRYIDAGGEQLWVDVLHAALAHGLTPRSWTDYLRLTVGGTLSNAGISGQAFRHGPQISNVLELDVVTGTGDMVTCSKEKDADLFDAVLGGLGQFGIITRARIPLAPAPERARWLRLLYTGAADLTADQERLIADDERRGGALAGLMDYVEGSVVTDLQQGLIG

SEQ ID NO: 7402 - protein, 425 aa, Vibrio parahaemolyticus RIMD 2210633
MSEDNRQAATPEEEHRQKALDYHAYPTPGKIAVELTKPAETAGDLALAYSPGVAEPVREIAQNPDNVYKYTAKGNMVAVISNGTAILGLGNLGPLASKPVMEGKALLFKRFAGLDSIDIEVKHRTIDEFVDTVANIADTFGGINLEDIKAPDCFEIEKRLIERCDVPVFHDDQHGTAIVTAAGMLNAIELQGKKLEDSTIVCLGAGAAAVACMELLIKCGAMREKIYMLDRKGVIHTRRDDLNEYKQLFANNTDKRTLEDVIEGADLFLGVSGPNLLPPEALKLMADKPVVFACSNPDPEIKPELAHAVRDDLIMGTGRSDYPNQVNNVLCFPFIFRGALDVRASEINDDMKLAAVDAIRALAKEPVPESVLKAAGVEKLEFGSDYIIPKPMDPRLLPRVAKAVAQAAVDSGVARIEMPENYMAE

SEQ ID NO: 7403 - protein, 286 aa, Deinococcus radiodurans R1
MGWPEGRAPVAPEQGAPGPFFSDRGGVCWRHPAQVRQGKSGAGPAVPLRRTHMEFFIDTAIVDEIREINAWGVLSGVTTNPSLIVASGRDFKEVIGEIAELVPGGAISAEVTALDAEGMIKEGKDVAAWHKQVVVKLPLTPAGLQACKALTSEGIKTNVTLCFSVPQALLAARAGATYVSPFVGRVDDTGWDGSELIRQIKEAFVLGDIQTKVLAASIRHPQHVVQAALAGADVATIPYKVFTQMVKHPLTQAGLDSFMADWAKRQGASPETPPSEAGTNPVKKEG

SEQ ID NO: 7404 - protein, 264 aa, Triticum aestivum
MEAAVGGSWTRVRTLGRGASGAVVSLAADDLSGALFAVKSAPAAAADQLRREGDILSGLSSPHVLPCLGFRAAAGECQLFLEFAPGGSVADVAARSGGRLEECAVRAYAADVARGLAYLHGRSLVHGDVKARNVVVGADGRAKIADFGCARAVGSSDRPVGGTPAFMAPEVARGEEQGPAADVWALGCTVVEMATGRAPWSDMDDVLTAMHRIGYTDAVPEVPAWLSAEAKRFLAMCFARDARDRCTAAQLLEHPFLASAGCGV

SEQ ID NO: 7405 - protein, 503 aa, Triticum aestivum
MVAPAAIPQRQLFIDGDWRAPALGRRLPVINPTTEVTIGEIPAGTSEDVDAAVAAARAALKRNRGRDWSRAPGAVRAKYLRAIAAKMIERKSDLARLEALDCGKPLDEAAWDMDDVAGCFEFFAGHAEALDKRQNAAVALPENFKCHLKKEPIGVVALITPWNYPLLMAVWKVAPALAAGCTAVLKPSELASVTCLELGDVCKEIGLPSGVLNIVTGLGHEAGAPLSSHPDVDKVAFTGSYATGQKIMVAAAPTVKPVTLELGGKSPIVVFDDVDIDKAVEWTLFGCFWTNGQICSATSRLLIHKNIAKEFVDRMVAWSKNIKVSDPLEEGCRLGPVVSEGQYEKIKKFVANAKSEGATILTGGVRPKHLEKGFFIEPTIITDINTSMEIWREEVFGPVLCVKEFSTEEEAIELANDTHYGLAGAVISGDRERCQRLAEEIDAGCIWVNCSQPCFCQAPWGGNKRSGFGRELGEGGIDNYLSIKQVTEYTSDAPWGWYKAPAN

SEQ ID NO: 7406 - protein, 307 aa, Glycine max
IRLERLELLGICGLPDTIFRNAVEMALADSECYGLENPNARLSCFVNKAFANIGSDMAKLVPGRVSTEVDARLAYDTHAIIRKVHDLLKLYNDSNVPPQRLLFKIPSTWQGIEAARLLESEGIQTHLTFVYSFAQAAAAAQAGASVIQIFVGRIRDWARNHSGDTEIESAQLRGEDPGLALVTKAYNYIHKYGHKSKLMAAAVRNKQDLFSLLGVDYIIAPLKVLQSLKESVASPDEKYSFVRRLSPQSAAKYTFSDEELVRWDEDSLSKAMGPAAVQLLAAGLDGHADQAKRVEELFGKIWPPPNV

SEQ ID NO: 7407 - protein, 166 aa, Zea mays
MTKAATIYGSKTQSDALRPGPLRPANIIRNKFPTYKNGSNGIVIKLADGPEIPPLKEIVAKETADLLDRRQRLSVRELAMKFEKGLSTATLLSNEVKWRQVALMERDILLKNLKSVLESLRGQVTGKTKDEIEESISMVEILTVQLFKRESELVQQKEEVTKLAKS

SEQ ID NO: 7408 - protein, 337 aa, Zymomonas mobilis
MKAAVITKDHTIEVKDTKLRPLKYGEALLEMEYCGVCHTDLHVKNGDFGDETGRITGHEGIGIVKQVGEGVTSLKVGDRASVAWFFKGCGHCEYCVSGNETLCRNVENAGYTVDGAMAEECIVVADYSVKVPDGLDPAVASSITCAGVTTYKAVKVSQIQPGQWLAIYGLGGLGNLALQYAKNVFNAKVIAIDVNDEQLAFAKELGADMVINPKNEDAAKIIQEKVGGAHATVVTAVAKSAFNSAVEAIRAGGRVVAVGLPPEKMDLSIPRLVLDGIEVLGSLVGTREDLKEAFQFAAEGKVKPKVTKRKVEEINQIFDEMEHGKFTGRMVVDFTHH

SEQ ID NO: 7409 - protein, 286 aa, Zea mays
  misc_feature (207)..(207): Xaa can be any naturally occurring amino acid
MAPKAAAAARKTRVGPYEVGKTIGEGSFAKVKHARDSRTGAVRAIKVLDRNHVLRHRMVEQIKREISTMKLIKHPNVVQLHEVMASKTKIYMVLEFVDGGELFDKIVNSGRLGEDEARIYFHQLINAVDYCHSRGVYHRDLEPENLLLDSHGTLKVSDFGLSAFAPQTKEDGLLHTACGTPNYVAPEVSFSPLLSCQLICVVTLCDXCTSRCVSIAHFLQVLADKGYDGMAADVWSCGIILFVLMAGYLPFDDANLMRLYKLICHATFSCPTWFSSGARKFIKRIL

SEQ ID NO: 7410 - protein, 191 aa, Zea mays
  misc_feature (68)..(68): Xaa can be any naturally occurring amino acid
  misc_feature (158)..(158): Xaa can be any naturally occurring amino acid
MAQDDQSAARSTGTVNWFSDAKGYGFIAPDDGGDELFVHQSSIVSDGFRTLTVDEPVEYAIAVGNDGXTKAVDVTAPGGGSLNKKEMSSRGNGGSCFSCGEVGHMAKDCAGGKRYGGGGRRSGGEGSCYVCGNVGHFARDCRQNAGGNSGGGGGGECXNCGVVGHMAKDCRGGNRIRGRGSGGEGCYTWWR

SEQ ID NO: 7411 - protein, 352 aa, Bipolaris oryzae
MPPAGSGSSRKISFNVSEQYDIQDVVGEGAYGVVCSALHKPSGQKVAIKKITPFDHSMFCLRTLREMKLLRYFNHENIISILDIQKPRNYETFTEVYLIQELMETDMHRVIRTQELSDDHCQYFIYQTLRALKAMHSANVLHRDLKPSNLLLNANCDLKVCDFGLARSAASTEDNSGFMTEYVATRWYRAPEIMLTFKEYTKAIDVWSVGCILAEMLSGKPLFPGKDYHHQLTLILDVLGTPTMEDYYGIKSRRAREYIRSLPFKKKIPWKAMFPKTNDLALDLLERLLAFNPVKRISVEDALKHPYLEPYHDPDDEPGADPIPEEFFDFDKNKDNLTKEQLKLLIYQEIMR

SEQ ID NO: 7412 - protein, 202 aa, Triticum aestivum
  misc_feature (144)..(144): Xaa can be any naturally occurring amino acid
MKPCTAIALLLVVAAQCAALATAAGPRVIIVGAGMSGISAGKRLSEAGITDLVILEATDRIGGRIHKTKFAGVNVEMGANWVEGVNGDEMNPIWTMANGTGGLNLRTFRSDFDHLASNTYKQDGGLYDEKVVEKIIERMDEVEXSGSKLSAPFTTAATGLAVWPATPLHPWAWKAGDWGSLSHFSPDPAVQPNQFRNFGKLF

SEQ ID NO: 7413 - protein, 123 aa, Phytophthora infestans
MIQIQTKLKVNDNSGIKIGQCLKIYKKKVGKIGDTILISAKKLRLNQKKKIKIIKGDLFKALIIHTTYQKKSTIGNLIKFDKNCIIILNNQNKPLGTRIFGPITSEFRKQKNFKILALASNIL

SEQ ID NO: 7414 - protein, 481 aa, Papaver somniferum
SLVAVVITTFLYLIFRDSSPKGLPPGPKPWPIVGNLLQLGEKPHSQFAQLAETYGDLFSLKLGSETVVVASTPLAASEILKTHDRVLSGRYVFQSFRVKEHVENSIVWSECNETWKKLRKVCRTELFTQKMIESQAEVRESKAMEMVEYLKKNVGNEVKIAEVVFGTLVNIFGNLIFSQNIFKLGDESSGSVEMKEHLWRMLELGNSTNPADYFPFLGKFDLFGQSKDVADCLQGIYSVWGAMLKERKIAKQHNNSKKNDFVEILLDSGLDDQQINALLMEIFGAGTETSASTIEWALSELTKNPQVTANMRLELLSVVGKRPVKESDIPNMPYLQAFVKETLRLHPATPLLLPRRALETCKVLNYTIPKECQIMVNAWGIGRDPKRWTDPLKFSPERFLNSSIDFKGNDFELIPFGAGRRICPGVPLATQFISLIVSSLVQNFDWGFPKGMDPSQLIMEEKFGLTLQKEPPLYIVPKTRD

SEQ ID NO: 7415 - protein, 570 aa, Triticum aestivum
  misc_feature (313)..(313): Xaa can be any naturally occurring amino acid
MASHIILPPDGDDDEQQRREDEENDGGGSGSGGDGEQQQQGGGNAKAALPFSAMCVRISRDSYPNLRALRNASHASLTDAAYVKISEGDFGYVLDDVPHLADYIPDVPTYPNPLQDHPAYSTVKQYFVNEDDTVPQKVVVQKNSRRGVHFRRAGPRQRVNFESDEVKACIVSCGGLCPGLNTVIRELVCGLAHMYNVNNIFGIQNGYKGFYSSNYVAITPKTVNDIHKRGGTVLGTSRGGHDTKKIVDNIQDRGINQVYIIGGDGTQKGAYEIYKEIRKRGLKVAVAGVPKTIDNDIAIIDKSLGFGSPVEEXAQRAINSAHGEASSAENGIGLVKLMGRYSGFIAMYATPASRDVDCCLIPESPFYMDGEGGLLPYVERRLKENKHMVFVVAEGAGQDIIAKSIPASDQQDASGNKLLLDIGLWLTHKIKDHFKSKKMEMTIKYIDPTYMIRAIPSNAADNVYCTLLAHSAIHGAMAGYSFTVGMVNGRHAYIPFYRVTSTRNKVKITDRMWARLLSSTNQPSFLSQKDIDEAREADRLANKPPLPSVANHNVAKAFDQSASASSNGEI

SEQ ID NO: 7416 - protein, 513 aa, Glycine max
  misc_feature (219)..(219): Xaa can be any naturally occurring amino acid
  misc_feature (225)..(225): Xaa can be any naturally occurring amino acid
MGACVSTPQGCVGGRLSSSKKKTRKRRREGLRRRVTSRLCKESSEKVDVAGLPDCSFANPTFQAGSIEEAWFDSIAVFDSDCDDDYQSVPDDVVSLSGIEGGSVSSFPSSRDATRGVSTDQVQKQKELLAGSEAARSSDVQYFGVDVIDSQREPVFLDEISSVDANSNKDDGLLDNCGILPNNCLPCLASTIPSVEKRRSSSSSPPNARKKGSCKTFLXWKEGHXNATLFSSKMLLQRPIAGSQVPFCPIEKKMLDCWSQIDASTFKVRGVNYFKDKKKDFAPNYPAYYPFGVDVFLSPRKVDHIARFVELPVMSSSVKFPPILVVNVQVPLYPATLFQGETDGEGMSIVLYFKLSESYSKELPPPFQESIRRLMDDEVEKVKGFPVDTIAPFRERLKILGRVVNLEDLHLSAAERKLMQAYNEKPVLSRPQHEFYTGENYFEIDLDMHRFSYISRKGFEAFLERLKVCTLDVGLTIQGNKQEELPENVLCCIRLNGIDYMNYHQLGLTQDPL

SEQ ID NO: 7417 - protein, 50 aa, Lactococcus lactis subsp. lactis
KGFGFITTEEGNDVFAHFSAIQTDGFKTLDEGQKVTFDVEEGPRGPQAAN

SEQ ID NO: 7418 - protein, 400 aa, Candida albicans SC5314
MPIDINTKAKCYFDTRPLTKGERKIIKDSIPILEYLDIQFGEKFFKRLIKQFPQYKPYFNETHLKLLRQPRSFHHCLLEFARNIDDLRPMKDFIMRIASKHVARQVSPDQYRVFGQVLVEVMMDQFPKEFVDQEFVEAWTMAFRILANILINIEVREYQDKPWYGFKAFRVTRLQPECVGTKSFFITPVDGTPVPIPKRGQYLCMRWKFPGEKQERLREYTISEFPKNNEYRITVRYIPGGKVTTYIHEKLAVGDIVQVSPPCGDCYYRSSKRNMVMLAGGNGVVALAPMIEKGLAEGRKVKFLYSNRSTETRSFGQFFRDLKQKYGDQLEVVEYLSRRRVIDPIDKYYRRSLTVEDLDFIVPEDDVYLIGPRTYMKMIEDYLKGRGVNVTLDYFGPQEV

SEQ ID NO: 7419 - protein, 343 aa, Listeria monocytogenes EGD-e
MKAVVKTNPGYDQMELKDVEEPQVYGDKVKIKVAFTGICGSDIHTFKGEYKNPTTPVTLGHEFSGVVVEVGPDVTSIKVGDRVTSETTFETCGECIYCKEHDYNLCSNRRGIGTQANGSFAEFVLSREESCHVLDERISLEAAALTEPLACCVHSALEKTTIRPDDTVLVFGPGPIGLLLAQVVKAQGATVIMAGITKDSDRLRLAKELGMDRIVDTLKEDLAEVVLGMTGGYGAERVFDCSGAVPAVNQGLPLTKKKGDFVQVGLFAEKKNAIDEESIIQREIAYIGSRSQKPSSWILALDLLANGKIDTDKMITKVYGLDDWREAFEAVMAGNEIKVLVKS

SEQ ID NO: 7420 - protein, 350 aa, Listeria monocytogenes EGD-e
MRAAVLYENNVIKAEQIDEATCGKDQVRVEVKAVGICGSDIHKMQTRWKYPLPAVMGHEFAGVITEIGSEVTNVAMGDRVAGIPLEPCMECNYCKAGDFALCDNYRMVGSHFHGGFAENVVMKADNVISIGDLDFEEGAMIEPLAVSMHGVLGIQPRLGDTVIVFGIGTIGILVVQCLLLAGVKDIIAVDISDKKLADAREFGCKYTINPKNEDLKERVFAYTNGLGADIALECAGSKITQEQCLLVTKKKGKVGFLGIAYADVLLHEEAFENIFRRELTLKGFWNSYSAPFPGEEWRTSIEFVKQGRIKLKPLISHRYKLEETKEAFDMILSREHDYNKVMILPQKGDD

SEQ ID NO: 7421 - protein, 50 aa, Lactococcus lactis subsp. cremoris
KGFGFITSEDGQDVFAHFSQIQTSGFKTLDEGQKVTFDVEAGQRGPQAAN

SEQ ID NO: 7422 - protein, 475 aa, Synechocystis sp. PCC 6803
MYEKLQPPSVGSKITFVAGKPVVPNDPIIPYIRGDGTGVDIWPATELVINAAIAKAYGGERKINWFKVYAGDEACELYGTYQYLPEDTLTAIKEYGVAIKGPLTTPVGGGIRSLNVALRQIFDLYTCVRPCRYYPGTPSPHKTPEKLDIIVYRENTEDIYLGIEWAEGTEGAKKLIAYLNDELIPTTPALGKKQIRLDSGIGIKPISKTGSQRLVRRAILHALRLPKAKQMVTLVHKGNIMKFTEGAFRDWGYELATTEFRAECVTERESWILGNKESNPDLTIEANAHMIDPGYDTLTEEKQAVIKQEVEQVLNSIWESHGNGQWKEKVMVNDRIADSIFQQIQTRPDEYSILATMNLNGDYLSDAAAAVVGGLGMGPGANIGDSAAIFEATHGTAPKHAGLDRINPGSVILSGVMMLEFMGWQEAADLIKKGIGAAIANREVTYDLARLMEPKVDKPLKCSEFAQAIVSHFDD

SEQ ID NO: 7423 - protein, 50 aa, Lactococcus lactis subsp. cremoris
KGFGFITSEEGKDLFAHFSAIQSDGFKTLDEGQKVEFDVEEGQRGPQAAN

SEQ ID NO: 7424 - protein, 526 aa, Triticum aestivum
MAMAMRRAAALGARHILAASASASSRVASRRHMGSVDAGAAMDKIRAAGLLRTRGLIGGQWVDAYDGKTTEVQNPATGEVLANVACMGNRETADAITSANTTFYTWSKLTASERSKALRKWHDLLMSHKEELALLMTLEQGKPMKEALGEVNYGASFIEFFAEEAKRVYGDIIPPTLADRRLLVLKQPIGVVGAITPWNFPLAMITRKVGPALACGCTVVVKPSEFTPLTALAAADLALQAGIPAGALNVVMGNAPEIGGELMQSTQVRKITFTGSTAVGKKLMAGSANTVKKVSLELGGNAPCIVFDDADIDVAVKGSLAAKFRNSGQTCVCANRILVQEGIYEKFASAFVKAVQSLQVGNGLEESTSQGPLINEAAVEKVEKFVGDATSKGANIMLGGKRHSLGMSFYEPTVVGNVSNDMLLFREEVFGPVAPLIPFKTEEEAIHLANDTNAGLAAYMFTKSIARSWRVSEALEYGLVGVNEGLISTEVAPFGGVKQSGLGREGSKYGMDDYLEIKYVCMGNLG

SEQ ID NO: 7425 - protein, 327 aa, Chlamydia trachomatis D/UW-3/CX
MSSQFDQLKLWSVLVGDTGDPALIKTLGVQDATTNPSLILKVAQEPKYQSMLTEAISWGIRQNGDDVQTLTFVLDKIQVNLGLEILKHVPGRVSLEIDARLSFNTEAMVQRAIFLSQLFEKMGGDKKRLLVKIPGTWEGICAAEVLESQGIACNVTLIFNLVQAIAAAKAKVTLVSPFVGRIYDWWIAAYGAEGYSIEADPGVASVANIYSYYKKFDIPTQIMAASFRTKEQVLALAGCDFLTISPKLLEELKKDQQPVERKLSVEEAKKLDIQPVELSESVFRFLMNEDAMATEKLAEGIRIFSGDTQILESAVTEFIRQIAAQEA

SEQ ID NO: 7426 - protein, 188 aa, Triticum aestivum
  misc_feature (151)..(151): Xaa can be any naturally occurring amino acid
  misc_feature (185)..(185): Xaa can be any naturally occurring amino acid
MAIVYVLLVALITAASHAPHGAHGQTWHGDLAALAAAGKLRSDPNATLAASTDFGNITAALPAAVLFPSSPADVAALLRAAHTTVAWPYTISFRGRGHSVMGQALALGGVVVDMPSLGGPSSAARINVSADGQYVDAGGEQMWIDVLRAAXARGVAPQSWTDYLHTHVGGTLSNAGISGQTYRHXPQI

SEQ ID NO: 7427 - protein, 130 aa, Chlamydia trachomatis D/UW-3/CX
MTTESLETLVEQLSGLTVLELSQLKKLLEEKWDVTAAAPVVAVAGAAAAGDAPASAEPTEFAVILEDVPSDKKIGVLKVVREVTGLALKEAKEMTEGLPKTVKEKTSKSDAEDTVKKLQEAGAKAVAKGL

SEQ ID NO: 7428 - protein, 339 aa, Bacillus firmus
DQVLKKDGTPYKVFTPYYKAWAKERKRTPAVIKRDVLLGSVHKGTAPDREAETLFNNLIKKCSYDWSAIGEEHAIKRLQMFTKKRLSGYKANRDFPSITGTSRLSPYIKTGAVSSRSIYYHILNAEADSYSAETFLKELAWRDFYRMVHFYEPDCKDREIMEGYRELNWSHDQDDLTSWKRGETGFPIVDAGMRQLLNEGWMHNRLRMITASFLTKDLLIDWRLGERYFERMLIDYDPSSNIGGWQWAASVGTDAVPYFRIFNPVTQSKRFDENGTYIRTYIPELNHVPDHYIHEPWKMSEEEQVKYKCRLDEDYPLPIVDHSKQRKKALSFFKGDDEE

SEQ ID NO: 7429 - protein, 110 aa, Sinapis alba
MSGVWVFKNGVIRLVENPNQSGGDTNSRRKVMVYLPTGEVISSYSTLEQILRSLGWERYFGGGDTDLLQFHKRSSIDLISLPKDFTKFSSVYMYDIVVKNPNYFHVRDSN

SEQ ID NO: 7430 - protein, 339 aa, Clostridium thermocellum ATCC 27405
MVSPGKIEFHEVEKPELKPGQVLIKIMRIGICGSDIHVNHGKHPFTKYPVTQGHEVSGKIVEVAEDVEHLKVGQKVTIEPQVVCGKCHPCRTGKYNLCEELKVMGFQTVGAGSEYFAVDAKNVTTVPDHLSYDEAAMIEPLAVTVHAANRVGDVKDKDIVVIGAGPIGILLVQTLKAKGARKVMVTDVSDYRLELALKCGADFAVNTKKEDFGEAMLRCFGPDKADVIYDCAGNNTTMEQAIKHSRKGSIIVLVAVFEGMATVDLATLNDKELDLNTTMMYRHEDYVEAIELVEAGKVKLTPLMSKHFAFRDWEKAYEYIDNNREITMKVLIDVNNDDD

SEQ ID NO: 7431 - protein, 339 aa, Bacillus subtilis subsp. subtilis str. 168
MKAVQVRKAYDLVTAEVKKPVLSKDDEVLVKVKRVGICGSDMHIYHGTNPLATLPRVIGHEVTGQVEAVGANVQSLKPGDHVVIEPISYCGSCYACRKGRPNVCAKLSVFGVHEDGGMREYIVLPERQLHAVSKDLPWEEAVMAEPYTIGAQAVWRGQVEKGDTVLIQGAGPIGICVLKMAKLAGAAVMMTDLNNERLAFAKENGADAVVNVQAEHVAERVLEWTGNEGANVVIDAVCLPETFALSIEAVSPAGHVVVLGFDERAAQISQLPITKKEVTITGSRLQTNQFPKVVELLNGGRLMHNGLVTHTFSVDDVHHAFQFIKEHPDQVRKAVITFD

SEQ ID NO: 7432 - protein, 110 aa, Bartonella sp. SC12uk
ANEACLKMLQEIGSVRRIPEFITRAKDKNDPFRLMGFGHRVYKNYDPRAKIMQQTCHEVLKELNIQDDPLLDIAIELEKIALNDQYFGEKKLYPNVDFYSGITLKALGFP

SEQ ID NO: 7433 - protein, 110 aa, Bartonella sp. SV06uk
ANEACLKMLQEIGSVKRIPEFIARAKNKNDPFRLMGFGHRVYKNYDPRAKIMQKTCHEVLKELNIQDDPLLDIAIELEKIALNDEYFVEKKLYPNVDFYSGITLKALGFP

SEQ ID NO: 7434 - protein, 159 aa, Glycine max
MDFRVMGLDSPLFHTLQHMMDMSEDAAGDNKTYSAPTRSYVRDAKAMAATPADVKEYPNSYVFEIDMPGLKSGDIKVQVEDDNVLLISGERKRDEEIEGVKYLRMERRIGKFMRKFVLPENANTDAISAVCQDGVLSVIVQKLPPPEPKKPKTIEVKVA

SEQ ID NO: 7435 - protein, 342 aa, Streptomyces avermitilis MA-4680
MRVGVLTGGGDCPGLNAVIRGVVRKGVQEYGYDFVGFRDGWRGPLEGDAVRLDIPAVRGILPRGGTILGSSRTNPLKLDDGIRRIKENLAKQEVDALIAIGGEDTLGVAARLTDEYGVPVVGVPKTIDNDLSATDYTFGFDTAVGIATEAIDRLHTTAESHMRVLVCEVMGRHAGWIAIHSGLAGGANVILIPEQRFDVDQVCAYVTSRFKASYAPIVVVAEGAMPKDGQMVLKDESLDSFGHVRLSGVGEWLAKEIEKRTGKEARTTVLGHVQRGGTPSAFDRWLATRFGLHAIEAVRDGDFGKMVALRGTDIVRVPIAEATAKLKTVDPKLYEEVGVFFG

SEQ ID NO: 7436 - protein, 495 aa, Triticum aestivum
  misc_feature (175)..(175): Xaa can be any naturally occurring amino acid
  misc_feature (300)..(300): Xaa can be any naturally occurring amino acid
  misc_feature (322)..(322): Xaa can be any naturally occurring amino acid
SLRGENRAEQIANNNSRYGQNLIRKSHTPSDIGMAGGYCGCDCAKALGNAASDFAFPQSGKLLRNAAEPLYSFGSPWGLEESWLGCYTFDGVGKPSDLYEKLRIPGDNLFFAGEATSVQDTGTVHGAFSTRVPQAEVGRIRVLFEAILEETGKLCHPMAEHTATASVPLLISRLXQSPPKLPTYCRGRFAGRSFQWLLGEGGVGAISPCSSSWHEACGRVTLWPAGHGLCGRGYRPGRLAWALGPGCRRGCLVSGIERRSTYQLCTVSRGCTLVADAAVITVPLGVLKSNTTKYERRLPXVEGGIGVENKIVRRYSEVFWPXNVEFLGVVEFLGVVSSTTYGCSYSTGHAVLVYMPAGRLACDIEHVSDEAAAQFAFSQLKKILPNAAEPLNYLVSHWGSDENTLGSYTFDGVGKPRDLYEKLRIPVDNLFFAGEATSVQYTGTVHGAFSTGEMAAEECRMRVLEKFRELDMLEMCHPMAEQTATVSVPLLISRL

SEQ ID NO: 7437 - protein, 133 aa, Parietaria judaica
MRTVSMAALVVIAAALAWTSSAEPAPAPAPGEEACGKVVQDIMPCLHFVKGEEKEPSKECCSGTKKLSEEVKTTEQKREACKCIVRATKGISGIKNELVAEVPKKCDIKTTLPPITADFDCSKIQSTIFRGYY

SEQ ID NO: 7438 - protein, 106 aa, Rickettsia prowazekii
AVINMLKEIGSSENIPKYVAKAKDKNDPFRLMGFGHRVYKSYDPRAAVLKETCKEVLNELGQLDNNPLLQIAIELEALALKDEYFIERKLYPNVDFYSGIIYKAMG

SEQ ID NO: 7439 - protein, 133 aa, Parietaria judaica
MRTVSMAALVVIAAALAWTSSAELASAPAPGEGPCGKVVHHIMPCLKFVKGEEKEPSKSCCSGTKKLSEEVKTTEQKREACKCIVAATKGISGIKNELVAEVPKKCGITTTLPPITADFDCSKIESTIFRGYY

SEQ ID NO: 7440 - protein, 176 aa, Parietaria judaica
MRTVSAPSAVALVVIVAAGLAWTSLASVAPPAPAPGSEETCGTVVRALMPCLPFVQGKEKEPSKGCCSGAKRLDGETKTGLQRVHACECIQTAMKTYSDIDGKLVSEVPKHCGIVDSKLPPIDVNMDCKTLGVVPRQPQLPVSLRHGPVTGPSDPAHKARLERPQIRVPPPAPEKA

SEQ ID NO: 7441 - protein, 257 aa, Zea mays
KTDIIAIDDEIYSNDDDPERWDVQVCLPKGSINHCKISNSDIHGRALSKFHLNFFCLGNREAEDTTCTSSGPFSASNPQDQARKNRRFMVYVHSKGMIVDDEYVIIGSANINQRSMEGTRDTEIAMAAYQPQHTWANMLSAPRGQIFGYRMSLWAEHIGAIEESFTRPESLECTRQVRHIGQQNWEKFISSHVTEMKGHLLKYPVSIDSRGKVNPLSGCATFPDLGGNICGSFLQHCISRKKNPYFLNRFKRSPSFL

SEQ ID NO: 7442 - protein, 352 aa, Escherichia coli CFT073
MLYYLHIRWITSMCKKTSGNRFHFAFQSSEVVMIKKIGVLTSGGDAPGMNAAIRGVVRSALTEGLEVMGIYDGYLGLYEDRMVQLDRYSVSDMINRGGTFLGSARFPEFRDENIRAVAIENLKKRGIDALVVIGGDGSYMGAMRLTEMGFPCIGLPGTIDNDIKGTDYTIGFFTALSTVVEAIDRLRDTSSSHQRISVVEVMGRYCGDLTLAAAIAGGCEFVVVPEVEFSREDLVNEIKAGIAKGKKHAIVAITEHMCDVDELAHFIEKETGRETRATVLGHIQRGGSPVPYDRILASRMGAYAIELLLAGYGGRCVGIQNEQLVHHDIIDAIENMKRPFKGDWLDCAKKLY

SEQ ID NO: 7443 - protein, 143 aa, Zea mays
  misc_feature (56)..(56): Xaa can be any naturally occurring amino acid
MAMAYKMATEGMNVKEECQRWFMEMKWKKVHRFVVYKIDERSRAVLVDKVGGPGEXHEELVAALPGDDCRYAVFDFDFVTVDNCQKSKIFFIAWSPAASRIRAKILYATSKQGLRRLLDGVHYEVQATDPSEMGFDVIRGRAQ

SEQ ID NO: 7444 - protein, 50 aa, Lactobacillus acidophilus
KGFGFITGEDGQDVFVHFSAINGEGYKSLDEGQAVSYDVEQSDRGPQAAN

SEQ ID NO: 7445 - protein, 386 aa, Lactobacillus plantarum WCFS1
MVEQDEILKLHAAHTGVLDIHSDLAVTDKADLGKAYTPGVAVISKLIAAHPELKAKYTMSGKLVALITDGSAVLGLGNIGPAGGLPVVEGKALLYKNLAGINAIPLALNQVSVPAMVATIKNMSLSFAGIHLEDITAPKCFELEAALKDELDIPVYHDDQEGTAIVVLAGLINAAHVVGKSLRQMRIVVNGVGASGLATARLLAAVGVKQLTLVDVYGVVTADDQRYNQYQRNLAKQLGTPAQLKGQPLAKVMADQDVFIGLSDANVLSAGAVHLMNHDPIVFALANPVPEINPAVAEKAGATVIATGSSQYPNQVNNILAFPGLFKGLLTNGVKQVDNALQIQVAQALAKTVSNPTATTIVPSVFDSQVVPNVTAAVAAYAQAQH

SEQ ID NO: 7446 - protein, 50 aa, Lactobacillus helveticus
KGFGFITGSDNKDVFVHFSAIKTDGFKSLEEGQKVSYDVEQGGRGPQAAN

SEQ ID NO: 7447 - protein, 183 aa, Avena sativa
YRVSIGLPGNGGWCSGWGRGDDGGAANARASVQGRGETWVRRRSGRQGCGGGGGRREEEGAGPAAKAQVVGWPPIRSYRKNTMATSLSAPRSKDEVEAKQAPVAGCLYVKVSMDGAPYLRKVDLKMYKNYKDLSLELEKKFSCFTVGHGESNGKSGRDGLSDCRLMDPKSGAELVLTYEDKDG

SEQ ID NO: 7448 - protein, 50 aa, Streptococcus thermophilus
KGFGFITSEDGQDLFAHFSSIQSDGFKSLDEDQKVEFDVEVGQRGPQAAN

SEQ ID NO: 7449 - protein, 302 aa, Magnaporthe grisea 70-15
MPFHKLVKNSAYYSRFQTKYKRRQQGKTDYYARKRLITQAKNKYNAPKYRLVVRFTNRDIIMQIVTSEISGDKVFASAYSHELKAYGITHGLTNWAAAYATGLLIARRVLKKLGLDEDFTGVEEPEGEFTLTEAAETDEGTRRPFKAYLDVGLARTSTGARVFGAMKGASDGGILIPHSENRFPGFDIESKELDSETLKKYIFGGHVAEYMETLADDDEERYKSQFQQYIDEDIDADGLEDIYTEAHAAIREDPFKKPEGAEAKKSKEEYKKESLKFKAKKLTLAERKARVQERIAELRDAE

SEQ ID NO: 7450 - protein, 361 aa, Synechocystis sp. PCC 6803
MGEIKRIGILTSGGDCAGLNAVIRSVVHHAIGTYGWEVIGIQEATQGLMENPSKAIALHRDNIDHLLMMGGTFLGTTNKGNPFAFPMADGTVRDRTEDIIAGYRQLGLDALIGIGGDGSLAILRRIAQQGGINLVGIPKTIDNDVGATEISIGFDTATNIATEALDRLHFTAASHNRVMVLEVMGRDAGHIALAAGIGGGADIILIPEIPYRIQSVCNKIRQRQAEGKNFCLVMVSEAVRTELGDQVKQIQQFGEDRYGGIGKYIAEQIAQRTGAETRVTVLGHIQRGGIPSPFDRLLGSVFGVAAVDLIAEGKFDHMVAWRNRQTISVPIEEAIQTYQTVQLDGTLVKTARGLGICLGND

SEQ ID NO: 7451 - protein, 120 aa, Avena sativa
GSVVGWPPVRSYRRNAMTVQSVKIKKEEETEKQQPASAVAAAAAAATAGGNGSAFVKVSMDGAPYLRKVDLKMYNTYKDLSIALQKMFSTFTATGNEGKMVEAVNGSDVVTTYEDKDGDW

SEQ ID NO: 7452 - protein, 312 aa, Saccharomyces cerevisiae
MDSQPVDVDNIIDRLLEVRGSKPGQQVDLEENEIRYLCSKARSIFIKQPILLELEAPIKICGDIHGQYYDLLRLFEYGGFPPESNYLFLGDYVDRGKQSLETICLLLAYKIKYPENFFILRGNHECASINRIYGFYHECKRRYNIKLWKTFTDCFNCLPIAAIIDEKIFCMHGGLSPDLNSMEQIRRVMRPTDIPDVGLLCDLLWSDPDKDIVGWSENDRGVSFTFGPDVVNRFLQKQDMELICRAHQVVEDGYEFFSKRQLVTLFSAPNYCVEFDNAGAMMSVDESLLCSFQILKPAQKSLPRQAGGRKKK

SEQ ID NO: 7453 - protein, 56 aa, Triticum aestivum
MKVSMSDSEDHHFQSKADAGASKTYPMQAGAIRKGGLLVMKNPPCKVADVSTSKTG

SEQ ID NO: 7454 - protein, 293 aa, Aspergillus fumigatus
MSEITHPTIKDGWFSEQSDMWPGQAMNLKVNQILHHEKSKYQDVLVFESTDYGTVLVLDNVIQCTERDEFSYQEMITHLAMNSHPNPKKVLVIGGGDGGVLREVVKHESVEEAILCDIDEAVIRVSKKYLPGMSIGFQHPNVKVHIGDGFQFLKERKNEFDVIITDSSDPEGPAESLFQKPYFELLRDALRDGGVITTQGSENQWLHLSLITDLKKACKEVFPVAEYAYTTIPTYPSGQIGFMVCCKDATRNVREPVRTWSREEEERLCRYYNQDIHRASFVLPNFARKALDV

SEQ ID NO: 7455 - protein, 358 aa, Cryphonectria parasitica
MAEFVRAQIFGTTFEITSRYSDLQPVGMGAFGLVCSARDQLTNQNVAIKKIMKPFSTPVLAKRTYRELKLLKHLRHENIISLSDIFISPLEDIYFVTELLGTDLHRLLTSRPLEKQFIQYFLYQIMRGLKYVHSAGVVHRDLKPSNILVNENCDLKICDFGLARIQDPQMTGYVSTRYYRAPEIMLTWQKYDVEVDIWSAGCIFAEMLEGKPLFPGKDHVNQFSIITELLGTPPDDVINTIASENTLRFVKSLPKRERQPLASKFKNADEQAVDLLERMLVFDPKKRITASDALAHEYLAPYHDPTDEPVAEEKFDWSFNDADLPVDTWKIMMYSEILDYHNVDASGASAAMGEFNGQ

SEQ ID NO: 7456 - protein, 490 aa, Synechococcus sp. WH 8102
MTTAFHSPTSRRRKTLQEANLLEGPLMLIKSIRGFSSNRAMTWLACAPLALMGLGIFTLSAKAEELPDLNAAFLANNLWLLVATILVIFMNAGFAMVEAGMCRQKNAVNILAKNLFVFALAVTAYWFVGYSFMYGDAAIDGWLYFGGLFFDPTVTAETISDAGLVPTVDFLFQAAFAGTAATIVSGLVAERIKFGEFVVFALILTAFIYPVAGSWEWNGGWLNSVGNAEFIDFAGSSIVHSVGAWAGLVGAALLGPRIGKYVGGNVQAIPGHNMSIATLGALILWIGWYGFNPGSQLAMDQWVPYVAVTTTLGAAGGAIGATVISTITSKKPDLTMIINGILAGLVSVTAGCGNLTLTGSWVAGLVGGIIVVFSVSALDSAGIDDPVGAFSVHGVCGVWGTLVIGLWGFDVQGDGSPLGLLVGGGIEQLGIQALGTAAYAIWTVVTCFIAWQIIGALFGGIRVTEQEETEGLDIGEHGMEAYAGFSTTNN

SEQ ID NO: 7457 - protein, 501 aa, Arabidopsis thaliana
MANLRLMITLITVLMITKSSNGIKIDLPKSLNLTLSTDPSIISAASHDFGNITTVTPGGVICPSSTADISRLLQYAANGKSTFQVAARGQGHSLNGQASVSGGVIVNMTCITDVVVSKDKKYADVAAGTLWVDVLKKTAEKGVSPVSWTDYLHITVRGTLSNGGIGGQVFRNGPLVSNVLELDVITGKGEMLTCSRQLNPELFYGVLGGLGQFGIITRARIVLDHAPKRAKWFRMLYSDFTTFTKDQERLISMANDIGVDYLEGQIFLSNGVVDTSFFPPSDQSKVADLVKQHGIIYVLEVAKYYDDPNLPIISKVIDTLTKTLSYLPGFISMHDVAYFDFLNRVHVEENKLRSLGLWELPHPWLNLYVPKSRILDFHNGVVKDILLKQKSASGLALLYPTNRNKWDNRMSAMIPEIDEDVIYIIGLLQSATPKDLPEVESVNEKIIRFCKDSGIKIKQYLMHYTSKEDWIEHFGSKWDDFSKRKDLFDPKKLLSPGQDIF

SEQ ID NO: 7458 - protein, 55 aa, Zea mays
MAGTANCIDIILAIILPPLGVFLKFGCGHEFWICLLLTFLGYIPGIIYAIYAITK

SEQ ID NO: 7459 - protein, 200 aa, Anabaena variabilis ATCC 29413
MSRRRDFLLQSFSIIGLVKLSAIACSSVGNKNTEIASTPSSKLTTERKSMKLESVFGANSQIPAKYTCDGVDISPTLSWDEPPEETQSLALIVDDPDAPRHTFVHWVIYDIPPTVRQLPEHITATKTLPSGGVQGKNDFGKLGYGGPCPPSGTHRYFFKLYALDKNLGLPPGATKEQILQAMKGHVLATAELIGGYQRQP

SEQ ID NO: 7460 - protein, 279 aa, Zea mays
MASTPLLLLSPQRLCLAALPSPGRDHPPPGLLPPGPRRAMEEPPPGSSKAAAARAPRVVGVLAGLLERAAERGDTATPAPAGSAFRGRALPGIPVRRYAERIYRYAGCSPACFVVAYVYLDRLARGRRDAGAGEDEDEDEAAVVGIDSYTVHRLLITSVLVAAKFMDDRHHNNAYFARVGGVEVAEMNALELRLLFALRFRLNVAPDTFARYCAALECHVDTPDAGGPVPRMPPSSHVDGEEAVTSSKDKVAAAGGGSVVVQRSHRQRRAVVQIMTTAQ

SEQ ID NO: 7461 - protein, 119 aa, Aspergillus nidulans FGSC A4
MIQLKTLLNCIDNSGAAVVECVNVLKKKRAATVGDRIVIVVQKQRNFGPEGTSSTGIANKVRRGDIRHAVVVRVKKEMQRPDGTLVKFDDNACVLVNKSGDPIGTRMNEHTFPGISLIT

SEQ ID NO: 7462 - protein, 447 aa, Triticum aestivum
  misc_feature (358)..(358): Xaa can be any naturally occurring amino acid
MSTGRRQASLKVRRRVGTYELGRTIGEGTFAKVRFAKDTESGDPVAIKILDKAKVHKHGLVEQIRREICTMKLIQHPNVVRLHEVMGSKARIFIVLEYVTGGELHDIIAARGSLKEDEARRYFQQLINAVDYCHSRGVYHRDLKLENLLLDTAGNLKVSDFGLSAISEQAKADGLLHTTCGTPNYVAPEVIQDKGYNGALADLWSCGVILFVMLAGYLPFEDDNVSALYKKISGAQFTCPSWFSDGAKRLIPRILDPNPSTRITIPQLLKDPWFKKGYKPPVFDEKHQTSLDDVDAAFGDSEEKQVEEEMEGQPASMNAFELISLNKGLKLDNFFEADKKYRRETRFTSQCPPEEIIXRIEEAAKPLGFDIQKKNYKMRMKNLEAGRKGNLNVATEVFQVAPSLFVVELKKAKGDTLEFQKFYKTLSAQIKDVVWVCESEAEERGST

SEQ ID NO: 7463 - protein, 416 aa, Arabidopsis thaliana
MGLFGTKKIGKYEIGRTIGEGNFAKVKLGYDTTNGTYVAVKIIDKALVIQKGLESQVKREIRTMKLLNHPNIVQIHEVIGTKTKICIVMEYVSGGQLSDRLGRQKMKESDARKLFQQLIDAVDCCHNRGVYHRDLKPQNLLLDSKGNLKVSDFGLSAVPKSGDMLSTACGSPCYIAPELIMNKGYSGAAVDVWSCGVILFELLAGYPPFDDHTLPVLYKKILRADYTFPPGFTGEQKRLIFNILDPNPLSRITLAEIIIKDSWFKIGYTPVYHQLSDSIKDNVAEINAATASSNFINAFQIIAMSSDLDLSGLFEENDDKRYKTRIGSKNTAQETIKKIEAAATYVSLSVERIKHFKVKIQPKEIRSRSSYDLLSAEVIEVTPTNCVIEISKSAGELRLYMEFCQSLSSLLTAEVS

SEQ ID NO: 7464 - protein, 449 aa, Xylella fastidiosa Ann-1
MNPTLIVNARLVNEGREFDSDLRIENGRIARIDTGLSAQSKDIVIDAAGRRLLPGMIDDQVHFREPGLTHKGDIVSESAAAVAGGLTSFMDMPNTNPPTLGAAALQAKYDAARGRAWGNYGFYLGASNDNLAAIQALDPKTSPGIKVFMGASTGNMLVDNETTLEGIFRHAPTPIITHCEDTPTINATLAKYHSRYGNTLSAEQHPDIRSRQACLKSSQLAVSLAKKNGTRLHVLHISTADELRLFEAGPLVDAAGKRRKQITAETCIHFLHFDRMDYARLGNLIKCNPAIKEASDREALIAALAKDVIDVLATDHAPHTWEEKQQPYAQAPSGLPLVQYALVAALELVHAGRLSVTEIVRKFAHAPAQLFDVIERGFLREGYWADLVLVEDTPFTVKRQEILSKCGWSPFEGTTFRSRIASTWVNGNHVWDGNRLVGVPNGQRLEFDR

SEQ ID NO: 7465 - protein, 140 aa, Triticum aestivum
  misc_feature (44)..(44): Xaa can be any naturally occurring amino acid
  misc_feature (57)..(57): Xaa can be any naturally occurring amino acid
  misc_feature (62)..(63): Xaa can be any naturally occurring amino acid
  misc_feature (65)..(65): Xaa can be any naturally occurring amino acid
  misc_feature (69)..(69): Xaa can be any naturally occurring amino acid
  misc_feature (72)..(73): Xaa can be any naturally occurring amino acid
  misc_feature (78)..(78): Xaa can be any naturally occurring amino acid
  misc_feature (91)..(92): Xaa can be any naturally occurring amino acid
  misc_feature (101)..(101): Xaa can be any naturally occurring amino acid
  misc_feature (112)..(112): Xaa can be any naturally occurring amino acid
  misc_feature (119)..(120): Xaa can be any naturally occurring amino acid
  misc_feature (125)..(125): Xaa can be any naturally occurring amino acid
GKVVEVSTSKTGKHGHAKCHFVAIDIFNGKKLEDIVPSSHNCDXPHVDRQDYQLIDXITDDXXVXPPKXEKXXTTKGXLKASQLMMFCLGXXKTGFADGKXLILSVMSAMGXEKQICAXXGIRGXKLTTVRGCPTATLGT

SEQ ID NO: 7466 - protein, 358 aa, Zea mays
HASAEDQDSWNVQLFRSIDGGACFGFPSTPEAAAQSGLVSGKNNVLDRSIHDAYIHAIRRAKHFIYIENQYFLGSSFAWKADGIKPEEIEALHLVPRELSLKIVSKIEAGEHFAVYVVLPMWPEGPPASGSIQGILDWQRRTMEMMYNDISVALDAKRIDRDPRDYLTFFCLGNREVKMDGEYEPSGRPLDGTDYARAQNARRFMIYVHSKMMIVDDEYIIVGSANINQRSMDGGRDSEIAMGAYQPCHLNTKGQVARGQVHGFRMSLWYEHLGMLHDDFLNPGSLECVRRVNQMADRYWDLYAGDSLDADLLGHLLRYPVTVTKEGTVTELPGAKFFPDTQALVLGALSKLPPILTT

SEQ ID NO: 7467 - protein, 499 aa, Glycine max
  misc_feature (175)..(175): Xaa can be any naturally occurring amino acid
  misc_feature (299)..(299): Xaa can be any naturally occurring amino acid
MNSNGYPASSFKIPTVKFTKLFINGHFVDSLSGGEFETIDPRTGEVIARIAEGTKEDIDLAVKASRLAFDHGPWPRMPAVERARIMMKWADLIDQHVEEIAALDAIDAGKLYHMCKAIEIPATANTIRYYAGAADKIHGEVLKTSREFHAYTLLEPLGVVGHIIPWNFPSIMFVXKVSPCLAAGCTMVLKPAEQTPLSALFYAHLAKLAGIPDGVLNVVPGFGATAGAAISSHMDIDKVSFTGSTEVGREVMRAAANSNLKPVSLELGGKSPFIIFDDADLDKAVELALMAVVYNQGRXCAAGSRVFVQEGIYDEFEKRLVEKAKAWVVGDPFDPNVQQGPQVDKKQFEKILSYIEHGKREGATLLTGGKRVGNKGYYIEPTIFSNVKEEMLIAQDEIFDPVIALMRFKTIEEAIKSANKSRYGLVAGVVTKSLDTANTMSRSIRPGVVWINCYFAFENDIPYGGCKMSGFGKDSGLEALHKYLHVKSVVTPIYNSPWL

SEQ ID NO: 7468 - protein, 375 aa, Pseudomonas syringae pv. tomato str. DC3000
MAEAKVLSGAGLRGQVAGQTALSTVGMAGAGLTYRGYDVRELAAEAQFEEVAYLLLYGELPTQSQLAAYLGKLKGLRDLPQALKEVLERIPADTHPMDVMRTGASMLGTLEPELSFDQQRDATDRLLAAFPAIMCYWYRFSHDGQRIDCTTDESSIGGHFLHLLLDKTPSELHRKVMDVSLILYAEHEFNASTFTARVCASTLSDLYSCVTAAIGTLRGPLHGGANEAAMEMIQRFASADEATQGTLGMLERKEKIMGFGHAIYKESDPRNEVIKGWSKKLADEAGDSVLFPVSEAIDKVMWEQKKLFPNADFYHASAYHFMGIPTKLFTPIFVCSRLTGWAAHVFEQRANNRIIRPSAEYIGVEQRSFVPIEQR

SEQ ID NO: 7469 - protein, 170 aa, Zea mays
MAGIGRNMVAPLVVLNLIMYIIVIGFASWNLNHFINGQTNYPGVAGNGATFYFLVFGILAGVVGAASKLAGVHHVRAWRHDSLATNAASSLIAWAITALAFGLACKEIHIGGHRGWRLRVLEAFVIILAFTQLLYVLMLHTGLFGGSGGYRDHDYGVGGAAGEPKGVTRV

SEQ ID NO: 7470 - protein, 493 aa, Aspergillus nidulans FGSC A4
MPPPVGRYGPTGLTGPYSHLAQQQAHLQQQQQAQHHPAHAQSSNTALPPPSLGVHPGFTTANANANMNPFTLAGAGVGNGMSVAGFGAAGDGGGTGLASHAAQMGFARGAQMQQQQLHQAHDGRFTLEGKGGGVKTRIRDVWKHNLAQEMAVLRHLVERYPYISMDTEFPGIVARPIGSFTNKADYHYQTLRCNVDLLKMIQLGITLFSPKGEVPPPDATDANGQPLGNGLVPAPCTWQFNFRFSLEEDMYAQESTAMLAKAGIDFATHEKNGIDPLEFGALLISSGLVLLDDVHWISFHSGYDFGYLMKIMLCQALPENEEEFHKLLNIFFPSLYDIKYLMKHATRNQAVNDSPLTPAAAQIISNLGQKSGLQDIADELGVKRVGIAHQAGSDSLVTGEIFWKMRQLVFNGKIDDSKYSGQIWGLNGQMPTVTYHNNPHQTPNLNGATIYSAAGTPSTPNNAGVQTPQNHTPGALTPGATGGVLGQYQMAKS

SEQ ID NO: 7471 - protein, 151 aa, Rhizobium etli
MMRRLLLVLALMLSAVPAFAVNPDEVLADPALEARARALSAELRCMVCQNQSIDDSNAELAKDLRLLVRERISNGDSDAAVLNYIVSRYGEFVLLKPRFSMRTVLLWGAPVLLVLAGGVSLLVFARKRTGRPTGSKLTPEEQAKLSELLEK

SEQ ID NO: 7472 - protein, 146 aa, Rickettsia peacockii
ANEAVINMLKEIGSSEYIPKYIAKAKDKNDPFRLMGFGHRVYKNYDPRAVVLKETCKEVLKELGQLDNNPLLQIAIELEAIALKDEYFIERKLYPNVDFYSGIIYKAMGIPSQMFTVLFAIARTVGWMAQWKEMHEDPEQKISRPR

SEQ ID NO: 7473 - protein, 116 aa, Zea mays
  misc_feature (105)..(105): Xaa can be any naturally occurring amino acid
MAMAYKMATEGMNVKEECQRWFMEMKWKKVHRFVVFKIDDWRYAVFDFDFVTVDNCQKNKIFFIAWSPAASRIRAQILYATSKQGLRRLLDGVHYEVQATDPSEXMGFDVIRGRAQ

SEQ ID NO: 7474 - protein, 145 aa, Zea mays
MCPTKKEMSAESSGSASSWTSASTSTSPEHQTVWTSPPKRPAGRTKFRETRHPVFRGVRRRGSAGRWVCEVRVPGRRGCRLWLGTFDAAEAAARAHDAAMLAIAGASACLNFADSAWLLAVPASYASLAEVRRAVAEAVEDFQRR

SEQ ID NO: 7475 - protein, 42 aa, Triticum aestivum
ILLPPVGVFLRYGIGVEFWICLLLTILGYIPGIIYAVYVLVA

SEQ ID NO: 7476 - protein, 147 aa, Brassica napus
MDFGRFPIISILEDMLEVPEEHSEKGRSNPWRAYVRDQKAMAATPADVIEHPDAYAFVVDMPGIKGDEIKVQVESDNLLVVSGERKRENKEKEGVKYVRMERRMGKFMRKFQLPENADLEKISASCNDGVLKVTVGKLPPPEPKKPK

SEQ ID NO: 7477 - protein, 466 aa, Methanothermobacter thermautotrophicus
MCAIAGFRGDDAPVKVQEMLDVLRHRGPDATGIYHDSRIVIRTATGEDVKEAPQSAEIAVGHNLLSIVGGPQPVSGDGVLVFNGEIYNQEELNWTGSDSELILDLIEGHGGDLEDALRFTVNKIDGDYAFAYTDGENLASRQDPVGVKPLYHSGEAFASEKKALWRIGLRNVETLPPGHAMINGVKVKLRGLPRAEPSDAEPEELRENLKSALRESVERRVRGLDEAALVFSGGVDSTLLAVLLDEHIDVRLYTVGLPGSSDPQFASRAAADLGMELEVLEVTEDTIREALPHVLGAIEEYNLMKIGVAMPLYLASEAASADGYRVMFSGQGADELFAGYHRYRRLLAEGRLEDALRHDLENIHHVNLERDDAVTMANSVELRVPFLDLQLIGVALTIPADLKIRGPEDELRKRILREAALEMGVPEYIAMRPKKAAQYGSGIDKVLRRKVLPGFDHETFLRRLMF

SEQ ID NO: 7478 - protein, 162 aa, Ureaplasma parvum serovar 3 str. ATCC 700970
MERLNMKLSDYPVLDIDKKLFNWSKVKNKLVLIVNVASKCGYAKQYEQLEYLYKKYKNKGFIIVAFPCRQFMFQEFDDNNKIKEFCSTKYNVTFPIMDLTNVVGSNISPLYKQLITEYPWSPKAKAVKWNFEKFFVKNDEIIGRFESKCEPNDLEEFIKNNL

SEQ ID NO: 7479 - protein, 411 aa, Deinococcus radiodurans R1
MCPARSHLFVTPAGTFDRPFFAPWKKGRCYPLLTMSNIAKGLEGVLFTESKLTFINGSEGILTHLGIPIQEWAEKSTFEELSLALLDAKLPTAEELAKFDAELKANRAIPDQLVGIIRDMPKGVHPMQALRTAVSYLGLLDPQAEDITPEARRAISTRMIAQFSTIIAAINRAQEGQDIVAPRADLTHAGNFLYMLTGNEPTPEQARLFDIALVLHADHGMNASTFTAIATSSTLSDMYSCMVSAIGALKGPLHGGANEAVMTMLDEIGTVDKAEAYITGKLDNKEKIMGVGHRVYKYFDPRSRVLRDYAEHVANKEGKSNYYQILEAIEKIIVDRMGAKGIYPNVDFYSGTVYSDLGIKKEYFTPIFALARISGWCASVIEYSQDNRLLRPDAEYTGARDQHYVDIKDRQ

SEQ ID NO: 7480 - protein, 253 aa, Triticum aestivum
  misc_feature (218)..(218): Xaa can be any naturally occurring amino acid
MKTLLIVTILAMATTIATANMQVDPGYQVHWPQQQPFPQPQQPFCQQPQQTIPQPHQTFHHQPQQTFPQPQQTYPHQPQQQFPQTQQPQQPFPQPQQTFPQQPQLPFPQQPQQPFPQPQQPQQQFPQSQQPQQPFPQPQQQFLQPQQPQQSFPQQQQPLIQLSLQQQMNPCKNFLLQQCNPVSLVSSLISMILPRSDCQVMQQQCCQQLAQIPQQLQXCAAIHKGGIPINQCSKNNGPRRCRIRRATGFSSVG

SEQ ID NO: 7481 - protein, 250 aa, Zea mays
MAKNYPTVSAEYSEAVDKARRKLRALIAEKSCAPLMLRLAWHSAGTFDVSSRTGGPFGTMKHQSELAHGANAGLDIAVRLLEPIKEEFPILSYADFYQLAGVVAVEVTGGPEIPFHPGREDKPQPPPEGRLPDATKGSDHLRQVFGKQMGLSDQDIVALSGGHTLGRCHKERSGFEGAWTTNPLVFDNSYFKELLSGDKEGLLQLPSDKALLSDPVFRPLVEKYAADEKAFFDDYKEAHLKLSELGFADA

SEQ ID NO: 7482 - protein, 318 aa, Shewanella oneidensis MR-1
MANTLEQLKSYTTIVADTGDIEAIKRYQPEDATTNPSLILKAAQIPEYSALIDNAIAWAKLQSTDIEQQIDDASDKLAVNIGVEILKLVPGRISTEVDARLSFDKEKSIAKAHKLVRLYQEAGVDKSRILIKLASTWEGICAAKELEQEGINCNLTLLFSFSQARACAEAGVYLISPFVGRILDWYKKDTGKDYDAVNDPGVVSVTEIYNYYKQHGYNTVVMGASFRNIGEIIELAGCDRLTIGPSLLEELANSQLAIQPKLVPTSTTVAVAEPLTEAQFRWEFNQDAMAVDKLAEGIRNFAIDQGKLEVMLKAKLAN

SEQ ID NO: 7483 - protein, 374 aa, Glycine max
  misc_feature (226)..(226): Xaa can be any naturally occurring amino acid
  misc_feature (353)..(353): Xaa can be any naturally occurring amino acid
MSQPKIKRRVGKYEVGRTIGEGTFAKVKFARNSETGDPVALKILDKEKVLKHKMAEQIRREVATMKLIKHPNVVRLCEVMGSKTKIYIVLEFVTGGELFDKIVNHGRMSENEARRYFQQLINAVDYCHSRGVYHRDLKPENLLLDAYGNLKVSDFGLSALSQQVRDDGLLHTTCGTPNYVAPEVLNDRGYDGVTADLWSCGVILFVLVAGYLPFDDPNLMNLYKKXRKLITRILDPDPTTRITIPEILDDEWFKKDYKPPVFEENGETNLDDVEAVFKDSEEHHVTEKKEEQPTAMNAFELISMSKGLNLENLFDTEQGFKRETRFTSKSPADEIINKIEEAAKPLGFDVQKXNYKMRLANVKAGRKGNLNVAT

SEQ ID NO: 7484 - protein, 509 aa, Oryza sativa
MGSFARKEHQFLAELGLAPRNPGSFACGAWGGSGPVVTSTNPTNNQVIAEVVEASAREYEEGMRACYDAAKTWMAIPAPKRGEIVRQIGDALRAKLHHLGRLVSLEMGKILPEGIGEVQEIIDMCDYAVGLSRQLNGSIIPSERPNHMMMEVWNPLGVVGVITAFNFPCAVLGWNACIALVCGNCVVWKGAPTTPLITIAMTKIVASVLERNNLPGSIFTAFCGGADIGQAISLDTRIPLVSFTGSTKVGLMVQQQVNARFGKCLLELSGNNAIIVMDDADIQLAVRSVLFAAVGTAGQRCTTCRRLLLHESIYRTFLDQLVEVYKQVRIGDPLENGTLLGPLHTPASRDAFLKGIQTIRSQGGKILYGGSAIESEGNFVQPTIVEISPSAPVVREELFGPVLYVMKVQNLKEAVEINNSVPQGLSSSIFTKRPDIIFKWIGPHGSDCGIVNVNIPTNGAEIGGAFGGEKATGGGREAGSDSWKQYMRRATCTINYGSELPLAQGINFG

SEQ ID NO: 7485 - protein, 254 aa, Methanosarcina mazei Go1
MTSYKALVKDVINKADVLLEVVDARFPDETRNSEVEKEIIRLKKPFIIVINKCDLVSKEKLDKTKSRLSRIAPTVFISSKDRSGTTMLRHQILASACIKGRDILVGTLGYPNVGKSSVINGVTGRHRASTSPVSGHTKGVQHVDAGSHIMFMDTPGVIPFDENDEYVQGLLGIKDSTHLKDPVGVALMIIDKMLAENRTALESFYNVTLESPDSYSVLEQIGRKCNFLQKKGEIDEMRTATKIIGDWQNGLLLV

SEQ ID NO: 7486 - protein, 283 aa, Listeria monocytogenes str. 4b F2365
MKTVKLNNGVEVPILGFGTYQITDAAEAEQAVKDAIKTGYRHIDTAQSYMNEEAVGRGIAASGVDRKELFITTKIWVENVSYKGVMSSFDRSLKRLGLDYIDLLLIHQPFNDVYGAWIAMEELQASGKIRAIGVSNFSPDRVIDLAAFNEVTPQVNQIEVNPFQQQAANLAVLRKEGVTIEAWAPFAEGKNDIFNNPVLTKIGAKYGKSAAQVILRWLVEQDIIVLAKSVKPERMAQNLAIFDFELTEADKGEIASLDQGESQFFSHADPEMVKWMASRKLNV

SEQ ID NO: 7487 - protein, 509 aa, Streptomyces avermitilis MA-4680
MAGQQARQAGQTQRTIHVGGEWREADSRATREILDPADAKPFAVVAEGDERDADAAVAAARRAFDSGEWPHTPVAERAALLRRVADLLVRDRESLGLLESRDAGKTLEEGRVDIDCVADAFRYFADLVVGEGGGRVVDAGSPDIHSVVVHEPVGVCAMITPWNYPLLQASWKIAPALAAGNTFVIKPSEITPLTTAALVDLLVEAGAPAGVANIVTGPGHTVGARLAEHPDVDLISFTGGLASGTKVAQAAAVSVKKVALELGGKNPNVVFADACATDEDFDTAVDQALNAAFIHSGQVCSAGGRLIVEESVRERFVAELVRRAGRIRLGRGTEDGVECGPLVSEQQRDKVEGYVASALSEGAVLRTGGRRPEPSDVRPAAGYFFEPTVLDQCHRGMKVVREEVFGPVLTVETFRTEDEAVALANDTEYGLAGAVWTSDAGRARRVAGRLRHGTVWINDFHPYLPQAEWGGFGKSGVGRELGPAGLAEYRETKHVYQNLAPKPVRWFAG

SEQ ID NO: 7488 - protein, 88 aa, Brassica napus
  misc_feature (35)..(35): Xaa can be any naturally occurring amino acid
  misc_feature (74)..(74): Xaa can be any naturally occurring amino acid
RGRIKFLLEGDWGVVDYKDFYVVVMRAAQKSFFFXLEKLKKKCFDGLKEGVLGIEKLVFVNGLCKGVLKVIGAXDRVQIKKTNLPVLI

SEQ ID NO: 7489 - protein, 596 aa, Zea mays
MATMKLGSKPEIFVLQDLTWLCTTELESDVVVEVGEMSFYLHKFPLLSRSGVLQRMISEYQAPADGGGMCTLQLDDIPGGAKAFELAAKFCYDVKIELNALNVVCLRCAAEYLRMTDDYAEGNLITQAECFLVDVLANWKDSIKALETCEGVLPTAEDLHLVSRCITALASKACGSDAAAPVVRNASVDKDALWNGIRSGDTTSSAAAAAAAAGMDWWYEDVSFLSLPMFKRLIQAMEAKGMRDESIAGAIMFYAGRFLPGLKRNRNITPRAASVSAPSEGDQRYFLEEIVALLPTKKGVASTKFLLGMLRTAMLLHASPLCRENLERRIGAQLEDASLDDLLVPNLGYHVETLYDIDCVQRILDYFMSSTDGIGTGYTSPALAEEGGGSLGIPQGATPSSSLSPITMVAKLMDGFLAEVAPDTNLKLPKFQALAAVVPDYARPVDDGIYRAIDIYLKSHPWLSESEREQLCRLLNCQKLSLEACTHAAQNERLPLRVVVQVLFFEQLRLRTSIAGWFFVSDNAAGGDGARPHAGGAIVPKGTDVKARVSDLEKECKSMKQEIRRLGKPRRSWSLLTRKCGFGAKVQQAQTAMSGK

SEQ ID NO: 7490 - protein, 141 aa, Triticum aestivum
  misc_feature (85)..(85): Xaa can be any naturally occurring amino acid
MSEAVGTPESGGAKEQERFLPIANIGRIMRRGVPENGKIAKDAKESIQECVSEFISFITSEASDKCMKEKRKTINGDDLIWSMGXTLGFEDYVEPLKLYLKLYREMEGDTSKGSKSEQAGKKVGALNGQPGSSFNGMYGGE

SEQ ID NO: 7491 - protein, 394 aa, Vibrio parahaemolyticus RIMD 2210633
MLSNQTIEIVKATAPLIAETGPKLTAHFYDRMFTHNPELKDIFNMSNQRNGDQREALFNAICAYAANIENLPALLGAVEKIAHKHTSFLITKDQYQIVGKHLIATIDELFNPGQEVLDAWAEAYGVLANVFIQREEQIYQANASQEGGWRGLREFELVGKQLESEHICSFVFKPTDGSKVTKYKPGQYLGIYINSDKFENQEIRQYSLSSSVQENTYRISVKREQGGKVSNYLHDELNIGDKVKLAAPAGDFFMDVDTNTPVVLISAGVGLTPTLSMLESLTEHHAPVTWVHATENSKHHAFKEHVNQLVTAKENMNALIWYNQPTAEDKIGEDFHFTGFVNLHEIEAALKQDNVQVYFCGPVGFMQHVAKQLQELGVPQEQFHYECFGPHKVV

SEQ ID NO: 7492 - protein, 129 aa, Thermoplasma volcanium GSS1
MSWQEAEVRELKVGRYILIDDVPCKIVEITMSKPGKHGEAKGRIVAIGVFDNQKRSVVYPVKHKVKIPIIEKKNAQVLSVMNNEAQLMDSETFETFVLPLDPEIADKVKPGMEVPYWEAMGVRKIMLQN

SEQ ID NO: 7493 - protein, 167 aa, Solanum demissum
MVDPVDRIRKACPKFHFPKRSLVFRVYISVAGCRCSPWSSPYSGLTLVEVTEVSSIIMKRLGMTEQPTVGVMKAGAAELAAAMKGPEAAKEEKKPEKTVFELKLESFESAQKIKIIKEVRSSTDLGLKEAKDLVEKTPAVFKKGVSKEKAEQIIDKMKAVGAKVVME

SEQ ID NO: 7494 - protein, 181 aa, Zea mays
  misc_feature (101)..(101): Xaa can be any naturally occurring amino acid
MASVRLSSATMTSSLAHATMVAPFIGLKSSAAFPVTCKANTEITSITSNGGRINCMKVWPPVGKKKFETLSYLPGLTDVEIAQEIDYLIRNKWTPCIEFEXEHGFVYREHGNIPGYYDGRYWTMWNLPLFGCTDPPQVLKEVQQCKREYPNAFIRIIGSDNNRQAQCISFIPHKPPSFTDA

SEQ ID NO: 7495 - protein, 576 aa, Glycine max
  misc_feature (121)..(121): Xaa can be any naturally occurring amino acid
  misc_feature (136)..(136): Xaa can be any naturally occurring amino acid
  misc_feature (222)..(222): Xaa can be any naturally occurring amino acid
  misc_feature (275)..(275): Xaa can be any naturally occurring amino acid
MAASLFMPSSIVDEEARFEAEVAEVQAWWNSERFRLTKRPYTARDVVSLRGNLRQTYASNEMAKKLWCLLKNHQANGTASRTFGALDPVQVTQMAKHLDTIYVSRWQCSATHTTSNEPGPXTLQSYPYDILADVAXHLLFGQEYHDRKQREDRMRMRREKRGKTPYVDYLRPIIADGDTGFGGTTATVKLCKLFVERGAAGIHIEDQSSVTKKCGHMAESAXLLLSEHINRLVAARLQFDVMGVETVLVARTDAEAHNLIQSNIDTRDPQFYVGXVTNPNMQQGMAAGKNGAELQALEDEWLSKAQLKTLSEAVVEAIERQNNIGEEEKRRKLNEWMHHSSYERCLSNEEGREIAEKLGVRNLFWDWDLPRTREGFYRFKGSVTASVVRGCAFSPHADVIWMETASPNVVECTEFSEGVRSKHPQMMLGYNLSPSFNWDASGMSDEQMSMSDEQMRDFIPKIAKLGYVWQFITVGGLHSNALITSTFARDFANRGMLAYVERIQREERNNGVDTLAHQKWAGANYYDRYLKTVQGGVASTAAMGKGVTEEQFKESWTRPGAVEIDRGSIVVAKARM

SEQ ID NO: 7496 - protein, 462 aa, Gloeobacter violaceus PCC 7421
MTRITPNSSFSLTLRLHLPNQPGMLAKATAAIGEAGGNIGDIELIEQERAYTVRDLIVDATSEEHAHAIAERVSAIPELKLLQVDDRTFQIHQGGKIQIVSKIPLRTRSDLAMAYTPGVGRICMAIARNPERVYELTIKRNTVAVLTDGSAVLGLGDIGPAGALPVMEGKALLFKEFANIDAFPVCLSTQNVDEIVETAVRISTVFGGINLEDISAPRCFEVERLLQERLDIPVFHDDQHGTAIVVLAALENALKLVDKSLASVRIVINGAGAAGIAIHQLLTAAGARAIVMCDSHGIVSAGRADLNAEKRAVAVEQTGALADAMAGADVFLGVSKGGVLSRAMVQSMATDPVVFAMANPVPEILPEEAEGVVAVMATGRSDYPNQINNVLAFPGIFRGALDCRARRVNLEMKMAAARAIAALVSPDEIAPESIIPSVFDRRVVVAVSAAVQQAARATGVAR

SEQ ID NO: 7497 - protein, 280 aa, Listeria monocytogenes EGD-e
MTLSFSDTYRLNNGIEMPRHGFGVYKLTDEARMRTALETAVDVGYRLFDTASFYHNEKELGDFFASSGLKRDEFFVTTKMWNTEQGYDETLRAFEKSQKKLQLDQIDLYLVHWPKQDTFFDTWRAVEKLYDEGLVRAIGVSNFEAHHLDRLRTSANVLPVVDQLETHPHFPNHLLHRYLEELHIVHQAWSPLGRGGVLQEQILIDLAEKHGKSPAQIVLRWHLQNNISIIPKSETPSRIRENAAIYDFELSEADMRQVERLNTGERVSHAPDVMYVRSEI

SEQ ID NO: 7498 - protein, 123 aa, Clostridium acetobutylicum ATCC 824
MTREEIIEAIKGMSVLELNELVKACEEEFGVSAAAPVAVAGAAGAAGAAAGEEKTEFDVVLAEAGAKKLQVIKVVRELTGLGLKDAKALVDGAPKTIKEGVAKEEAESMKAKIEEAGGKVELK

SEQ ID NO: 7499 - protein, 338 aa, Pseudomonas fluorescens PfO-1
MNIKKTLAASLLALSIGNAFAAESTGVEHNTQAFLDALAAGGGKPLEQLSPKDARAVLTGAQASVKVDLSGVEVSDKAIKVDGQTINLKVVRPAKVKGELPVFMFFHGGGWVLGDFPTHQRLIRDLVVGSGAVAVYVDYTPSPEAQYPTAINQAYAATKWVAEHGKDIGVDGKRLAVAGNSVGGNMAAVVALMAKEQKTPALRFQLLMWPVTNAGFDNGSYQQFAEGHFLTKGMMQWFWDNYTTNPAERAQIHASPLNASAEQLKGLPAALVQTAEFDVLRDEGEGYARHLDAAGVPVTSVRYNGMIHDFGLLNPLNGIPEVKAAVRQAAAELKTHLN

SEQ ID NO: 7500 - protein, 480 aa, Arabidopsis thaliana
MASRTTPSRSTPSRSTPSGSSSGGRTRVGKYELGRTLGEGTFAKVKFARNVENGDNVAIKVIDKEKVLKNKMIAQIKREISTMKLIKHPNVIRMFEVMASKTKIYFVLEFVTGGELFDKISSNGRLKEDEARKYFQQLINAVDYCHSRGVYHRDLKPENLLLDANGALKVSDFGLSALPQQEDGLLHTTCGTPNYVAPEVINNKGYDGAKADLWSCGVILFVLMAGYLPFEDSNLTSLYKKIFKAEFTCPPWFSASAKKLIKRILDPNPATRITFAEVIENEWFKKGYKAPKFENADVSLDDVDAIFDDSGESKNLVVERREEGLKTPVTMNAFELISTSQGLNLGSLFEKQMGLVKRKTRFTSKSSANEIVTKIEAAAAPMGFDVKTNNYKMKLTGEKSGRKGQLAVATEVFQVAPSLYMVEMRKSGGDTLEFHKFYKNLTTGLKDIVWKTIDEEKEEGTDGGGTNGAMANRTIAKQST

SEQ ID NO: 7501 - protein, 115 aa, Citrus sinensis
MAALKLVSALVLCMLVTGPLSAQAITCGQVSGSLAPCIGFLRSGGPIPMPCCNGVRSLNAAARTTPDRQTACNCLKQAAGSIPNLNLNNAAGLPGACGVSIPYKISTSTDCSKVR

SEQ ID NO: 7502 - protein, 505 aa, Ralstonia eutropha JMP134
MKAQEIAACWQSMGLPRPWSDGTPAGTVIVRSPVDGEAFGHVPACTPAEADARIVRAHAAQSSWALVPAPVRGDIVRRFGEVLREHKTALGRLVSLESGKIQQEGLGEVQEMIDICDFAVGLSRQLHGLTIASERPQHAMRETWHPYGLCGVISAFNFPVAVWAWNAALALVCGNAVLWKPSEKTTLCALAAHGLLERVLAATAPHYVGISAVLPGGRMVGTHLVGHPAVRLVSATGSTRMGREVGIACAQHFKRSILELGGNNAAIVTPSADIELAVRAITFAAAGTAGQRCTTLRRCFVHADLMDTMASRLVTVFDRLPVGDPLEDGTLLGPLIDTGAADAMANALASCRAQGNIVTGGERLLADRFPHASYVRPALVMTDEQHDTMLTETFAPILYLMPYTSLDEAISLNNAAAHGLSSCIFTESLREAERFLSSAGSDCGIANVNIGTSGAEIGGAFGGEKATGGGRESGSDAWKGYMRRATNTINYGDTLPLAQGIRFEI

SEQ ID NO: 7503 - protein, 158 aa, Oceanobacillus iheyensis HTE831
MSVHDFTVTTIEGEEKRLSDYKGKVILIVNTASQCGFTPQLEDLQKLYKQYQDNDFEILGFPCNQFGNQDPGASEEISAFCQKNYGVTFQMFKKVDVKGKEAHPLYKHLTEEKKGILGGQIKWNFTKFLIDQNGNVIERFSPQKNPNTLNKDIEVLLR

SEQ ID NO: 7504 - protein, 463 aa, Oryza sativa (japonica cultivar-group)
MESEVCWLLCAALAAAMACYYLTGTMRRRSRRLPPGPTPLPVIGNVLSLRGNMHHALARLAGEHGPVMALKLGLVTTVVVSSAGAAREAFTKHDRRLAARAVPDTTRARGFASRSMIWLPSSDPRWKTLRGVAATHVFSPRSLAAARGVRERKVRDIVGHLAGHAGEVVDVGKVVYGGVLNLRRLDLQGWRRWAEKRYDKVFGIFDSVINSRLADASTGKHADAGAGDFLDSLLDLMSAGTIARDDVTSIMYDLFGAGTDTIAITVEWAMAELLRNPSVMAKARAEMNHVLAGKVKATEMEENDVEKLPYLQAVVKEVMRLHPAAPILVPHRAEEDDAEIGGYAVPKGSTVIFNVWAIMRDPVAWERPEEFMPERFLDMAEEVDFRGKDHKFMPFGTGRRLCPGLSMAKRVVPFILASLLHAFEWRLPAGVTAEALDLSEKFTTVNVLVTPIKAIPILASDQI

SEQ ID NO: 7505 - protein, 214 aa, Physcomitrella patens
LSDIHCTQCLPIRLSLVLSSALSKFRESVAMASAVVSTVVAPVALGGASSCVGAPSESSSVKAFSGLKSATLFSGKTQKLSSVQNGSRVQCMQVWNPIGQPKFETFSYLPPLTDDQIAKQVDYMIQQNLIPCIEFDTVGSVSRTNFSGAGSSGYYDGRYWTMWKLPMFGCTDSSQVLREIQECKSQFPSCWVRVLGFDSKKQVQICGFLVSRPN

SEQ ID NO: 7506 - protein, 357 aa, Azoarcus sp. EbN1
MTTMKAAVFKAPGRIELVDKPLPQVGPNDALVRITTTTICGTDVHILKGEYPVATGLTIGHEPVGVIEQLGSNVQGYVEGQRVIAGAICPSFTSYGCQDGVPSQDGGHVGHGYKPMGGWRFGNTIDGTQADYVLVPDAIANLAPVPDGLTDEQVLMCPDIMSTGFAGAEAANIRIGDIVAVFAQGPIGLCATAGAKLRGASLIIAVDGVDERLRISRNMGADVTLNFREVDVVSEILRITGGRGVDAAVEALGLQSTFESALRVLKPGGTLSSLGVYSSDLTIPLGAFHAGLGDNKIVTSLCPGGKERMRRLMNVVASGRDDFGALVTHTYKLDDIVAAYDLFANQRDGVLKIAIKP

SEQ ID NO: 7507 - protein, 582 aa, Glycine max
  misc_feature (259)..(259): Xaa can be any naturally occurring amino acid
  misc_feature (266)..(266): Xaa can be any naturally occurring amino acid
  misc_feature (325)..(325): Xaa can be any naturally occurring amino acid
FEQQYDRFMNSFRSLENNTQGQPDKVVSLAKWRILNRLHDRNETLYYRVLIDNIKEFAPIIYTPTVGLVCQNYSGLFRRPRGMYFSAKDKGEMMSMIYNWPAHEVDMIVLTDGSRILGLGDLGVQGIGIPIGKLDVYVAAAGINPQRILPVMLDVGTNNQKLLEDRLYLGLRQPRLEGEEYLSIVDEFMEAVHARWPKAIVQFEDFQMKWAFETLKRYQKRFCMFNDDIQGTAGVALAGILGTVRAQGRPLTDFVNQKXIVVVGAXGGLGVLKMAIQTVAKISGCSELAAKSQFYLIDKDGLVTTERNSLDPAAAPFAKNPRDIXGLTEGASIIEVVKKIRPHVLLGLSGVGGIFNEEVLKAMRESVSTKPAIFAMSNPTMNAECTSIDAFKHAGENIVFASGSPFENVDLGNGKVGHVNQANNMYLFPGIGLGTLLSGAHLITAGMLQAASECLASYMAEEDILKGILYPSVDFYMYMGTAECTAIDAFKHAGENMVFASGSPFENVDLGNGIVGHVNQANNMYLFPGIGLGTLLSGAHLITDGMLQAAAEWYDVNLENCFFFINQKPLELALMEVWQDVF

SEQ ID NO: 7508 - protein, 126 aa, Brassica napus
  misc_feature (20)..(20): Xaa can be any naturally occurring amino acid
PIDPDAGLQSEIESLMKKSXSDFSVVISQMNGQDYASRSHVLTIGKTRIKLSRGWITKAREIYSTSMQLCGVRGNIKAPAKALFWQPRKSLTFTLTFESEQERNTAISLARKYAFDCNVTLLGPDD

SEQ ID NO: 7509 - protein, 204 aa, Triticum aestivum
HEAFPTPPRSANHRLLLPPPFSPLRSSPPARAFFIRVSGRGMADDDSGSPRGGGGVREQDRFLPIANISRIMKKAVPANGKIAKDAKETLQECVSEFISFVTSEASDKCQKEKRKTINGDDLLWAMATLGFEEYVDPLKIYLQKYRDMEGDSKLTSKSGEGSVKKDIIGAHSGATSSNAQAMVQHGAYAQGMGYMQPQYHNGDT

SEQ ID NO: 7510 - protein, 145 aa, Zea mays
  misc_feature (36)..(36): Xaa can be any naturally occurring amino acid
  misc_feature (102)..(102): Xaa can be any naturally occurring amino acid
RIDGRTHASADTCDDYSAVAMDSESQGVERLPMRTXMSPSEYHYASLQAYMLMLKLIHLKLRFYDQHRGLSALGPYMGTCIWQCIFGRFDPQTDLATSDSIXLRRHIGIDLSRHAADREHSRYYAELLIRSGVVSNSELHNLTSH

SEQ ID NO: 7511 - protein, 290 aa, Glycine max
SWSISVFEQVKWIRVLYADFTAFIRDQEKLIFAEKAFDYVEGFVIINRTGLLNNWSSSFNPQDPVQASEFKSDGRTLFCLELAKYYNLEETLLVNQEVEKHLSRLNYIPSTLFLTEVTYVDFLDRVHTSEVKLRSKGLWDVPHPWLNLFIPKTKIHHFAEVVFGNIVKETSNGPVLIYPVNKSKWDNRTSVVIPEEDIFYLVAFLASAVPSSNGPDGLEHILSRNKKILEYCERANLGVKQYLPHYSTQEEWTAHFGSQWEIFKKRKSLYDPLAILAPGQGIFQKSITFS

SEQ ID NO: 7512 - protein, 113 aa, Bartonella sp. Rn1691yn
ANEACLKMLQEIDSVKRIPKFIARAKDKNDPFRLMGFGHRVYKNYDPRAKIMQQTCHEVLKELNIQDDPLLDIAIELEKIALNDEYFVEKKLYPNVDFYSGITLKALGFPTEM

SEQ ID NO: 7513 - protein, 280 aa, Zea mays
MDAPAPAVEIREVWASNLEEEFEVIRDVVDAYPYVGMDTEFPGFVVQPIAEYRFTCDRIYAGLEGNVNVLKLIQLGLTFSNEAGTLPPCGTGGQCCIWQFNFRGFNPHTDPYSPDSIDLLRRSGIDFDLFAVEGVDSTRFAELMMSSGIVLNDDVQWVTFHGSHDFGYLLRLLTGREMPNTLDEFLKLTKIFFPVMYDVKHLMKFCGPGLYGGLSRLGKLLKVERVGTGHQAGSDCLLTLQCFMKLKQLYLKESVKLYDGLLFGLIPGEVEIKTAPPPIG

SEQ ID NO: 7514 - protein, 502 aa, Pseudomonas aeruginosa
MEKTTTSPVGATYWRSRAENVEFEGRCLIDGKLIEAHSGQTFDCVSPVDGRVLTKVAEGGEADINKAVAAARAAFQDRRWAGQSPIFRKRTLQAFAALIRLHRDELALLETLDMGKPISASRSVDVEAVANCFDWYAEAIDKLYEQIAPTAENDLALITREPLGVVGAIVPWNFPMLTTAWKVAPALATGNSVVLKPAEQSPLTAIRLGQLALEAGIPEGVFNVVPGFGRSAGKALACHMDVDGIFFTGSTATGRLLTEYAAKTNLKRVCLELGGKSPNIILASYGDIEKAAVTAAESMFNNQGEVCIAPSRLIVERSIHKQVVEIVAEIARQRQPGDPLDPATRIGALVNAQHADRVMGFIERAKTDGATLAAGGTRALTETGGSYVVPTVFDNVSNDMEIAREEIFGPVLSVIPVSSVDEAVSVANDSPYGLGAGVWTDSLSDAHKISRKLRAGVVYVNCYNDCDITTPFGGVKQSGNGRDKSLYALDEYTELKTTWIRL

SEQ ID NO: 7515 - protein, 115 aa, Brassica napus
MALALRFFTCLVLTVCIVASVDAAVSCGTVTSSLAPCANYLSKGGDVPPPCCAGVTKLNGMAQTTPDRQQACKCLQSAAKTVSGLDPSLAAGLPGKCGVSIPYPISMSTNCDNVK

SEQ ID NO: 7516 - protein, 360 aa, Candida albicans SC5314
MTNPSLVLNKIDDISFEDYESPEITSPRDVIVEVKKTGICGSDIHYYAHGSIGPFVLRKPMVLGHESAGVVVAVGDDVTNLKVGDKVAIEPGVPSRYSDEYKSGNYHLCPHMAFAATPPVNPDEPNPPGTLCKYYKAPADFLFKLPDHVSLELGAMVEPLTVGVHACKLANLKFGENVVVFGAGPVGLLTAAVAKTIGAKNIMVVDIFDNKLQMAKDMGAATHTFNSKTGDDLVKAFDGIEPSVVLECSGAKQCIYTGVKILKAGGRFVQVGNAGGDVNFPIADFSTRELTLYGSFRYGYGDYQTSIDILDKNYINGKENAPINFELLITHRFKFKDAIKAYDLVRGGNGAVKCLIDGPE

SEQ ID NO: 7517 - protein, 249 aa, Magnaporthe grisea 70-15
MGMGDSDTANGTVRTSVPGVPVTIERKPFVQDEHEDQRLPNAGTARVNTAASYEHPNGTTEDGYARRHSHQTVLQQHCDFFDRDQDGVIWPQDTFVGFYRLGFGVILSLISVFIIHGNFSYPTSPSWIPDAFFRIHLDRIHKDKHGSDTGTYDTEGRFVPQKFEDIFAKYAPGQDSLTWRDVMQVLHGQRLYADPIGWFAAVFEWLATYILLWPEDGHMKKDDIRGVYDGSIFYTIAARREERVRQKSS

SEQ ID NO: 7518 - protein, 77 aa, Triticum aestivum
PHVGPQDYQLIAITDDGYVRLLTESGPPKDDLKLPPDDVLLGPIQTGFADGQDLILFVMSPLGEEPICPVKEIGGGQ

SEQ ID NO: 7519 - protein, 325 aa, Zea mays
CIASAVGVNEKKRTPSSRTHSIRCLFEAFLKKKSGEAHPSSTLLSTKDFLERPLAGSQVQLCLLETNTLNSWSRIDPGTFRVRGANYFRDKKKELAPNYAAYYPFGVDVYLSPQKLNHISRFVQLPDIQLSSKLPPLLVVNVQVPLYPASLFQNETDGEGMSFVLYFRLSDGYSKELPHSFIESIRRLVDDHVEKIKAFPMETTIPFRERLKILGRVANLEDLPLSAAERKLMHAYNEKPVLSRPQHEFYLSDNYFEIDIDMHRFSYISRKGFETFLDRLKACVLDVGLTIQGNKAEELPEQILCCVRLNGIDYTKYQPLLTHGA

SEQ ID NO: 7520 - protein, 488 aa, Leptospira interrogans serovar Copenhageni str. Fiocruz L1-130
MSEKTKIAIAYGDGIGPEIMDATLKILNAAGAKIEPIEIEIGEKVYKEGHSSGIKPEAWDILRQTKVFLKAPITTPQGGGYKSLNVTVRTTLGLFANVRPCFSLYPYVETKHPSLDIVIIRENEEDLYTGIEHRQTNDTVQCLKLISHPGSEKIIRYAFEYARAYGRKKVTAMVKDNIMKQTDGLFHDIFKEVAKEYPELEVNSQIIDIGAANLADRPQNFDVVVTLNLYGDIISDIVAQIAGSVGMAGSSNIGEIVSMFEAIHGSAPDIAGKNLANPSGLLNAAVMMLVHIGQPDIAAKINNAWLLTIEEGIHTGDIFKPGVSRIKVGTKEFSDAVIGNLGHLPGKFKPVSFGKAKKIIIPEYKRNIQKKDLVGVDIFLDWVGKDPNELGNKLKSVSDELMLKIITNRGVKVYPDGQPETFLIDHWRCRFVSKNALIKQEDPSYHPISHKQVAELLLKLDLAGFDTIKTENLYYFNGKRAFSLGQGE

SEQ ID NO: 7521 - protein, 127 aa, Pinus radiata
MAEKKSRSVSGAVICVCIWACMGVFLHQPASAALDCNTIIQQITSCATYLTTGTPVPQEESSCCQGVQSLYGDATTTEEIQQICTCLKNEAINYNLNDRALQSLPSNCGLQLSFTITRDIDCSSISL

SEQ ID NO: 7522 - protein, 487 aa, Sinorhizobium meliloti 1021
MNPETTAVPYERLGILIDGRWIYEAERSTEVVDPATGQTIARLPFAADGEIAEAVASSQRAFESWKDRSPLERGRILRRFADLARKHADEIARNMTRDQGKPLSEAIGEIRFAADHADWHAEEARRIYGRVIPARDPRVQQMVLREPVGVCIAFTPWNFPFSQALRKVVAALASGCTIILKGPGESPSSTVAIGRLMQEAGLPDGCLNILWGDPAHLSETLLAAPEVRKISFTGSVEVGKHLASLAGRHMKRSTMELGGHAPVILFDDADIEAAADALAGQKVRNAGQVCISPTRFYVQAKGHDRFLARFAEKIASTRVGNGFQESVQMGPLCHGRRVAAMEGFIQDAREQGAEIVTGGERVGNAGFFYAPTVVAAGTDELRLMKEEPFGPIAVVTPFGDFDEVIRRANSLPFGLASYVFTGSSSRAQNAARALAAGMVSVNHFGLALPETPFGGINDSGYGSEGGSETFDGYLNTKFVTRFDQIPQ

SEQ ID NO: 7523 - protein, 461 aa, Sinorhizobium meliloti 1021
MNDRPNSLHALDKQSLVHPYTNLAVHQETGPHVITGGDGIYVVDDEGKRYIEGLAGLFCAGLGFSEQRLVEAATRQLKTMPFYHSFAHKSTEPGIRLAEKLLSIAPVPMSKVFFAGSGSEANDTAIKLIWYYNNALGRPEKKKIISRRKAYHGVTVATASLTGLPFNHRDFDLPIANILHTDCPHYWRFAETGETEEDFATRMANNLEAIILEEGPETIAAFFAEPVMVSGGVITPPKTYFEKVQAVLRKYDILLIADEVICGFGRTGNMFGSETYGLKPDMISCAKQLSAAYMPISALMINAKIADALVDQSRKIGTFSHGFTYGGHPVAAAVALEALTIYEEIDIVGHVRSVAPAFQDRVRKLGEHPLIGEARGVGLVAGLEFVKDKATRENFPPAWQVANQAGKFATARGVLTRGLGDMVSLCPAMIIDDEQIDDLMTRMGLALDDTLAWARAQGHVG

SEQ ID NO: 7524 - protein, 400 aa, Psychrobacter sp. Ant300
MTIKLASTDRIDNDIREENGTQENRLTVKQKVLSYNPLTTCQPHTLHYAMKGVGYLPTPLLESLVGYLKGPSSKQYLHADAHLRLILAVNSKLVHWEDKVIANADDGDMTIRCYQSDASSHGLGFKKADTHNSDETVLLYFHGGGFCIGDVNTHHEFCHAVCEQTGWPIVSVDYRLAPEHPAPAALKDCITAYAWLAEHCHTLGALPSRIVLAGDSAGGGLSTLIAQQLSAPSQVAWSDLGSAGQKMFDLLERLPKPLAQMPLYPVTDIETDYPSWELYGEGLLLDHADVAVFDAACLDNSPLPRQHILNCPMLGDNSKVCPTYIVAAELDVLRDEAFAYAKQLKVHGIAVKTHTILGAPHGFIHFMSIHQGIGQKTGDIIKGFASFVRDVINTQSQLAA

SEQ ID NO: 7525 - protein, 363 aa, Zea mays
MTASQSSMSGGGEPGVRTVVWFRRDLRVEDNPALAAAARTAGEVVPAYVWSPEEDGPYYPGRVSRWWLSQSLKHLDASLRRLGACRLVTRRSSDAVVALIDLVRSTGATHLFFNRLYDPLSLVRDHRVKEQLSAEGITVQSFNADLLYEPWEVLDDDGFPFTMFAPFWNRCLCMPDPAAPLLPPKRINSGIRDLSRCPWDELIFEDESEKGSNALLARAWSPGWQNADKALTAFLDGPLVDYSANHKKADSASTSLLSSYLHFGELSVRKVFHQVRMKQLMWSNDGDRAGEESCTLFLCSIGPRRRGELHPVPLLHRPAGVLEGGEAGEEYAGAVGEPWRRIWRSPKRKKGKSWTLMWRVSLV

SEQ ID NO: 7526 - protein, 495 aa, Shigella flexneri 2a str. 301
MNFHHLAYWQDKALSLAIENRLFINGEYTAAAENETFETVDPVTQAPLAKIARGKSVDIDRAVSAARGVFERGDWSLSSPAKRKAVLNKLADLMEAHAEELALLETLDTGKPIRHSLRDDIPGAARAIRWYAEAIDKVYGEVATTSSHELAMIVREPVGVIAAIVPWNFPLLLTCWKLGPALAAGNSVILKPSEKSPLSAIRLAGLAKEAGLPDGVLNVVTGFGHEAGQALSRHNDIDAIAFTGSTRTGKQLLKDAGDSNMKRVWLEAGGKSANIVFADCPDLQKAASATAAGIFYNQGQVRIAGTRLLLEESIADEFLALLKQQAQNWQPGHPLDPATTMGTLIDSAHADSVHTFIREGEGKGQLLLDGRNAGLAAAIGPTIFVDVDPNASLSREEIFGPVLVVTRFTSEDQALQLANDSQYGLGAAVWTRDLSRAHRMSRRLKAGSVFVNNYNDGDMTVPFGGYKQSGNGRDKSLHALEKFTELKTIWISLEA

SEQ ID NO: 7527 - protein, 220 aa, Brassica napus
MVLEATMICIDNSEWMRNGDYSPSRLQAQTEAVNLLCGAKTQSNPENTVGILTMAGKGVRVLTTPTSDLGKILACMHGLDVGGEINLTAAIQIAQLALKHRQNKNQRQRIIVFAGSPIKYEKKALEVVGKRLKKNSVSLDIVNFGDDDDEEKPQKLEALLAAVNNNDGSHIVHVPSGANALSDVLVSTPVFTGDEGASGYVSDATAETATDGDCDFGVDP

SEQ ID NO: 7528 - protein, 374 aa, Ralstonia eutropha JMP134
MDEACARLGVRPQTVYAYVSRGKIEVMSDPVDTRRSLYRAEDVATLAKRKQAGRKHETLATNTLFGAEPSIPTAISTFLRERLYYRGRDAVVLAETATLEEAAQLLWDSAQPVNFSSSTKVAKPGRVAAFKALAELAATGHSTHGRMTRVLHAEGQGLVGQMANAFGAQPGQQALHMRFAQGWGLKPAGAELLRMAMVLLVDHELTSSAFASRIAASNGASLPACLLSGLATLSGPLHGDASGRVKALFNDVERQGEDQVITHYLSTGQALAGFGHHLYPEGDPRAAALLSRFEPPPVIARFIAQATRLTGLQPNIDVALAALVIHCGLPDDAAFGMFATARSIGLLAHSLEQLGVGQVIRPRGRYVGVVPERV

SEQ ID NO: 7529 - protein, 385 aa, Lycopersicon esculentum
MGSQIKKQWLQFACLLTFFLIATCSMAYSPYNSYESSDSTYNKVPTTVVKSEDFKVPSESEKEYKSSFLPKNDYYKKPSISEDNYKKVSFVPEHESFLPKNDYYKKPLFSEDNYKKESYVQEVPSKAKPEYKESFFSKFDYFKKPSFFEDNYKKTSYVPKVPSMAKPEYKESFFPKFDYFKKPSVSEDNYKKTSYVSEVPSMAKPEYKESFFPKFDYFKKSLAPEDKYKKAPYVPEVSTEPKPEYKVPSLPKNDYYKKPTIPEDNYKKVSYVSKVPSVPKEEYKAPTLPKNDYYKKPSVQEENYKKVPLISKLPSVPKEEYKVPSLSKKDYYKKPLVSEDNYKKVSYVPKVPSVPKEEYKAPSLSKNDYYKKSSPSPSPPPPPYY

SEQ ID NO: 7530 - protein, 312 aa, Pseudomonas aeruginosa
MTDTAKRPLYVPHAGPSLLEMPLLNKGSAFSTQERIDFNLQGLLPHNIETIEEQTERAYSQYNLCNTDLDRHIFLRSIQYNNETMFFRLLEEHLEEMMPIIYTPTVGQACQEFSKIYRTHRGLFISYPDRERIDDILRSATKNNVKIVVVTDSERNLGLGDQGIGGMGIPIASCPCTCGGISPAYTLPVVLDVGTNKPDLLNDPMYMAWRHERVSGAQYEEFVDLFIQAIKRCWPNVLLQFEDFAQTNAMPLLERYKDELCCFNDDIQGTAAVAVGTLLAACKAKGEKLSEQTVTFVGWPPPVAASPNRSSR

SEQ ID NO: 7531 - protein, 291 aa, Saccharomyces cerevisiae
  misc_feature (1)..(1): Xaa can be any naturally occurring amino acid
XVHVASVEKGRSYEDFQKVYNAIALKLREDDEYDNYIGYGPVLVRLAWHISGTWDKHDNTGGSYGGTYRFKKEFNDPSNAGLQNGFKFLEPIHKEFPWISSGDLFSLGGVTAVQEMQGPKIPWRCGRVDTPEDTTPDNGRLPDADKDAGYVRTFFQRLNMNDREVVALKGAHALGKTHLKNSGYEGPWGAANNVFTNEFYLNLLNEDWKLEKNDANNEQWDSKSGYMMLPTDYSLIQDPKYLSIVKEYANDQDKFFKDFSKAFEKLLENGITFPKDAPSPFIFKTLEEQGL

SEQ ID NO: 7532 - protein, 207 aa, Arabidopsis thaliana
MASVSPLAKYKLVFLGDQSVGKTSIITRFMYDKFDTTYQATIGIDFLSKTMYLEDRTVRLQLWDTAGQERFRSLIPSYIRDSSVAVVVYDVANRLSFLNTSKWIEEVRNERAGDVIIVLVGNKTDLVEKRQVSIEEGDSKGREYGVMFIETSAKAGFNIKPLFRKIAAALPGMESYSNTKNEDMVDVNLKPTSNSSQGDQQGGACSC

SEQ ID NO: 7533 - protein, 291 aa, Saccharomyces cerevisiae
  misc_feature (1)..(1): Xaa can be any naturally occurring amino acid
XVHVASVEKGRSYEDFQKVYNAIALKLREDDEYDNYIGYGPVLVRLAWHISGTWDKHDNTGGSYGGTYRFKKEFNDPSNAGLQNGFKFLEPIHKEFPWISSGDLFSLGGVTAVQEMQGPKIPWRCGRVDTPEDTTPDNGRLPDADKDAGYVRTFFQRLNMNDREVVALMGAHALGKTHLKNSGYEGPWGAANNVFTNEFYLNLLNEDWKLEKNDANNEQWDSKSGYMHLPTDYSLIQDPKYLSIVKEYANDQDKFFKDFSKAFEKLLENGITFPKDAPSPFIFKTLEEQGL

SEQ ID NO: 7534 - protein, 339 aa, Ralstonia solanacearum GMI1000
MNRIAKFVAGSLLAVATGAALAAGSPGVERNTQAFLDALAAGGGKPLETLSPAEARAVLVGAQAAPKVPLPPADVSEKTINVDGKPIRLTIVRPAGAKGELPAFMFFHGGGWILGDFPTHERFVRDLVADSGAVAVFVNYTPSPEARYPVAINEAYAATRWVAENGAQINVDGTRLAVAGNSVGGNMAAVVALMAKTRGAPALRAQVLFWPVTNASFENASYDAFAEGHFLTRPMMKWFWDAYTANPAQRQEITASPLLATPGQLKGLPPTLVQTAEKDVLRDEGEAYARKLDAAGVTVVATRYNGMIHDFGLLNALSGLPATRAALHQASETLKLRLK

SEQ ID NO: 7535 - protein, 249 aa, Phytophthora infestans
MDRDSLVFLAKLAEQAERYDEMVDHMKAVANNHNVELTVEERNLLSVAYKNVIGSRRASWRVISSIENKGDSERSEHIKAYRQKIEGELVDICNDILTIIENNLIPNSSSEEGKVFYYKMKGDYHRYLAEFQVDDERKESSDKALESYKQASTIAMAELPPTHPIRLGLALNFSVFYYEILNSPDRACNLAKQAFDDAIAELDTLSEESYKDSTLIMQLLRDNLTLWTSDQEPDNADANQGDMNVQDVE

SEQ ID NO: 7536 - protein, 448 aa, Bacillus subtilis
MTHDLIEKSKKHLWLPFTQMKDYDENPLIIESGTGIKVQDINGKEYYDGFSSVWLNVHGHRKKELDNAIKKQLGKIAHSTLLGMTNVPATQLAETLIDISPKKLTRVFYSDSGAEAMEIALKMAFQYWKNIGKPEKQKFIAMKNGYHGDTIGAVSVGSIELFHHVYGPLMFESYKAPIPYVYRSESGDPDECCDQCLRELEQLLKEHHEEIAALSIESIVQGASGMIVMPEGYLAGVRELCTTYDVLMIVDEVATGFGRTGKMFACEHENVQPDLMAAGKGITGGYLPIAVTFATEDIYKAFYDDYENLKTFFHGHSYTGNQLGCAVALENLALFESENIVEQVAEKSKKLHFLLQDLHALPHVGDIRQLGFMCGAELVRSKETKEPYPADRRIGYKVSLKMRELGMLTRPLGDVIAFLPPLASTAEELTEMVAIMKQAIHEVTSLEN

SEQ ID NO: 7537 - protein, 120 aa, Onion yellows phytoplasma OY-M
MIQRESRLVVVDNSGAKEVLVIGILGGTRRSHVNIGDIVLVTVKSGSGTVKKHDVLKAVIVRTKKGLRRKNGSYIKFDDNAVVLLKEDLNIIGTRIFGPVVRELSDKKFSKIVSLAQLVL

SEQ ID NO: 7538 - protein, 125 aa, Triticum aestivum
  misc_feature (59)..(59): Xaa can be any naturally occurring amino acid
  misc_feature (65)..(65): Xaa can be any naturally occurring amino acid
  misc_feature (118)..(118): Xaa can be any naturally occurring amino acid
  misc_feature (120)..(120): Xaa can be any naturally occurring amino acid
  misc_feature (124)..(124): Xaa can be any naturally occurring amino acid
MAPTVMASSATSVAPFQGLKSTAGLPVSRRSNGASLGSVSNGGRIRCMQVWPIEGIKKXSKTLSXLPTLKQREGLLKARSELTLIRFKVGLPCLRSSTRVGFNFREQNATPGYYDGRXWXMWKXP

SEQ ID NO: 7539 - protein, 435 aa, Pseudomonas aeruginosa
MTALISSSNYPLPVVHHARGVFIYDDSGKSYIDGSGGAMTVSIGHGVPEVLSAMSRQAQQVCFTYRTHFTSTAAEELAKEIVALAPGDLNKVFFVNSGSEATELSMRTAIQYWQARGQPTKTKILGRAISYHGMTMGSLSMSGHAARRADYSNLLHQFAVAPPPYAYRFEVPNDGTFGASVWEKIIQEQGADTIAAVIVEPIVGAAGGALTPPIGYLKALREICDRHSILLISDEVITGMGRTGTWFGCEHDGIVPDIIATGKGMSSGYTPMGGVIIRDGIMEALGERVKLFGHTFSANPLSAATCLAVIRYMKEHAILDNVAARSVQLESGLKDLSVRYPWMADVRGRGLLWGFEFVKDATTKEPIDAARQPNLRFAQHCFDAGLIAYPAGIAPLNNSALLAPPLVISASETEELLSRLEIGLQRFGNEMGLPA

SEQ ID NO: 7540 - protein, 545 aa, Glycine max
RAIQATKVVFNHLYDPVSLVRDHNIKEKLVEQGISVQSYNGDLLYEPWEVNSESGRAFTTFNAFWKKCLHMQMDIVSVVPPWQLIPAEGKIEECSLEELGLENESEKPSNALLGRAWSPGWRNADKALREFVELHLLHYSKKRLKVGGESTSLLSPYLHFGELSARKVFQVTCMKQILWTNEGNSAGEESANLFLRAIGLREYSRYLCFNFPFTHERALLGHLKFFPWNPDPDIFKTWRQGRTGFPLVDAGMRELWATGWIHNRIRVIVSSFAVKMLLLPWKWGMKYFWDTLLDADLESDILGWQYISGGLPDGHELERLDNPEIQGAKFDPEGEYVRQWLPELARMPTEWIHHPWDAPLTVLRAAGVELGQNYPKPIIDIDLARERLTEAIFKMWESEAAAKAAGSEPRDEVVVDNSHTVENLDTQKVVVLGKAPCATISANDQKVPALQDSKNEPPTRKRPKHMIEEGQNQDHSQNHNKDTGLSSIDQDICSTADSSSCKKQCASTSSYSFSVPQQCSSSSNLKWPWQEKIDMEQSSSKDGAM

SEQ ID NO: 7541 - protein, 1098 aa, Magnaporthe grisea 70-15
MPPTDASRQREFVHPEAAHARKKTPPSPFVLQPITAFYFFLAANLIAAVFAPIQDCDETFNYWEPTHYLTHGYGLQTWEYSPEYSIRSWLYVSLHAIVANIRRILPQSTKVSEFYFVRYVLGFICALAQTLLYRSISLTISPRTGTWFVMVLVASPGNFHASAAYLPSSFAMYACMLGAAAFIHWRGGLKTSHGIFWFAVAGVIGWPFAAALCAPFLAEEGLLPLFGDGERRFDCFVRVGRGVVAALLLVVFDTCINTFFYRKMEVISWNIVKYNVFSSSGGPNLYGTEPWTFYFKNLALNFNIWFVLAMLSMPLFLMRNLIVPSGHELRSGWRTTVFLTPFYMWLGIFTAQPHKEERFMYPAYPFLALNAAVAFHIIVTALGNANPKTLIGMIPGKLKLAVLSIAVLLAFDVSLARVYGVYTAYSAPLSLYKPLGTGVLGEQGLGGSGDSVCFGKEWYRFPSSFFLPRKMRAKFIRSEFRGLLPGEFSEARTGFGIFGGTWLTPSGMNDRNEEDMGNGQRQLGGRTMYPILGCSEYELPRPGALGPSAVLYTGSHAEKVGLSLSFAKTEGFIKKSNISAGLYIASLYDYWHHRTRNFGVMQENLLLMELREQGAVVDFGSLHLGALKRIVTGGVAIPGDPGYEDAIRRWSALAVKQAGIVVFPTTAREVSGAIVYANGHSIPFTVCCGGHATSGSSSIGPDGMLIHLRLMQAISVDAQARTVTFGGGCLWRQVDAATSEYGMATPGGTISHTGVGGLILGGGFGWLSGRYGLCIDNLLEVEVVLGDGRIVTANAASEPDLFWAMRGAGHSFGVATRFTSRLYPQGDVWGGLLEFPHERLAEVTAVVNEMINKGDEDQCLMVTSTYATSKDSKSTVRAKVTTVCCFYNGTAEKAEGEIFKPLLSLRPHTSTAKQLPYAEMNRVLDEFLTYGSMMRQGGTNVLPHLTAQVLCGAANKLFDWVDEMLRKSDGRVDARDSIIAWELIPFDKTASVPGSATATGNRGRYYNVGMVVCNSSSDASQDDEMRAFKRELSASIATAGFKADMVGHGGVGHYVNYAEEQLSAEAGFGGNAKRLRELKTRYDPDNRFRKLWRLDTNV

SEQ ID NO: 7542 - protein, 294 aa, Listeria innocua Clip11262
MTKTLQDRMILPGNETIPYIGLGVFQVTEQEFIAGAVEKAIEVGYRLFDTAAVYNNEAIVGQAILDSAVPREELFISSKVWNGDLGYDETLFAFERTLRNLKLDYLDLYLIHWPVAGKYRDSWRAMERLHDEKLIKSIGVANFKQHHLSDLLVAANEKPVLNQVETHPLLPQNDLRKYLAEQNIAHAAWSPLAKGILMQNPVITEIAKKHQASVDQVILQWHLNRNTIIFPKSITSSRIEENSRLSYFQLDASDMEKIDRLETGKRVGPDPDDLEYFLSSIERERAYLTGGEKE

SEQ ID NO: 7543 - protein, 144 aa, Methylococcus capsulatus str. Bath
MTIGRNEPWSLLNQLQRELERSFEGRQGSDSAATAEWTPAVDIKEEADRYVLLADLPGVSTDNIDVSMEQGVLTLRGERNTEARTERSGYKRIERVYGSFYRRFSLPDTADADGISARYNNGVLEIVIPKKAAIQPRRIVVSAD

SEQ ID NO: 7544 - protein, 96 aa, Brassica napus
ESFHWRRKTIEPLTKCGLMKTSDEEIRHFFKNSSVQVIICPRSGGKGHHSFVKKTEVGTIYTHHQKTLIVDAEAAQGRRKIIAFVGGLDICKGRFD

SEQ ID NO: 7545 - protein, 207 aa, Zea mays
  misc_feature (161)..(161): Xaa can be any naturally occurring amino acid
MTKAATLYGSKTQSDALRPGPLRPANIIRNKFPTYKNGSNGIVIKLADGPEIPPLKEIVAKETADLLDRRQRLSVRELAMKFEKGLSTATLLSNEVKWRQVALMERDILLKNLKSVLESLRGQVTGKTKDEIEESISMVEILTVQLSKREAELVQQKEEVXKLAKSLKQMCFTLLYNLCKHVLVISGIKIYLLQIFQSSPCHHSVTK

SEQ ID NO: 7546 - protein, 266 aa, Photorhabdus luminescens
MNKKILILPGDGIGQEVCDAALPVFQALNLPVTLEIGDIGWTCWERDGDPVPASTWEKIASVDAVLLGAITSKGKEEAQQALPPHLRVKTRNYVSPVIQLRQRLGLYANIRPVRYVEGDRKPFRCCVIRENTEGLYAGFDFKGIPSTATTWLQHPNIDKYGPEEAAWTVRLQTRFGLERLFITAFEYAKENNYSRVTFADKPNVMRESGHFAKGIFDTVAAHYPEIKADIHNIDAVALWMVKKPHEFGVIVSENMFVIFCLIWQRA

SEQ ID NO: 7547 - protein, 171 aa, Glycine max
MAESDNESGGHTGNASGSNEFSGCREQDRFLPIANVSRIMKKALPANAKISKEAKETVQECVSEFISFITGEASDKCQKEKRKTINGDDLLWAMTTLGFEEYVEPLKVYLHKYRELEGEKTAMMGRPHERDEGYGHATPMMIMMGHQQQQHQGHVYGSGTTTGSASSARTR

SEQ ID NO: 7548 - protein, 350 aa, Agrobacterium tumefaciens str. C58
MKALVLEEKGKLSLRDFDIPGGAGSGELGPKDVRIRTHTVGICGSDVHYYTHGKIGHFVVNAPMVLGHEASGTVIETGSDVTHLKIGDRVCMEPGIPDPTSRASKLGIYNVDPAVRFWATPPIHGCLTPEVIHPAAFTYKLPDNVSFAEGAMVEPFAIGMQAALRARIQPGDIAVVTGAGPIGMMVALAALAGGCAKVIVADLAQPKLDIIAAYDGIETINIRERNLAEAVSAATDGWGCDIVFECSGAAPAILGMAKLARPGGAIVLVGMPVDPVPVDIVGLQAKELRVETVFRYANVYDRAVALIASGKVDLKPLISATIPFEDSIAGFDRAVEARETDVKLQIVMPQ

SEQ ID NO: 7549 - protein, 252 aa, Ustilago maydis 521
MFVNGGGKGEIPRKVDIDPYFDNTKLVFGEAGTKVPYTPQNTWKDPNGDRKDYLDRTKGLTTMQKHVAFFDGDCDGVIWPTDTFFAFLSLGFGFLLSAMAVAIIHGPFSYPTLPRKDNKLLDWLPDPFMRIYVANIHRCKHGSDSESYDRRGHFRQSQFETILDDYSTRHGKDALSFSDAMAMIRERRDLMDLFGCFAFMFEWGSTYMLLWPADGYMRKDDILGIFDGSIFVVLAHRHRNGQGGGAFKPKRA

SEQ ID NO: 7550 - protein, 509 aa, Brassica napus
  misc_feature (171)..(171): Xaa can be any naturally occurring amino acid
  misc_feature (221)..(221): Xaa can be any naturally occurring amino acid
MGSSCEEYEFLSEIGLSSSHNLGNYVGGKWLGNGPLVSTLNPANNQPIAQVVEASLEDYETGLKACEEAAKAWMQVPAPKRGDIVRQIGDALRSKLDYLGRLLSLEMGKILAEGIGEVQEVIDMCDFAVGLSRQLNGSVIPSERPDHMMLEMWNPLGIVGVITAFVDPRVXGWNACIALVCGNCVVWKGAPTTPLITIAMTKLVAEVLEKNHLPGAIFTAXMCGGAEIGEAIAKDTRIPLVSFTGSSKVGLTVQQTVSARSGKTLLELSGNNAIIVMDDADIQLAARSVLFAAVGTAGQRCTTCRRLLLHESVYDKVLEQLLTSYKQVKIGDPLEKGTLLGPLHTPESKKNFEKGIEVIKSQGGKVLTGGKAVEGEGNFVEPTIIEISSDAAVVKEELFAPVLYALKFKTFEEAVAINNSVPQGLSSSIFTRSPENIFKWIGPMGSDCGIVNVNIPTNGAEIGGAFGGEKATGGGREAGSDSWKQYMRRSTCTINYGNELPLAQGINFG

SEQ ID NO: 7551 - protein, 486 aa, Delftia tsuruhatensis
MKEFLNFINGEYVRNASGKTFQDINPVNGSVIGNIYEAGQAEVDAAVAAARAALKGDWGRLSVAERCKLLDAVAGEINRRFDDFLQAEIADTGKPHHLASHVDIPRGAANFQIFIDTIKSTATESFNMRTPDGKTALSYGVRVPRGVIAVVCPWNLPLLLMTWKVGPALACGNTVVVKPSEETPATATLLGEVMNQVGMPKGVYNVVHGFGPGSAGEFLTQHPGVNGITFTGETRTGTAIMKAAADGVRPVSLEMGGKNAAVVFADCDFQVTIDTLTRSCFENAGQVCLGTERVYVERPIFEKVVAALKERAEAMKPGLPFDHDTKIGPLISKKHQAKVLGLYKTAKDEGATIVTGGGVPDMPDALKDGSWVQPTIWTGLPETATVVTEEIFGPCCHISPFDSEEEVLGKVNANRYGLATAIFTQDIARANRLAHQIEVGLCWINAWFLRDLRTPFGGSKQSGIGREGGVHSLEFYTELRNVMVKF

SEQ ID NO: 7552 - protein, 150 aa, Caulobacter crescentus CB15
MKRLRALLIAAAAVALTAGASDPSERLPDQAQEARARTLFKEVRCLVCQNESIDDSEAQLAGDLRQIVREQVKAGSSDAQIRDFLVERYGEFVLLKPRFSMGNAVLWLAPVVVLLVGGVLMAGLLRRRETPEPALSQDEEARVRRLLEGD

SEQ ID NO: 7553 - protein, 481 aa, Microbulbifer degradans 2-40
MKIHNMKNFINGEYIASQADGAIDVLSPSTGKKVGDIPAGCVEDAQLALDTANAAQKLWAKKTNRERAKILRVFAANIRAAADDLAKLLVSEQGKLLSVAQMEVEATATFIEYACDNALTIEGDILPSDNPNEKIYIHKVPRGVVVAITAWNFPLALAGRKIGPALVTGNAIVVKPTQETPLATLALGELANAAGIPAGVLNIVNGRGSVVGQHLCESPITRLITMTGSTPAGQRIYRTSADHLTPVMLELGGKAPFIVMEDANLESAVEAAFTTRYANCGQVCTCAERLYVHESIYPAFMDKLLEKVKAIKVGDPMAADTDMGPKVNQSEIENIDALVKKGIEQGATLLHGGKRAHVPGFEGGNWYEPTLLGDVQQSNILVHEETFGPILPVVKINSIEQAIEYTNDSEYGLSTYLFTQNLKYIHQYIAEVEAGEVYVNRGIGEQHQGFHNGWKLSGAGGEDGRYGLEQYLEKKTVYFAE

SEQ ID NO: 7554 - protein, 201 aa, Klebsiella aerogenes
MAQHDENVVWHAHPVTQQQREQHHGHRGVVLWFTGLSGSGKSTVAGALEEALHERGVSTYLLDGDNVRHGLCSDLGFSDEDRKENIRRVGEVARLMVDAGLVVLTAFISPHRAERQMVRERLGEGRFIEVFVDTPLAICEARDPKGLYKKARAGELRNFTGIDSVYEAPEKAEIHLDGEQLVTNLVHQLLDLLQQSDIIRS

SEQ ID NO: 7555 - protein, 236 aa, Oryza sativa (japonica cultivar-group)
MGMGTFTTDESDKHEESYLSLGLTVSQSKKNNTEYPKVLLLLAAYLDRSVQKNEDLLDSNKIKDSSTIFHGHRAPDLSIKLYAERIFKYSECSPSCFVLALIYMERYLQQPHVYMTSLSVHRLLITSVVVAAKFTDDAFFNNAFYARVGGISTVEMNRLELDLLFNLDFRLKVDLETFGSYCLQLEKETMVLVIDRPIQQVHGVNSTKDLSRNSSIDESCKSELMRYSSQALQGCS

SEQ ID NO: 7556 - protein, 168 aa, Magnaporthe grisea 70-15
MSEGQLQKVNLQSNDGQSIEVDRAVACRSRLIKDLIGDLGEEMVASTPIPIPNVSEAVLRKVLEWCEHHRNDPVQTSDEDSESRKKTTDIDEWDQKFMQVDQEMLFEIILASNYLDIKPLLDVGCKTVANMIKGKSPEEIRKTFNITNDFTPEEEEQIRRENEWAEDR

SEQ ID NO: 7557 - protein, 475 aa, Synechocystis sp. PCC 6803
MYEKLQPPSVGSKITFVAGKPVVPNDPIIPYIRGDGTGVDIWPATELVINAAIAKAYGGREEINWFKVYAGDEACELYGTYQIFPEDTLTAIKEYGVAIKGPLTTPVGGGIRSLNVALRQIFDLYTCVRPCRYYPGTPSPHKTPEKLDIIVYRENTEDIYLGIEWAEGTEGAKKLIAYLNDELIPTTPALGKKQIRLDSGIGIKPISKTGSQRLVRRAILHAKRLPKAKQMVTLVHKGNIMKFTEGPFRDWGYELATTEFRAECVTERESWICGNKESNPDLTIEANAHMIDPGYDTLTEEKQAVIKQEVEQVLNSIWESHGNGQWKEKVMVNDRIADSIFQQIQTRPDEYSILATMNLNGDYLSDAAAAVVGGLGMGPGANIGDSAAIFEATHGTAPKHAGLDRINPGSVILSGVMMLEFMGWQEAADLIKKGIGAAIANREVTYDLARLMEPKVDKPLKCSEFAQAIVSHFDD

SEQ ID NO: 7558 - protein, 72 aa, Triticum aestivum
  misc_feature (43)..(43): Xaa can be any naturally occurring amino acid
MASRSCTFLEILLAIILPPLGVFLHYGCCSMEFCICLLLTILXGYIPGIIYAVYVLVALGSEERDRDYDTLA

SEQ ID NO: 7559 - protein, 426 aa, Glycine max
MPSPSRYGFGISQITLRLMMLLFLFFARAASGLNLTALLSTVPELSQFTSLLASATPLAADLSDRSSLSILAVPNAYLAADDHLSRHHLSPAALADVLRYHVLLQFLSWSDLRALPPSGKLITTLLQTTGRATDNFGSVNLTRDSQSGVISIRSPAPYSPSNATILSLIKTLPYNVTIFAVNSLLIPYGLDLMASETRPNIVLNITNALVNGHNFNVAASMLAASGVVQEFEADEGGAGITLFVPVDDAFADLPPSVALQSLPADKKAVVLKFHVLHSYYPLGSLESVVNPFQPTLATEAMGAGSFTLNISRVNGSVAINTGIVQASITQTVFDQNPVAIFGVSKVLLPREIFGRNPIVSAKPLDNAPPPDDDALSPENSPGFDGQPSHLSSPPGFREDVRSHAGGSGGSLNFVVLLCCIGLYFVV

SEQ ID NO: 7560 - protein, 236 aa, Candida albicans SC5314
MRSIKSVVVGDGGVGKTCLLISYTTNTFPNDYIPTVFDNYSASVMIDGEPIKLGLWDTAGQSEYDRLRPLSYPQTEIFLCCFSVISPDSFQNVKSKWIPEILHHCPKDILILLIGTKVDLRDDLHVLDELTARNLSPVTFDQGNKLAREIGAIKYMECSAATQVGVKEIFDYAIRAVLDPPNANKGEYVTNDSVPGMGVNNSSGSKKHNEKNGSGTATAGTGKKRKIKRAKKCTIL

SEQ ID NO: 7561 - protein, 469 aa, Streptococcus pyogenes SSI-1
MVSVMWFRRDLRIDDQKALAHAIASQSPTLCVFQFNNEQLNLLHSRNQSSFITSVLAFRKLLKCEGIDLYLMYGDLMTCFEQLLTQLKDWTDVYFNYDESGYGRLRDQKAAQFFKKNGIAVHTYQDHYLHGSQEIINQSGQPYKVFTPYYRIWQNYPKETPIKVELSQGRWLNLETPDDVLRTVESFKDEKYQDVATFDEASKQLNRFIQDQLAAYHANRDFPAQLGTSRLSPFLRIGAIGIRTVYHAVRQAPNSLGQATFLKELAWRDFYNMVYVAYPDQKTQPIQKAFSQIEWVNNPDWFQLWKEGKTGYPIVDAAMLQLQKTGWMHNRLRMIVASFLTKDLLCDWRLGEQYFQQQLIDYDAASNIGGWQWAASTGTDAVPYFRIFNPVTQGKRFDPKGEFIKAYLPQLEHVPEKYLHEPWKMPKYLQESVSCIIGTDYPQPIVDHAKQREQAIAKYEWAKEKAKIE

SEQ ID NO: 7562 - protein, 343 aa, Candida albicans SC5314
MSTAAVATKPSVTSKPATKQVSNYTKEKKVGEGTYAVVYLGKQISTKRQIAIKEIKTGLFKDGLDMSALREVKYLQELKHPNVIELVDVFSATNNLNLVLEFLPCDLEVLIKDKSIVFKSADIKSWLLMTLRGIHHCHRNFILHRDLKPNNLLLAPDGQLKIADFGLARALVNPNEDLSSNVVTRWYRAPELLFGARHYTGAVDIWSIGIIFAELMLRIPYLPGKDDVDQLDVTFRAYGTPTEQIWPNVSSLPMYNALHVYPPPSRQELRNRFSAATEKALDLLISMTQLDPSRRCDSTLALLHDYFTESPRPTDPKKLPKKSSPEKRENEDEQNNGSKRRHV

SEQ ID NO: 7563 - protein, 276 aa, Gibberella zeae PH-1
MASKTKYQTAPQSDPDDDYTHAPPAYAEGSAARDETQGLFGAPRDSEDNLPDDFKFGGSVAEATVDIRNQFVRKVYTILTVQLLATAGVSSLTFFSTGYKDWIQSHPGVVWASLFGSMIFMGLTYWKRKSYPTNLLFLSLFTLAEAYTISVIVSFYKTSIVLNAVVLTAGIFVFLTLFACQTKYDFTSWMPYLFGALWGLVIFGFMAMFFPYSSTGELIYGGLAALIFSGYILVDTQLVLRHHHVEEEIAAAISLYLDIINLFLAILRILNSQSNN

SEQ ID NO: 7564 - protein, 346 aa, Bacillus subtilis subsp. subtilis str. 168
MKAARWHNQKDIRIEHIEEPKTEPGKVKIKVKWCGICGSDLHEYLGGPIFIPVDKPHPLTNETAPVTMGHEFSGEVVEVGEGVENYKVGDRVVVEPIFATHGHQGAYNLDEQMGFLGLAGGGGGFSEYVSVDEELLFKLPDELSYEQGALVEPSAVALYAVRSSKLKAGDKAAVFGCGPIGLLVIEALKAAGATDIYAVELSPERQQKAEELGAIIVDPSKTDDVVAEIAERTGGGVDVAFEVTGVPVVLRQAIQSTTIAGETVIVSIWEKGAEIHPNDIVIKERTVKGIIGYRDIFPAVLSLMKEGYFSADKLVTKKIVLDDLIEEGFGALIKEKSQVKILVRPN

SEQ ID NO: 7565 - protein, 236 aa, Methanococcoides burtonii DSM 6242
MEGIFMKERNANASSSEKEAAGNAAASLVEDGMIIGLGTGSTTAFAIAEVGRRVREEGLNVLAVVTSYQAEMLAIEAGVPLTSLAEHPVLDLAIDGADQVDAKLNVIKGGGAAHTHEKVVAHSAKRFIVVVDESKISEELDHFVPIEVLPYARELAKKQFIELGGKPQIRLASRKDGPVISDNGNVIIDVEFGVIEDAAELSQKLSTCVGVVEHGIFLNTDEVYVGMKDGSVKIIN

SEQ ID NO: 7566 - protein, 276 aa, Arabidopsis thaliana
MKGEYREQKSNEMFSKLPHHQQQQQQQQQQHSLTSHFHLSSTVTPTVDDSSIEVVRRPRGRPPGSKNKPKPPVFVTRDTDPPMSPYILEVPSGNDVVEAINRFCRRKSIGVCVLSGSGSVANVTLRQPSPAALGSTITFHGKFDLLSVSATFLPPPPRTSLSPPVSNFFTVSLAGPQGQIIGGFVAGPLISAGTVYVIAASFNNPSYHRLPAEEEQKHSAGTGEREGQSPPVSGGGEESGQMAGSGGESCGVSMYSCHMGGSDVIWAPTARAPPPY

SEQ ID NO: 7567 - protein, 344 aa, Arabidopsis thaliana
MQPKTEFVKFLRKGAYGSVDLVKYIKRDDNALPLYAAVKTAECEDYNSLEREIQILSKLEGCRRIVQCYGNYTLEEDFDVGGFRVYKMVMEYAAAGSLFSFMDSYKDRKLPETMIKDFTRMILQGLVSVHRLGYVHCDLKPDNLLVFPCRQSYELKISDFGSSRKVGEYSDCWDVDLPFVGTPVYMSPESVRSGVAEKALDLWSLGCIVLEMYTGVIPWSEVEFEDLAPALSKGKAPEIPKSLPCDARKFLETCFSRNPKERGSASDLLSHQFLRGEVVSGFSLPPLKLKIKLAPEKPTNVSKKPLKLKIIPPKPPQFKKGGIKPLKLKIMPLKPPASSFVSVQ

SEQ ID NO: 7568 - protein, 308 aa, Sorghum bicolor
MEINIVDKYEKLEKVGEGTYGKVYKAQDKATGQLVALKKTRLEMDEEGIPPTALREISLLNLLSHSIYVVRLLAVEQAAKNGKPVLYLVFEFLDTDLKKYLDVYRRGPAARPLPATLIKNFLYQLCKGVAHCHGHGVLHRDLKPQNLLVDKDKGILKIADLGLGRAFTVPMKSYTHEIVTLWYRAPEVLLGATHYSTGVDMWSVGCIFAEMARRQALFPGDSELQQLLHIFRLLGTPSEEQWPGVSELRDWHEFPQWKPQSLARVVPTLEPEGVDLLSKMLQLDPSNRISAIAAMEHPYFDSLDKSQF

SEQ ID NO: 7569 - protein, 245 aa, Eucalyptus globulus
MGRGRVQLKRIENKINRQVTFSKRRCGLLKKAHEISVLCDADVALIVFSTKGKLFEYATDCCMERILERYERYSYAESQVLTNNAETNGNWTLEHAKLKARMEILQKNQKNLMGEELDSLSLKELQNLEHQLDTALKNIRSRKIQLMCESISELQRKDKALQEQNNMLAKKVKEKEKALAQQTQWDNPQDDGLTSSSVILSQSLQPLNIGGPYHPSGIEEGAALGPPQHRNATLFPSWMLSHLQE

SEQ ID NO: 7570 - protein, 178 aa, Clostridium perfringens str. 13
MLYDFKVKDIEGNEVSLGEYKGKVLLIVNTATGCGFTPQYEGLEVLYKKYHDKGFEILDFPCNQFFEQAPGSNEEIVGFCKLNYGTTFKTFAKVEVNGENACELYKFLKKEAPMAKEDETSLGFYDKLKGLGFTTEGEEIKWNFTKFLIDKNGEVVARFAPTFEPEKLDELIEELLEE

SEQ ID NO: 7571 - protein, 496 aa, Corynebacterium glutamicum ATCC 13032
MVKYPQSTLGDLVTATFAGIDATKHLIGGQWVEGNSDRISTNINPYDDSVIAESKQASIADVDAAYEAAKKAQAEWAATPAAERSAIIYRAAELLEEHREEIVEWLIKESGSTRSKANLEITLAGNITKESASFPGRVHGRISPSNTPGKENRVYRVAKGVVGVISPWNFPLNLSIRSVAPALAVGNAVVIKPASDTPVTGGVIPARIFEEAGVPAGVISTVAGAGSEIGDHFVTHAVPKLISFTGSTPVGRRVGELAINGGPMKTVALELGGNAPFVVLADADIDAAAQAAAVGAFLHQGQICMSINRVIVDAAVHDEFLEKFVEAVKNIPTGDPSAEGTLVGPVINDSQLSGLKEKIELAKKEGATVQVEGPIEGRLVHPHVFSDVTSDMEIAREEIFGPLISVLKADDEAHAAELANASDFGLSAAVWSKDIDRAAQFALQIDSGMVHINDLTVNDEPHVMFGGSKNSGLGRFNGDWAIEEFTTDRWIGIKRS

SEQ ID NO: 7572 - protein, 157 aa, Lactococcus lactis
MNFYDFSAVKMNGETVSMSDYKGKVVIVVNTASKCGFTPQFEGLEKLYETYKDQGLEILGFPCNQFANQDAGENTEINEFCQLNYGVTFTMFQKIKVNGKEAHPLYQFLKKEAKGALSGTIKWNFTKFLIDRDGQVIERFAPKTEPEEMEEEIKKLL

SEQ ID NO: 7573 - protein, 443 aa, Zea mays
  misc_feature (136)..(136): Xaa can be any naturally occurring amino acid
MEDAMAADGKSVLQGRYELGRVLGHGNFGRVHAARDLRTGRSVAVKVVAKDKLERAGMAEQIKREIAVMKMVSHPNIVELHEVMATRSKIYLALELVRGGELFSRIARAGRVREDVARCYFRQLVAAVDFCHGRGXFHRDLKLENLLLDEVGNLKVADFGLSALAGHARSDGLLHTACGTPSYVAPEVLGGKGYDGAKADLWSCGVILYVLLVGSLPFHEDNLMVMYRKMQRGEFLCPPWVSADARKLIGELLDPDPSTRITVARLVETPWYRKPLPVLPPLNLKEPTPDARRATSDKEEPEVLNAFHLISFSEGFDLSPLFDQGRGGGVGRSSAGGIRFVTREAASSVVSRLESLVTGRGANMRVTKSGSRGVRLEAVSRGRSGARLAVAAEIFSVAPSVLLVDVKKDGGDTMEYRSFCSEELRPALKDIVWASSQDTPGAA

SEQ ID NO: 7574 - protein, 122 aa, Psilotum nudum
MIQPQSYLKVTDNSGARKLMCIRILGTNNCKYANTGDTIIAVVKESVPNMPVKKSEIVRAVIVRTRKEMKRDNGIIIRFDDNAAVVINREGNLKGTRVHGPVDRELWKKNFTKIVSLAPEAF

SEQ ID NO: 7575 - protein, 319 aa, Phytophthora infestans
MDSRGEMKALDAQIDRLRRAENLTETEIYELCQKAKEILAGESNVQPVKCPVTVCGDIHGQFYDLLELFRIGGACPDTNYLFMGDYVDRGYYSLESVALLVALKVRHRERITILRGNHESRQITQVYGFYDECLRKYGNANVWKYFTDLFDHLPMTALIENRVFCMHGGLSPSIDTLDHARALDRVQEVPHEGPMCDLVWSDPDDRCGWGISPRGAGYTFGQDITEQFKRSNGLTFIARAHQLVMEGYQWTHNRGVVTIFSAPNYCYRCGNQAALMEIDEVMADRNGDKVYETCKFIQFDPAPRDSNFNEKKRTPDYFL

SEQ ID NO: 7576 - protein, 498 aa, Bordetella bronchiseptica RB50
MTLHDSAYWRAQAAALAPEGRAYIDGAYCDAADGATFAAHSPIDGRKLADVAACGAADVDRAVAAARRAFEAGVWSGLAPRERKHRLLRLAALITKHQEELALLETLDMGKPIRDALAFDLPETARCYAWYGEAIDKRYDEIAPTGADALATITREPLGVVAAVVPWNYPLMMAAWKVAPALAVGNSVILKPAEQASLSALRLAALAEQAGIPPGVFSVVPGLGAQAGQALGLHPDVDCIAFTGSTATGKRFMTYSGQSNLKRVWLECGGKSPHIVFADCPDLDRAAQVAALAIFSNQGEVCIAGSRLYVQHGIYDAFMEKVAAFAATLRPGNPLDPDSALGAMVDERQTQAVMARIAAGAQEGARLRLGGRQVLTNSGGYYIEPTIFDCPGQDNSLVREEIFGPVLAAQGFADEDEAVALANDSIYGLGAGLWTADLGRAHRLSRRLRAGLVWVNCYADGDITVPFGGVKQSGFGRDKSLHAMDKYSDLKTTWISLR

SEQ ID NO: 7577 - protein, 457 aa, Staphylococcus aureus subsp. aureus MRSA252
MAIAVLLNRMFRMEHNPLFEYIYQQKEDIDACYFIIPEEDMSSASDLKAQFYRGTLQRFYQSLHAEKLTPYVMSYDDIISFCKENNISEVVIAGDIMSYHLEEYDILHQRSLFNEARIAVTLIRGNHYFKASKTMNQQGEPYKVFTSFSKKWRPYLRHRDVYHYDLKSFEDFVIASPDDLVFDDIAFGSSQIIEQNKWQHFLDQDIQNYESGRDYLPEVLTSQLSVALAYGLLDIIEIFNDLLARYDEDEANYEAFIRELIFREFYYVLMTQYPETSYQAFKSKYRQIKWSQNEADFNAWCEGQTGFPIIDAAIMELTQTGFMHNRMRMVVSQFLTKDLFIDWTWGEKFFRKHLIDYDAASNIHGWQWSASTGTDAVPYFRMFNPIRQSERFDPKALYIKTYLPIFNQIDAKYLHDTQRNESNLFELGIELGRHYPRQMVDHQEKRTQVLAAFKALD

SEQ ID NO: 7578 - protein, 418 aa, Colletotrichum lagenarium
MGDLQGRKVFKVFNQDFIVDERYTVTKELGQGAYGIVCAAVNNQTQEGVAIKKVTNVFSKKILAKRALREIKLLQHFRGHRNITCLYDMDIPRPDNFNETYLYEELMECDLAAIIRSGQPLTDAHFQSFIYQILCGLKYIHSANVLHRDLKPGNLLVNADCELKICDFGLARGFSVDPEENAGYMTEYVATRWYRAPEIMLSFQSYTKAIDVWSVGCILAELLGGRPFFKGRDYVDQLNQILHILGTPNEETLSRIGSPRAQEYVRNLPFMPKKPFPQLFAQANPDALDLLDRMLAFDPSSRISVEQALEHPYLHIWHDASDEPDCPTTFNFDFEVVEDVGDMRKMILEEVYRFRQLVRTVPGSTQAGAQAAGQAGAGQVPIPSGNPGWTSSDPRPQEYVGQGGGLEADLAGGLDHRR

SEQ ID NO: 7579 - protein, 447 aa, Leptospira interrogans serovar Copenhageni str. Fiocruz L1-130
MKLSRSEFIKLGILTAAGISGLPGIKLSAQGTSSRKTVIVMGGGISGLYASYLLSKTGIKVQLIEATDRLGGRIRTVTDVSGNFLDLGAEWIQAEHRTAKSLIRELGLKTTDFEVQSDLFFGSYRKFGTWDISPKSQEILNKLVQMNSKINSTQQQELDRISFYNFLNYQGMSLEDLNILNFKYSLYYGDSLRSLSAQKVLSDLVNFPKYNTRVEGGMETLTRALVSSLENTEIIFSDPVVSVSQGEGKVIVTTVSGKKIEGNACISTLPANQLTTIQWDPELDKEKKLSALRIRYSRIYKTFLMLREAPWTRGSFSAYSDSVAGFIYDAGTKINSEDKILGMISTGDRYDVLASSTDAMKVEYIRLALESLGQGRELQVLRIQSSETSQSKFIPTGIATFPPGSYGSIISLLKPMDRIFFAGEHTAELNGTVEGALASAIRAVNQV

SEQ ID NO: 7580 - protein, 248 aa, Gibberella zeae PH-1
MSDSPQSPPKEVDQGAPSPDDEAQMNEQQDPQSANAAGYEFEGVKEQDRWLPIANARSAVHIWIPLMSCDSSSKSPKASRASKADRADELDANIRNFAPVARIMKNALPDNAKIAKEAKECMQECVSEFISFITSEASEKCQQEKRKTVNGEDILFAMTSLGFENYAEALKVYLSKYREQQNQSNRERVNMDNGQWGSGTMMGDAKAESGAVGDFGHDGNSVESGADPNYMYGSQPGHNGNAPEARER

SEQ ID NO: 7581 - protein, 359 aa, Lycopersicon esculentum
MVFPLDSQLQNPISALLDGLYCEEDRFLDDDLGEWSSLDVGNENVKKTLPLLECDMFWEHDELATLLSKENEFHLGFQSLISDGSLMGARKEALDWMLRVIAYYGFTATTAVLAVNYFDRFVSGWCFQKDKPWMSQLAAVACLSIAAKVEETQVPLLLDLQVADSRFVFEAKTIQRMELLVLSTLKWKMNLVTPLSFIDHIMRRFGFMSNLHMDFLKKCERLILDIITDSRLLHYPPSVIATASMFYVINDIEPSNAMEYQNQLMSVLKVRKDIFEECHDLILELMDTACYKLCQSLKRKHHSVPGSPSGVIDAYFSSESSNESWSVASSISSSPEPQYKRNKTQDQRMTLAPLGSNLH

SEQ ID NO: 7582 - protein, 283 aa, Enterococcus faecium
MNSLTSTYRLSNGYEIPVVGFGTWQTPDGDVAVSSVKEALAAGYRHIDTAQGYKNEESVGQAIKESGIPREEIFLTTKLWNANHSYELVMSSFEESLKKLQTDYLDLFLIHWPNPVAFRDNWEQANADTWRAFEELYEAGKIKAIGVSNFLPHHLDTLAKTAKIMPMVNQVFLAPGELQTTVVEYAKKHDMILEAYSPLGTGKIFDVPEMKQIAEAHDKTIAQVALRWSLQHEFLPLPKSVTPSRIKENTELFDFELTEEEMKQIDQLDGVVGKAKDPDTTQF

SEQ ID NO: 7583 - protein, 506 aa, Gibberella zeae PH-1
MSRPRRRGHKDGGYGGQATTLSSVVNLLNTSFQVVGAGTLAMPSVMSHMGIMLGVILIIWSGLTAAFGLYLQSRCARYLERGTASFFALSQITYPNAAVIFDAAIAIKCFGVGVSYMIIIGDLMPGVVLGFLSNANSAPYLVDRNFWITAFMLLIIPLSFLRRLDSLKYTSIVALVSIGYLIVLVIYHFASDKHADPGSIRVIQWGGAIETLSALPVVVFAYTCHQNMFSILNELKDNSPRSVVGVIGTSIGSASSIYIVVAITGYLTFGNAVVGNIVSMYPTGAASTIGKAAIVVLVTFSVPLQVHPCRASLDAVLKWRPNRNSSNNGRTATPLLPASPPGDHGSTAPMSDLRFAVITTFILTFAYMTALSVTSLDRVLAFVGSTGSTSISFILPGLFYYKISNPDSTYHQRLVKEDDDIDEDSSTSDVEESAALAQSTTSVRSGVSVVSNASTRSNRNSWRWRRKWRWDLEHIEHHHLRRMALALAIYGAVVMSTWYWVALQYK

SEQ ID NO: 7584 - protein, 196 aa, Glycine max
  misc_feature (154)..(154): Xaa can be any naturally occurring amino acid
MVLEATMICIDNSEWMRNGDYSPSRFQAQADAANLICGAKTQSNPENTVGVLTMAGKGVRVLVTPTSDLGKILACMHGLEIGGEMNLAAGIQVAQLALKHRQNKKQQQRIIVFAGGPVNHEKKMLEMIGRKLKKNSVALDVVNFGEEDEGMTCXLEALLSAVINNDTSLIVHVPSCPNALSDVLISTFIFTGEGWG

SEQ ID NO: 7585 - protein, 341 aa, Streptomyces avermitilis MA-4680
MRIGVLTAGGDCPGLNAVIRSVVHRAVTMYGDEVIGFEDGYAGLLDGRYRALDLNAVSGILARGGTILGSSRLQRDRLREACENAQDMAREFGIDALIPIGGEGTLTAARMLSDAGLPVVGVPKTIDNDISATDRTFGFDTAVGVATEAMDRLKTTAESHQRVMVVEVMGRHAGWIALESGMAAGAHGICLPERPFDPAHLVKMVEERFARGKKFAVLCVAEGAHPVVGSMDYSHGAIDQFGHERFQGIGTALAAELEHRLGKEAKPVILGHIQRGGTPTAYDRVLATRFGWHAVEAAHRGDFGRMTALRGTDVQMVPLAEAVTELKTVPKDRMDEAESVF

SEQ ID NO: 7586 - protein, 164 aa, Triticum aestivum
  misc_feature (101)..(102): Xaa can be any naturally occurring amino acid
GLNALAGRLKYDDPLEAAQLHGGCGAWGIIFTALFAKKQYVEEIYGAGRPYGLFLGGGGRLLAAHIVQILVIAGFVSCTMGPLFFALKKLGLLRISAEDEXXGMDLTRHGGFAYVYHDDERARQVGWRASCSSRGHTRVEAGQAGGPTRPALTKSNPGVRLQEK

SEQ ID NO: 7587 - protein, 496 aa, Pseudomonas aeruginosa UCBPP-PA14
MFELSDWQRRAATQRFIDQALIGGRQRPAASGATFDAIDPASNRLLARVAACDAADVDAAVAAARRAFDEGPWARLAPVERKRVLLRLAELMLAHREELALLDSLNMGKPVMDAWNIDVPGAAHVFAWYAESLDKLYDQVAPTAQQALATITRVPLGVIGAVVPWNFPLDMAAWKLAPALAAGNSVVLKPAEQSPFSALRLAELALEAGVPEGVLNVVPGLGEQAGKALGLHPEVDALVFTGSTEVGKYFMQYSAQSNLKQVWLECGGKSPNLVFADCRDLDLAAEKAAFGIFFNQGEVCSANSRLLVERSIHDEFVERLLAKARDWQPGDPLDPASRAGAIVDRRQTAGILAAIERAQGEGATLLGGGRQLTINGSDNFIEPTLFGDVRPDMQLAREEIFGPVLAISAFDSEDEAIRLANDSRYGLAASLWSDDLHRAHRVARRLNAGTVSVNTVDALDVAVPFGGGKQSGFGRDLSLHSFDKYTQLKTTWFQLR

SEQ ID NO: 7588 - protein, 285 aa, Salmonella enterica subsp. enterica serovar Typhi Ty2
MKSVKNVTFCGQVTLPAIGQGTWYMGERADQRQREVSALRAGLDLGLRLIDTAEMYADGGAEKVVGEALAGRRDEAFLVSKVYPWNAGGQKIVAACEESLRRLKTDYLDLYLLHWAGGFSFEETVEGMERLIAQGKIRRWGVSNLDYDDMQALWRIPGGQQCATNQVLYHLASRGIEYDLLPWCQQQRMPVMAYSPLAQAGRLRSGLLNHPVVNEIAQAHNATAAQILLTWVIAHPGVMAIPKAGSTEHVKQNAAALEITLSANELALLDNAWPAPKGKTALDMV

SEQ ID NO: 7589 - protein, 201 aa, Helicobacter hepaticus ATCC 51449
MQNQSIQSKQTSQQDNQQTSTMCSKQQGAVIWICGLAGAGKTTIAKEIFTLLEQKYSNVIFLDGDEFREIFGRSGFSKEERLEVARLIAKLCVFLSKSGLIVVCATISLFDEIYAFNRSHIARYFEVFVECSMEELLRRDKKALYSQALKGDIKDVIGIDLTYDTPKAHYVLQNNTADKLDSKVKELYNAVEKFLIQKGAK

SEQ ID NO: 7590 - protein, 214 aa, Saccharomyces cerevisiae
MSFNSPFFDFFDNINNEVDAFNRLLGEGGLRGYAPRRQLANTPAKDSTGKEVARPNNYAGALYDPRDETLDDWFDNDLSLFPSGFGFPRSVAVPVDILDHDNNYELKVVVPGVKSKKDIDIEYHQNKNQILVSGEIPSTLNEESKDKVKVKESSSGKFKRVITLPDYPGVDADNIKADYANGVLTLTVPKLKPQKDGKNHVKKIEVSSQESGGN

SEQ ID NO: 7591 - protein, 266 aa, Zea mays
  misc_feature (194)..(194): Xaa can be any naturally occurring amino acid
  misc_feature (238)..(238): Xaa can be any naturally occurring amino acid
  misc_feature (250)..(250): Xaa can be any naturally occurring amino acid
  misc_feature (257)..(257): Xaa can be any naturally occurring amino acid
PRGRPHEAAISLVHYFKLLVLLALARLTMHVPDEDVLLSLGALRLDGHFSFHDVSAMARDFGNQCSFLPAAVLHPGSVSDIAATVRHVFSLGEGSPLTVAARGHGHSLMGQSQAAQGIVVRMESLRGPRLQVNDAGVSPPSVDAPGGELWINVLRETLKHGLAPKSWTDYLHLTVGGTLSNAGVSGQAFRHGPXGRGDAVTCSPDDNADLFYAALGGLGQFGIITRARIALEPAPKMXRWIRVLYSDFEXFTEDQRXLIMAENSFD

SEQ ID NO: 7592 - protein, 323 aa, Candida albicans SC5314
MSSNSLEQLKATGTTIVTDTGEFEQIAKYKPQDATTNPSLILAATKNPEYASVIDVAIEYAKDKGSSPKEKAEIALDRLLIEFGKNILDIVPGRVSTEVDARLSFDKEATVKKALELIDLYKQQGIEKDRILIKIASTWEGIQAARELESKHGIHCNLTLLFSFAQAVACAEAGVTLISPFVGRILDWYKASTGEEYTAETDPGVQSVKAIYNYYKKYGYKTIVMGASFRNTGEIKALAGCDFLTISPKLLEQLYNSTEEVPKQLDAATAKDEDVEKVTYVDDESAFRFALNEDAMATEKLSQGIRQFGKDAVTLLTELESRF

SEQ ID NO: 7593 - protein, 162 aa, Pseudomonas putida KT2440
MAATMLNIPCVTLGGEHKTLGDFPGKVLLVVNTASQCGFTPQYKGLEQLWQAYRDRGLVVLGFPCNQFGKQEPGDAREIAQFCERNFGVSFPLFRKVEVNGPGAHPLFVELKQRAPGILGSQKIKWNFTKFLVDPASGQVKRYAPTTKPQALEADIERLLSR

SEQ ID NO: 7594 - protein, 340 aa, Zea mays
DGEVGNKLRGTAPPRGTRGRHHHGGRSHAHRREGGHRAANVSIAAVAAAKGGRFRHAAPAFATAPAATGSDAAPLVSASGGEVPPAAAQWAASWELDDWEFADCGDVAPAAVVAEREATAAAAKPRLVFAPPSREEAEEATTELRDAIGRAYFNESPVEVVKEQDKEFNKLATDAIIPSMPGHVVQAFTLLKSSTEAQSVVASLASDRNVWDAVLKNEKVMEFYKTHQTTPVQTFPEEAATAESPGKFEDATSENASNSELPTGSGASFADFVDNAKKKVMDVVHNITDFFRDLFNDSAEAQTGAGPSAEKGFSATEMAVGGSFMALTIAVILVVLFKRA

SEQ ID NO: 7595 - protein, 157 aa, Glycine max
  misc_feature (104)..(104): Xaa can be any naturally occurring amino acid
  misc_feature (139)..(139): Xaa can be any naturally occurring amino acid
GIRHEAGAGMVAPFTGLKSMAGFPTRKTNNDITSIASNGGRVQCMQVWPPVGKKKFETLSYLPDLDDAQLAKEVEYLLRKGWIPCLEFHLEHGFVFREHNRSPXYYHGRYWTMWKLPMCGRTVASQVVKELKEDKTECXSGFIRVIGCTTAPSAVFE

SEQ ID NO: 7596 - protein, 457 aa, Bordetella bronchiseptica RB50
MSKSPEQMTPYDQFNIEVPEDHFPVEGMSARAAQALVLSDEWTDTNPMLNMSSFVTTFAEPEAVRIAEKNMYKNYIDHDMYPQLFAMEQRMVRWLHQLWNGPKDAEPYGTATVGSSEACMLAGLAHKWNWRQRREREGKDATRPNMVTGGNVQIVWKKFLRYFDVEPRIVPLKPGQYCLTAEDLDKYVDENTIAVVAIAGQTFTGEDDDIQGIHDWLDAYEKKTGVSVPMHIDGASGGFVNPFLYPDYKWDFRLPRVQSINASGHKYGLTPPGLGWVIFRERKVFNEDLVFYVNYLGGEMPTATLNFSRNSFQVAVQYYQFLRLGFDGFKRVMQRTLDNAIALRQHLVDSGYFTIMNDTQRIPVVAVTLDPKVKKFNEFDVSNKVRERGWVISAYTMPPDAESVRSLRVVVRPHINRNVALLLAEDIVKACKYLEQHGGTATPPALHDTHKSSPAKC

SEQ ID NO: 7597 - protein, 293 aa, Magnetospirillum magnetotacticum MS-1
MVRNMTIASELGYLHVPEGVLIDLKKVDSLRDDEIVLMCTGSQGEPMAALSRMANGDHKVQVGHGDTVILASSLIPGNENAVFRIINGLTRLGARVVHGGNAKVHVSGHASAGELLYCYNVLKPKNVMPVHGEVRHLVANGALAVRTGVPADRVVLAEDGVVVDLVDGRASVVGAVPCGYVYVDGSSVGEITDAELKDRRILGEEGFVSVFAVVDSATGKVLAGPQILARGFAEDDKVFQDIQPEVVKALEDAIAGGATDTHQLQQVMRRVIGRWVSNRLRRRPMIVPVVVEA

SEQ ID NO: 7598 - protein, 279 aa, Staphylococcus aureus subsp. aureus MRSA252
MLNEIQILNNGYPMPSVGLGVYKISDEDMTKVVNAAIDAGYRAFDTAYFYDNEASLGRALKDNGVDREDLFITTKLWNDYQGYEKTFEYFNKSIENLQTDYLDLFLIHWPCEADGLFLETYKAMEELYEQGKVKAIGVCNFNVHHLEKLMAQSSIKPMVNQIEVHPYFNQQELQEFCDRHDIKVTAWMPLMRNRGLLDDPVIVKIAEKYHKTPAQVVLRWHLAHNRIIIPKSQTPKRIQENIDILDFNLELTEVAEIDALNRNARQGKNPDDVKIGDLK

SEQ ID NO: 7599 - protein, 214 aa, Listeria monocytogenes EGD-e
MRFFIDTANVEEIKKANRMGFISGVTTNPSLVAKEGRDFNEVIQEITSIVDGPISGEVVSLEADEMIAEGRVIAKIHPNMVVKIPMTGEGLAAVKVLTEEGIKTNVTLVFSATQALLAARAGATYVSPFLGRLDDIGDDGLVLIRDIADIFEIHGIPTEIISASVRHPIHVIECAKAGADIATVPFKVFEQMLKHPLTDSGIDKFLADWEAAKK

SEQ ID NO: 7600 - protein, 617 aa, Triticum aestivum
  misc_feature (313)..(313): Xaa can be any naturally occurring amino acid
MDSDYGVPRELSEVQQKRTLYQPELPPCLQGTTVRVEYGDVAIAADPAGAHVISHAYPHTYGQPLAHFLRKAANVPDAKVISEHPAVRVGIVFCGRQSPGGHNVIWGLHEAIKAHNVNSKLIGFLGGTDGLLAQKTLEITNEVLSSYKNQGGYDMLGRTKDQIRTTEQVNGAMATCQALKLDALVIIGGVTSNTDAAQLAETFAEAKCATKVVGVPVTLNGDLKNQFVETTVGFDTICKVNSQLISNMCTDALSAEKYYYFIRMMGRKASHVALECALQSHPNMVILGEEVAASKLTIFDITKQICDAVQARXAEKDKNHGVILIPEGLVESIPELYALLQEINGLHGKGVSVENISSQLSPWASALFEFLPQFIRQQLLLRPESDDSAQLSQIETEKLLAQLVETEMNKRLKEGTYKGKNFNAICHFFGYQARGAMPSKFDCDYAYVLGHVCYHILAAGLNGYMATVTNLKSPLNKWRCGAAPISSMMTVKGWSRGPATTQIGKPAVHMASVDLRGKAYEMLRQNSSSCLLEDIYRNPGPLQFEGPGADAKPISLCVEDQDYMGRIKKLQEYLEKVKSIVKPGCSQDVLKAALSAMSSVTETLAIMTSSSTGQPPL

SEQ ID NO: 7601 - protein, 502 aa, Gibberella zeae PH-1
MSPPSIPLIAPNGVKWSQPTGLFINNEFVSSSSSRTLTSIDPATENEIATVQAADAQDIDKAVKAAKAALRHPSWKDLPASDRGQLMARLADLIEAKRELFATIDAWDNGKTYIETLENDLVEAVGVIRYYSGWADKTFGQTINTTPQKFAYTIRQPIGVIAQIIPWNYPLSMATWKLGPALACGNAVVIKAAEQTPLSLLVLGELIKEAGFPPGVVNIVNGLGKDTGAALVQHPLVDKIAFTGSTATAANIMGVAAKTLKNITLETGGKSPLIVFDDAEMDQAVKWSHFGIMSNQGQICTATSRILVQETIYEEFIKKFIDTLNTVSKVGDQWDKTTYQGPQVSKVQYERILEYIEIGKKEGATLAAGGGPLKINGSDKGFYISPTVFTDVKPSMRVFREEIFGPVVVVSTFKTEEEAIELANDTTYGLGAAAFTTNLEKAHRVAAAIEAGMVWINSSQDCDPRVPFGGVKQSGIGRELGEAGLEAYTQIKSVHINMGNRL

SEQ ID NO: 7602 - protein, 171 aa, Glycine max
MADGPASPGGGSHESGEHSPRSNVREQDRYLPIANISRIMKKALPANGKIAKDAKETVQECVSEFISFITSEASDKCQREKRKTINGDDLLWAMATLGFEDYIDPLKIYLTRYREMEGDTKGSAKGGDSSSKKDVQPSPNAQLAHQGSFSQGVSYTISQGQHMMVPMQGPE

SEQ ID NO: 7603 - protein, 460 aa, Pseudomonas aeruginosa UCBPP-PA14
MTAQLNPQRDTRDYQQLDAAHHIHAFLDQKALNREGPRVMVRGDGLQLWDNDGKRYLDGMSGLWCTNLGYGRQDLAAAASRQLEQLPYYNMFFHTTHPAVVELSEMLFSLLPDHYSHAIYTNSGSEANEVLIRTVRRYWQILGKPQKKIMIGRWNGYHGSTLGSTALGGMKFMHEMGGMLPDFAHIDEPYWYANGGELSPAEFGRRAALQLEEKILELGAENVAAFVAEPFQGAGGMIFPPQSYWPEIQRICRQYDVLLCADEVIGGFGRTGEWFAHEHFGFQPDTLSIAKGLTSGYIPMGGLVLGKRIAEVLVEQGGVFAHGLTYSGHPVAAAVAIANLKALRDEGVVTRVREETGPYLQRCLREVFGDHPLVGEVQGAGFVAALQFAEDKATRKRFANENDLAWRCRTIGFEEGVIIRSTLGRMIMAPALVAGRAEIDELIDKTRIAVDRTAREIGVL

SEQ ID NO: 7604 - protein, 390 aa, Oryza sativa (japonica cultivar-group)
MGNRLCCHDAADDEKPAAAAVSGGGGGGGREEYRRWPIAAESGGGETGRVLDMPRLRVFTLAELRAVTRGFKPEMVLGEGGFGTVYKGWADERTLNPAKSSAGVVVAVKKLNPESVQGLHEWQSEVNFLGRLVHPNLVKLLGYCKEERELLLVYEFMPKGSLENHLFRRGAFDPLSWSLRLKIAIGAARGLAFLHSSERQIIYRDFKASNILLDVDYTPKLSDFGLAKNGPVAGRSHVTTRIIGTYGYAAPEYVATGHLYVKSDVYCFGVVLLELLTGLRAHDLNRPSHQQNLVEWARPYIAGGKKLAGLMDPRLAGDYPAKAAARAAKLADKCLCGDPKSRPSMDDVVVALQEIESVGTARPAAAKLPPRAPPPAAHRSPHRNPYSKPR

SEQ ID NO: 7605 - protein, 427 aa, Escherichia coli K12
MADTKAKLTLNGDTAVELDVLKGTLGQDVIDIRTLGSKGVFTFDPGFTSTASCESKITFIDGDEGILLHRGFPIDQLATDSNYLEVCYILLNGEKPTQEQYDEFKTTVTRHTMIHEQITRLFHAFRRDSHPMAVMCGITGALAAFYHDSLDVNNPRHREIAAFRLLSKMPTMAAMCYKYSIGQPFVYPRNDLSYAGNFLNMMFSTPCEPYEVNPILERAMDRILILHADHEQNASTSTVRTAGSSGANPFACIAAGIASLWGPAHGGANEAALKMLEEISSVKHIPEFFRRAKDKNDSFRLMGFGHRVYKNYDPRATVMRETCHEVLKELGTKDDLLEVAMELENIALNDPYFIEKKLYPNVDFYSGIILKAMGIPSSMFTVIFAMARTVGWIAHWSEMHSDGMKIARPRQLYTGYEKRDFKSDIKR

SEQ ID NO: 7606 - protein, 212 aa, Triticum aestivum
  misc_feature (69)..(69): Xaa can be any naturally occurring amino acid
  misc_feature (76)..(76): Xaa can be any naturally occurring amino acid
  misc_feature (83)..(83): Xaa can be any naturally occurring amino acid
  misc_feature (102)..(102): Xaa can be any naturally occurring amino acid
  misc_feature (118)..(118): Xaa can be any naturally occurring amino acid
  misc_feature (141)..(141): Xaa can be any naturally occurring amino acid
MAPTVMASSATSVAPFQGLKSTAGLPVSRRSNGASLGSVSNGGRIRCMQVWPIEGIKKSETLSYLPPLXSTEALLXKQVDYLXIRSKWVPCLEFSKVGFIFXREHNASPGYYDGRYWXTMWKLPMSGCTDATQVVNEVEEXKKEYPDPYSAHRVHNIASASSAHRLNQPAARSGRLNTHHDSILNANLQMLGFHYFYCPKRFLGLSMAKQPL

SEQ ID NO: 7607 - protein, 168 aa, Bacillus subtilis subsp. subtilis str. 168
MNIYVEANPYLHDKYSKYADEKYKREGNPFVSFPIHFDDIPSGAKTLALTFIDHDAIPVCGFSWIHWTAANIPAYIGELPEHASEERQDLMIQGQNSFASPLAGSNDPKVIHQYCGPTPPDKDHAYTLTVYALDAELNLQPGFYLNELYQEMKEHILAETSIELLARV

SEQ ID NO: 7608 - protein, 123 aa, Zea mays
  misc_feature (85)..(85): Xaa can be any naturally occurring amino acid
THASERLQDRPSIICVFLHLICHMHVYVSELRVGKHSLPLYELPTHATRCYYLGMFLRGAYHDALSRLHNLFGLPSMVRVSQCDXPHCFSVTLADKIPSCANMLQAIQYEPLVMYYVLKHYTY

SEQ ID NO: 7609 - protein, 331 aa, Saccharomyces cerevisiae
MRSIKCVIIGDGAVGKTSLLISYTTNSFPTDYVPTVFDNYSTTIAIPNGTASSPLELDNGNDKRGSLSSASSSPSTDRKLYKINLWDTAGQEDYDRLRPLCYPQTDIFLICFSVSEHASFANVTEKWLPELKQTSNIEGTSLYTKLGKYPILLVGTKSDLRDDPATQKKLQEANSDYVSQEEIDELVQRCGFMGYTECSAATQAGVREVFEQAVRYAIYEPESPNQKSANHTLTDELTTATTNTNGDKNIREQKQQPHHNNSTDSTLPKGSLQQEKEALNIKPTKKGQKDKIHEQSKSKGSKIASNNHHNKQAKPKTRNDKKKKKSKCVIL

SEQ ID NO: 7610 - protein, 413 aa, Cucumis sativus
GDDVEDVRREVQIMHHLTGHPHIVELKEVYEDRHYVNLIMELCAGGELFDRIIAKGHYSECTAASLCRQIVTVVHNCHSMGVMHRDLKPENFLFLSADENSPLKATDFGLSVFFKPGDVFKDLVGSAYYVAPEVLRRRYGPEAAVWSAGVILYILLSGVPPFWAENDQGIFDAVLRGHIDFSSDPWPSISSGAKDLIRKLLHSDPKERLSAIEALNHPWMKEDGEASDKPLDIAVLTRMKQFRAMNKLKKVALKVIAENLSEEEIVGLKEMFKSMDTDNSGTITFEELKAGLPKLGTKLSESEVRQLMEAADVDGNGSIDYIEFITAAMHMNRVEREDHLFKAFEYFDKDKSGYITMEELETALKKYNMGDETTIKEIIAEVDTDNDGRINYDEVVAMMRKGNQELTTTSRQK

SEQ ID NO: 7611 - protein, 131 aa, Flaveria ramosissima
SNGGRVQCMKVWPPLGKKKYETLSYLPDLTEAQLAKEVDYLLRNKWVPCLEFELEHGFVYRENARSPGYYDGRYWTMWKLPMFGCTDSAQVMKELQECKKEYPQAWIRIIGFDNVRQVQCISFIASKPDGF

SEQ ID NO: 7612 - protein, 136 aa, Zea mays
MDARMFGLENPLVAALHHLLDARAMAATPADVKELAGAYAFVVDMPGLSTGDIRVQVEDERVLVISGERRREEREDAKYLRMERRMGKFMRKFVLPDNADVDKVAAVCRDGVLTVTVEKLPPPEPKKPKTIEIKVA

SEQ ID NO: 7613 - protein, 151 aa, Desulfitobacterium hafniense DCB-2
MWCETGKPDLEFARKFAEAIHAQFPGKLLAYNCSPSFNWKKNLDDATIAKFQKEIASYGYKFQFITLAGFHSLNYGMFNLAHGYARRQMSAFVELQEAEFAAAEKGFTAVKHQREVGTGYFDAVTQTIQGGQSSTVALKGSTEEDSSTSRK

SEQ ID NO: 7614 - protein, 131 aa, Flaveria palmeri
SNGGRVQCMKVWPPVGKKKYETLSYLPELTEAQLAKEVDYLIRNKWVPCLEFELEHGFVYRENASSPGYYDGRYWTMWKLPMFGCTDSAQVMKELQECKKEYPQAWIRIIGFDNVRQVQCVSFISPKPTGF

SEQ ID NO: 7615 - protein, 141 aa, Brassica napus
  misc_feature (23)..(23): Xaa can be any naturally occurring amino acid
  misc_feature (25)..(26): Xaa can be any naturally occurring amino acid
  misc_feature (29)..(29): Xaa can be any naturally occurring amino acid
  misc_feature (36)..(36): Xaa can be any naturally occurring amino acid
  misc_feature (45)..(45): Xaa can be any naturally occurring amino acid
  misc_feature (124)..(124): Xaa can be any naturally occurring amino acid
  misc_feature (136)..(136): Xaa can be any naturally occurring amino acid
RLTPGSEMPNLELNLWDFNTKQXEXXLGXTLAGKPXAPKLEMVCXASQDMSENFLFCPMVNNDREPSGFWSLLSPDENRVHAPVESCPLSLSFSPVQQHTSVGPPPQSTTGFTMGSSMQPNMLXSRPWMAVSAPFXQTHYL

SEQ ID NO: 7616 - protein, 381 aa, Triticum turgidum
VAATSAIAQMETSHIPSLEKPLQQQPLPLQQILWYQQQQPIQQQPQPFPQQPPCSQQQQPPLLQQQQPPFSQQQPPFSQQQQPVLPQQPPFSQHQQPPFSQQPPFSQQQQPLLPQQQQPIQQQPQPFPQQPPHFIQQQQQPFLQQQQWSFQQQQPLFQQQQPPVFQQQPPFSQQQQPVLPQQPPFSQHQQPVLPQQQIPSVQPSSLQQLNPCKVFLQQQCSPVAMPQSLARSQMLWQSSCHVMQQQCCRQLPQIPEQSRYDAIRAIIYSIVLQEQQHGQGFEQPQQQQPQQSVQGVSQPQQQQKQLGQCSFQQPQQQQLGQWPQQQQVPQGTLLQPHQIAQLEVMTSIALRTLPTMCSVNVPVYGTTTIVPFGVGTGVGAY

SEQ ID NO: 7617 - protein, 335 aa, Streptococcus pneumoniae TIGR4
MKRIAVLTSGGDAPGMNAAIRAVVRQAISEGMEVFGIYDGYAGMVAGEIHPLDAASVGDIISRGGTFLHSARYPEFAQLEGQLKGIEQLKKHGIEGVVVIGGDGSYHGAMRLTEHGFPAIGLPGTIDNDIVGTDFTIGFDTAVTTAMDAIDKIRDTSSSHRRTFVIEVMGRNAGDIALWAGIATGADEIIIPEAGFKMEDIVASIKAGYECGKKHNIIVLAEGVMSAAEFGQKLKEAGDTSDLRVTELGHIQRGGSPTARDRVLASRMGAHAVKLLKEGIGGVAVGIRNEKMVENPILGTAEEGALFSLTAEGKIVVNNPHKADIELSSLNKSLS

SEQ ID NO: 7618 - protein, 483 aa, Rhodopseudomonas palustris CGA009
MLMPSDPGLLAERCLIGGKWCGEPVDAVFNPATGERIGAVPRFGTDEAEEAVRAAEIAFRQWSKLLAKQRATMLRAWFDQIIANRDDLALLLTREQGKPLAEALGEIDYAASFVEFYAEEARRIYGETIPSHRADARTMVIRQPVGVVAAITPWNFPAAMITRKVAPALAAGCTVVIKPAPETPLTALALGVLAQRAGFPPGVLNIITGDAPAIGKAWTEHPTVRAISFTGSTEVGKILMRQAASTVKKVALELGGNAPFIVFDDADLDAAVEGVIASKFRNMGQTCVCANRIYAQDGIYDAFVEKLTAKVATLQVGNGVDAGVTQGPLITTEAIAKVERHVSDAVAKGAKVVLGGKRHKLGRTFFEPTVLAGVTTAMLITREETFGPVAPVYRFTDEADVIAQANDSPFGLASYFYARDLGRVFRVAEALESGMVGVNSALLGADVVPFGGVKQSGLGREGSRHGIEEYVETKYILLGGLDR

SEQ ID NO: 7619 - protein, 231 aa, Zea mays
MEYAAVGYGYGYGYDERQEPAESADGGGGGDDEYATVLSAPPKRPAGRTKFRETRHPVYRGVRRRGPAGRWVCEVREPNKKSRIWLGTFATPEAAARAHDVAALALRGRAACLNFADSARLLQVDPATLATPDDIRRAAIQLADAASQQDETAAVAADVVAPSQADDVAAAAAAAAAAAMYGGGMEFDHSYCYDDGMVSGSSDCWQSGGGGWHSSVDGDDDGAGDMTLWSY

SEQ ID NO: 7620 - protein, 174 aa, Griffithsia japonica
MSTNTATLQSGAKMPLNGFGTWKASVEETEQAVTAALRAGYRHIDCAAVYWNEAAVGTAISKAISGGVVKREDLFITSKVWNTCHATDKVVDSCRQSLKDHQVDYFDLFLVRDIGVSNYSVALLVDTLNYARIKPSVNQCEAHVYFARPQLRDVCREFGVHLPCTPSSQRPKGR

SEQ ID NO: 7621 - protein, 152 aa, Triticum aestivum
MASAEDVKQRQVVEDRARNISHNVRCTECGSQSIEDSQADVAVLLRRLIRDEIKSGKSDKEIYKKLEEDFGETVLYAPKFDLQTAAIWLSPVIVGGVAAGVWAYQKHRQRTNVHIMALNLVRGVPLTPREKETMIDILTPPPPARRWWWPLK

SEQ ID NO: 7622 - protein, 535 aa, Zea mays
MGNCCAAPSTEGSGKTRPKKQKENPYNVAYNRGAAAPPPPPARPGLVVLRDPTGRDLGAEYELGGELGRGEFGVTYLCTEPATGARYACKSISKRKLRTPVDVEDVRREVDIMRHMPPHPNIVSLRAAYEDEDAVHLVMELCEGGELFDRIVARGHYTERAAAAVTRTIVEVVQMCHRHGVMHRDLKPENFLYANKKESSPLKAIDFGLSVFFRPGERFTEIVGSPYYMAPEVLKRNYGPEVDVWSAGVILYILLCGVPPFWAETEQGVAQAIIRSVVDFKREPWPRVSEPAKDLVRRMLDPNPLTRFTAAQVLEHPWLHDSKNTPDVSLGDTVRARLQQFAAMNKLKKKALRVIAEHLSAEEVADIKQMFDKMDVNKNGKLTFEEFKAGLRKLGNQMHDSDFQILMDAGDVDRNGTLDYEEFVTVSVHVRKIGNDEHIQKAFAYFDRNKSGYIEIEELREALADELDGSDEDIIGGVIRDVDTDKDGKIGYDEFAAMMKAGTDWRKASRQYSRQRFSNLSLKLQKDGSLGADTR

SEQ ID NO: 7623 - protein, 282 aa, Ralstonia eutropha JMP134
MSEINQAMDPGQQLSQDWWRTEIIDMRPGEIRYRGYPIEQLIGQVSFAQMIWLMLRGELPGPGQGELLDAALMAAVDHGPQAPSIAIARMAATCGVGLNNAMASAVNVLGDVHGGAGEQAVELYQDIAGRIDEGAALDQAVSAGLAHYRDLHGRFVSGFGHRFHPVDPRAPRLLALVDQAAEKSVVNGRFAAIARAVERALGEGRSKPVPMNIDGATAVIYAELGFPAPLARGLFCLSRSVGILAHAWEQTQQGGRNKGPIPRQFLWTYDGTPQRDVPAQGD

SEQ ID NO: 7624 - protein, 290 aa, Triticum aestivum
MAGLSMEHPWAFAFGLLGNVISFSSLLAPIPTFYRIFKSKSTEGFQSVPYVVALFSAMLWIFYALVKTGEGLLISINAAGCVIETVYIVMYLVYAPRKAKIFTAKIVLLLNIAGFGLIFLLTVFAFQGETRVVSLGWICVGFSVWVFVAPLSIIGRVIKTKSVEYMPFTLSLTLTLSAIVWFLYGLLIKDKYVALPNILGFTFGVIQMVLYVFYMNKTPVASEVKEGKEAWKVPAEDHVVVINVGKADKSSCAEVRPVTEMAGAVDVPRRCAAEAAAAPGMDFARSVDVV

SEQ ID NO: 7625 - protein, 291 aa, Saccharomyces cerevisiae
  misc_feature (1)..(1): Xaa can be any naturally occurring amino acid
XVHVASVEKGRSYEDFQKVYNAIALKLREDDEYDNYIGYGPVLVRLAWHISGTWDKHDNTGGSYGGTYRFKKEFNDPSNAGLQNGFKFLEPIHKEFPWISSGDLFSLGGVTAVQEMQGPKIPWRCGRVDTPEDTTPDNGRLPDADKDAGYVRTFFQRLNMNDREVVALMGAGALGKTHLKNSGYEGPWGAANNVFTNEFYLNLLNEDWKLEKNDANNEQWDSKSGYMMLPTDYSLIQDPKYLSIVKEYANDQDKFFKDFSKAFEKLLENGITFPKDAPSPFIFKTLEEQGL

SEQ ID NO: 7626 - protein, 458 aa, Sinorhizobium meliloti 1021
MLERSNELTAWDRDHFFHPSTHMGMHARGETPTRVIGGGEGVYITDISGKRSLDAFAGLYCVNVGYGRQKIADAIAEQAKNLAYYHAYVGHGTEASIRLSKMIIDRAPEGMSRVYFGLSGSDANETNIKLIWYYNNILGRPEKKKIISRWRGYHGSGVMTGSLTGLHLFHNAFDLPRAPILHTEAPYYFRRPDRSMSEEQFSQYCADKLEEMILAEGPDTVAAFIGEPILGTGGIVPPPKGYWEKIQAVLQKYDILLVADEVVTGFGRLGTMFGSDHYGIKPDLITIAKGLTSAYAPLSGTIVSDKLWQVLVKGSDELGAIGHGWTYSAHPICAAAGIANLELIDELGIVENAGSTGAYFRAELQKAVGDHRHVGEVRGDGLMAAIEFVEDRDDRAFFDPGRKVGPQVAAALLERGVIGRAMPQGDILGFAPPLCLTRDEADIVVKAAADTIQSVLGR

SEQ ID NO: 7627 - protein, 498 aa, Sinorhizobium meliloti 1021
MTAVFARTAFHDALKNLSDRQLLRELAYVGGRWVAGRDGTCLEVSDPASGAALAFVASLDAAQTSEAIDAAQKAFRSWHNMLPQARAAILRKWHDLMLEAREDLALLMTLEQGKPLAESRGEIDYAASFIEWYAEEGKRLNAESVTSHLAGAEMIVRREALGVVGIVTPWNFPSAMITRKAAAALAAGCTVVAHPSSETPLSALALAELGERAGLPAGVFNVVTGKAATIVGRMCEDARVRAMSFTGSTEIGRLIASQCAPTMKRLVMELGGHAPLIVFADANVEKAADIAIAAKFATSGQDCLAANRIYVERPALKAFQEAFAARIAGLKVGSGMEPDTDIGPLMHERAVAKVEEQVADALKLGARLAVGGKRHAAGPLFFQPTLLTDVPDDALIMREETFGPVAAVTAFDSEEEVVARANDTEYGLVAYVVTENGARQMRLARALEYGMVAVNRVKITGGPIPFGGWKQSGLGREGSRHGMEAFTELKYLCIDTAA

SEQ ID NO: 7628 - protein, 196 aa, Zea mays
  misc_feature (154)..(154): Xaa can be any naturally occurring amino acid
MASPFSVPSLIMEEEGRFEAEVAEVESWWGTERFRLTKRPYTARDVVLLRGTLRQSYASGEMAKKLWRTLKAHQAGGTASRTFGALDPVQVTMMTKHLDTIYVSGWQCSSTHTSTNEPGPDLADYPYYTVPNKVEYLFFPHIYHYRDQLQARMXLARADCARVPYLNFFDPICDQGDTALVSCPHLRTALEALILP

SEQ ID NO: 7629 - protein, 289 aa, Zea mays
MVIRSFATTSLIAAFFAIAHLAAWVTPPQAAATAAPPSSPDTASFLRCLGAHLPPQAVYTNASRSYTSVLESSIKNLLFVTPATPTPAAVRCGARHGVGVRPRSGGHDYEGLSYRSLSARRPFAVVDLARLRAVSVDARNRTAWVGSGATLGELYYAIASRSARLGFPGGVGPTVGVGGHLSGGGFGLLLRKHGLAADHVVDAVVVDAAGSLRDRAAMGEDLFWAIRGGGGGSFGVVLSWKLRLVRVPPVVAVSTVHRPRNQSASALLARWQHVAPALPRDAILRVVLQ

SEQ ID NO: 7630 - protein, 87 aa, Brassica napus
MPRSLEPLDLGLQIPYHFRCPISLELMRDPVTVCTGQTYDRTSIESWVSTGNNNTTCPVTRAPLSDHTLIPNHTLRRLIQEWCVANR

SEQ ID NO: 7631 - protein, 179 aa, Fritillaria agrestis
MAASSTMLSSVATAACAAPAQASMVAPFVGLKSTSAFPVTQKPATGLSTLPSNGGRVQCMKVWPIVGLKKFETLSYLPTLSVESLLKQIEYLIRNGWVPCLEFSLEGFVSRDNNKSPGYYDGRYWTMWKLPMFGCTDAAQVVKEAAECKKEYPAAFIRVIGFDNVRQVQCVSFIVERPE

SEQ ID NO: 7632 - protein, 148 aa, Pseudomonas syringae pv. phaseolicola
DVIDVRGLTATGRFTFDPGFMSTASCDSKITYIDGDNGILLHRGYPIEQLAEQSDYLETSYLLLNGELPTAEQKAQFVAVVKNHTMVHEQLKTFFNGFRRDAHPMAVMCGVVGALSAFYHDSLDINNPQHREISAVRLVAKMPTLAAM

SEQ ID NO: 7633 - protein, 131 aa, Flaveria palmeri
SNGGRVQCMKVWPPVGKKKYETLSYLPELTEAQLAKEVDYLHRNKWVPCLEFELEHGFVYRENASSPGYYDGRYWTMWKLPMFGCTDSAQVMKELQECKKEYPQAWIRIIGFDNVRQVQCVSFIASKPTGF

SEQ ID NO: 7634 - protein, 354 aa, Schizosaccharomyces pombe
MYCNLAKMYEVEPSEKEDNVERQTKKYNFEIDEPEEQEKKDEKEDDKEESPSKSLEEISQSVSPVEEEPRDVRFKELSTPFSYPINDPPEGRPVRVYADGVFDLFHIGHMRQLEQAKKVFPNVHLIVGLPNDQLTHRLKGLTVMNDKERAEALRHCKWVDEVLENAPWVITPEFLEEHKIDFVAHDDIPYASDDSGDIYLPVKKVGKFIPTKRTEGVSTSDLITRIIRDYDQYVMRNLARGVNRKELNVSLFKKNELDLRHHIKVLRDTLRNHWVSTTRDLKADIKSFLSMATTDYQLQKNPLHGSSEPSSPGPTGFLGGINRWMQRRSSSHYDLPRVGNEIAASSSSATEENH

SEQ ID NO: 7635 - protein, 179 aa, Fritillaria agrestis
MASSATMLSSVATAACAAPAQASMVAPFVGLKSASAFPVTQKTATGLSTLPSNGGRVQCMKVWPIVGLKKFETLSYLPTLSVESLLKQIEYLIRNGWVPCLEFSLEGFVSRDNNKSPGYYDGRYWTMWKLPMFGCTGAAQVVKEAAECKKEYPAAFIRVIGFDNVRQVQCVSFIVEKPE

SEQ ID NO: 7636 - protein, 467 aa, Streptomyces aureofaciens
MPTPEAGSASGREAVRFPVVDPATGETFDEAPDQQPGELDDVVARAQRAWHGWRADPAARTAALRGAADAVETAGDDLARLLTREQGKPLAESYAEIARTAARLRYFADLAPRTRRIDDGRPVHSEVRWRPLGPVAAIVPWNFPLQLAAAKFAPALAAGNTVVLKPSPFTPLATRMLGSVLATALPEDVLTVVTGREPLGARLASHPGIRHVTFTGSVPTGRAVAGAAAASLARVTLELGGNDAALLLDDVDVDRIADRLFWAAFRNCGQVCMAVKRVYVPARLHAEVVEALAQRAKTVAVGPGLDPGTRLGPVNNARQLARVEQVTEQALADGARAAWGGHRLDGPGYFFAPTILTDVLPGSPVVTEEQFGPVLPVLPYRSLDEAVDAANSTGFGLGGSVWGTDLDQAETVADRLECGTAWINHHAELSLAQPFAGVKDSGVGVAGGPWGLYGNLRPFVVHRPQEV

SEQ ID NO: 7637 - protein, 131 aa, Flaveria palmeri
SNGGRVQCMKVWPPVGKKKYETLSYLPELTEAQLAKEVDYLIRNKWVPCLEFELEHGFVYRENASSPGYYDGRYWTMWKLPMFGCTDSAQVMKELQECKKEYPQAWIRIIGFDNVRQVQCVSFIASKPTGF

SEQ ID NO: 7638 - protein, 436 aa, Glycine max
MSGKQAVRPRTRVGKYELGKTIGEGSFAKVKFAKNVENGNHVAIKILDRNHVLRHKMMEQLKKEISAMKMINHPNVVKIYEVMASKTKIYIVLELVNGGELFNKIAKNGKLKEDEARRYFHQLINAVDYCHSRGVYLKPENLLLDSNAILKVTDFGLSTYAQQEDELLRTACGTPNYVAPEVLNDRGYVGSTSDIWSCGVILFVLMAGYLPFDEPNHATLYQKIGRAQFTCPSWFSPEAKKLLKRILDPNPLTRIKIPELLEDEWFKKGYKPTTFVEEEDVNVDDVAAAFNDSKENLVTERKEKPVSMNAFELISRSQSFNLENLFEKQTQGIVKRETHFTSQRPANEIMSKIEEAAKPLGFNVHKRNYKMKLQGDKSGRKGHLSVATEVFEVAPSLHMVELRKTGGDTLEFHKFYKSFSSSSGLQDIVWHSEAKQ

SEQ ID NO: 7639 - protein, 157 aa, Triticum aestivum
  misc_feature (83)..(83): Xaa can be any naturally occurring amino acid
  misc_feature (95)..(95): Xaa can be any naturally occurring amino acid
  misc_feature (98)..(98): Xaa can be any naturally occurring amino acid
  misc_feature (110)..(110): Xaa can be any naturally occurring amino acid
  misc_feature (116)..(116): Xaa can be any naturally occurring amino acid
  misc_feature (124)..(124): Xaa can be any naturally occurring amino acid
  misc_feature (127)..(127): Xaa can be any naturally occurring amino acid
MAPTVMASSATSVAPFQGLKSTAGLPVSRRSNGASLGSVSNGGRIRCMQVWPIEGIKKFETLSYLPPLKHGGLLKQVDYLIRXKWVPCLRFSKLXYLXVRQRTPGYYDGXYWDMWXCLVRCTDXPGXNEVEESRRIPDPIPHQVNIACLSHGLDPAK

SEQ ID NO: 7640 - protein, 331 aa, Streptomyces avermitilis MA-4680
MQLRELVFGAACAAAVRAAAKLGVADALGEKPATAEELAAVLGTEPRPLLRLLRALSCYGIFAQNDDGRFVHTSMSRLLREDDPHSLRYISLWCTEPWTWDAWPRLDEAVRSGGSVFHELYGKGFFDYLHEDAHDSAQVFNQAMTTSSEQSARDVAELLDLTGVSTVADIGGGQGHVLASLLEKHPDIRGTLLDLPRVVEKADPRLRDGGPLAARARIVGADCREEIPVEADLYIIKNILEWDDDSTRRTLRNVMTKARPGARVVIIENLVDDTPSMKFTTSMDLMLLLNVGGAKHTKESLVTRMTEAGLTVGEIRPVNAYLHAFECTVPA

SEQ ID NO: 7641 - protein, 369 aa, Oryza sativa (japonica cultivar-group)
MGKGGKGAEAAAAAVAGAGEEENMAAWLVAKNTLKIMPFKLPPVGPYDVRVRMKAVGICGSDVHYLREMRIAHFVVKEPMVIGHECAGVIEEVGSGVTHLAVGDRVALEPGISCWRCRHCKGGRYNLCEDMKFFATPPVHGSLANQIVHPGDLCFKLPENVSLEEGAMCEPLSVGVHACRRADVGPETGVLIMGAGPIGLVTLLAARAFGATRVVIVDVDEHRLSVARSLGADAAVRVSARAEDVGEEVERIRAAMGGDIDVSLDCAGFSKTVATALEATRGGGKVCLVGMGHNEMTVPLTSAAIREVDVVGIFRYKDTWPLCIEFLRSGKIDVKPLITHRFGFSQEDVEEAFEVSARGRDAIKVMFNL

SEQ ID NO: 7642 - protein, 148 aa, Pseudomonas syringae pv. pisi
DVIDVRGLTATGRFTFDPGFMSTASCDSKITYIDGDNGILLHRGYPIEQLAEQSDYLETCYLLLNGELPTAEQKAQFVAVVKNHTMVHEQLKTFFNGFRRDAHPMAVMCGVVGALSAFYHDSLDINNPQHREISAIRLVAKMPTLAAM

SEQ ID NO: 7643 - protein, 378 aa, Antarctic bacterium DS2-3R
TEPTIHKGLAGVTADVTAISKVNSDTNSLLYRGYPVQELAAKCSFEQVAYLLWNSELPNDSELKAFVNFERSHRKLDENVKGAIDLLSTACHPMDVARTAVSVLGANHARAQDSSPEANLEKAMSLLATFPSVVAYDQRRRRGEELIEPREDLDYSANFLWMTFGEEAAPEVVEAFNVSMILYAEHSFNASTFTARVITSTLADLHSAVTGAIGALKGPLHGGANEAVMHTFEEIGIRKDESLDEAATRSKAWMVDALAQKKKVMGFGHRVYKNGDSRVPTMKSALDAMIKHYDRPEMLGLYNGLEAAMEEAKQIKPNLDYPAGPTYNLMGFDTEMFTPLFIAARITGWTAHIMEQVADNALIRPLSEYNGPEQRQVP

SEQ ID NO: 7644 - protein, 500 aa, Triticum aestivum
  misc_feature (86)..(86): Xaa can be any naturally occurring amino acid
  misc_feature (97)..(97): Xaa can be any naturally occurring amino acid
  misc_feature (100)..(100): Xaa can be any naturally occurring amino acid
  misc_feature (104)..(104): Xaa can be any naturally occurring amino acid
  misc_feature (172)..(172): Xaa can be any naturally occurring amino acid
  misc_feature (250)..(250): Xaa can be any naturally occurring amino acid
  misc_feature (306)..(306): Xaa can be any naturally occurring amino acid
MGRSERTVVWFRRDLRIDDNPALAAAARDGAVLPVFIWCPAEEGRFYPGRCSRWWLKESLAHLARSLEALGCPLVLIPAQTTLAAXLQCVDSIGATXVVXNIYXPISLVRDDKIKNELLGLGISMQSFNGDLLYEPWEVYDENGLAFTTFNKYWEKCMKLPIEISPFLAPWXIENICSSSIDNLGLESSKDEESSNALLSRAWSPGWRNAEKTLEDFVSHGLLDYSKDRMKVTGTTTSLLSPYLHYGEVXLLGNLKHYPWRADEDRFKSWRQGMTGYPLVDAGMRELWATGWTHNRIRIFGWQYIXSGSLPDGHELGRLDNPEVQGQKYDPDGEYVRTWIPELARMPGEWIHHPWDAPSSILEVAGVELGFNYPMPIVELHTARECLDDAISTMWQLDTAEKLAELDGEVVEDNLSHIKSFDVPKVVLKELSPHCDREVPTDDGRNLELQPKELKGTNKQTICVDVIKASKMEDTGSIANSPISRKRSSSGSVFNVPSYV

SEQ ID NO: 7645 - protein, 340 aa, Zea mays
  misc_feature (76)..(76): Xaa can be any naturally occurring amino acid
  misc_feature (310)..(310): Xaa can be any naturally occurring amino acid
  misc_feature (319)..(319): Xaa can be any naturally occurring amino acid
  misc_feature (335)..(335): Xaa can be any naturally occurring amino acid
CSHPPSACSCSLKSKQLIRWREQQARETSARAHYTRTDQTPAMATLATAAAAWTREEDKAFENAVAAAAAPPADGXPDDGWFTALVASVPARTVEEVRRHYEALVEDVAAIEAGRIPLPRYAGEESSAATPEGSGSAASAPKDAGGGGGGGGGHRREERKSGVGVDVGKSSSKAEQERRKGIPWTEEEHRLFLLGLDKFGKGDWRSISRNFVISRTPTQVASHAQKYFIRLNSMNRDRRRSSIHDITSVSAGEVAAAGAPITGGPTTAGAMPMGPAGMKHHHHHPAPPMGMYGHAPMGHPVSGHMVAPAXRRTPVMFPXGHHSPYVMPVGYPAPXGQMHP

SEQ ID NO: 7646 - protein, 497 aa, Magnaporthe grisea 70-15
MNIQLSAPNGKKWIQPTGLFINNEFVKSSNGQKLTTVNAATEEDITSVYSATEEDIDKAVKAARAAFKHPSWRNLSGTERGEMMHKLADLVVKNAETLATIEALDGGKPYSVALGEDVVEFEKTIRYYAGFADKNFGQTIDVGPNKFAYTIKEPIGVCGQIIPWNYPLCMAAWKLGPALACGNTVVLKLAEQTPLSMLYVATLIKEAGFPAGVVNVINGLGGEAGAAIVQHPDIDKVAFTGSTATGKQIMKACAGTMKNITLETGGKSPLLVFDDADLDLAAEWSHIGIMSNQGQICTATSRILVHESVYDKFVGRFKDTVEKVSIVGDPFDEKTFQGPQVTKAQYEKVLGYIKLAQEEGATIATGGKPAPQNGKGFYVAPTVFTNVKTSMRVYKEEIFGPCVSIISFKDEEEAVELANDTTYGLGAAVFTRNLTRAHRVAREIQSGMVWINSSNDSDCRVPFGGVKQSGIGRELGEAGLASYCNIKSVHVNMAAHL

SEQ ID NO: 7647 - protein, 250 aa, Fragaria x ananassa
MGKCYPTVSEEYKKAIDKAKRKLRGLIAEKNCAPLMLRLAWHSAGTYDVKTKTGGPFGTMKQSAELAHGANNGLDIAVRLLEPIKEQFPILSYADFYQLAGVVAVEVTGGPDVPFHPGREDKPEPPPEGRLPDAGKGSDHLREVFGKTMGLSDQDIVALSGGHTLGRAHKERSGFEGPWTPNPLIFDNSYFTVLLSGEKEGLLQLPTDKALLSDPVFRPLVEKYAADEDAFFADYALAHQRLSELGFAEA

SEQ ID NO: 7648 - protein, 161 aa, Vibrio parahaemolyticus RIMD 2210633
MRKVILAVFAALTFSLAAHAAIEVYEFDNLEQEQQFKELGHTLRCPKCQNNTISDSNAELAQDLRHKVYEMTKEGKSKEEIVDYMIARYGNFVTYNPPFTMSTAILWLGPLAVVLGGFGLIVLRSRKSKAKVTANNDEKWDEQKEARLKALLEEENNGDNK

SEQ ID NO: 7649 - protein, 121 aa, Setaria italica
MAPMRKMQAVFALAMVFAAAALVASAAAAITCGQVASSLAPCIPYATGNANVMPSGCCGGVRSLNNAARTSADRQAACRCLKSLAGTIKKLNMGTVAGIPGKCGVSVPFRISMSTDCNKVS

SEQ ID NO: 7650 - protein, 397 aa, Candida albicans SC5314
MRGIKGLVWEGSVLDPIEGIRFRGRTIPDIQKELPKAPGGEEPLPEALFWLLLTGEVPTDAQTKALSEEFAARSALPKHVEELIDRSPSHLHPMAQFSIAVTALESESQFAQAYAKGANKSEYWKYTYEDSIDLLAKLPTIAAKIYRNVFHDGKLPAAIDSKLDYGANLASLLGFGDNKEFVELMRLYLTIHSDHEGGNVSAHTTHLVGSALSSPFLSLAAGLNGLAGPLHGRANQEVLEWLFKLREELNGDYSKEAIEKYLWETLNSGRVVPGYGHAVLRKTDPRYTAQREFALKHMPDYELFKLVSNIYEVAPGVLTKHGKTKNPWPNVDSHSGVLLQYYGLTEQSFYTVLFGVSRAFGVLPQLILDRGIGMPIERPKSFSTEKYIELVKNINKA

SEQ ID NO: 7651 - protein, 1611 aa, Schizosaccharomyces pombe
MSSFPTRVVALYPYRSSFSDDLEFDPGQVIDVVSNLDGDWYTGTYVDSDGNRKIGSFPKDFTEPAEDAVFVERASEMALHQPTPTSAVHSRNSSLGYAPSITRSIKSISNNTEHLGADTESYLSANDFIDSTSEALTKIVDVDTLSAPFGNDSNSRPHSLKNVEKLHTFSAPYTISEETPSCSTENDSLPLTATHTITGGEDAATGAAVTNTTTTHITTSTNTSTVIPSNPNSVFLVDCTHSQCPTDLPNIATTQHSLRYLDNASASAITVLERTHPAASSTMATESSHQSPSADSQAEELSKSQRVAKDDDPFVVSNTANSDEPASSSKPAKPLTDLNRAFSQRLNLDPQKPGKSQGEISEQEEDEYDDAESDEMHSPYSTHEPESEPEDQDEPSEKDDENKDVEEEQEQEQEEEQIDPEEAKRIALRERMAKMSGGIGMHVFGLPGLAAPIGRKNTLRRTPAKSSEEAKSTTNDSSPPKDSSSTSTQPTEQSNAQQAPSPKEEERPLPSEPSQNQPAEYRDTPDTPRNIMPLPGLMSADQPIKVTEPSNDADKAIVAEGPNNEEETKGPVIPETQETSEQQVHKTPSPEKQKVLSPPPIITNFDKETLASNEAHEAVPQKPSAPQVTRLMAPQDSSSVVTPSPTSLLDPARAVRKVIDGIDPPKEAGAGATADVESAANSPITPPRTWHSPDFTSKSFEPIERKLPSRISEVTEDSIDEDKQNEVDPSTSARALPPPGLRFGKVDTLASLAHDDLDDLPAVPRIFSPPPLPKTPSGEFGDNEFMFPKKSNRVRGHQSRPSTGSQLRNVVPVSIVTSGGRPALPDEMASPSSSIGHPLPSPPPADFNSLNVDFYEPHSYLESPAPEPQPSYEEESFNATVIHAPTPSTATFQGHPTISNVATPPLKQDVTESKASPVADASATHQSSTGLTQEITQLGSNMRLPTKLTRPSNDGRKASGPRPAAPPSIPPPLPVSNILSSPTSEPPKDHPPSAPLSKPVSTSPAAPLARVPPVPKLSSKAPPVPLPSADAPPIPVPSTAPPVPIPTSTPPVPKSSSGAPSAPPPVPAPSSEIPSIPAPSGAPPVPAPSGIPPVPKPSVAAPPVPKPSVAVPPVPAPSGAPPVPKPSVAAPPVPVPSGAPPVPKPSVAAPPVPAPSGAPPVPKPSVAAPPVPAPSSGIPPVPKPAAGVPPVPPPSEAPPVPKPSVGVPPVPPPSTAPPVPTPSAGLPPVPVPTAKAPPVPAPSSEAPSVSTPRSSVPSPHSNASPSPTSSSMASAAPARTSVSRSKSKAERHETSTSSRKSSKSGEHHHHHNEGHADSSSTRTSLAHQDSRKSLHRHLSRSSSRASKKPSIVSTTGPFNESFSAKPVEPCASEKWWLNSTAVPKSVVQMNDSVLYMIKEGITGQDKKYKSVHILFPDYSQTVLTATFNPHNQNITQLSQLQLAPPAQPSKARLDEEYACYGSTILKKARAYQGSMVGDGSAFTFVNSVMSILAHNLEPINKQTFGGVIYKNVGNVTVQQIGEIRPGDIVTFDKAKFSGQKGTLRSKYSLEVGKPMHYGIISEWDVSKLKIRVLEQGRESKKVSVASYKFGDLKSGEVTVWRVMRRSWLGWN

SEQ ID NO: 7652 - protein, 151 aa, Triticum aestivum
MASAEDVKQRQVVEARARNISHNVRCTECGSQSIEDSQADVAVLLRRLIRDEIKSGKSDKEIYKKLEEDFGETVLYAPKFDLQTAAIWLSPVIVGGVAAGVWAYQKHRQRTNVHIMALNLVRRVPLTPREKETMIDILTPPPPARSWWWLK

SEQ ID NO: 7653 - protein, 154 aa, Brassica napus
AMWKPRKFKSIYLMATLYVFTLTLPSASAVYWAFGDQLLNHSNAFSLLPKTRFRDAAVILMLIHQFITFGFACTPLYFVWEKAIGMHHTKSICLRAIVRLPVVVPIWFLAIIFPFFGPINSAVGALLVSFTVYIIPALAHMLTYRTASARRNAA

SEQ ID NO: 7654 - protein, 465 aa, Gibberella zeae PH-1
MIATTLFSELKAHLANTQAKTYAPDAPDYKKIEQCFIETPVQTLGVVRLQNGDDVASVVRFCVERNVEFSIRGGGHDCASRTLVDGALVIDMRDIKHVVVSQDKKTARVGGGILSGDLARALGNDGLGTPTATVASVGYTGWATLGGYGLLTSHYGLGVDQIIGAKIVNARGELQDANEELLVGIRGGGGSLGVIVELTIKVYPIDKILSSTIIYDSTDLTAALTSYTQHYEKLLESGQLPVYLQLQPMIAQMPGQPVILMIIATWHGEDKDEGRSWIKNIAGAADCVMEDTKEITIAEMLENNEKLVTWPSYGRVYTLNAKRMTETALKIVGKHCVNAPGGSLIFSYHTLLSSQEPEQKSVFGTRARHHMFEIYSILADKDIAEERVRWAAQVKADLQAEDADNILEGSYISLGSHEDVDLKKVYGKHYETLAALKRKYDLGNVFKHSVPRLVLTGEENGIMEA

SEQ ID NO: 7655 - protein, 308 aa, Datura stramonium
MEEANNKESPYISSILPGWFSEISPLWPGEAHSLKVEKILFQGKSDYQNVMVFQSSTYGKVLILDGVIQLTERDECAYQEMITHLPLCSIPNPKKVLVIGGGDGGVLREVSRHSSVEQIDICEIDKMVIDVSKQFFPNVAIGYEDPRVKLHVGDGVAFLKFVAEGTYDAVIVDSSDPIGPAQELFEKPFFESVARALRPGGVVCTQAESIWLHMHIIEDIVANCRQIFKGSVNYAWTTVPTYPSGVIGFMLCSTEGPAVDFKNPINPVDADDSHTKTRGPLKFYNSEIHSASFCLPSFAKRVIESKGK

SEQ ID NO: 7656 - protein, 317 aa, Datura stramonium
MEVANHNNNNNGCTNDKESPCISSVLPGWFSEISPLWPGEAHSLKVEKILFQGKSDYQDVMVFQSTTYGKVLVLDGVIQLTERDECAYQEMITHLPLCSIPNPKKVLVIGGGDGGVLREVSRHSSVEQIDICEIDKMVVEVAKQFFPDVAVGYEDPRVNLHIGDGVAFLKNVPAGTYDAVIVDSSDPIGPAQELFEKPFFETIARALRPGGVVSTQAESIWLHMHIIEEIVANCREIFKGSVNYAWTTVPTYPSGMIGFMLCSTEGPAVDFKNPINPIDDESHGQTIGPLKFYNSEIHQASFCLPSFAKRVIETKGK

SEQ ID NO: 7657 - protein, 44 aa, Triticum aestivum
VLTLAHHGSLAAAAGGGPRVIIVGAGLSGISAGKRLSEAGITDL

SEQ ID NO: 7658 - protein, 511 aa, Gerbera hybrid cultivar
MNTLQLIFLLFFFPTLLFLYCLPYKRNQNHRRLPPSPPSFPIIGHLHHLGPLIHQSFHALSTRYGSLIHLRLGSVPCVVVSTPDLAKDFLKTNELAFSSRKHSLAIDHITYGVAFAFAPYGTYWKFIKKLFTVELLGTQNLSHFLPIRTHEIRELLRTLMVKSRAKERVNLTEELLKLTNNVISQMMMSIRCSGTNSEADEAKNLVREVTKIFGQFNVSDFIWFCKNIDLQGFKKRYEGTHRRYDALLERIIMGREENRRRGKIKDGEGKDFLDMLLDVLEDGKAEIKITRDHIKALILDFLTAGTDTTAIAIEWALVELINNPNALEKARQEIDQVIGDERLVQESDTPNLPYIQAIIKEALRLHPPIPMLIRKSTENVIVQGYDIPAGTLLFVNIWSIGRNPQCWETPLEFKPHRFLDGGDLKSSLDIKGHNFQLLPFGTGRRGCPGVNLAMRELSVVIANLIQCFDWDVVGERLLNTDERAGLTAPRAVDFVCVPLERGNTLKILGSN

SEQ ID NO: 7659 - protein, 286 aa, Clostridium acetobutylicum ATCC 824
MLDLWYSESHADDTKFSIRVKEHLYSEKTPFQQIDFFKSETFGTFFTLDGYIMMTEKDEFIYHEMITHVPMAVNPKIKKVLIVGGGDGGTSREILRYNTIEKVDMVEIDERVVRLCQKYLTQTSCKLDNDSRLTMHFEDGKEFVKRAETGFYDLILVDSTDPIGPGEGLFTNEFYRDCERILSDDGILINQHESPYYKDYCHEMKRAHSKIKDKFPISMVYQFHMPTYASGHWLFGFASKKYHPLNNLNADSWNSLGLKTKYYNTNLHKGAFALPNYVIDELEKTE

SEQ ID NO: 7660 - protein, 510 aa, Xanthomonas axonopodis pv. citri str. 306
MSADLLKALDLAASNSGTYLGEATWSQATGAGVLQPLNPTTNAVIAEVQATTPEDYELIVQRAQAAFKVWRTTPAPRRGEAVRLCGEALRAHKDALGSLVALEMGKSKPEGDGEVQEMIDIADFAVGQSRMLYGYTMHSERPGHRMYEQYQPLGLVGIISAFNFPVAVWAWNAFLAAICGDICIWKPSNKTPLTAIATMKICNAALKDAGFPDIFFLINDAGTALSEKLVEDTRVPLISFTGSTQIGRVVAEKVARRLGRCLLELGGNNAIILDETADLKLAIPGIVFGAVGTAGQRCTTTRRLIVHASIYDTVLATLVKAYKQLDSKIGDPTDPANLMGPLNSQGAVAQFLDSIAKAKAAGGTVEVGGTAIDRPGNFVLPAIVTGLQNSDAVVQHETFAPILYVMKYSTLDEAIELQNGVPQGLSSSIFTQNLKAAEKFLSAAGSDCGIANVNIGTSGAEIGGAFGGEKETGGGRESGSDAWKVYMRRQTNTINYSDSLPLAQGIKFDL

SEQ ID NO: 7661 - protein, 351 aa, Saccharomyces bayanus
MSSQAIPESQKAIVFYETNGKLEYKDIAVPEPKANEILVHVKYSGVCHSDLHAWRGDWPFQLKFPLIGGHEGAGVVVKLGSNVKGWKVGDLAGIKWLNGTCMSCEYCEVGNESQCPHLDGTGFTHDGTFQEYATADAVQAAHLPENVDLAEVAPILCAGVTVYKALKRANLIPGQWVTISGACGGLGSLAIQYATAMGYRVIGIDEGETKKQLFEGLGGEVFIDFTKEKDIVGAVIKATDGGSHGVINVSVSEAAIEASTRYCRPNGTVVLVGMPAHAYCKSDVFNQVVKSISIVGSCVGNRADTREALDFFARGLIKSPIHLASLSDVPEIFEKMEKGEIVGRYVIDTSK

SEQ ID NO: 7662 - protein, 500 aa, Escherichia coli K12
MMTEPHVAVLSQVQQFLDRQHGLYIDGRPGPAQSEKRLAIFDPATGQEIASTADANEADVDNAVMSAWRAFVSRRWAGRLPAERERILLRFADLVEQHSEELAQLETLEQGKSIAISRAFEVGCTLNWMRYTAGLTTKIAGKTLDLSIPLPQGARYQAWTRKEPVGVVAGIVPWNFPLMIGMWKVMPALAAGCSIVIKPSETTPLTMLRVAELASEAGIPDGVFNVVTGSGAVCGAALTSHPHVAKISFTGSTATGKGIARTAADHLTRVTLELGGKNPAIVLKDADPQWVIEGLMTGSFLNQGQVCAASSRIYIEAPLFDTLVSGFEQAVKSLQVGPGMSPVAQINPLVSRAHCDKVCSFLDDAQAQQAELIRGSNGPAGEGYYVAPTLVVNPDAKLRLTREEVFGPVVNLVRVADGEEALQLANDTEYGLTASVWTQNLSQALEYSDRLQAGTVWVNSHTLIDANLPFGGMKQSGTGRDFGPDWLDGWCETKSVCVRY

SEQ ID NO: 7663 - protein, 463 aa, Triticum aestivum
  misc_feature (364)..(364): Xaa can be any naturally occurring amino acid
MAASVREGAAAAAAAGHAVDDYDVSDGEMDVDVDVEAGSELQHAGGAGDDGRRDGDGDDEYALLTRITDTSAAEARAGKDIQGIPWERLQITRQDYRKARLEQYKNYENFPQSGELMDKLCKQVESSSKYYEFQYNTRIVKPSILHFQLRNLLWATSKHDVYFMSNSTVGHWSSLSHKMTDVLDFSGHVAPAKKHPGCALEGFTGVQVSTLAVNEGLLVAGGFQGELVCKSLGERDVKFCTRTTLSDNAITNAMDIHRSTSGSLRITVSNNDSGVREFDMERFQLLNHFRFNWPVNHTSVSPDKKLLAVVGDDRDALLVDSRNGKVTSTLVGHLDYSFASAWHPDGVTFATGNQDKTCRVWDIXRNPSTSLAVLRGNIGAIRCIRYSSDGRFLLFSEPADFVHVYSAAECYRKRQEIDFFGEISGISLSPDDESLFVGVCDRVYASLLNYRMVHANGYLDSYM

SEQ ID NO: 7664 - protein, 169 aa, Lycopersicon esculentum
MATQTSNPQSVYDFTVKDAKGKDVDLSIYKGKVLIIVNVASQCGLTNSNYTDMTELYKKYKDQGLEILAFPCNQFGGQEPGNIEDIQQMVCTRFKAEYPIFDKVDVNGDNAAPLYRFLKSSKGGFFGDGIKWNFSKFLIDKEGHVVDRYSPTTSPASMEKDIKKLLGVA

SEQ ID NO: 7665 - protein, 101 aa, Phaseolus vulgaris
MASSMISSPAVTTVNRAGAGAGMVAPFTGLKSLGGFPSRKMNNDITSVANNGGRVQCIQVWPTVGKKKFETLSYLPPLTKQQLAKEVDYLLRKGWVPCLEF

SEQ ID NO: 7666 - protein, 277 aa, Corynebacterium sp.
TVPSIVLNDGNSIPQLGYGVFKVPPADTQRAVEEALEVGYRHIDTAAIYGNEEGVGAAIAASGIARDDLFITTKLWNDRHDGDEPAAAIAESLAKLALDQVDLYLVHWPTPAADNYVHAWEKMIELRAAGLTRSIGVSNHLVPHLERIVAATGVVPAVNQIELHPAYQQREITDWAAAHDVKIESWGPLGQGKYDLFGAEPVTAAAAAHGKTPAQAVLRWHLQKGFVVFPKSVRRERLEENLDVFDFDLTDTEIAAIDAMDPGDGSGRVSAHPDEVD

SEQ ID NO: 7667 - protein, 441 aa, Arabidopsis thaliana
MGKDRISELPDALLIKILSFLPTKIVVATSVFSKQWRPLWKLVPNLEFDSEDYDDKEQYTFSEIVCKSFLSHKAPVLESFRLEFESEKVDPVDIGLWVGIAFSRHLRELVLVAADTGTGTAFKFPSSLCTCNTLETLRLVLLILVDISSPVVMKSLRTLHLELVSYKDESSIRNLLSGCPILEELLVIRGEDSDIEVFTIDEVPSLKRLTINDDHDGQEFWGYVINAPSLKYLLIEDLRCPGFCLNAPELMEANIFDGTSITNDNFLGYLTSVKRLLLNLSPWKITYPTGSIFYQLVSLEMYTREIDWWDLLTLMLEHSPKLQVLKLTDNCVKFHKNGLPGGKWNEPKYVPECLLSHLETFVWRRFDWGREEEKEIATYILKNARRLNKATFSTNPVNSEELDKLKERRKVHNELDGVVRASNSCQFVFKFDTSYHVSDSS

SEQ ID NO: 7668 - protein, 122 aa, Selenomonas ruminantium
MTKEEIMEAIENMTVLELSELVKAMEEKFGVSAAAPVAVAAVGGAAAGAAEEKSEFTVMLASAGDKKINVIKAVREATGLGLKEAKALVDGAPAAVKENVAKAEAEELKAKLEEAGATVELK

SEQ ID NO: 7669 - protein, 439 aa, Triticum aestivum
  misc_feature (55)..(55): Xaa can be any naturally occurring amino acid
VDMIVVTDGSRILGLGDLGVQGIGIPIGKLDVYVAAAGTSPQKVLPIMLDVGNKXNEELLEDKLYLGLRQPRLEGEEYLAVVDEFMEAVHARWPKAIVQFEDFQMKWAFETLQRYRSRFCMFNDDVQGTAGVALAGLLGAVRAQGRPLADFTKQKIVVVGAGSAGIGVLNMAKHAMLRMPGTHKIGELGEGHNQFWVLDKDGLITKSRKDLDPAVARFARGYGPEEVEDLHEGASLVEVVKKVKPHVLLGLSGVGGIFNEEVLKAMKESDSPCPAIFAMSNPTTKAECTPEDVFQHVGENAVFASGSPFSNVTLSNGRKGYANQANNMYLFPGGGGAALLSGARHISDGMLHAAAECLASYITDDAIRKGILFPSISSIRHITARVGAAVARAAVDEDLAEGCPDLDPRDLRSMSESDTVDYVARKMWYPVYSPLVNDK

SEQ ID NO: 7670 - protein, 85 aa, Triticum aestivum
WLSSATCVAPFQGLKCTGVLRVSRRSNGASLGSVSIGGRIRCMHVWSFEGIKKFETLSYLPPLSTVALLKQVDYLMRSKRVPWLE

SEQ ID NO: 7671 - protein, 286 aa, Streptococcus pneumoniae TIGR4
MDLWFSEVHTPDVKLSLRTAKQLYAGKSEWQDIEVLDTPAFGKILILNGHVLFSDADDFVYNEMTVHVPMAVHPNPKKVLVIGGGDGGVAQVLTLYPELEQIDIVEPDEMLVEVCREYFPDFAAGLDDPRVTIYYQNGLRFLRNCEDDYDIIINDATDPFGHTEGLFTKEFYGNSYRALKEDGIMIYQHGSPFFDEDESACRSMHRKVNQAFPISRVYQAHIPTSPAGYWLFGFASKKYHPVKDFDKEGWKKRQLFTEYYTANLHVGAFMLPKYVEDILEEEEGKK

SEQ ID NO: 7672 - protein, 156 aa, Prunus dulcis
MDVRIAGLDSPLFSTLQHIMDFTDEPDKSFNAPTRTYVRDAKAMASTPADVKEYPNSYVFVVDMPGLKSGDIKVQVEDDNVLLITGERKREEEKEGAKYVRMERRVGKFMRKFVLPENANVEAISAVCQDGVLTVTVEKLPPPEPKKSKTIEVKIA

SEQ ID NO: 7673 - protein, 86 aa, Brassica napus
  misc_feature (7)..(7): Xaa can be any naturally occurring amino acid
  misc_feature (12)..(12): Xaa can be any naturally occurring amino acid
  misc_feature (15)..(15): Xaa can be any naturally occurring amino acid
  misc_feature (22)..(22): Xaa can be any naturally occurring amino acid
  misc_feature (34)..(34): Xaa can be any naturally occurring amino acid
  misc_feature (41)..(41): Xaa can be any naturally occurring amino acid
  misc_feature (54)..(54): Xaa can be any naturally occurring amino acid
  misc_feature (66)..(66): Xaa can be any naturally occurring amino acid
  misc_feature (69)..(69): Xaa can be any naturally occurring amino acid
  misc_feature (85)..(85): Xaa can be any naturally occurring amino acid
KRRQEVXVYSMXSSXAVVTSPXQATMVAPFTGLXSSSAFPXTRKANNDITSIVXNGGRVNCMQGWXPPXEKKKFETLSYLPDLTXS

SEQ ID NO: 7674 - protein, 140 aa, Campylobacter jejuni subsp. jejuni NCTC 11168
MTKEQIQIIKDCVPILQKNGEDLTNEFYKIMFNDYPEVKPMFNMEKQISGEQPKALAMAILMAAKNIENLENMRSFVDKVAITHVNLGVKEEHYPIVGACLLKAIKNLLNPDEATLKAWEVAYGKIAKFYIDIEKKLYDK

SEQ ID NO: 7675 - protein, 184 aa, Zea mays
LTKEEAAFSPSHPAMQRHVASGRPSGTDGSDFSYRMVVESRYQRVAEGRSRLARLILVQALHLVAGGLLLLLSLSKGAAVNKFAVLSMAAGFLAIVVGELGRMRTMSVLLRLYTSLSSIAVAFSVTCIIRSELFLKVMKQNTEAITSYEMLDAVRVALGILLQMVVIATTTRLLQNMSPPKRAS

SEQ ID NO: 7676 - protein, 435 aa, Aeropyrum pernix K1
MQVMASPPCTTEELSPPPGGSLVEYSGGSLRVPDNPVVAFIRGDGVGPEVVESALKVVDAAVKKVYGGSRRIVWWELLAGHLAREKCGELLPKATLEGIRLARVALKGPLETPVGTGYRSLNVAIRQALDLYANIRPVRYYGQPAPHKYADRVDMVIFRENTEDVYAGIEWPHDSPEAARIRRFLAEEFGISIREDAGIGVKPISRFATRRLMERALEWALRNGNTVVTIMHKGNIMKYTEGAFMRWAYEVALEKFREHVVTEQEVQEKYGGVRPEGKILVNDRIADNMLQQIITRPWDYQVIVAPNLNGDYISDAASALVGGIGMAAGMNMGDGIAVAEPVHGTAPKYAGKDLINPSAEILSASLLIGEFMGWREVKSIVEYAIRKAVQSKKVTQDLARHMPGVQPLRTSEYTETLIAYIDEADLNEVLAGKRG

SEQ ID NO: 7677 - protein, 321 aa, Pseudomonas aeruginosa
MALNPDIAAYLELVGNGRSSGKSLPMHQLTVQQAREQFDQSSALMDPGLDEPLPRVETLFVPARDGTPLPARLYSPQGLSASPPLPGVLYLHGGGYVVGSLDSHDALCASLAERAGCVVLSLAYRLAPEWRFPTAAEDAEDAWCWLAAEAARLGIDPQRLAVAGDSVGGSLCAVLSHRLALRGDASQPRLQVLIYPVTDASRTRQSIERYAVGHLLERDSLEWFYQHYQRSPEDRQDPRFSPLLGVVPADLAPTLLLVAECDPLHDEGIAYAEHLRQGGARVELCVYPGMTHDFLRMGAIVDEADEAKDMIADALVAALAP

SEQ ID NO: 7678 - protein, 309 aa, Mycobacterium tuberculosis CDC1551
MLSTSRIFGVDGLAVDDDIVASRAHMRAICEAMPGPQIHVDVTDLSIPGPAGEIPARHYRPSGGGATPLLVFYHGGGWTLGDLDTHDALCRLTCRDADIQVLSIDYRLAPEHPAPAAVEDAYAAFVWAHEHASDEFGALPGRVAVGGDSAGGNLSAVVCQLARDKARYEGGPTPVLQWLLYPRTDFTAQTRSMGLFGNGFLLTKRDIDWFHTQYLRDSDVDPADPRLSPLLAESLSGLAPALIAVAGFDPLRDEGESYAKALRAAGTAVDLRYLGSLTHGFLNLFQLGGGSAAGTNELISALRAHLSRV

SEQ ID NO: 7679 - protein, 321 aa, Parasitella parasitica
MVVDYLTLDRTEDKMPLRGFGCWKIEKKDAENTIYQAIKIGYRLFDGACDYGNEVEVGRGINKAIKEGLVKREELFIVTKLWNTFHSKQHVRTAFDRQLKDWGLEYFDLYLIHFPIPLQYVDPAVSYPPEWYVPHADKLNFERSPIHECWAEMEKLVQAKLTRNIGVANFNCQAILDLLSYAKIKPAVLQIEIHPLLPQERLVKWVQEQGIQVTAYSSFGPTSYVDLCESGKTYSSLLANADVKSIANKHNANTGQILLRYALDRNIAVIPKSVHEDRMKSNLDILNIQLDQDDRKILNSLKTNQRFNDPMIFGFGLPLFD

SEQ ID NO: 7680 - protein, 190 aa, Glomerella cingulata
MVVATIKCVVVGDGAVGKTCLLISYTTNKFPSEYVPTVFDNYAVTVMIGDEPYTLGLFDTAGQEDYDRLRPLSYPQTDVFLVCFSVTSPASFENVARSGSRGTSPLPGVLLIVAPVTERGSSVREKLSKQKMSPVRKEDGERMAKDLGAVKYVECSALTQFKLKDVFDEAIVAALEPPAPKKKSHKCLVL

SEQ ID NO: 7681 - protein, 506 aa, Brassica napus
MTSINVKLLYHYVITNLFNLCFFPLTAIVAGKAYRLTIDDLHHLYYSYLQHNLITIAPLFAFTVFGSVLYIATRPKPVYLVEYSCYLPPTHCRSSISKVMDIFYQVRKADPSRNGTCDDSSWLDFLRKIQERSGLGDETHGPEGLLQVPPRKTFAAAREETEQVIIGALENLFKNTNVNPKDIGILVVNSSMFNPTPSLSAMVVNTFKLRSNVRSFNLGGMGCSAGVIAIDLAKDLLHVHKNTYALVVSTENITYNIYAGDNRSMMVSNCLFRVGGAAILLSNKPGDRRRSKYELVHTVRTHTGADDKSFRCVQQGDDENGKIGVSLSKDITDVAGRTVKKNIATLGPLILPLSEKLLFFVTFMGKKLFKDKIKHYYVPDFKLAIDHFCIHAGGRAVIDVLEKNLALAPIDVEASRSTLHRFGNTSSSSIWYELAYIEAKGRMKKGNKVWQIALGSGFKCNSAVWVALNNVKASTNSPWEHCIDRYPVKIDSDSGKSETRVQNGRS

SEQ ID NO: 7682 - protein, 118 aa, Ambrosia artemisiifolia
MDCIRILWSVAVGLLLVSWRPTMFAASPTCDTVQNILAPCAGFLTGQEPSKACCTGVNNLNNSRKTKADRVAVCNCIKELTKSIAYDPKRMPLLSTKCGVKPDFPAVDKNLDCSKLPV

SEQ ID NO: 7683 - protein, 222 aa, Saccharomyces cerevisiae
AYSSRFQTPFRRRREGKTDYYQRKRLVTQHKAKYNTPKYRLVVRFTNKDIICQIISSTITGDVVLAAAYSHELPRYGITHGLTNWAAAYATGLLIARRTLQRLGLDETYKGVEEVEGEYELTEAVEDGPRPFKVFLDIGLQRTTTGARVFGALKGASDGGLYVPHSENRFPGWDFETEEIDPELLRSYIFGGHVSQYMEELADDDEERFSELFKGYLADDID

SEQ ID NO: 7684 - protein, 360 aa, Arabidopsis thaliana
MAKISDLSDELLVKILSFLPTKEAVSTSVCRNNGSFFGCGCPNSSSTLVMDLKSWVRIAVSRCVRELSISLHDTTAAVSLPSSLYTCKSLVTLKLYGKKVLLDVPRTVFLPSLKTLQLERLRYSDEDSLRLLLSYCPVLEDLSIVREDYDNLRALVVIVPSLQRLSLEIPGNCSSDGYVIVTPSLKYFKVVDYRESMSYLIEQMPELEEADIVVLQYPEKLLESVTFFKRLSIRVIFNTYTETVYRDGIVFNRLENLKLCICNGDWSKLLIQFLKDSPNLRVLNLLVDDYPSSLGDYEPVRWKNNKSSVPKCLLESLETFEFAGYIGTPEERDFLSYIFKHARCLKSSSILSRPERYHGI

SEQ ID NO: 7685 - protein, 400 aa, Glycine max
  misc_feature (200)..(200): Xaa can be any naturally occurring amino acid
  misc_feature (244)..(244): Xaa can be any naturally occurring amino acid
  misc_feature (290)..(290): Xaa can be any naturally occurring amino acid
MVLEATMICIDNSEWMRNGDYSPSRFQAQTDAVNLICGAKTQSNPENTVGVLTMAGKGVRVLVTPTSDLGKILACMHGLEIGGEMNLAAGIQVAQLALKHRQNKKQQQRIIVFAGGPVKHEKKMLEMIGRKLKKNSVALDIVNFGEEDEGKTEKLEALLSAVNNNDTSHIVHVPSGPNALSDVLISTSIFTGDGEGVSGXFCSISCNAINFLIVLFIQPQQKNDAKPIKRGGEEVIFETPFALXGFIFLVAFFAAVTNRGNYLRMFQCVSLHFNWNQCYVPVIEYWMIFXLPMQVIAMSMDDSAISHDVKDTDMSEASASDPDLALALQLSITDSAKDQSSQSDMSKLLADQSFVSSILASLPGVDPNDPSVKDLLASMQNQSEPQQKNDDKPSNEEEKK

SEQ ID NO: 7686 - protein, 308 aa, Pseudomonas sp. B11-1
MPLDKQIAAVLQQFSELPAPDFSQLDAAQYRQFCDNLLPAIPGDPMIEVRNLRVAAAAGELDARLYRPLEEDNLPLLVFFHGGGFVMGNLDTHDNLCRSLASQTEAVVVSVAYRLAPENHFPAAPLDCYAATCWLVEHAAELGVDGRRLALAGDSAGGNLALAVSRLAAQRQGPKISYQCLFYPVTDARCDSQSYEEFAEGYFLTGAMMYWFWQQYLQDTGQGDDPLASPLRAETLADLPPTTLITAEFDPLRDEGEAFALRLQQAGVSVRVQRCEGMIHGFISMAPFVERAAHALSDAAADLRRALN

SEQ ID NO: 7687 - protein, 489 aa, Cucumis sativus
MLGQKQAEEAIVPTTANEVEHGGGKEEGEEADGGEQPQNSVFQMKNLLWHGGSAWDAWFSCASNQVAQVLLTLPYSFAQFGMLSGIIFQIFYGLIGSWTAYLISVLYIEYRSRKEKENVNFKNHVIQWFEVLDGLLGPHWKALGLAFNCTFLLFGSVIQLIGCASNIYYINDHLDKRTWTYIFGACCATTVFIPSFHNYRIWSFLGLGMTTYTAWYLAARALIHGQTEGVTHSGPTKLVLYFTGATNILYTFGGHAVTVTVEIMQSDVETQKFKYIYLMATLYVFTLTLPSASAVYWAFGDELLNHSNAFSLLPKNRFRDAAVILMLIHQFITFGFACTPLYFVWEKVIGMHDTKSLCLRALVRLPVVVPIWFLAIIFPFLGPINSAVGALLVSFTVYIIPAAAHMLTYRKASAKQNAAEKPPFFLPSWTAMYVLNSFIVVWIFVFGFGFGGWATITNFVRQINSFGLFAKCYQCKPSHPPAPPPTHRH

SEQ ID NO: 7688 - protein, 533 aa, Glycine max
MKSLRSILATFVVLLSISLTISLPIEEAFNHCLTQHSQTPNQFPSSIYTYTNGSFTSILESTAQNLRYLLPSVPKPDFIFTPLDDSQVQAAVVCAKKLGIHMRVRSGGHDYEGLSYVSLIEKPFMILDLAKLRAVNVDIARNTAWIQAGATIGEVYYRISEKSAVHGFPAGLCTTLGIGGHITGGAYGSMMRKYGLGADNVLDARIVDANGKVLDRKAMGEDLFWAIRGGGGGSFGVILWWKIKLVPVPQTVTVFTVTKTLEQGGSKLLHRWQQVAPHIDENLFIRVIIQPGNGTVPGKRTVTTSYNALFLGGANRLLQVMKHGFPELGLTRKDCVETSWIESVLYIAGYPDGTAPEVLLQGKSTTKAYFKAKSDFVREVITEKSLNALWKIFLQDDGPLMIWNPYGGKMSRIAESATPFPHRKGVLYKIQHVTGWLDGEKSMAKHMNWMRKFYFYMAPYVSKYPRETYVNYRDLDIGMNQKNNTSLLKASSWGYRYFKGNFNRLVKVKTKVDPSNFFRHEQSIPLLPTGKKE

SEQ ID NO: 7689 - protein, 314 aa, Shigella flexneri 2a str. 301
MLTSGGDAPGMNAAIRGVVRSALTEGLEVMGIYDGYLGLYEDRMVQLDRYSVSDMINRGGTFLGSARFPEFRDENIRAVAIENLKKRGIDALVVIGGDGSYMGAMRLTEMGFPCIGLPGTIDNDIKGTDYTIGFFTALSTVVEAIDRLRDTSSSHQRISVVEVMGRYCGDLTLAAAIAGGCEFVVVPEVEFSREDLVNEIKAGIAKGKKHAIVAITEHMCDVDELAHFIEKETGRETRATVLGHIQRGGSPVPYDRILASRMGAYAIDLLLAGYGGRCVGIQNEQLVHHDIIDAIENMKRPFKGDWLDCAKKLY

SEQ ID NO: 7690 - protein, 354 aa, Ammi majus
MAEMKTSPSQDEEAGVVAMQLATSTVLPMILKSAIELDLLNTIAKAGPGNYLSPSDLASKLLLSNPDAPVMLARILRVLATYKVLGCKRGEVEWLYCWTPVCKYLSNNEDGASIAPILLVHQDKVTIKSWYHLTDAVRDGGTAFNKAHDMSIFEYASQDPQFNKAFNRSMRGHSTITMKKILETYKGFEGLKSIVDVGGGTGATLNMIISKYPTIKGINFDLPHVVGDAPSLPGVEHVGGNMFASVPKGDAIFLKWIFHSWGDEECLKILKKCHQALGDNKKVIVAEFILPEDPGGSDSATKSAVHLDAIMLAYVPGGKERTEKEFESLAKRAGFKSFTKVCCAFNTWIMEFSK

SEQ ID NO: 7691 - protein, 463 aa, Streptomyces avermitilis MA-4680
MRPHVSHPHELVVLDPATEEVVATVPAATPQDVDAAVVRASKAQVRWAALAPGERARLLRRFAVVVDEHLEELARLEVREAGHVIGNARWEAGNVRDLLDYAAGGVERLTGRQIPVPGGLDITILEPLGVVGVIAPWNFPMPIAAWGTAPALAAGNAVILKPAETTPLTALRLAELALEAGLPEHLFQVLPGAGPVAGNALVEHPGVAKIVFTGSTAVGKQVWAKGSALLKRVTLELGGKSPNIVFADADVEAAAAAAPMAFLDNSGQDCCARTRILVQRSVYDRFLALLAPAVESVAVGDPLDERTAMGPLISKVQLERVRSYVPAGAPALRGKAPEGPGFWFPPTVLTDVDPHAPVAVEEVFGPVAVVLPFEDEADAVRLANATEYGLAGSIWTRDVGRALRVSGAVRAGNLSVNSHSSVRYWTPFGGFKQSGIGRELGPDALTAFTETKNVFISTEGPAQ

SEQ ID NO: 7692 - protein, 420 aa, Saccharomyces cerevisiae
MSIKGDSPSSTNASSSPKSTYSIQSDDKANLGSGNVDIRTDNSQQDSNNRRDIVVVTRVASEETLESQSSTSSMGIRPESSFNYEDASNQARVEMNNRVHGSNMNTINKYYPVRFPKNNERQLSDTNNLNEKVQGTHTVQSSTQEDKILDGDTSNSQVTPSLNIAEFPTDKLLKMLTALLTKIIKSNDRTAATNPSLTQEIENGRCLALSDNEKKYLSPVLGFRGKHVPQIGLDQYFQRIQKYCPTTNDVFLSLLVYFDRISKRCNSVTTTPKTNTAKHESPSNESSLDKANRGADKMSACNSNENNENDDSDDENTGVQRDSRAHPQMFVMDSHNIHRLIIAGITVSTKFLSDFFYSNSRYSRVGGISLQELNHLELQFLVLCDFELLISVNELQRYADLLYRFWNNAKAQSQALVTGM

SEQ ID NO: 7693 - protein, 568 aa, Zea mays
NSRVDPRVRLYEPWEVVDDEGQPFTMFDPFWNRCLSMPYDPPAPLLPPKRINSGDLSMCPSEDLIFEDESERGSNALLARAWTPGWQNADKALTAFLNGPLADYSVNRKKADSASTSLLSPHLHFGELSVRKVFHLVRMKQLVWSNEGNHAAEESCTLFLRSIGLREYSRYLSFNHPSSHERPLLAHLRFFPWVVDESYFKIWRQGRTGYPLVDAGMRELWATGWLHDRIRVVVASFFVKVLQLPWRWGMKYFWDTLLDADLESDALGWQYITGSLPDGRELDRIDNPQFEGYKFDPHGEYVRRWIPELARLPTEWIHHPWDAPVSVLQAAGIELGSNYPLPIVELDAAKGRLQAALSEMWQLEAASRATMNNGTEEGLGDSSEVLFPQELQMEVDRQPAPAEAAANVHVHVHVPMPARRRGDQMVPTMTTSSLNRAGTEVSADLVVANSEEEDTRAQVPFHAHLHLHPRAEAPPAARRTNNGARQHDAFQQPRNHRRDALLAPSASEASSSWTGREGAVVPVWSPPAASGHSDAFAADEADVSSRSYLGRHPQSHRLMNWSQLSQSS

SEQ ID NO: 7694 - protein, 136 aa, Triticum aestivum
  misc_feature (35)..(35): Xaa can be any naturally occurring amino acid
  misc_feature (58)..(58): Xaa can be any naturally occurring amino acid
  misc_feature (72)..(72): Xaa can be any naturally occurring amino acid
  misc_feature (85)..(85): Xaa can be any naturally occurring amino acid
  misc_feature (90)..(90): Xaa can be any naturally occurring amino acid
  misc_feature (92)..(92): Xaa can be any naturally occurring amino acid
  misc_feature (96)..(96): Xaa can be any naturally occurring amino acid
  misc_feature (99)..(100): Xaa can be any naturally occurring amino acid
  misc_feature (102)..(103): Xaa can be any naturally occurring amino acid
  misc_feature (105)..(105): Xaa can be any naturally occurring amino acid
  misc_feature (110)..(110): Xaa can be any naturally occurring amino acid
  misc_feature (118)..(118): Xaa can be any naturally occurring amino acid
  misc_feature (133)..(133): Xaa can be any naturally occurring amino acid
MAPAVMASSATTVAPFQGLKSTAGLPVGRRSSGSXQQASSNGGRIRCMQVWPIEGIKXKFENLSYLATLSKXGLLKQVHYLIRSXKWVAXLXFNKXGFXXRXXNXSPGYXEGRYWAMXELPMFRCTDPNKVLXEGE

SEQ ID NO: 7695 - protein, 513 aa, Vicia sativa
MELETLISWLLFSTSLFWFLFLATKTKSKPPKTPSSTTNTPIPKSYPIFGSAFSLLANFHRRIQWTSDILQTIPSSTFVLHRPFGARQVFTAQPAVVQHILRTNFTCYGKGLTFYQSINDFLGDGIFNADGESWKFQRQISSHEFNTRSLRKFVETVVDVELSDRLVPVLSQASNSQTTLDFQDILQRLTFDNICMIAFGYDPEYLLPSLPEIPFAKAFDESSQLSIERLNALIPLLWKVKRFLNIGVERQLKEAVAEVRGLATKIVKNKKKELKEKALQSESESVDLLSRFLSSGHSDESFVTDMVISIILAGRDTTSAALTWFFWLLSKHSHVENEILKEITGKSETVGYDEVKDMVYTHAALCESMRLYPPLPVDTKVAVHDDVLPDGTLVKKGWRVTYHIYAMGRSEKIWGPDWAEFRPERWLSRDEVGKWSFVGIDYYSYPVFQAGPRVCIGKEMAFLQMKRVVAGIMGRFRVVPAMVEGIEPEYTAHFTSVMKGGFPVKIEKRSPLV

SEQ ID NO: 7696 - protein, 272 aa, Griffithsia japonica
RFVQACTRRLMSDVPVGVFISGGLDSSLVASIAKKHLPDGYVFHSFSCGLEGSPDVRAAQKVADYLGTKHHVLTFTVEDGISALRDVIYHLETYDVTTIRASTPMYLLSRLCKQYVKVVLSGEGADEVYGGYLYFHNAETERDFHEETVRRVKLLYTSDVLRGDRSTAAQSLELRVPFLDRDFLDVSMSFSAQDKVTQKGKRIEKWPMRQAFAKEFCGEEFLPDDILWRSKEQFSDGVGYNWIDGLKEFCDKEVSDKLLANASDKFPHQPPK

SEQ ID NO: 7697 - protein, 222 aa, Mesembryanthemum crystallinum
WLVDSKGLIVSSRKNSLQEFKKPWAHEHEPLGDLSSAVKAIKPTVLIGSSGVGRTFTKEVIEAMASFNEKPLIMALSNPTTQSECTAEEAYTWSKGRAIFASGSPFNSVEYEGKTFVPGQSNNAYIFPGFGLGLVISGAIRVHEDMLLAASEALAGQVTQENYDKGMIYPPFSNIRKISAAIAANVAAKAYDLGLATRLPRPENLVKYAENCMYSPVYRSFR

SEQ ID NO: 7698 - protein, 238 aa, Prunus tomentosa
AHYKSEADVGNAIAEAIQSGLVKREELFITSKASNHGHVVEACKSSLKKLQLDYLDLYLVHYPLATKHSGVGTTASLLDENKVLDIDVTVSLETTWHDMEKTVDLGLVRSIGLSNYELFLTRDCLSYAKIKPQVSQFETHPYFQRESLVRFCKKHGVVPMAHTPLGGATANVKAFGSISPLEDPVLIGLAKKYQKSVAQIALRWNIERGTPVIPKSSKVERLKENLEILNFKLEKEDI

SEQ ID NO: 7699 - protein, 252 aa, Prunus padus
AHYKSEADVGNAIAEAIQSGLVKREELFITSKASNHGHVVEACKNSLKKLQLDYLDLYLVHYPLATKHNGVGTTASLLDENKVLDIDVTVSLETTWHDMEKTVSLGLVRSIGLSNYELFLTRDCLSYAKIKPQVSQFETHPYFQRESLVRFCKKHGVIPMAHTPLGGATANVKAFGSISPLEDPVLLGLAKKYQKSVAQIALRWNIERGTPVIPKSSKVERLKENLEVLNFKLEKEDIELIDTIDKKSRTTL

SEQ ID NO: 7700 - protein, 347 aa, Magnaporthe grisea 70-15
MSDLPKTMKALQYSKPKEFAVVDVPLPELRDDDVLVKVKACGVCGTDLHIHEGEFIAKFPLIPGHETVGVVAAVGKDVKDFKVGDRVSADNAELCGHCFYCRRGESLLCENWAGHGTTLSGGFAEYCAYPQGKVFKFNNMTDVEATLIEPASCACHGLDKIKPRLGSSVLMFGAGPTGLMLAQLLRQNGCSQVTIAAPAGLKMDLARSLDAADTYVDLSREDSGPQLEQLKKDNPYGFDIVIEATGSVKILEDSINYCRRGGTLVVYGVYGDQDKVSWKPTKIFGDEIRIIGSFSEVFMFPQTIDYLDNGKVKTKGIVNKTFKLEQFGEALESIKNKSAIKAAIVFD

SEQ ID NO: 7701 - protein, 413 aa, Burkholderia cepacia R1808
MPIYKGTMGPDVIDIRKLYGQTGKFTYDPGFMSTASCNSAITYIDGDKGELLYRGYPIDNLAQNADFLESCYLLLKGELPNAAQKKEFVDTVTKHTMVHEQMHFFFRGFRRDAHPMAILVAAVGALSAFYHDSLDINDPRHREVSAIRMIAKLPTLVAMAYKYSIGQPFVYPKNSLSYSANFMHMMFSNPCEEYKVNDVLVRALDRILILHADHEQNASTSTVRLAGSSGANPFACIAAGIACLWGPAHGGANEAALNMLEQIGSPDNIPEFIKQVKDKNSGVKLMGFGHRVYKNYDPRAKLMRETCYEVLNELGLHDDPLFKLAMQLEKIALEDEYFVSRKLYPNVDFYSGIVQRALGIPTSMFTCIFAMARTVGWIAQWNEMIADPEQKIGRPRQLFIGDTPREAKPLNAR

SEQ ID NO: 7702 - protein, 252 aa, Prunus caroliniana
AHYKSEADVGNALAEAFETGLVKREELFIISKASNHGHVVEACKDSLKKLQLDYLDLYLVHYPLATKHSGVGTTASLLDKNKVLDIDVTVSLESTWHDMEKTVSLGLVRSIGLSNYELFLTRDCLSYAKIKPQVSQFETHPYFQRETLVRFCRKHGVCPMAHTPLGGATANVKAFGSMSPLEDPVLHGLAKKYKKSVAQIALRWNIERDTPVIPKSSKVERLKENLEVLNFKLEKEDIELINTIDKKSRTTL

SEQ ID NO: 7703 - protein, 299 aa, Corynebacterium glutamicum ATCC 13032
MLLHPDAQFYIDTLPTLSAEEQVSFGKDAPVSEADATHVATDQDIAGVPVRVYTPLSGAGDLPCLVYFHGGGWSGGTLNMIDATVHSLVVGLPIIAISVDYRLAPAHPFPAAIDDAFAVVSAVLDGVSGLSIDTSRVAIGGDSAGGNIAAVTAQQLRERAVGSTPVLAHQVLIFPVTDVSTTSTPSYLTFGKDCYLTKDAMERYIEQYADGHDRTDPRLSPLLASDLSDLPPTTIVYGECDVLAHEVRAYGQALLEAGNSVTMTEFKGQIHAFINLGGISSDARAARRLIRAELEAALC

SEQ ID NO: 7704 - protein, 305 aa, Gibberella zeae PH-1
MKLSAVTLLTLATGIIAAPVADVSKEVRSYASYEPPKDTYEQPKTPKQEKPKKPEYNQPKAPKPHHEKPKAPKPHHDKPKHYAPPHHEKPKAPKPHHEKPKTPSYEKPKAPKPHHEKPKKPETPKKPEYNQPKAPKPHHEKPKKPETPKKPAYEQPKAPKPHHEKPKKPETPKKPEYNQPKAPKPHHEKPKKPETPKKPEYNQPKAPKPHHEKPKKPETPKGPSYEQPKAPKPHHEKPKKPETPKKPEYNQPKAPKPHHETPKAPKPHHETPKKPSYEQPKPKQEQPKKPSYEAPKQPAYEAPHY

SEQ ID NO: 7705 - protein, 468 aa, Glycine max
  misc_feature (6)..(6): Xaa can be any naturally occurring amino acid
MGACVXTPQGCVGGRLSSSKKKTKKRRREGLRRRVTSRLWLPDCSFANPTFQGSIEEAWFDSIAVFDSDCDDDYQSVPDDVVSLSGIEGGSVSSFPSSRDATRGVSTDQVQKQKELLAGSEAARNVIDSQREPVFLDEISSVDANSNKDDGLLDNCGILPNNCLPKPTTKLSFKWKEGHGNATLFSSKMLLQRPIAGSQVPFCPIEKKMLDCWSQIDASTFKVRGVNYFKDKKKDFAPNYPAYYPFGVDVFLSPRKVDHIARFVELPVMSSSAKFPPILVVNVQVPLYPATLFQGETDGEGMSIVLYFKLSESYSKELPQTFQESIRRLMDDEVEKVKGFPVDTIAPFRERLKILGRVINLEDLHLSAAERKLMQAYNEKPVLSRPQHEFYMGENYFEIDLDMHRFSYISRKGFEAFLDRLKVCTLDVGLTIQGNKQEELPEHVLCCIRLNGIDYMNYQQLGLTQDPL

SEQ ID NO: 7706 - protein, 223 aa, Prunus caroliniana
  misc_feature (61)..(61): Xaa can be any naturally occurring amino acid
  misc_feature (188)..(188): Xaa can be any naturally occurring amino acid
GLVKREELFITSKASNHGHVVEACKNSLKKLQLDYLDLYLVHYPLATKHSGVGTTASLLDXNKVLDIDVTVSLETTWHDMEKTVSLGLVRSIGLSNYELFLTRDCLSYAKIKPQVSQFETHPYFQRESLVKFCKKHGVTPMAHTPLGGATANVKSFGSISPLEDPVLLGLAKKYKKSVAQIALRWNIXRDTPVIPKSSKVERLKENLEVLNFKLGKEDIELIN

SEQ ID NO: 7707 - protein, 122 aa, Rickettsia prowazekii str. Madrid E
MIQMQSILEVADNSGAKKVMCIKVLGGSHHMMAKLGDVIVVSIKEAIPGGKVKKGDVYKGVIVRTKTGVVRSDGSTIKFDKNALVLLNKQDEPIGTRVFGPVTRELRAKKYVRIMSLAEEVL

SEQ ID NO: 7708 - protein, 251 aa, Prunus laurocerasus
AHYKSEADVGNAIAEAIQRGLVKREELFITSKASNHGHVVEACKNSLKKLRLDYLDLYLVHYPLATKHSGVGTTASLLDENKVLDIDVTVSLESTWHDMEKTVSLGLVRSIGLSNYELFLTRDCLSYAKIKPQVSQFETHPYFQRETLVRFCRKHGVCPMAHTPLGGATANVKAFGSISPLEDPVLRALAKKYKKSVAQIALRWNLDRNTPVIPKSSKIERLKENLEVLNFKLEKEDIELINSIDKNPGPL

SEQ ID NO: 7709 - protein, 131 aa, Zea mays
AGSGPYPPPPAFRLQTEDLRYHHQLSRHIAQLGRIEAMASRLLAAASSSSASSSPLARLISSRRMAGAADHHGSTKVNMWQEPLNPGNWKEEHFVLASLAMWGAIIYGGLKAFGGKKEVKTEAGPAAAPAH

SEQ ID NO: 7710 - protein, 225 aa, Glycine max
MGDVMGPDLISDLPQSIIESILVQLPIRDAVRTSILSSKWRYKWASITQLVFDDKCVPFSNDREAVEKSVVKFITRVLFLHQGPIHKFQITNSKLQSCPEIDQWILFLSRNDIKELVMELGEGEFFRIPSSLFNCGKLTRLDLSRCEFDPPHSFKGFVCLRSLNLHQVLISPDAIESLISRCPLLESLSLSYFDNLALTICAPNLKYLYLEGEFKDICLEDTPLL

SEQ ID NO: 7711 - protein, 370 aa, Agrobacterium tumefaciens
MTVRSVFLLPGDGIGPEAMTEVRKLIEYMNSAHNAGFTVSEGLVGGSAYDAHGVAISDADMEKALAADAILFGAVGGPKWDGVPYEHRPEAGLLRLRKDLELFANLRPAICYPALAAASSLKPELVEGLDILIVRELTGGVYFGEPKQIIDLGNGQKRGIDTQIYDTFEIERIASVAFELARSRDNRVCSMEKRNVMKSGVLWNQVVTETHAAKYKDVQLEHMLADAGGMQLVRKPKQFDVIVTDNLFGDMLSDVAAMLTGSLGMLPSASLGAPDAKTGKRKAMYEPVHGSAPDIAGKSIANPIAMIASFAMCLRYSFNMVDEATKLEAAIANVLDKGIRTADIMADGCRQVGTSDMGDAVLAEFKALSA

SEQ ID NO: 7712 - protein, 319 aa, Wolinella succinogenes
MRIGLVCSGGDCAGMNPATKKFVEYSLELGYEPYFIREGLEGLIEGKIEPATLKEVSGILHKGGTILQSSRSKRFFDPAFRLQAYQNLQRHSIEALVTLGGDGSFRAMEVLAKEHSLLYAGIPATIDNDIRASDYALGVDSALNVILESTDRLRDTAESFRRAFVVEVMGRDCGYLALASAIACGAEVCIIPEMGYSLQSLGARLKEELGTGKRRYVLAIVSEGAKASSEVVSWLKEEVGIETRITILGHVQRGGSPSVYDRLMGFRFMQKALDSLSLGKSGVVVLREGRVEFLSSQEASSAPASLPLDMVRLASRLMF

SEQ ID NO: 7713 - protein, 178 aa, Triticum aestivum
  misc_feature (66)..(66): Xaa can be any naturally occurring amino acid
  misc_feature (74)..(74): Xaa can be any naturally occurring amino acid
  misc_feature (150)..(150): Xaa can be any naturally occurring amino acid
MAPTVMASSATSVAPFQGLKSTAGLPVSRRSNGASLGSVSNGGRIRCMQVWPIEGIKKFETLSYLXPPLSTEAXLLKQVDYLIRSKWVPCLEFSKVGFIFREHNASPGYYDGRYWTMWKLPMFGCTDATQVINEVEEVKKEYPDAYVPHXSGFDNMRQVQCVSFIAFKPPGCEESGKA

SEQ ID NO: 7714 - protein, 148 aa, Zea mays
EAGGAGSGLNGAVQAKGTGADDGSAKRLPPCCVKARAAAPESEARCHATVVSGWFTEPRSRCGEANSLKVEKILYQGKSLYQEVLVFESSTYGKVLVLDGIVQLTDKDECAYQEMITHLPLCSIPSPKKVCLLISKIGLIVKLVCRHA

SEQ ID NO: 7715 - protein, 147 aa, Triticum aestivum
  misc_feature (130)..(130): Xaa can be any naturally occurring amino acid
MGERVKGTVKWFNVTKGFGFISPEDGSEDLFVHQSAIKSDGYRSLNENDTVEFEVITGDDGRTKASDVTAPGGGALSGGSRPGDGGGDRGGRGGYGGGGYGGGGGGGGYGGGGGGYGGGGGGYGGGGGGXGCYNAQEAISDCQRVGR

SEQ ID NO: 7716 - protein, 169 aa, Zea mays
LEIGGEANLTAAIQVAQFALKNRQNKQLRQRIIVFVGSPVIDEKNWLEPEKLEALVAAVNSGGNSHIIHIPAGRDLSDALFSDSAAAARGASGFEFDVDPNVDPELALVLLISMEEERLRQEAAAKKAREESSKTENEGQSSTSNGDIVMADAEPEPNSYTEDKGLHCK

SEQ ID NO: 7717 - protein, 427 aa, Coxiella burnetii
MTELTGVSIVTYQHIKVPSQGEKITVNKAVLEVPDRPIIPFIEGDGIGIDIAPVMKNVVDAAVEKSYAGKRKIEWMEIYAGEKATKVYGKDNWLPDETLEAIKGYQVAIKGPLTTPVGGGIRSLNVALRQQLDLYVCLRPVRYFTGVPSPVKTPEKVNMVIFRENSEDIYAGIEWPAGSPEAVKLINFLQNEMGVKKIRFPETAGIGIKPVSKEGTSRLVRRAIQYAIDNDRDSVTLVHKGNIMKFTEGAFKDWGYEVAVKEFGAKPLDGGPWHVFENPKTGQKITIKDVIADAFLQQILLRPAEYSVIATLNLNGDYISDALAAEVGGIGIAPGANLSDTVGLFEATHGTAPKYAGQDKVNPGSLILSAEMMLRYLGWKEAADLVVQGIEGAIESKTVTYDFARLMTGAKEVSTSQFGKAIIKHIL

SEQ ID NO: 7718 - protein, 444 aa, Desulfitobacterium hafniense DCB-2
MYDIQIINAKIQTEQGQIEGNITINNGKIEAISSSPLANVKQTIDAEGLLVLPGFIDQHVHFMDPTETDREDFIHGTTAAAMAGVTTVIEHTHSRPILTVEDFLKYKSYIEERSLVDFGFAAHIWPGQYDQLEKLWQEGIAYFKVFTCTTHGVPGQNSASLHGAFTKVASFGGRVLVHCEDDSLTAENEKVLKGNNRDDGHVIQEWRSKAAEAISVANVCFIAKETGAHVTIAHLSHPDVVGIVQEAKEAGAKVLAEICPQYLYLEENTLAARGSFGKFTPPSRSARESQELMELVGKGELDILASDHAPSTKRHKDSGSIWTSPFGLPGIDTTSSVMLTAVNNNKLSLAGFVRMYAENPAKALGLYPKKGCIRVGADADLVLVDMKKKWTIQDDGICSKAKWSPFNGFQCTGKPVMTLLRGQIIMSEGKLLGKPGDGNYVKRA

SEQ ID NO: 7719 - protein, 387 aa, Zea mays
MAGGAGNGSNEAVQAKGSGGDGSAAKPLPPCCVKARSAAPESEAKCHATVVSGWFTEPRSHCGKATKVQYYNNPMWPGEAHSLKVENILYQGKSPYQEVLVFESSTYGKVLVLDGIVQLTDKDECAYQEMITHLPLCSIPSPKKVLVIGGGDGGVLREISRHSSVESIDICEIDQLVIDICKEFFPHLSVGFEDPRVQLHVGDAVEFLRNAPEGTYDAIIVDSSDPIGPAQELVEKPFFETIARALRPGGVLCNQAESMWLHTHLIQDMLSICRETFKGSVRYAWASVPTYPSGVIGFLLCAKDGPPVNFLTPVNPIEEVEGATKAGREIRFYNSEMHMAAFVLPTFAKRELEAYCASTETEQAEEVAATAPQKLTAAPKRGITTAS

SEQ ID NO: 7720 - protein, 427 aa, Coxiella burnetii
MTELTGVSIVTYQHIKVPSQGEKITVNKAVLEVPDRPIIPFIEGDGIGIDIAPVMKNVVDAAVEKSYAGKRKIEWMEIYAGEKATKVYGKDNWLPDETLGAIKEYQVAIKGPLTTPVGGGIRSLNVALRQQLDLYVCLRPVRYFTGVPSPVKTPEKVNMVIFRENSEDIYAGIEWPAGSPEAVKLINFLQNEMGVKKIRFPETAGIGIKPVSKEGTSRLVRRAIQYAIDNDRDSVTLVHKGNIMKFTEGAFKDWGYEVAVKEFGAKPLDGGPWHVFENPKTGQKITIKDVIADAFLQQILLRPAEYSVIATLNLNGDYISDALAAEVGGIGIAPGANLSDTVGLFEATHGTAPKYAGQDKVNPGSLILSAEMMLRYLGWKEAADLVVQGIEGAIESKTVTYDFARLMTGAKEVSTSQFGKAIIKHIL

SEQ ID NO: 7721 - protein, 414 aa, Arabidopsis thaliana
MGLCWGSPSDSPPTTTPSSTGNISSVGTFKSSNNTTTTGTSRGSNISSKSGFSVASGEDAYPDGQILPIPNLRIFSLAELRASTRNFRSENVLGEGGFGKVFKGWLEDKTPGKQSNGTVIAVKKLNAESFQGFEEWQCEVNFLGRVSHPNLVKLLGYCLEGEELLLVYEYMQKGSLENHLFRKGSAVQPLSWEIRLKIAIGAAKGLAFLHASEKQVIYRDFKASNILLDGSYNAKISDFGLAKLGPSASQSHITTRVMGTHGYAAPEYVATGHLYVKSDVYGFGVVLAEILTGLHALDPTRPTGQHNLTEWIKPHLSEKRKLRSIMDPRLEGKYPFKSAFRVAQLALKCLGPEPKNRPSMKEVVESLELIEAANEKPLERRTTRASPSIRQQQGHYRPQQLSSFRPRHTVSRAH

SEQ ID NO: 7722 - protein, 441 aa, Glycine max
MSQPKIKRRVGKYEVGRTIGEGTFAKVKFARNSETGEPVALKILDKEKVLKHKMAEQIRREVATMKLIKHPNVVRLCEVMGSKTKIYIVLEFVTGGELFDKIVNHGRMSENEARRYFQQLINAVDYCHSRGVYHRDLKPENLLLDAYGNLKVSDFGLSALSQQVRDDGLLHTTCGTPNYVAPEVLNDRGYDGVTADLWSCGVILFVLVAGYLPFDDPNLMNLYKKISVAEFTCPPWLSFSARKLITRILDPDPTTRITIPEILDDEWFKKDYKPPVFEENGETNLDDVEAVFKDSEEHHVTEKKEEQPTAMNAFELISMSKGLNLENLFDTEQGFKRETRFTSKSPADEIINKIEEAAKPLGFDVQKKNYKMRLANVKAGRKGNLNVATEIFQVAPSLHMVEVRKAKGDTLEFHKFYKKLSTSLDDVVWKTEDDMQMRETK

SEQ ID NO: 7723 - protein, 427 aa, Coxiella burnetii
MTELTGVSIVTYQHIKVPSQGEKITVNKAVLEVPDRPIIPFIEGDGIGIDIAPVMKNVVDAAVEKSYAGKRKIEWMEIYAGEKATKVYGKDNWLPDETLEAIKEYQVAIKGPLTTPVGGGIRSLNVALRQQLDLYVCLRPVRYFTGVPSPVKTPEKVNMVIFRENSEDIYAGIEWPAGSPEAVKLINFLQNEMGVKKIRFPETAGIGIKPVSKEGTSRLVRRAIQYAIDNDRDSVTLVHKGNIMKFTEGAFKDWGYEVAVKEFGAKPLDGRPWHVFENPKTGQKITIKDVIADAFLQQILLRPAECSVIATLNLNGDYISDALAAEVGGIGIAPGANLSDTVGLFEATHGTAPKYAGQDKVNPGSLILSAEMMLRYLGWKEAADLVVQGIEGAIESKTVTYDFARLMTGAKEVSTSQFGKAIIKHIL

SEQ ID NO: 7724 - protein, 275 aa, Bacillus cereus ATCC 10987
MHIPTTTLHNGVKMPMIGLGVYKAKEGDEVKQAVKTALEVGYRSIDTATVYENESGVGEAVRESGIPREEIFITTKVWNDDQGYEETLEAFEKSLKKLQMDYVDLYLIHWPIRGKYVDTYRALEKLYEEGKVRAIGVSNFHKHHLELLLPNCKVKPMVNQVELHPMLTQFELRNFCQGEQIQMEAWSPLMRGGEVFQHPIIQAIATKYEKTPAQVILRWDIQSGVVTIPKSVTPSRIQENFSIFDFSLTEEEMTQINTLNRNLHVGTNPDKYDTL

SEQ ID NO: 7725 - protein, 114 aa, Triticum aestivum
  misc_feature (48)..(48): Xaa can be any naturally occurring amino acid
  misc_feature (55)..(55): Xaa can be any naturally occurring amino acid
  misc_feature (86)..(86): Xaa can be any naturally occurring amino acid
MSMPSTREDTIKMKCRVLQENVGFAHRYGKRGHSKSHFGDIDIFDGKXLVDMVPXYKKGDRPHGDRLTYQLIEITEDGYVRLITRXGNTEDDLKLCKEDVLLGQIKTGFDDGKD

SEQ ID NO: 7726 - protein, 494 aa, Zea mays
MTRASTIDFGRRKQSELFGSGPLRPANIIRNKFPTYKNGSNGIVIKLADGPEMPSLKEAVAKEATDLLDRCQRPSVRELTMKFEKGFNTATLLSNEAKWRHAALLERDILLKDLKSVLESLRGRVGGKNKDEIEESLSMVDILAIELSKREDELLRQKTEVTKIADTLKLASTDAKRIIDEERANARLEIESAKASVQKIQSALKEQEIFSQRTGKQDADELKEEVQEARRVKMLHCPSKAMDIENEIQVLRDQLAEKSSDSLRLLKELELHRSYGENDMPLYELKGLETLGSTLHIVVHDCASVDFSNSSIQWFRIQPEGSKKEIISGATKPVYAPEPHDVGRYIQAEVKSGGQISVAKTAGSIDPAAGLVEYVETLVMNPETDYNVVILQVNGVAQAADSVHVLCIGRLRMRLAKEKTVVAKEFYSSSMQLCGVRGGGDAAPQAIFWQPRKGLSFVLAFETTRERNSALMLARRFAIDCNIILGGPGDKTSW

SEQ ID NO: 7727 - protein, 98 aa, Triticum aestivum
  misc_feature (4)..(5): Xaa can be any naturally occurring amino acid
  misc_feature (13)..(13): Xaa can be any naturally occurring amino acid
  misc_feature (23)..(23): Xaa can be any naturally occurring amino acid
  misc_feature (26)..(26): Xaa can be any naturally occurring amino acid
  misc_feature (44)..(44): Xaa can be any naturally occurring amino acid
  misc_feature (50)..(50): Xaa can be any naturally occurring amino acid
  misc_feature (53)..(53): Xaa can be any naturally occurring amino acid
  misc_feature (55)..(56): Xaa can be any naturally occurring amino acid
  misc_feature (60)..(63): Xaa can be any naturally occurring amino acid
  misc_feature (65)..(69): Xaa can be any naturally occurring amino acid
MSAXXLTNVAVLXNPTSFVNPFXFEXSYECLVALEDDLEWKLIXVGSAEXENXDXXLDSXXXXPXXXXXPYRCSGGPDFQRSARRTIGTACIHNFPQV

SEQ ID NO: 7728 - protein, 254 aa, Oemleria cerasiformis
SEADVGQAFAEAFKTGLVKREELFITSKANHGHVVEACKNSLKKLQLDYLDLYLVHYPLATKHSGVGTTASLLDENKVLDIDVTVSLEETWRGMEKAVSLGLTRSIGLSNYELFLTRDCLSYAKIKPAVSQFETHPYFQRESLVRFCQKHGVVATAHTPLGGATANTKYFGSISPLGDPVLHDVAKKYQKSVAQICLRWNIERNTPVIPKSSKVERLKENLQVLEFKLEKEDIELINGIDKKSRSTLPSLSWGL

SEQ ID NO: 7729 - protein, 160 aa, Griffithsia japonica
PIVRLPIHPTPNSRRPQPLSTAPPSPASRLSFPPRRRRLCPPAIGAAASASVYDLSAFKNGRPYPFSPLSGKLTLFVNVASYCALTPQYEGLVALHTAYQPKGFEVVASPCNQFGRQEPQPDDEICAFVKERFGARFVLLDKLVVNERPADGRSPRSTVS

SEQ ID NO: 7730 - protein, 264 aa, Sorbus aucuparia
AHYKSEADVGEALTEAFKTGLVKREELFITTKIWNSDHGHVVEACKNSLEKLQLDYLDLYLVHYPMPTRHNAIGKTASLLGEDKVLDIDVTVSLQQTWEGMEKAVSLGLVRSIGLSNYDLFLTRDCLAYSKIKPAVSQFETHPYFQRDSLIKFCIKHGVLPTAHTPLGGAAANKDMFGSVSPLDDPVLNDVAKKYGKSVAQICLRWGIQRKTAVIPKSSKIQRLKENLEVLEFQLSDEDMQLIYSIDRKYRTSLPSKTWGLDVS

SEQ ID NO: 7731 - protein, 242 aa, Triticum aestivum
MASLVFLVALLLSCSSMSSAARYLEEVVPKKEYPPHPIVPELPKPELPPHPAVPELPKPEPPHPLVPEVPHPMVPETPKEPEVSHPVVPEVPKHELPPHPAMPELPKPELPHPVVPEVPKETEAPHPIVPKVPKDHDLPHPAVPETPKEPEVPHPVVPEVPKEHELPHPPVPEVPTEPHVPHPEVPKEPELPHPVVPEVPKHEMPPFPKAELPPKPEVHFPGASGQAMIGLATSAHCPLSKY

SEQ ID NO: 7732 - protein, 438 aa, Oryza sativa (japonica cultivar-group)
MAHDLHDDLEFVSGDDDDYYLEFDHDPGHGFHTSAATSASQTLIGALYFRTSRWTIPWERLNYSRNQYREMRLRQYKNYENLTMPRDGLEKECKQVERKDTFYDFHLNTRLVKSTIVHFQLRNLLWATSKHDVYLMQNYSVMHWSSLLQRGKEVLNVAGQLAPSQNVRGAMPLSRVQISTMAVKGNLMVAGGFQGELICKYVDKPGVAFCTNLTGNNNSITNAVDIYQAPNGGTRITTANNDCVVRTFDTERFSLISHFAFPWSVNNTSVSPDGKLLAVLGDSSDCLIADSQSGKEMARLKGHLDYSFSSAWHPDGRVVATGNQDRTCRVWDVRNMSRSVAVLEGRIGAVRGLRYSPDGRFLAASEPADFVHVYDAAAGYADAQEIDLFGEIAGVAFSPAGNNGGGGEALFVSIADRTYGSLLEFHRRRRHGYLDCYV

SEQ ID NO: 7733 - protein, 279 aa, Gibberella zeae PH-1
MSVVSLLGVNVLNNPAKFVDKYEFEITFECLEQLEKDLEWKLTYVGSATSDQYDQELDSLLVGPIPVGVNKFIFEADAPNISRIPDAEILGVTVILLTCAYDGREFIRVGYYVNNEYDSEELNAEPPVKPIIERVKRNVLAEKPRVTRFAIKWDSEASAPAEYPPEQPEADLVADGDEYGAEEADEEAAEEAEEEAKSKGKASSGEDAEMAGVEHEGENAADEDELSDDGSVDIEGESEDDLEEEEEGEGEGEADGDAMEVDSAEKPATSTAKPVSVAS

SEQ ID NO: 7734 - protein, 265 aa, Kageneckia oblonga
AHYKSEADVGEALAEAFKSGLVKREELFITTKIWNSDHRYVAEACKNSLEKLQLQYLDLYLVHYPLPTRHNAIGKTASLLGEDKVLDIDVTIPLQQTWEGMEKTVALGLVRSIGLSNYDLFLTRDCLAYSKIKPAVSQFETHPYFQRDSLVKFCMKHGVLPTAHTPLGGAAANKDMFGSVSPLDDPVLNDVAKKYGKSVAQICLRWGIQRKTAVIPKSSKIQRLKENLEVLEFQLSDEDMQLIYSIDKKYRTSLPSKTWGLDVYA

SEQ ID NO: 7735 - protein, 307 aa, Triticum aestivum
MKTLLILTILAMAITISTANMQVDPSGQVQWPQQQLVPQPQQPLSQQPQQAFPQPQQTFPHQPQQQQPQQPFPQQPQQPFPQTQQPQQPFPQQPQQPFPQTQQPQQPFPQFQQPHQPFPQPQQQFPQPQQPQQSFPQQQRPFIQPSLQQRLNPCKNILLQQCKPASLVSSLWSIIWPQSDCQVMQQQCCQELAQIPQQLQCAAIHSVVHSIIQQQQQQQQQQGMHILLPLSQQQQLGQGTLVQGQGIIQPQQLAQLEAIRSLVLQTLPTMCNVYVPPECSIHQGTICQHQGIIRAPFASIVAGIGGQ

SEQ ID NO: 7736 - protein, 265 aa, Vauquelinia californica
AHYKSEADVGEALAEAFKTGLVKREELFITTKIWNSDHGHVVEACKNSLEKLQLDYLDLYLVHYPMPTRHNAIGKTASLLGEDKVLDIDVTISLHTTWEGMKKAVSLGLVRSIGLSNYDLFLTRDCLAYSKIKPAVSQFETHPYFQRDSLVKFCMKHGVLPTAHTPLGGAAANKDMFGSVSPLDDPVLNDVAKKYGKSVAQICLRWGIQRKTAVIPKSSKIQRLKENLEVLKFQLSDEDMQLIHGIDRKYRTSLPSKTWGLDVYA

SEQ ID NO: 7737 - protein, 497 aa, Pseudomonas aeruginosa PAO1
MTTLTRADWEARAKDLKIEGRAFVNGEYSNAASGETFDCLSPVDGRFLAKVASCDLADAEQAVKVARNAFDSGAWSRLAPAKRKQTMIRFADLLLENAEELALLETLDMGKPISDSLHIDVASAANSLRWSAEAIDKIYDEVAATPHAELGLVTREPVGVVAAIVPWNFPLLMSCWKLGPALATGNSVILKPSEKSPLTAIRIAQLAVEAGIPKGVFNVLPGYGHTVGKALALHMDVDTLVFTGSTKIAKQLMVYAGESNMKRVWLEAGGKSPNIVFADAPDLKAAAEAAAGAIAFNQGEVCTAGSRLLVERSIKDKFLPLVIEALKGWKPGNPLDPETNVGALVDTQQMNTVLSYIEAGHNDGAKLVAGGKRTLEETGGTYVEPTIFDGVTNAMKIAREEIFGPVLSVIEFEDAEEAVRIANDTPYGLAAAVWTSNLSKAHLTAKALRAGSVWVNQYDGGDMTAPFGGFKQSGNGRDKSLHAFDKYTELKATWIKL

SEQ ID NO: 7738 - protein, 112 aa, Bartonella sp. Tm6313nv
ANEACLKMLQEIGSVKRIPEFIARAKDKNDPFRLMGFGHRVYKNYDPRAKIMQQTCHEVLKELNIQDDPLLDIAIELEKIALNDEYFVEKRLYPNVDFYSGITLKALGFPTE

SEQ ID NO: 7739 - protein, 444 aa, Pseudomonas aeruginosa PAO1
MTMNDEPQSSSLDNFWMPFTANRQFKARPRLLESAEGIHYIAQGGRRILDGTAGLWCCNAGHGRREISEAVARQIATLDYAPPFQMGHPLPFELAARLTEIAPPSLNKVFFTNSGSESADTALKIALAYQRAIGQGTRTRLIGRELGYHGVGFGGLSVGGMVNNRKAFSANLLPGVDHLPHTLDVARNAFTVGLPEHGVEKAEELERLVTLHGAENIAAVIVEPMSGSAGVVLPPKGYLQRLREITRKHGILLIFDEVITGFGRVGEAFAAQRWGVVPDLLTCAKGLTNGSIPMGAVFVDEKIHAAFMQGPQGAIEFFHGYTYSGHPVACAAALATLDIYRRDDLFQRAVELEGYWQDALFSLRDLPNVVDIRAVGLVGGVQLAPHADGPGKRGYDVFERCFWEHDLMVRVTGDIIAMSPPLIIDKPHIDQIVERLAQAIRASV

SEQ ID NO: 7740 - protein, 483 aa, Pseudomonas fluorescens
MKTKLFINNAWIDSSDQQTFEGKDPVNSEVMTERANATVTDAIKAAQVAEEAFKTWKDVGPSECRRLLLKVADVMESKTPKFIEVMAMEVGASALWAGFNVHASANVFREAASLATQIQGETIPTDKAETLSMTLRQPVGPILSIVPWNGTAVLAARAIAYPLVCGNTVVFKGSEFIPATHALITQCVQEAGMPAGVLNYLNSSPDRSPEIADALISAKEIRRINFTGSTRVGSIIAQKAAQHLKRCLLELGGKSPLIVLDDANIDAAVKAAVFGSFLFQGQICMYTERLVVDEKIADEFVSKFVEKTKRLSAGDLCVTGDCIIGPMVSLNSGYRINGLFKDAIDKGSKVVCGGMVQGAVMPSTILDHVKSDMRIYDEETFGPITVVIRCKGEAEAIRIANDSVYGLSSGVFGRDINRALRVGMSIEYGCVHINGSTVQNEVQAPYGGTKNTGYGRFDGRAVVDEFTELKWLTIEPFEQQYPF

SEQ ID NO: 7741 - protein, 284 aa, Crocosphaera watsonii WH 8501
MDYSQDNNGTGSPTDQGLLDDPAYTIEQALNNLQQTDDPSARYYAAWWIGRFRVNEPVAIQGLLTALEDNSDRSPDGGYPLRRNAAKALGKSGDVSVVPALIEALQCPDYYVRESAAQSLEMLGDQQAIPGLISLLNGGVAAAQQVEGKPHLIQPYEAILEALGTLQAKNAISLIEPFVEHFVPKVKFAAARALYQLTNDPVYGEILVTALQETTLQVRRSALMDLGAIGYLGGVDAIGNTLAENSLKLISLKGILEHHLSQQEMPQELNDDLVHLMNVMDSLL

SEQ ID NO: 7742 - protein, 265 aa, Amelanchier alnifolia
AHYKSEADVGEALAEAFNTGLVKREELFITTKIWNSDHGHVVEACKNSLEKLQLDYLDLYLVHYPMPTRHNAIGKTASLLGEDKVLDIDVTISLQQTWEGMEKAVTLGLVRNMGLSNYDLFLTRDCLAYSKIKPAVSQFETHPYFQRDSLVKFCIKHGVLPTAHTPLGGAAANKDMFGSVSPLDDPVLNDVAKKYGKSVAQICLRWGIQRKTAVIPKSSKIQRLKENLEVLEFQLSNEDMQLINGIDRKYRTSLPSKTWGLDVYA

SEQ ID NO: 7743 - protein, 315 aa, Actinobacillus pleuropneumoniae serovar 1 str. 4074
MSQLDALREMTVVVADTGDIEAIKQYQPQDATTNPSLILSASALPQYASLIDDAVAYAKARSDDKAQQLIDAEDKLAVNIGLEILKIVPGRISTEVDARLSYDTKATIEKARQIMKLYNDAGISNDRILIKIASTWQGIRAAEVLEKEGINCNLTLLFSQAQARACAEAGVYLISPFVGRILDWYKAAEKKEYAPAEDPGVISVTNIYNYYKQYGYQTVVMGASFRNVGEITEIAGCDRLTIAPPLLKELAESNAPLVRKLEYKGEVKTRPAPLTEAEFYWQHNQDPMAVEKLAEGIRKFAVDIEKLEAMLAAKL

SEQ ID NO: 7744 - protein, 175 aa, Triticum aestivum
MAPAVMASSATSVAPFQGLKSTAGLPVSRRSSSAGLSSVSNGGRIRCMQVWPIEGIKKFETLSYLPPLSTEALLKQVDYLIRSKWVPCLEFSKVGFVFREHNSSPGYYDGRYWTMWKLPMFGCTDATQVLNEVEEVKKEYPDAYVRVIGFDNLRQVQCVSFIAFRPPGCEESGKA

SEQ ID NO: 7745 - protein, 175 aa, Zea mays
QMEVDRQPAPAEAAANVHVHVPMPARRRGDQMVPTMTTSSLNRAGTEVSADLVVANSEEEDTRAQVPFHAHLHLHPRAEAPPAARRTNNGARQHDVFQQRRNHRRDALLAPSASEASSSWTGREGAVVPVWSPPAASGHSDAFAADEADVSSRSYLGRHPQSHRLMNWSQLSQSS

SEQ ID NO: 7746 - protein, 464 aa, Glycine max
  misc_feature (76)..(76): Xaa can be any naturally occurring amino acid
  misc_feature (132)..(132): Xaa can be any naturally occurring amino acid
  misc_feature (139)..(139): Xaa can be any naturally occurring amino acid
MDRRSHPTGTVSTRNILFNKYEIGKLLGQGNFAKVYHGRNLSTNESVAIKVIKKERLQKERLVKQIKREVSVMRLXVRHPHIVELKEVMANKAKIFMVVEYVKGGELFAKVAKGKMKEDVARKYFQQLISAXVDFCHSXRGVTHRDLKPENLLLDENEDLKVSDFGLSALPDQRRSDGMLLTPCGTPAYVAPEVLKKKGYDGSKADIWSCGVILFALLSGYLPFQGENVMRIYSKSFKADYAFPEWISPAAKNLISNLLVVDPQKRYSIPDIMKDPWFQIGFLRPIAFSMKESALEDNIDFSGDDVPSPGSDDGNSSSNNEDGELTGAKPARPSYNAFEIISSLSHGFDLRNLFETRKRSPSMFISKFSASAVMAKLEGVAKKLNFRVTGKKEFMVRMQGATEGRKGKLAMTVEVFEVAPEVAVVEFSKSAGDTLEYLNFCEDQVRPSLRDIVWSWQGDANCHQ

SEQ ID NO: 7747 - protein, 427 aa, Coxiella burnetii
MTELTGVSIVTYQHIKVPSQGEKITVNKAVLEVPDRPIIPFIEGDGIGIDITPVMKNVVDAAAEKSYAGKRKIEWMEIYAGEKATKVYGKDNWLPDETLEAIKEYQVAIKGPLTTPVGGGIRSLNVALRQQLDLYVCLRPVRYFTGVPSPVKTPEKVNMVIFRENSEDIYAGIEWPAGSPEAVKLINFLQNEMGVKKIRFPETAGIGIKPVSKEGTSRLVRRAIQYAIDNDRDSVTLVHKGNIMKFTEGAFKDWGYEVAVKEFGAKPLDGGPWHVFENPKTGQKITIKDVIADAFLQQILLRPAEYSVIATLNLNGDYISDALAAEVGGIGIAPGANLSDTVGLFEATHGTAPKYAGQDKVNPGSLILSAEMMLRYLGWKEAADLVVQGIEGAIESKTVTYDFARLMTGAKEVSTSQFGKAIIKHIL

SEQ ID NO: 7748 - protein, 140 aa, Triticum aestivum
  misc_feature (120)..(120): Xaa can be any naturally occurring amino acid
  misc_feature (128)..(128): Xaa can be any naturally occurring amino acid
  misc_feature (130)..(130): Xaa can be any naturally occurring amino acid
MAPTVMASSATSVAPFQGLKSTAGLPVSRRSNGASLGSVSNGGRIRCMQVWPIEGIKKFETLSYLPPLSTEALLKQVDYLIRSKWVPCLEFSKVGFIFREHNASPGYYDGRYWTMWKLPXFGCTDATXVXNEVEESRRST

SEQ ID NO: 7749 - protein, 427 aa, Coxiella burnetii
MTELTGVSIVTYQHIKVPSQGEKITVNKAVLEVPDRPIIPFIEGDGIGIDITPVMKNVVDAAVEKSYAGKRKIEWMEIYAGEKATKVYGKDNWLPDETLEAIKEYQVAIKGPLTTPVGGGIRSLNVALRQQLDLYVCLRPVRYFTGVPSPVKTPEKVNMVIFRENSEDIYAGIEWPAGSPEAVKLINFLQNEMGVKKIRFPETAGIGIKPVSKEGTSRLVRRAIQYAIDNDRDSVTLVHKGNIMKFTEGAFKDWGYEVAVKEFGAKPLDGGPWHVFENPKTGQKITIKDVIADAFLQQILLRPAEYSVIATLNLNGDYISDALAAEVGGIGIAPGANLSDTVGLFEATHGTAPKYAGQDKVNPGSLILSAEMMLRYLGWKEAADLVVQGIEGAIESKTVTYDFARLMTGAKEVSTSQFGKAIIKHIL

SEQ ID NO: 7750 - protein, 345 aa, Sulfolobus solfataricus P2
MVEGFSPMKSVIMENGKAVIKELPLPKLQQGDVLVKMKACGLCGTDIEKICGQYTASQPILGHEPTGIIQESTVDWLKPGDRVFAHHHVPCYECYYCKKGSPTMCPYYRKTNLDPGGFSEYFRVPAWNVARGGVLKLPDNVSFEEGAFIEPLATVIRAQKRVAIDNGDTVFIVGIGPMGLLHAMMAKVNKAGVIIASDVSDFRTEFGYKVGINYSLNAKKVNVVDEVKRLTDGRGADVTIIASGSPSAIVSGLNATRKGGRVLLFGVPYKGTILNYDISDLLNNEISIIPSNAAVEEDTKEALAIIANKKIDVTKLITHRFSLDEFNEAVRIGKEGNAIKVIIYS

SEQ ID NO: 7751 - protein, 359 aa, Candida rugosa
MSKSIVLLPGDHVGTEVVAEAVKVLKAIERTTPGTSFSFSTHLIGGAAIDATGVPLPDEALEAAKASDAVLLGAVGGPKWGTGDVRPEQGLLKIRKELGLYANLRPCSFASSKLVDLSPLKREIVEGTDFVVVRELVGGIYFGERKEDDGSGVASDTETYSVPEVERITRMAAFLALQHNPPQTVWSLDKANVLASSRLWRKTVTRVMTEEFPTVPFQHQLIDSAAMILVQKPTKLNGVVLTSNMFGDIISDEASVIPGSLGLLPSASLASLPDTNTAFGLYEPCHGSAPDLPAGKVNPLACILSAAMMLRLSLDNAAAADRIEQAVREVIDSGVATADLGGSSSTGEVGDAIVKALEK

SEQ ID NO: 7752 - protein, 427 aa, Coxiella burnetii
MTELTGVSIVTYQHIKVPSQGEKITVNKAVLEVPDRPIIPFIEGDGIGIDITPVMKNVVDAAVEKSYAGKRKIEWMEIYAGEKATKVYGKDNWLPDETLEAIKEYQVAIKGPLTTPVGGGIRSLNVALRQQLDLYVCLRPVRYFTGVPSPVKTPEKVNMVIFRENSEDIYAGIEWPAGSPEAMKLINFLQNEMGVKKIRFPETAGIGIKPVSKEGTSRLVRRAIQYAIDNDRDSVTLVHKGNIMKFTEGAFKDWGYEVAVKEFGAKPLDGGPWHVFENPKTGQKITIKDVIADAFLQQILLRPAEYSVIATLNLNGDYISDALAAEVGGIGIAPGANLSDTVGLFEATHGTAPKYAGQDKVNPGSLILSAEMMLRYLGWKEAADLVVQGIEGAIESKTVTYDFARLMTGAKEVSTSQFGKAIIKHIL

SEQ ID NO: 7753 - protein, 427 aa, Coxiella burnetii
MTELTGVSIVTYQHIKVPSEGEKITVNKAVLEAPDRPIIPFIEGDGIGIDITPVMKNVVDAAVEKSYAGKRKIEWMEIYAGEKATKVYGKDNWLPDETLEAIKEYQVAIKGPLTTPVGGGIRSLNVALRQQLDLYVCLRPVRYFTGVPSPVKTPEKVNMVIFRENSEDIYAGIEWPAGSPEAVKLINFLQNEMGVKKIRFPETAGIGIKPVSKEGTSRLVRRAIQYAIDNDRDSVTLVHKGNIMKFTEGAFKDWGYEVAVKEFGAKPLDGGPWHVFENPKTGQKITIKDVIADAFLQQILLRPAEYSVIATLNLNGDYISDALAAEVGGIGIAPGANLSDTVGLFEATHGTAPKYAGQDKVNPGSLILSAEMMLRYLGWKEAADLVVQGIEGAIESKTVTYDFARLMTGAKEVSASQFAKAIIKHIL

SEQ ID NO: 7754 - protein, 427 aa, Coxiella burnetii
MTELTGVSIVTYQHIKVPSEGEKITVNKAVLEVPDRPIIPFIEGDGIGIDITPVMKNVVDAAVEKSYAGKRKIEWMEIYAGEKATKAYGKDNWLPDETLEAIKEYQVAIKGPLTTPVGGGIRSLNVALRQQLDLYVCLRPVRYFTGVPSPVKTPEKVNMVIFRENSEDIYAGIEWPAGSPEAVKLINFLQNEMGVKKIRFPETAGIGIKPVSKEGTSRLVRRAIQYAIDNDRDSVTLVHKGNIMKFTEGAFKDWGYEVAVKEFGAKPLDGGPWHVFENPKTGQKITIKDVIADAFLQQILLRPAEYSVIATLNLNGDYISDALAAEVGGIGIAPGANLSDTVGLFEATHGTAPKYAGQDKVNPGSLILSAEMMLRYLGWKEAADLVVQGIEGAIESKTVTYDFARLMTGAKEVSASQFAKAIIKHIL

SEQ ID NO: 7755 - protein, 227 aa, Camellia sinensis
GDHILDAQQKGEINEDNVLYIVENINVAAIETTLWSIEWGIAELVNHPQIQKKLRHELDTMLGLGVQITEPDTYKLPYLQAVVKETLRLRMAIPLLVPHMNLHDAKLSGYDIPAESKILVNAWWLANNPDNWKNPEEFRPERFLEEEAKVEANGNDFRYLPFGVGRRSCPGIILALPILGITLGRLVQNFELLPPPGQAKIDTAEKGGQFSLHILKHSTIVLKPRSF

SEQ ID NO: 7756 - protein, 112 aa, Bartonella weissi
ANEACLKMLQEIGSTEKIPEFIERAKDKNDPFRLMGFGHRVYKNYDPRAKLMQKTCHEVLKELNIQDDPLLDIAMELEKIALNDEYFIEKKLYPNVDFYSGITLKALGFPTE

SEQ ID NO: 7757 - protein, 297 aa, Saccharomyces cerevisiae
MSGPPPPYEEQSSHLYGQPASSQDGNAFIPEDFKYSTVVISCEPIIRQRFMHKVYSLLSCQLLASLSFCYWASVSTSLQNFIMAHIALFYICMVVSLVSCIWLAVSPRPEDYEASVPEPLLTGSSEEPAQEQRRLPWYVLSSYKQKLTLLSIFTLSEAYCLSLVTLAYDKDTVLSALLITTIVVVGVSLTALSERFENVLNSATSIYYWLNWGLWIMIGMGLTALLFGWNTHSSKFNLLYGWLGAILFTAYLFIDTQLIFRKVYPDEEVRCAMMLYLDIVNLFLSILRILANSNDDN

SEQ ID NO: 7758 - protein, 265 aa, Amelanchier alnifolia
AHYKSEADVGEALAEAFNTGLVKREELFITTKIWNSDHGHVVEACKNSLEKLQLDYLDLYLVHYPMPTRHNAIGKTASLLGEDKVLDIDVTNFLQQTWEGMEKAATLGLIRNIGLSNYDLFLIRDCLAYSKIKPAVSQFETHPYFQRDSLVKFCIKHGVLPTAHTPLGGAAANKDMFGSVSPLDDPVLNDVAKKYGKSVAQICLRWGIQRKTAVIPKSSKIQRLKENLEVLEFQLSNEDMQLINGIDRKYRTSLPSKTWGLDVYA

SEQ ID NO: 7759 - protein, 170 aa, Glycine max
SPSVRGSLSDLTCDSDGKIDKFINGESSLPLHEREGGRTYYLGMFLGGAYEEALGGVHNLFGGPSVIRVSQSDGPHSFAVTRAVPGPSCGDVLRVMQHQPELMFETLKHRAQEYVSHDNAAAVLAAGLARTFDRMPYLLPLSSFVADDVAAAAAVPAGEDDEEQWSYICA

SEQ ID NO: 7760 - protein, 265 aa, Gillenia stipulata
AHYKSEADVGEVLAEAFKTGLVKREELFITTKIWNSDHGHVVEACKNSLEKLQLDYLDLYLVHYPMPTKHNGVGKTASLLGEDKVLDIDVTISLQQTWEGMEKTVSLGLVRSIGLSNYELFLTRDCLAYSKIKPAVSQFETHPYFQRDSLVKFCLKHGVLPTAHTPLGGAAANKDMFGSVSPLDDPVLNDVANKYGKSVAQICLRWGIQRKTAVIPKSSKIQRLKENLEVLEFQLSEEDMQLIYSIDRKYRISLPSKTWGLDVYA

SEQ ID NO: 7761 - protein, 160 aa, Manihot esculenta
  misc_feature (52)..(52): Xaa can be any naturally occurring amino acid
MSDEEHHFESKADAGASKTFPQQAGTIRKNGYIVIKNRPCKVMEVSTSKTGXHGHAKCHFVGIDIFNGKKLEDIVPSSHNCDVPHVNRTDYQLIDISEDGFVSLLTETGNTKDDLRLPTDENLLSQIKDGFAEGKDLVVSVMSAMGEERICSLKDIGPKN

SEQ ID NO: 7762 - protein, 398 aa, Pneumocystis carinii
MQSEAYQTNLQCSGETSHKLGIKEAKSTSKTSLIDQIPILTLSIPSRRSIPHIFDATRITDNSDNSHNENQDFKGILEENGSPDPFSYNRSYFTKIMLDEVWQRSAHSDEIIELEKLGEGISGSVSKCILKNTGTLFALKTILVDTNPEIQQQILRELSINRTCSSEYIVQYYGTFVDEASSNISMAMEYCAGGSLDRLYKKVRANGARIGEYPILKIAENALKGLNYLHTRKIIHRDIKPSNILMTLEGQAKLCDFGVSGELVSSMAKTFTGTSYYMAPERIKGETYSITSDIWSLGLTLMEISQNRFPFPPEGPPLVPIELLNYIVNISNFELVDEPDNKIKWSEDFKHFLKTCLERDGAKRPNSQRMLEHPWVMKHSIIKIDMAKWIKQILELPL

SEQ ID NO: 7763 - protein, 379 aa, Nicotiana tabacum
MGEALNVMESVRSIVFKESENLEGSATKIEGYDFNKGVNYAELFKSMASTGFQAANLGDAIQIVNQMLDWRLSHEQPMEDCSEEERDVAYRESVTCKIFLGFTSNLVSSGVRDTIRYLVQHRMVDVVVTTAGGIEEDLIKCLAPTYKGDFSLPGAVLRSKGLNRIGNLLVPNDNYCKFENWIIPIFDQMYEEQIKEKVLWTPSKVIARLAKEINDETSYLYWAYKNRIPVFCPGLTDGSLGDMLYFHSFKKGDPDNPDLNPGLIIDIVGDIRAMNSEAVHAGSRKTGMIILGGGLPKHHVCNANMMRNGADFAVYINTAQEFDGSDSGARPDEAVSWGKIRGGAKTVKVHCDATIAFPILVAETFAAKRKELSHIRCQV

SEQ ID NO: 7764 - protein, 166 aa, Triticum aestivum
  misc_feature (92)..(92): Xaa can be any naturally occurring amino acid
  misc_feature (102)..(102): Xaa can be any naturally occurring amino acid
  misc_feature (116)..(116): Xaa can be any naturally occurring amino acid
  misc_feature (146)..(146): Xaa can be any naturally occurring amino acid
  misc_feature (148)..(148): Xaa can be any naturally occurring amino acid
MAPTVMASSATSVAPFQGLKSTAGLPVSRRSNGASLGSVSNGGRIRCMQVWPIEGIKKFETLSYLPPLSTEALLKQVDYLIRSKWVPCLEFXSKVGFIFREXHNASPGYYDGRYWXTMWKLPMFGCTDATQVINEVEEVKKEYPDXYXRIIGFDNIRQVQCVSSSP

SEQ ID NO: 7765 - protein, 227 aa, Spiraea cantoniensis
HGHEVEACKNSLQKLQLDYLDLYLVHYPLATRHRVGTTASLLDENKVLDIDVTVSLESTWRGMEKAVELGLVRSIGLSNYELFLTRDCLSYAKIKPAVSQFETHPYYQRESLVRFCQKHGICATAHTPLGGGTANTKYFGSTSPLGDPVLNEVAKKYKKSVAQICLRWNIDRCTAVIPKSSKVERLKENLQVLDFKLEKEDIELIBTIVRKRRTTLPSLSWGLDVYA

SEQ ID NO: 7766 - protein, 151 aa, Ralstonia metallidurans CH34
MILWRVALFFFLFTAPVWASDQAAEDRMLGIASELRCLVCQNESIAASQADLAADLRQQIREQIRAGKSDDDIRTYMVERYGDFVLYRPPLKPTTMLLWFGPFVVLALGIVVLVMNLRSRNRKPKHAALNEEERRHADALLAPPHNVLDET

SEQ ID NO: 7767 - protein, 219 aa, Holodiscus microphyllus
WNSDHGHVVEACKNSLKKLQLDYLDLYLVHYPLATKHSVGNTASLLDENKVLDIDVTVSLESTWHAMEKAVKLGLVRSIGLSNYELFLTRDCLSYAKIKPAVSQFETHPYYQRDSLVKFCQKHGVCATAHTPLGGATANTKYFGSVSPLGDPVLNEVAKKYQKSVAQICLRWGIERKTAVIPKSSKPERLKENLQVLEFKLEREDIELINSIDRKYRTS

SEQ ID NO: 7768 - protein, 389 aa, Lactobacillus plantarum
MTMQHVFPTYQRFPFAITDGQGVHLTDNHGKTYLDFTAGIGVCNFGYHQPQIQAAVTQQLTHIWHTSNLYENELQDAVAGLLANGEERLVYFANSGTEANEAALKLARKYTGKTGILAFQHSFHGRTYGAMSMTGNPHIQAGYAPLVPGITFATYNDDAALDKITPELAAVILEVVQGEGGVFAGQTAWLQAVNAKCQATGVLLIIDEVQTGIGRTGYRMAYEGYGLDPDIYTVAKGLANGLPVGAMVGRRQLATAFGPGSHGSTFAGNAVAMAAAKRVLTQLTPALLTTVRAHAKLVWQSLATQVEPIPVVKQITGKGLMIGIHLDEQIPVNQVITRLQVEGLLTLSAGDNTLRLLPPIVMQPADLLAGIALIAKVLTTLTTEVTTNE

SEQ ID NO: 7769 - protein, 250 aa, Glycine max
KSLGVKMVISGEGSDEIFGGYLYFHKAPNKEEFHQETCRKIKALHKYDCLRANKSTFAWGLEARVPFLDKEFIRVAMNIDPECKMIKKEEGRIEKWALRRAFDDEEHPYLPKHILYRQKEQFSDGVGYGWIDGLKAHAEKHVTDRMMLNAANIFPFNTPTTKEAYHYRMIFERFFPQNSARLTVPGGASVACSTAKAVEWDAAWSNNLDPSGRAALGVHISAYENQNNKGVEIEKIIPMDAAPLGVAIQG

SEQ ID NO: 7770 - protein, 278 aa, Silene vulgaris
EAHSLKVEKILFQGKSKLQDVMVFQSSTYGKVLILDGVIQLTERDECAYQEMISHLPLCSIPNPKKVLVIGGGDGGVLREVARHSSVEHIDICEIDEMVVTVSKEFFPEVAVGYDDPRVNLHIGDGVAFLKAATEGSYDAVIVDSSDPIGPAKELFEKPFFESVAKALRPGGVVCTQAESIWLHMHIIEDIVSNCREIFKGSVNYAWTTVPTYPSGVIGFMVCSTEGPAVDFRNPVNPIDKMEDEKRPLKFYNAEIHSAAFCLPSFAKRIIEAKANST

SEQ ID NO: 7771 - protein, 624 aa, Triticum aestivum
  misc_feature (590)..(590): Xaa can be any naturally occurring amino acid
MRGLRRSSLARIASTTRAASARQCSSSILGGARAAPYCTMAGRSGEEADAAMAGVATGGVEDAYGEDRATEDQPVTPWAVCIASGHSLLRDPRHNKGLSFTEKERDAHYLRGLLPPVVLSQELQEKRLLQNVRQLDVPLQRYMFLMDLQERNERLFYKLMIDNVEELLPVVYTPTVGEACQKYGSIFRRSQGLYISLKDKGRVLEVLRNWPEKSIQVIVVTDGERILGLGDLGCQGMGIPVGKLALYTALGGVRPSACLPITIDVGTNNEELLNDEFYIGLRQKRATGQEYTELLDEFMVAVKQNYGQKVLVQFEDFANHNAFTLLEKYKATHLVFNDDIQGTAAVVLAGLMAGLKFAGGTLADHTFLFFGAGEAGTGIAELVALEISMQSKTSQEEARKNIWLVDSKGLIVSSRKDSIQPFKKLYAHEHEPVKDLLSAIKDIKPTALIGSAGVGQSFTKEVIEAMSSINKRPIILALSNPTSKSECTAEQAYSWSQGRAIFGSGSPFDPVKYNDKLFVPAQANNAYIFPGFGLGVVTSGAIRVKDDMVLAAAEALAEQVTAEHFDKGLIYPPFSSIRKISANIAARVGXKAYDLGLASHLPRPKDLVKYAESCMYSPIYRSYR

SEQ ID NO: 7772 - protein, 106 aa, Glycine max
  misc_feature (67)..(67): Xaa can be any naturally occurring amino acid
NEEGREIAEKLGVRNLFWDWDLPRTREGFCGFKGSMTASVVRGCAFCPHADDIWMVTASPYVVERPXLFNGVMSKHAHMMLEYYLSSCLNWDAFVMSGEHIKGSIP

SEQ ID NO: 7773 - protein, 278 aa, Silene latifolia
EAHSLKVEKILFQGKSKYQDVMVFQSSTYGKVLILDGVIQLTERDECAYQEMISHLPLCSIPNPKKVLVIGGGDGGVLREVARHSSVEHIDICEIDEMVVTVSKEFFPEVAVGYDDPRVNLHIGDGVAFLKAATEGSYDAVIVDSSDPIGPAKELFEKPFFESVAKALRPGGVVCTQAESIWLHMHIIEDIVSNCREIFKGSVNYAWTTVPTYPSGVIGFMVCSTEGPAVDFKNPVNPIDKTEDEKRPLKFYNAEIHSAAFCLPSFAKRIIEAKANST

SEQ ID NO: 7774 - protein, 427 aa, Coxiella burnetii
MTELTGVSIVTYQHIKVPSEGEKITVNKAVLEVPDRPIIPFIEGDGIGIDITPVMKNVVDAAVEKSYAGKRKIEWMEIYAGEKATKVYGKDNWLPDETLEAIKEYQVAIKGPLTTPVGGGIRSLNVALRQQLDLYVCLRPVRYFTGVPSPVKTPEKVNMVIFRENSEDIYAGIEWPAGSPEAVKLINFLQNEMGVKKIRFPETAGIGIKPVSKEGTSRLVRRAIQYAIDNDRDSVTLVHKGNIMKFTEGAFKDWGYEVAVKEFGAKPLDGGPWHVFENPKTGQKITIKDVIADAFLQQILLRPAEYSVIATLNLNGDYISDALAAEVGGIGIAPGANLSDTVGLFEATHGTAPKYAGQDKVNPGSLILSAEMMLRYLGWKEAADLVVQGIEGAIESKTVTYDFARLMTGAKEVSASQFAKAIIKHIL

SEQ ID NO: 7775 - protein, 238 aa, Zea mays
  misc_feature (122)..(122): Xaa can be any naturally occurring amino acid
  misc_feature (228)..(228): Xaa can be any naturally occurring amino acid
IIDKSIHTAYVRAIRSAQHFIYIENQYFLGSSYEWPSYVNSGADNLIPMELALKIATKIRAGERFAVYVVIPMWPEGVPTSASVQEILFFQAQTMEMMYGVIARELKAMNIEDAHLQDYLNXYCLGNREEPSTDGSPESDKSTDKSAAGLARKHRRFMIYVHAKGMIVDDEYVILGSANINQRSLAGSRDTEIAMGAYQPHHAWSSKKGHPHGQVYGYRNSLWAEHLXMVDDHFKEPS

SEQ ID NO: 7776 - protein, 227 aa, Arabidopsis thaliana
MPVHDEQEHEVYGGDIPEEEEGEMDTEEYEEHGGEEGAAAGDEELEPGSSSRDLEDMKKRIKEIEEEAGALREMQAKAEKDMGASQDPSGGVSAAEKEEVDSRSIYVGNVDYACTPEEVQQHFQSCGTVNRVTILTDKFGQPKGFAYVEFVEVEAVQNSLILNESELHGRQIKVSAKRTNVPGMRQFRGRGRPFRPMRGFMPGVPFYPPYAYGRVPRFRRPMRYRPY

SEQ ID NO: 7777 - protein, 353 aa, Triticum aestivum
MGSISDDEAACIYAMQLAAAAVLPMTLKNAIELGMIEILVGAGGKMLSPSEVAAQLPSTANAEAPAIVDRMLRLLASHNVVSCEVEEGKDGRLARRYGTAPVCKWLSPDEDGVSLAPMVLLNDKVMLESWYHLKDTVLNGGLPFEKAYGMTAFDYQGTDPRFNRVFNEAMKTHSMIITKKLLEFYKGFDGVGTLVDVGGGVGATIHTILCRYPSIEGVNFDLPHVISEAPSFAGVHHIGGDMFKKVPSGDAILMKWILHDWNDEHCTTLLSNCYDALPAHGKVVIVEYILPVKPDETATAQRSFEADMIMLTHTPGGKERYLREYEELARSAGFASVKATYVYSNIWVIELNK

SEQ ID NO: 7778 - protein, 509 aa, Glycine max
  misc_feature (282)..(282): Xaa can be any naturally occurring amino acid
  misc_feature (288)..(288): Xaa can be any naturally occurring amino acid
  misc_feature (296)..(296): Xaa can be any naturally occurring amino acid
MGSDNHQNLEFLKEIGLGSSNIGSYINGQWKATGSSVTSVNPSNNQSIAQVTEATLQDFEEGLQACSEAAKTWMTIPAPKRGEIVRQIGEALRAKLDPLGRLVSLEMGKILPEGIGEVQEIIDMCDYCVGLSRQLNGSIIPSERPDHMMFEVWNPLGIVGVITAFNFPCAVLGWNACIALVCGNCVVWKGAPTTPLITIAVTKLVAEVLERNKLPGAIFTSFCGGADIGQAIAKDTRIPLVSFTGSSKVGLMVQQTVNERFGKCLLELSGNNAIIVMDDADXSNWLYXYFVCSCGXAGQRCTTCRRLFLHESIYADVLDQLIGVYKQVKIGNPLEKGTLVGSLHTPTSVENFQKGISVIKSQGGKILTGGSVLESAGNFVQPTIVEISPDAPVVKEELFGPVLYVMKFQTLEEAIALNNSVPQGLSSSIFTQRPGTIFKWIGPRGSDCGIVNANIPTNGAEIGGAFGGEKATGGGREAGSDSWKQYMRRSTCTINYGSELPLAQGINFG

SEQ ID NO: 7779 - protein, 225 aa, Zea mays
  misc_feature (204)..(204): Xaa can be any naturally occurring amino acid
MAISTDSRGEEKPSQHSQEEKRWVLSDFDVGKALGRGKFGHVYLAREKRSSHIVALKVLFKSQLKQSQVEHQLRREVEIQSHLRHPNILRLYGYFYDQTRVYLILEHAAKGELYKELQRCKHFSERRSATYIASLARALIYLHGKHVIHRDIKPENLLVGLQGELKIADFGWSVHTFNRRRTMCGTLYYLPPEMVEKTEHHYHXVDICELGHPMLLDFLYGLPTF

SEQ ID NO: 7780 - protein, 527 aa, Zea mays
MAMAMMAMRRAVALGARHIPAAAASSFRVVSLRHMSADAGAAMEKIRAAGLLRTQGLIAGQWVDAYDGKTIEVQNPATGEVLANVSCMGSRETSDAIASAHSTFYSWSKFTASERSKALRKWYDLIISHKEELALLMTLEQGKPMKEALGEVNYGASFIEYFAEEAKRIYGDIIPPTLSDRRLLVLKQPVGVVGAITPWNFPLAMITRKVGPALACGCTVVVKPSEFTPLTALAAADLALQAGIPAGALNVVMGNAAEIGDALLQSTQVRKITFTGSTAVGKKLMAGSANTVKKVSLELGGNAPCIVFDDADIDVAVKGSLAAKFRNSGQTCVCANRILVQEGIYEKFAKAFIQAVQSLKVGNGLEESTSQGPLINEAAVQKVEKFINDATSKGANVMLGGKRHSLGMSFYEPTVVGNVSNDMLLFREEVFGPVAPLIPFKTEEEAVHMANDTNAGLAAYIFTKSIPRSWRVSESLEYGLVGVNEGIISTEVAPFGGVKQSGLGREGSKYGIDEYLELKYICMGNLG

SEQ ID NO: 7781 - protein, 462 aa, Bacillus cereus ATCC 10987
MTFSKSTTDKPSYTYEELSEKNKAYVWHPFTQMKDYLEEDPVIIERGEGRKLYDVNGNEYWDGVSSIWLNVHGHQVPELDEAIREQLNKISHSTMLGLANVPSILLAEKIIEVVPEGLKKVFYSDSGSSAVEIAIKMAFQYWQHKGKPKKQRFVTLKEAYHGDTIGAVSVGAIDLFHQVYSSLLFEAIKMPYPYTYRSPYGNNKEEIVKKHLEEMEELLKDKHEEIAAIIVEPLMQGAGGMITMPKGYLKGLRNLCTKYNVLFITDEVATGFGRTGKMFACEHENVTPDILTAGKGLTGGYLPVAITVTTDEIYNAFLGGYEEQKTFFHGHSYTGNPLGCAVAIANLELYEKTNLIEEVARKTEYVATQLEDLFAYKHVGDIRQCGLMVGIELVKNKETKEAFEWTERVGVQVCKRSRELGMILRPLGNTIVFMPPLASTIDEIDDMLRILYKAISDVTEGE

SEQ ID NO: 7782 - protein, 444 aa, Thermococcus kodakaraensis
MIRVYTISGYEEVGKNMTAVGYSDGRKEEVVIIDMGIRLDRVLIHEDVNIQQFPTKELQRLGAIPDDSILRNKKVVAITFTHGHLDHIGAVGKIAPHYPDVPIYGTPYTIKLAKSEVKSEQYFEVKNPMYETEFGEIVQVSENLAIEFVRITHSIPQAAMVVVHTPEGAVVHTGDFKFDNNNPLGERPDYKRLKELGKEGVKVLIAESTRVAEPTKTPSEAVAQMLLEDFFLYEGMDEKGLIATTFASHIARLQELIWIANKMGRQAVFVGRSLAKYTGIAKQLGLIKMKGARAVRSPNAIKKVLAEVSGARENYLLVVTGHQGEPGAVLTRMANGELYDIGKQDTVVFSAGTIPNPLNRAQRYILETKLKMKGVRMIKDLHVSGHASREDHRYLLRMLNPENIVPAHGEFRMLTHYAELAEEEGYLIGRDVFVSRNGYTVEIE

SEQ ID NO: 7783 - protein, 325 aa, Schizosaccharomyces pombe
MSIKEFAKNAREAYFTLPNGDKIPSIGLGTWRSGKDETKNAVCAALKAGYRHIDTAHIYGNEKEIGEGIRESGVPRTDIWVTSKLWCNAHRAGLVPLALEKTLQDLNLEYIDAYLIHWPFALLSGPEELPRNEKGELIYEDVPIEETWQAMEELLETGKVRYIGISNFNNEYLDRVLKIAKVKPTIHQMELHPYLPQTEYLEKHKKLQIHVSAYSPLANQNDAYNSDISKLIEHKTLVDIANARGEGITPANIAISWAVKRGTSVLPKSVNESRIVSNFLYIPLTDKEMEAINNIGVVRRFSHGKFAPKPMFVGLQDGTPKQTHA

SEQ ID NO: 7784 - protein, 172 aa, Burkholderia cepacia R1808
MATFATAPARAEGPFTVTSTDLAPGGRVGAAQLFDRGECNGENRSPQLSWRNPPPGTRGYAVTIFDPDAPGHGWWHWAVADLPATVTSLPANASASGFLRRIGASEARNDFGTDGYGGPCPPPGKPHRYVITVYALKGTDLRVAQGRPAPMFEHEIGTLTIGTAQLTVTYGR

SEQ ID NO: 7785 - protein, 503 aa, Nierembergia sp. NB17
MMQLSTELAIAAIIFLLAHILISKTSGRRLPPGPRGWPVIGALPLLGDMPHVSLAKMAKKYGPIMYLKVGTCGMAVASTPHAAKAFLKTLDINFSNRPPNAGATHFAYNAQDMVFAPYGPRWKLLRKLSNLHMLGGKALEDWSNVRANELGHMLKSMLDLSREGQRVVIADMLTFAMANMIGQVILSKRVFVDKGVEVNEFKNMVVELMTVAGYFNIGDYIPCLAWLDLQGIEKGMKILHKKFDVLLTKMFDEHKTTSHEREGKSDFLDMVMANRDNSEGERLSTTNIKALLLNLFTAGTDTSSSVIEWALTEMLKNPSILKKAQVEMDQVIGKNRRLLESDISNLPYLRAICKETFRKHPSTPLNLPRISSESCEVDGYYIPKNTRLSVNIWAIGRDPDVWENPLKFNPERFLSGKYAKIDPRGNDFELIPFGAGRRICAGTRMGIVMVEYILGTLVHSFDWKLPSDVIELNMEEVFGLALQKAVPLEAMVTPRLPLNVYAP

SEQ ID NO: 7786 - protein, 185 aa, Zea mays
  misc_feature (161)..(161): Xaa can be any naturally occurring amino acid
MTKAATIYGSKTQSDALRPGPLRPENIFRNKFPTYKNGSNGIVIKLADGPEIPPLKEIVAKETAYLLDRRQRLSVRELAMKFEKGLSTATLLSNEVKWRQVVLMERDILLKNLKSVLESLRGQVTGKTKDEIEESISMVEILTVQLSKREAELVQQKEEVXKLAKSLKQMCFTLLYNLCKHVLVI

SEQ ID NO: 7787 - protein, 250 aa, Suaeda salsa
MGKSYPTVSEENQKSIEKAKKKLRGLISEKHCAPIMLRLAWHSAGTFDVQSKTPGPFGTMRHQAELAHGANNGLDIALRLLEPIKEQFPEISFADFYQLAGVVAVEVTGGPEIPFHPGREDKPEPPQEGRLPDATKGCDHLRDVFIKQMGLTDQDIVALSGGHTLGRCHKDRSGFEGPWTPNPLVFDNSLLKELLSGEKDGLLQLPSDKALLADPVFRPLVEKYAADEDAFFADYSDAHLKLSELGFADA

SEQ ID NO: 7788 - protein, 154 aa, Sorbaria sorbifolia
SIGLSNYELFLTRDCLSYAKIKPAVSQFETHPYYQRETIVRFCQKHGVVPVAHTPLGGATANTKYFGSVSPLGDPVLNELAKKYQKSVAQICLRWNIERNTPVVPKSTKVERLKENFQALDFKLEKEDIDLINTIDRKSRTTLPSLSWGLDVYA

SEQ ID NO: 7789 - protein, 347 aa, Escherichia coli CFT073
MKNSKAILQVPGTMKIISAEIPVPKEDEVLIKVEYVGICGSDVHGFESGPFIPPKDPNQEIGLGHECAGTVVAVGSRVRKFKPGDRVNIEPGVPCGHCRYCLEGKYNICPDVDFMATQPNYRGALTHYLCHPESFTYKLPDNMDTMEGALVEPAAVGMHAAMLADVKPGKKIIILGAGCIGLMTLQACKCLGATEIAVVDVLEKRLTMAEQLGATVVINGAKEDTIARCQQFTEDMGADIVFETAGSAVTVKQAPYLVMRGGKIMIVGTVPGDSAINFLKINREVTIQTVFRYANRYPVTIEAISSGRFDVKSMVTHIYDYRDVQQAFEESVNNKRDIIKGVIKISD

SEQ ID NO: 7790 - protein, 222 aa, Arabidopsis thaliana
MDSLAISPRKLRSDLYSYSYQDDSNTVPLVISVLSSLIERTLARNERISRSYGGFGKTRVFDCREIPDMTIQSYLERIFRYTKAGPSVYVVAYVYIDRFCQNNQGFRISLTNVHRLLITTIMIASKYVEDMNYKNSYFAKVGGLETEDLNNLELEFLFLMGFKLHVNVSVFESYCCHLEREVSIGGGYQIEKALRCAEEIKSRQIVQDPKHHHHHQFSRIML

SEQ ID NO: 7791 - protein, 394 aa, Burkholderia cepacia R18194
MARVKATAPVLAVHGATITKHFYQRMFARHPELKNLFNQTHQKTGSQPETLAKAVYAYAANIDNLGALGGAVTKIAHKHASLNIRPEHYPIVGENLLASIVEVLGDAVDAETLEAWRVAYGQLAQILIGVEADLYAGAAWSGFRPFKVERKVRESDEITSFYLTPADGGAAPTFEPGQYITVKRFVGDLGVDQPRQYSLSDAPHGKWLRISVKREAGKPEVIPAGKVSTLMHDGVEEGAIVEVTAPMGEFSLKRGVETPVVLISGGVGITPMMSMASTLIAEGSQREVRFVHACRSGAVHAFRDWLNDTVRDHANVKRTVLYELVGPNDRAGIDYDLEGRLTPERVQQYALVPDADYYICGPIGFMKAQRDALVALGVAPERVNTEIFGSGALE

SEQ ID NO: 7792 - protein, 149 aa, Chamaebatiaria millefolium
NYELFLTRDCLSYAKIKPAVSQFETHPYYQRETIVRFCQKHGVCPVAHTPLGGATANTKYFGSVSPLGDPVLNEVAKKYQKSVAQICLRWNIERNTAVVPKSTKVERLKENFQVLDFKLEKEDIDLINTIDRKSRTTLPSLSWGLDVYA

SEQ ID NO: 7793 - protein, 54 aa, Triticum aestivum
MGSETFVEILLAILLPPVGVFLRYGIGVEFWICLLLTVLGYIPGIIYAIFVLVA

SEQ ID NO: 7794 - protein, 293 aa, Gibberella zeae PH-1
MAPDVCTFTLNTGDEMPAVGFGTWNIPRSQAAKAVETALRAGYRHIDTALAYGNEKEVGAGIRASGVPREEIWVSGKLRNNWHKHARKCLQTSLKNLGVGYLDLYLIHWPCSRDADNPAICYEDWDYVDTWMEMEELLDEGKVLNIGVSNFGIQQLERLLTSTEIVPAVNQIELHPCNPSPKLVAYCNNRGIHSEGYSCLGSGHSALHRNKTLRDIADAKEKTVQQVLLQWGIEKGWGVVCKSVTPSRIKSNFELSGWELTDDDMEAIDGIKKRFKAVGDGFLPHRVFFGDDE

SEQ ID NO: 7795 - protein, 358 aa, Escherichia coli CFT073
MKALARFGKAFGGYKMIDVPQPICGPEDVVIEIKAAAICGADMKHYNVDSGSDEFNSIRGHEFAGCIAQVGEKVKDWKVGQRVVSDNSGHVCGVCPACEQGDFLCCTEKVNLGLDNNTWGGGFSKYCLVPGEILKIHRHALWEIPDGVDYEDAAVLDPICNAYKSIAQQSKFLPGQDVVVIGTGPLGLFSVQMARIMGAVNIVVVGLQEDVAVRFPVAKELGATAVVNGSTEDVVARCQQICGKDNLGLVIECSGANIALKQAIEMLRPNGEVVRVGMGFKPLDFSINDITAWNKSIIGHMAYDSTSWRNAIRLLASGAIKVKPMITHRIGLSQWREGFDAMVDKTAIKVIMTYDFDE

SEQ ID NO: 7796 - protein, 149 aa, Exochorda racemosa
NYELFLTRDCLSYAKIKPAVSQFETHPYYQRESLVRFCQKHGVVAAAHTPLGGATANTKYFGSTSPLGDPVLHDVAKKYQKSVAQICLRWNIERNTPVIPKSSKVERMKENLQVLDFNLEKEDIELINGIDRKSRTTLPSLSWGLDVYA

SEQ ID NO: 7797 - protein, 503 aa, Panax ginseng
MAIRIPTRQLFIDGEWREPAKKNRIAIINPATEQIIGNIPAATSEDVDIAVEAARRALARNGGSDWASASGAYRAKYLRAIAAKITERKSELAKLETLDCGKPLEEAAWDIDDVAACFEYNADLAEALDGKQKSPISLPMETFKSYILKEPIGVVGLITPWNYPMLMATWKVAPALAAGCAAILKPSELASVTCLELGEVCKEVGLPPGILNILTGLGPEAGAPLASHPHVDKIAFTGSTATGSKIMTAAAQQVKPVTLELGGKSPILVFEDVDLDKAAEWTIFGCFWTNGQICSATSRLLVHESIAAEFLDKLMKWTKNIKISDPLEEGCRLGPVVSGGQYEKVMESISTAKKEGATILCGGARPKHLEKGFFIEPTIISDVTTSMQIWREEVFGPVLCVKTFRTEDEAIELANDTRYGLGGAVISNDLERCERVTKALQSGIVWINCSQPCFCQAPWGGKKRSGFGRELGEWGLDNYLSVKQVTQYVSDEPWGWYQSPSKL

SEQ ID NO: 7798 - protein, 204 aa, Zea mays
  misc_feature (110)..(110): Xaa can be any naturally occurring amino acid
MAAAAAGATRRAASSLASRCLLSRPAASPAAVPSALRRADGARGLLPGLLQRFGTAAAAEEPISPSVQVGETQLLINGKFVDAASGKTFPTLDPRTGEVIARVSEGDAEXVDRAVVAARKAFDEGPWPKMTAYERSRILLRFADLIEKHNDEIAALETWDNGKPYEQVPHIEVPMLARLMRYYAGWTDKIHGLIVPADGPSYLQ

SEQ ID NO: 7799 - protein, 153 aa, Nicotiana clevelandii
MKMIVLRSSDGETFEVEESVALESQTIKHMIEDDCADTSIPLPNVTSKILAKVIEYCKRHVDAASKTEDKAVEDDLKAFDADFVKVDQSTLFDLILAANYLNIKSLLDLTCQTVADMIKGKTPEEIRKTFNIKNDFTPEEEEEVRRENAWAFE

SEQ ID NO: 7800 - protein, 297 aa, Glycine max
  misc_feature (113)..(113): Xaa can be any naturally occurring amino acid
MLLLERQRILLRAADLLEKHNDELAALETWDNGKPYEQAAKIEVPMLVRLIRYYAGWADKIHGLTVPADGPYHVQTLHEPIGVAGQIIPWNFPFLMFCCCVGSRTFVHESVSXVVEKAKARAFKRVVGDPFKGGIEQGPQIDSDQFEKILRYIRSGVESGATLETGGDKLGNKGFYIQPTVFSNVKDGMLIARDEIFGPVQSILKFKDLGEVVQRANNTRYGLAAGVFTTNMDTAYTLTRALRVGTVWINCFDTFDAAIPFGGYKMSGQGREKGEYSLKNYLQVKAVVNPLKNPAWL

SEQ ID NO: 7801 - protein, 278 aa, Silene latifolia
EAHSLKVEKILFQGKSKYQDVIVFQSSTYGKVLILDGVIQLTERDECAYQEMISHLPLCSIPNPKKVLVIGGGDGGVLREVARHSSVEHIDICEIDEMVVTVSKEFFPEVAVGYDDPRVNLHIGDGVAFLKVAPEGSYDTVIVDSSGPIGPAKELFEKPFFESVAKALRPGGVVCTQAESIWLHMHIIENIVSSCREIFKGSVNYAWTTVPTYPSGVIGFMVCSTEGPAVDFKNPVNPIDKTEDEKRPLKFYNAEIHSAAFCLPSFAKRVIEAKAKST

SEQ ID NO: 7802 - protein, 118 aa, Brassica napus
MYYQLTKSSYMDSLKILEADIEHANGLAAEIPMGKSGVRLQVKLVCSNLAPFFIFLLQWMDFSCLLPRYFDFFHILIYKVRADGRWNRSRYGRKATIREFYCKFNTFVCVVYTIGLVL

SEQ ID NO: 7803 - protein, 430 aa, Zea mays
MAYAAGRKKRVGRYEVGRTIGQGTFAKVKFAVDADTGAPVAMKVLDKETIFAHRMLHQIKREISIMKIVRHPNIVRLNEVLAGKTKIYIILELVTGGELFDKIPRYGKLRENEARKYFQQLIDAIDYCHSKGVYHRDLKPQNLLLDSRGNLKLSDFGLSTLSQNGVGLVHTTCGTPNYVAPEVLSSNGYDGSAADIWSCGVILYVLMAGYLPFEENDLPHLYEKITAAQYSCPYWFSPGAKSLIQRILDPNPRTRITIEEIREDPWFKKNYVTIRCGEDENVSLDDVQAIFDNIEDKYVSDEVTHKDGGPLMMNAFEMIALSQGLDLSALFDRQQEFVKRQTRFVSRKPAKTVVATIEVVAESMGLKVHSRNYKVFEVAPSLFMVDVRKVAGDTPEYHRFYENLCSKLCSIIWRPTEVSAKSTPLRTTTC

SEQ ID NO: 7804 - protein, 150 aa, Silene latifolia
FLKVAPEGSYDTVIVDSSGPIGPAKELFEKPFFESVAKALRPGGVVCTQAESIWLHMHIIENIVSSCREIFKGSVNYAWTTVPTYPSGVIGFMVCSTEGPAVDFKNPVNPIDKTEDEKRPLKFYNAEIHSAAFCLPSFAKRVIEAKAKST

SEQ ID NO: 7805 - protein, 443 aa, Zea mays
MESTGKILMERYEVGRLLGKGTFGKVHYAKNLESNESVAIKMMDKDKVLKAGLSEQIRREITTMRLVAHKNIVELHEVMATRNNIYFVMEYVKGGELFDKIGKSGKLTEAAAHKYFQQLIGAVDYCHSRGVYHRDLKPENLLLDENENLKVSDFGLSALSESKGQDGLLHTTCGTPAYVAPEVISKTGYDGAKSDIWSCGVVLFVLVAGYLPFRAPNMMEMYRKIQNGDFRCPSWFSHKLKKLLYKILDPSPDTRISVQKIKESTWFRKGPVETRTVKEKILSENDTTNAAPAVAMRRKKNVHEDVKPPTVTSLNAFEIISFSTGLDLSGLFIRKECKKETRFTSDKGAVSIISKLEDVAKALNLRVRKKDNGVVKIQGRKVGRKGVLEFDTEIFEITASYHLIEMKQTGGDSLEYKKLLEEDIRPALKDIVWAWHGDDQQQK

SEQ ID NO: 7806 - protein, 304 aa, Oryza sativa (japonica cultivar-group)
MGGFVKTQKTHAYFKRFQVKFKRRRQGKTDYRARIRLTNQDKNKYNTPKYRFVVRFTNKDITAQIVYATIAGDIVMAAAYSHELPRYGLEVGLTNYAAAYCTGLLLARRVLTLRGLDQEYEGNVEATGEDYYVEPADERRPFRALLDVGLIRTTTGNRVFGALKGALDGGLDIPHSDKRFAGFKKDEKQLDSDIHRKYIYGGHVADYMRSMAEEEPEKFQAHFSEYLKKGIDADGMESLYKKVHAAIRADPTMAKSTKKEPATHKRYNLKKLTYEQRKASLVERLNALNSSAGADDDDEEEDDE

SEQ ID NO: 7807 - protein, 304 aa, Oryza sativa (japonica cultivar-group)
MGGFVKTQKTNAYHKRFQVKFKRRRQGKTDYRARIRLTNQDKNKYNTPKYRFVVRFTNKDITAQIVYATIAGDIVMAAAYSHELPRYGLEVGLTNYAAAYCTGLLLARRVLKLRGLDQEYEGNIEATGEDYYVEPADERRPFRALLDVGLIRTTTGNRVFGALKGALDGGLDIPHSDKRFAGFKKDEKQLDSDIHRKYIYGGHVADYMRSMAEEEPEKFQAHFSEYLKKGIDADGMEALYKKVHAAIRADPTMAKSTKKEPATHKRYNLKKLTYEQRKASLVERLNALNSSAGADDDDEEEDDE

SEQ ID NO: 7808 - protein, 205 aa, Arabidopsis thaliana
MAEGSMRPPEFNQPNKTSNGGEEECTVREQDRFMPIANVIRIMRRILPAHARISDDSKETIQECVSEYISFITGEANERCQREQRKTITAEDVLWAMSKLGFDDYIEPLTLYLHRYRELEGERGVSCSAGSVSMTNGLVVKRPNGTMTEYGAYGPVPGIHMAQYHYRHQNGFVFSGNEPNSKMSGSSSGASGARVEVFPTQQHKY

SEQ ID NO: 7809 - protein, 309 aa, Triticum aestivum
  misc_feature (102)..(102): Xaa can be any naturally occurring amino acid
MAFLNMEQHTWAFTFGILGNIISLMVFLSPLPTFYRVYRKKSTEGFQSTPYLVTLFSCLLWMYYAFLKSGSELLLTINAVGCVIESLYIAMYLVYAPKSARXLTAKLFIGLDVGLFGLIALVTMLASHGPLRVQVVGWICVAVALGVFAAPLSIIRLVIRTKSVEFMPFSLSFFLVLSAVIWFAYGALKKDIFVAMPNVLGFLFGVAQMALYMAYRNKKPATVVLVHEEMKLPEHVKEVAGGAKPQGGAPTEGRISCGAEVHPIDVLPAVADEQAAAAADEDVIRDDQNMLRPEQPAVIKPDVAIVVQA

SEQ ID NO: 7810 - protein, 177 aa, Triticum aestivum
  misc_feature (53)..(53): Xaa can be any naturally occurring amino acid
  misc_feature (66)..(66): Xaa can be any naturally occurring amino acid
  misc_feature (73)..(73): Xaa can be any naturally occurring amino acid
  misc_feature (91)..(91): Xaa can be any naturally occurring amino acid
  misc_feature (98)..(98): Xaa can be any naturally occurring amino acid
  misc_feature (135)..(135): Xaa can be any naturally occurring amino acid
MSDTDEHHFESKADSGASKTYPQQAGAIRKGGHIVIKARPCKVVEVSTSKTGXKHGHAKCHFVAIXDIFNGKXSLEDIVPSSHNCDVPHVXRQRYQLXIDITGWMDMSTLPTGEWATPKDDLELPNRMISAWGSXDGFADGKDWILSVIPPWGERTSLPVKETVVASNTSAWPTAIL

SEQ ID NO: 7811 - protein, 349 aa, Mesorhizobium sp. BNC1
MVKPTSRLGRTIFVNESNLLKNGSGTLCPIDPEISLFLERLREGWSRHPPLSAVSSAEARWIAEIVREPFRQGGPVMAETLELLIPTRHGDMRARLYDPGLGEDAPVLIYLHGGGFTLFSINTHDRLMREYAHAARVKVLGLDYYLAPEHKYPVALDQVEDTLEWIGSANLGVDMQRLALGGDSAGGNLSLAAAIRMRDKGRPAAVKGLLFNYAGFATDCSDEAEALHGGPGSVMDRDEVRSFIRNYTRSPEDMKNPEVNLLDANVDHLPPSFFVIADRDIIAENSLAMAGKLRAAGNAMTCKIYRGATHSFLEAMSMSALARQAIADGADFIARILNTDAKYGLRAAS

SEQ ID NO: 7812 - protein, 364 aa, Nicotiana tabacum
MESSTKSQIPTQSEEERNCTYAMQLLSSSVLPFVLHSTIQLEVFEILAKSNDTKLSASQIVSQIPNCTKPEAPTMLNRMLYVLASYSLFTCSIVEDEKNNGGQKRVYGLSQVGKFFVKNENGASMGPLLALLQNKVFINSWFELKDAVLEGGVPFDRVHGVHAFEYPKSDPKFNDVFNKAMINHTTVVMKKILENYKGFENLKTLVDVGGGLGVNLKMITSKYPTIKGTNFDLPHVVQHAPSYPGVEHVGGDMFESVPEGDAIFMKWILHDWSDSHNLKLLKNCYKALPDNGKVIVVEAILPVKPDIDTAVVGVSQCDLIMMAQNPGGKERSEEEFRALATEAGFKGVNLICCVCNFWVMEFCK

SEQ ID NO: 7813 - protein, 495 aa, Bradyrhizobium japonicum USDA 110
MMSVAYDFAHSPASEFMARPQHLLIDGRRVPASSGRTFKSLNPATGQVIATVAEGNEADVDHAVAAARRAFEGPWRTMRASERGQILLRWAELLKANAEEIIELESIDAGKPISATLRQDFPAAVDTLIYYAGWADKISGDVVPVRDDALTYTVREPVGVVAAIVPWNFPLMIGMWKLAPALACGCTIVMKPAELTSLSALRIAELALQAGLPAGVFNVVTGPGRVVGDALVNHPDVDKVTFTGSPGVGRGIMKGAAGNFKRVSLELGGKSANVIFDDADLEAASKAAASGIFFNAGQVCSAGSRVLVQEKAYDEVVERLAARAKSLKIGDPLDRKTALGPVISEKQMKSILDYVDIGQKEGASLVTGGTRVGERGYFISPAVFANVEHEMRISQEEIFGPVVSIIKFRDEADALRIANGTAYSLAAGVWSRDIGKLQRFAKRARAGTVWMNTYGYTDVRLPWGGERDSGLGREHGTAALDNFTEPKAVWMNLAV

SEQ ID NO: 7814 - protein, 450 aa, Zea mays
  misc_feature (223)..(223): Xaa can be any naturally occurring amino acid
  misc_feature (239)..(239): Xaa can be any naturally occurring amino acid
MDIKDMKTRGKTLTERYEMGKLLGKGAFGKVHYARDLESNQGVAIKIMDKDRVLKAGLSEQVKREITTMRLVEHKNIVRLHEVMATRNKIYIIMEYAKGGELLDKVKRSGRLTEADTHRYFQQLIGALDHCHSRGVYHRDLKPENLLLDENGDLKVSDFGLSAFSESRRTDGLLHTVCGTPVYIAPEVIKKTGYDGAKSDIWSCGVVLFVLAAGYLPFQGPNXMEIYRKIHDRDFRCPXWFSHKLKRLLYKILNPNPSMRPSIQEIKESTWFRKGPREISAVNEKVLSENATTTNAAPVLAARRKEIAHEDMKSLVATNLNAFEIIALSAGLDLSGLFIKECRKETRFTSDKPALAIIAKLEDVAKALNLRIRKKDNNTVSIQGRKEGGNGVLKFDTQIFEITPSCHLVQIKQTSGDLLEYEKLLEEGIRPGLKDVVSAWHGDDLQQKQK

SEQ ID NO: 7815 - protein, 1575 aa, Streptococcus gordonii
MNKRKEVFGFRKSKVAKTLCGAVLGAALIAIADQQVLADEVTETNSTANVAVTTTGNPATNLPEAQGEATEAASQSQAQAGSKEGALPVEVSADDLNQAVTDAKAAGVNVVQDQTSDKGTATTAAENAQKQAEIKSDYAKQAEEIKKTTEAYKKEVEAHQAETDKINAENKAAEDKYQEDLKAHQAEVEKINTANATAKAEYEAKLAQYQKDLAAVQKANEDSQLDYQNKLSAYQAELARVQKANAEAKEAYEKAVKENTAKNAALQAENEAIKQRNETAKANYDAAMKQYEADLAAIKKAKEDNDADYQAKLAAYQAELARVQKANADAKAAYEKAVEENTAKNTAIQAENEAIKQRNAAAKATYEAALKQYEADLAAAKKANEDSDADYQAKLAAYQTELARVQKANADAKAAYEKAVEDNKAKNAALQAENEEIKQRNAAAKTDYEAKLAKYEADLAKYKKELAEYPAKLKAYEDEQAQIKAALVELEKNKNQDGYLSKPSAQSLVYDSEPNAQLSLTTNGKMLKASAVDEAFSHDTAQYSKKILQPDNLNVSYLQQADDVTSSMELYGNFGDKAGWTTTVGNNTEVKFASVLLERGQSVTATYTNLEKSYYNGKKISKAVFKYSLDSDSKFKNVDKAWLGVLPDPTLGVFASAYTGQEEKDTSIFIKNEFTFYDENDQPINFDNALLSVASLNRENNSIEMAKDYSGTFVKISGSSVGEKDGKIYATETLNFKQGQGGSRWTMYKNSQPGSGWDSSDAPNSWYGAGAISMSGPTNHVTVGAISATQVVPSDPVMAVATGKRPNIWYSLNGKIRAVNVPKITKEKPTPPVAPTEPQAPTYEVEKPLEPAPVAPTYENEPTPPVKTPDQPEPSKPEEPTYETEKPLEPAPVVPTYENEPTPPVKTPDQPEPSKPEEPTYETEKPLEPAPVAPTYENEPTPPVKTPDQPEPSKPEEPTYDPLPTPPVAPTPKQLPTPPVVPTVHFHYSSLLAQPQINKEIKNEDGVDIDRTLVAKQSIVKFELKTEALTAGRPKTTSFVLVDPLPTGYKFDLDATKAASTGFDTTYDEASHTVTFKATDETLATYNADLTKPVETLHPTVVGRVLNDGATYINNFTLTVNDAYGIKSNVVRVTTPGKPNDPDNPNNNYIKPTKVNKNKEGLNIDGKEVLAGSTNYYELTWDLDQYKGDKSSKEAIQNGFYYVDDYPEEALDVRPDLVKVADEKGNQVSGVSVQQYDSLEAAPKKVQDLLKKANITVKGAFQLFSADNPEEFYKQYVSTGTSLVITDPMTVKSEFGKTGGKYENKAYQIDFGNGYATEVVVNNVPKITPKKDVTVSLDPTSENLDGQTVQLYQTFNYRLIGGFIPQNHSEELEDYSFVDDYDQAGDQYTGNYKTFSSLNLTMKDGSVIKAGTDLTSQTTAETDAANGIVTVRSKEDSLQKISLDSPFQAETYLQMRRIAIGTFENTYVNTVNKVAYASNTVRTTTPIPRTPDKPTPIPTPKPKDPDKPETPKEPKVPSPKVEDPSAPIPVSVGKELTTLPKTGTNDSSYMPYLGLAALVGVLGLGQLKRKEDESN

SEQ ID NO: 7816 - protein, 315 aa, Azotobacter vinelandii
MRQHSIVVADTGDLEAIRRFAPEDATTNPSLILKAVQSGQYDGLVARVLGEVGGARSPEAAVDDACDRLVVALGERILASVPGRVSTEVNARLSFDREASIAKARRLVGLYEAAGIGRERILIKLAATWEGIRAAEVLEKEGIPCNLTLIFGFAQARACAEAGVHLISPFVGRILDWYRQADPATAYAPAEEPGVRSVRRIFDYFRRHAYPTVVMGASFRNVGEILALAGCDRLTISPALLEELAASEGVLAPALADTGEREARPAQRLGEAEFRWQMNEDAMATEKLAEGIRGFEADQLKLEALLRARLAGGVA

SEQ ID NO: 7817 - protein, 450 aa, Bacillus cereus ATCC 14579
MMKTKQTDELLAKDEQYVWHGMRPFSPNSTMVGAKAEGCWVEDIQGKRYLDGMSGLWCVNSGYGRKELAEAAYKQLQTLSYFPMSQSHEPAIKLAEKLNEWLGGEYVIFFSNSGSEANETAFKIARQYYAQKGEPHRYKFMSRYRGYHGNTMATMAATGQAQRRYQYEPFASGFLHVTPPDCYRMPEIEGQHIYDVECVKEVDRVMTWELSETIAAFIMEPIITGGGILMPPQDYMKAVHEMCQKHGALLISDEVICGFGRTGKAFGFMNYDVKPDIITMAKGITSAYLPLSATAVKKEIYEAFKGKGEYEFFRHINTFGGNPAACALALKNLEIMENENLIERSAQMGSLLLEQLKDEIGEHPLVGNIRGKGLLVGIELVNDKETKEPIDNDKIASVVNACKEKGLIIGRNGMTTAGYNNVLTLAPPLVISSEEIAFVVGTLKTAMERI

SEQ ID NO: 7818 - protein, 117 aa, Brassica napus
LEAGSKPEILLAMSCLCKGNNEAFLICNGFKDAEYVSLALLGRKLALNTVIVLEQEEELDLVIDLSHKMNVRPVIGLRAKLRTKHSGHFGSTSGEKGKFGLTTTQIVRVVRKLSEAC

SEQ ID NO: 7819 - protein, 500 aa, Gibberella zeae PH-1
MSDLYVNLEAPNGVKYRQPTGLFINNEFVPGSSTQKITSIDPATEKEIATVHAANADDVDKAVKAAYDAFRNPSWKKLPPPQRGVLMNKLADYIEERTKIFATSEAWDNGKVYTDAEGGDVVEVINTIRYYAGWADKITGQTITANPNKLAYTLRQPLGVVAQIIPWNYPLAMAAWKIGPALACGNTIVMKAAEQTPLSILLLGEAIKAVGFPPGVFNALNGYGSEAGPALVEHPLVDKVAFTGSTATGARIMEMASKTLKNITLETGGKSPLLVFSDSDIDEAVKWSHMGIMSNQGQICTATSRLLVQDKVYDEFVQRFIETTKTVSKVGHQWDSETYQGPQVSKQQYDRILEYIQIGKSEGATLLAGGQPVDSSKKGFFIQPTVFGDVHHQMRVFREEIFGPVVVITKFSDEAEALKLANDTTYGLGAAVFTKDVERAHRVAAEIEAGMVWINSTQDSEPYIPFGGVKQSGIGRELGEAGLEAYSNTKSIHVNLGSRL

SEQ ID NO: 7820 - protein, 316 aa, Vibrio parahaemolyticus RIMD 2210633
MSNKLEQLRKLTTVVADTGEIDAIKKYQPEDATTNPSLILKAAQIAEYAPLIDASIEYAKAQSNDKAQQVQDTCDMLAVNIGKEILKTIPGRISTEVDARLSYDMEGSVAKARQLVKMYNDAGITNDRILIKLASTWEGIRAAEILEKEGINCNLTLLFSFAQARACAEAGVFLISPFVGRIMDWYKAKEGRDFEASEDPGVLSVTKIYNYYKEYGYKTVVMGASFRNIGEILELAGCDRLTIAPALLAELEAAEGEVVEKLVDSKGAAERPAPMTHAEFLWEHNQDPMAVEKLAEGIRNFAVDQGKLEAMIEAKL

SEQ ID NO: 7821 - protein, 215 aa, Streptococcus agalactiae NEM316
MKYFLDTADVSEIRRLNRLGIVDGVTTNPTIISREGRDFKEVINEICQIVDGPVSAEVTGLTCDEMVTEAREIAKWSPNVVVKIPMTEEGLAAVSQLSKEGIKTNVTLIFTVAQGLSAMKAGATFISPFVGRLEDIGTDAYALIRDLRHIIDFYGFQSEIIAASIRGLAHVEGVAKCGAHIATIPDKTFASLFTHPLTDKGIETFLKDWDSFKKK

SEQ ID NO: 7822 - protein, 168 aa, Avena clauda
VMASSATSVAPFQGLKSTAGLAVSRRSNAGLGSVSNGGRIRCMQVWPIEGIKKFETLSYLPPLSEEALLKQIDFLIRSKWVPCLEFSKVGFIFRVHGSTPGYYDGRYWTMWKLPMFGCTDASQVIKEVEEVKKEYPDAYVRIIGFDNIRQVQCVSFIAFKPPGCEESG

SEQ ID NO: 7823 - protein, 494 aa, Gibberella zeae PH-1
MAENYHKEVISGLKNKSLFIQDAFINGQWVAKENKFDVFEPSTATVLGQVANCALEDFQTAIKSADVAQTKYFDSTTGASRGAMLRKWYDLVLANQEDLAKILSLENGKTYSEALGEVIYSASFISWFAEEATRSYGVTIPSSAPHTTLMTIREPVGVCGIITPWNFPAAMITRKIAPALAAGCSVVIKPPSETPYSALAFTKLAIEAGLPPATIQVLPTRDRQAATELATNPLVKKISFTGSTGVGKYLAKLAAGTLKKLSLELGGNAPFIVFEDADLDLAAEGAMFCKFRCSGQTCVCANRLYVQKSVAKEFTAKLVEKVNALKMGGGLDKTTTQGPLVNKSAIDKVKEHIADATSKGAKIATGGSTPDSPGFFHQPTVLTGVTQEMAVAKDETFGPLAPVFEFDTEEDAIRLANDTEFGLAGYFFSKDISRVMRVAHKMQVGMVGANTGKISAAEAPFGGVKESGYGKEGSLYGMAEYQNIKSITIGNLNN

SEQ ID NO: 7824 - protein, 296 aa, Zea mays
MAVATESRGSEDRASAHANQEKRWVLSDFEVGKPLGRGKFGHVYLAREKRSSEIVALKVLFKSQLKQSQVEHQLRREVEIQSHLRHPNILRLYGYFYDQTRVYLILEYAAKGELYKELTRCKHFSERRTATYVASLARALIYLHGKHVIHRDIKPENLLVGVQGEIKIADFGWSVHTFNRRRTMCGTLDYLPPEMVEKAEHDYHVDIWSLGVLCYEFLYGVPPFEAKEHSETYRRIVKVDLKFPLKPFVSPAAKDLISQMLVKSSAQRLPLHKVLEHPWIVQNADPSGVYREGRSI

SEQ ID NO: 7825 - protein, 182 aa, Triticum aestivum
MAGVGRNMVAPLLVLNLIMYIIVIGFASWNLNHFINGLTNRPGVGGNGATFYFLVFAILAGVVGAASKLAGVHHVRTWRGDSLATSASSALVAWAITALAFGLACKEIHIGGYRGWRLRVLEAFVIILMFTQLLYVLALHSGLFGNQFGNHAGAGGYGAEHGAYGAGDPHNKGMGTGGVARV

SEQ ID NO: 7826 - protein, 350 aa, Azotobacter vinelandii
MKAVMAYAPGDYRLEEVAVPKAGPGEIIAKVEACGICAGDIKSFGGAPSFWGDETQPAYIKAPMIPGHEFIAHIVELGKGVEGYELGDRVISEQIVPCWNCRFCKRGHYWMCQKHDLYGFQNNVNGAMAEYIRFTKESINYKVPRDLPIEKAVLIEPYACSMHAVQRAQIQFGDVVVLAGAGTLGLGMIGAAKKAGPGKLVVMDLFEDRLELAKKFGADLVINPAKEDPVARIKEITDGYGCDVYIEATGHPKSVEQGLSMIRNLGRFVEFSVFKDPVTVDWSIISDRKELDVLGAHLGPYCYPLVIEGIADGSLPTEGVVTHNFPLERFMDGFKLAMSGKDSLKVILTP

SEQ ID NO: 7827 - protein, 317 aa, Methanosarcina thermophila
MDFEASAKILTTPVKGAKIVSNMTVDELVREYAGCAFGAGRLAKAVDIYYEMLASEKTTKFFGLAGAMTPAGMRNIIADLIRDGYIDVLVTTGANMVHDTVEALGLHHYKGSDCTNDIQLRHECIDRIYDVYLPDQHFTDLEEFLQGVYAGLPQEKLSIRQVLTEIGKNLDDDSSILKTAAEMGVPVYCPALQDSVIGLQAWLYKEGNPLHVDAFADMHEFMEICFETESAGAMLLGGGVPKNYILQSMLVTPRSFDYAIQLTMDHPETGGLSGATLDEAQSWGKVGENAKSVTVYADSTITLPLIVSAVRTRLSKR

SEQ ID NO: 7828 - protein, 1008 aa, Chlamydomonas reinhardtii
MPHEFKTAVVWFRRDLRVDDNPALVAALAAAPNVIPVFIWAPEEEGQFQPGRCSRWWSKHSLVDLQQALAALGSRLVIRRSTDSTAALLQLVTELGAEAVFFNHLYDPISLMRDHDCKRGLTAAGVAHRTFNGDMLYEPWDVLDPNKQPYSTFDDFWNSVRAMPVPPPFPVSAPASMPAVPAAVPSMTVAEVDWFFTPEQEASSDQLKFKWKPGVGGAISELEHFLAERLTEFEHDRAKVDRDSTSRLSPWIHIGSISVRYIFYRVRQCQAEWLAAGTDRAQSCDDFLQQMGYREYSRYLAFHFPFIHERSLLGHLRACPWRIDQHAFKAWRQGQTGYPIVDAAMRQLWSSGWCHNRGRVVAASFLVKDLLLPWQWGLKHYWDAQIDADLECDALGWQYVSGGMSDAHPFSYMMDLEKEARRFDPDGEYVRRWLPALSRLPTEYIHAPWKAPASVLAAADVELGCNYPLPIITRSDAKANVDYACGVLEKSAVAPTGSESSGRYPYRAPTYPNAGGGGGASGGVDGAGSSGGNPTAAMGASGGAGPSSGTGTGGQGGAFRGRGDGGGSAPVSQQGGMLPPGVAVCVTAGTGGTQPDSRTVSGAHAGVSNSAGGVACDMPPPSHSHPRGGSSGVAAAGVGGVSGGPSSGGAAAPGATRKATAPGGAVFYHPGEASGEGHALLERILQQQRRQRGAANRQDGSGTNQPPPPVSMPGMLDAAGAAGGGGGGGGGLAGLPGVLQGLHGGAGATAAPAVAWAGRVAAGGVDDMDAVALWQQQQQLLQGGAAAFAFEQAMELLLARRRAGDGVSGFCGGDAPGRGGGDADEADGLMLEEDSEEVVSNTVDLHLSAFTGASCHRQSGTARGARAAERRLKKEAGSPEVTDGGGSAGAGCGEEDAMQCEDEEHGERGSPARRTADEEAQPPAEEGGAGSEDAGAAASEGDEAEGYGSESASEDNGGATPVEEADQMVVDGGGGGGGGGGGGGGRGGGQHKRRRSQLEGEQGDAAWE

SEQ ID NO: 7829 - protein, 101 aa, Triticum aestivum
  misc_feature (71)..(71): Xaa can be any naturally occurring amino acid
  misc_feature (82)..(82): Xaa can be any naturally occurring amino acid
  misc_feature (84)..(84): Xaa can be any naturally occurring amino acid
MAPTVMASSATSVAPFQGLKSTAGLPVSRRSNGASLGSVSNGGRIRCMQVWPIEGIKKFETLSYLPPLSTXALLKQVDYLIXRXKWVPCLEVQAKVGFIFR

SEQ ID NO: 7830 - protein, 414 aa, Vibrio vulnificus YJ016
MERYIMELTTTVSELRYALDTFFFLISGALVMWMAAGFAMLEAGLVRSKNTTEILTKNFCLYAIACTTYLVVGYNIMYVDNSEGGWLPSIGALIGSQAEGADHSLESDFFFQVVFVATAMSVVSGAVAERMKLWSFLLFSAILTAFIYPVEGYWTWGGGFLSAAGFSDFAGSGIVHMAGASAALAGVLLLGARKGKYGKNGEVYPIPGSNMPLATLGTFILWFGWFGFNGGSQLMVSDFENATAVGQIFLNTNAAAAAGAITALFVCKTTWGKADLTMILNGALAGLVAITADPLSPSPLYSVAIGAVAGALVVFSIVGLDKLKIDDPVGAISVHGVCGFFGLMVVPISNGDASFLSQLFGAVVIFAWVFGASLAVWAVLKATIGIRVSEEEEMEGMDMHDCGVGAYPEFVTVK

SEQ ID NO: 7831 - protein, 109 aa, Zea mays
QRTKARDNRCVNESIAMASRLVAAAASSSSLSSASPLARLISRRGLAGAADGHGSAKVPLWKDPLSPSKWKEEHFVLASLSMWGVIFYGGYKLFSGKKEAKTEAGSPQA

SEQ ID NO: 7832 - protein, 207 aa, Avicennia marina
MLRVMKKSFKDSLKALEADIQHANTLASDYPTEHDGACLQMRLSYSPCAHLFLFLVQWADCHLAGVLGLIRILIYKAYEDGKTTRSICERKASLREFYGVIFPSLLQLHRGITDVEERKQRVIIPQLNTRRRDEMAKGKLSEIEIEREEECAICMEMNSKVVLPSCSHSMCMKCYRNWRARFSVVPVLSRQSKEDEFWGALDLHKPL

SEQ ID NO: 7833 - protein, 139 aa, Glycine max
  misc_feature (69)..(69): Xaa can be any naturally occurring amino acid
  misc_feature (87)..(87): Xaa can be any naturally occurring amino acid
VQIYHLNLTIWTFVPDSLSINHVCPIIHIHPMKQKPSKRDLLSDLTCDSHLKIDMFINRQSNLPLHEMXRGSYYLKMLLPSAYEEAXGGAHNIFGNLSLITVTHSDGSHSFMLTRAVLVPSYGDVLTVMQHQTRLMFKT

SEQ ID NO: 7834 - protein, 479 aa, Erwinia carotovora subsp. atroseptica SCRI1043
MSTTQKRMYINGEFVENRSGKWIDVVNPATEQVISQVPEGSADDAKRAIDAAEAAQPSWEALPAVERGVWLHKIAAGIREREAELTDTIIAEGGKTHGLAQTEVLFTADYLDYMAEWARRYEGEIIQSDRPNENIFVFRKAIGVTTGILPWNFPFFLIARKAAPALITGNTIVIKPSEITPNNAVIFAEIIHKIGLPKGVINFVTGYGPTVGQELAGNPKVGMVSLTGSVAAGIATMTAAAQNVTKVSLELGGKAPAIVMDDADLDLAVKAIVSSRVINSGQVCNCAERVYVQKGIYDEFIIRIKAAMEQVTFGNTAEKKTLDMGPLISAAALQRVEDKVAKAVSQGAKVLLGGKSESGTGYFYPPTLLVNVTQEMPIMHEEVFGPVLPVATFDTLEDAIAMANDSEYGLTSSIYTQNINTAMKALKGLKFGETYINRENFEAMQGFHAGWRKSGVGGADGKHGLQEYLQTHVAYLQFH

SEQ ID NO: 7835 - protein, 139 aa, Brassica napus
  misc_feature (7)..(7): Xaa can be any naturally occurring amino acid
  misc_feature (9)..(10): Xaa can be any naturally occurring amino acid
  misc_feature (12)..(12): Xaa can be any naturally occurring amino acid
  misc_feature (16)..(18): Xaa can be any naturally occurring amino acid
  misc_feature (21)..(22): Xaa can be any naturally occurring amino acid
  misc_feature (29)..(29): Xaa can be any naturally occurring amino acid
  misc_feature (34)..(38): Xaa can be any naturally occurring amino acid
  misc_feature (45)..(49): Xaa can be any naturally occurring amino acid
  misc_feature (51)..(52): Xaa can be any naturally occurring amino acid
  misc_feature (54)..(54): Xaa can be any naturally occurring amino acid
  misc_feature (58)..(60): Xaa can be any naturally occurring amino acid
  misc_feature (62)..(63): Xaa can be any naturally occurring amino acid
  misc_feature (65)..(65): Xaa can be any naturally occurring amino acid
  misc_feature (82)..(82): Xaa can be any naturally occurring amino acid
  misc_feature (85)..(87): Xaa can be any naturally occurring amino acid
  misc_feature (91)..(91): Xaa can be any naturally occurring amino acid
  misc_feature (101)..(101): Xaa can be any naturally occurring amino acid
  misc_feature (111)..(111): Xaa can be any naturally occurring amino acid
  misc_feature (115)..(115): Xaa can be any naturally occurring amino acid
  misc_feature (118)..(119): Xaa can be any naturally occurring amino acid
  misc_feature (121)..(122): Xaa can be any naturally occurring amino acid
  misc_feature (127)..(127): Xaa can be any naturally occurring amino acid
  misc_feature (131)..(131): Xaa can be any naturally occurring amino acid
  misc_feature (133)..(133): Xaa can be any naturally occurring amino acid
MASSMLXSXXGXTSPXXXTMXXPFSGLKXSAAFXXXXXGNNDITXXXXXGXXVXCMKXXXPXXKXKFETLSYLPDLTEVELXKEXXXLLRXKWIPCVEFEXQHGFAYREHXSTPXYYXXRXXTMWKXPLFXCXDSAQVL

SEQ ID NO: 7836 - protein, 166 aa, Glycine max
  misc_feature (54)..(54): Xaa can be any naturally occurring amino acid
  misc_feature (68)..(68): Xaa can be any naturally occurring amino acid
  misc_feature (106)..(106): Xaa can be any naturally occurring amino acid
  misc_feature (134)..(134): Xaa can be any naturally occurring amino acid
MRTKKKEVAYSMISCPVVTTRQRAHGDRYWTVPFTGLKSMAGFPTRKTNNDITXIASNGGRVQCMQVXWPPIGKKKIETLSYLPDLDDAQLAKEVEYLIRKGWIPXLEFELEHGFEYREHNGSPGYYQGLYWTXWKLPMSGCTDASQVLKEHQEAKTAYPNGFIRI

SEQ ID NO: 7837 - protein, 335 aa, Bacillus cereus G9241
MKQTKLTGRIVVPSDPDYDVARMNLNLSIPKLPCIIVFCQNKNDVCNALKWARERHVPFRLRSGRHSYENFSLLNRGLIIDVSEMHRITVHTDKLTATIEAGANLGIVYKELWNYGVTIPAGTSASVGIVGLALGGGIGMLSRLFGLTCDQLIEVEMVQACGKFGAKIIRASEHENHNLFWACRGGGGGNFGIITSLTFRVHPIKNVSIFSITWEWEDFITAFQAWQNWAPYVDERLTSSIELFTKQQNKIEAQGEFVGSPSELHSLLSPLLETGTPSLFIDEVPYIKAVEFFNSGNIPENFKRSGSYVYKPIPLKGIQIMQYFLSHAPNKDASI

SEQ ID NO: 7838 - protein, 175 aa, Glycine max
PCSCLQEMFIFSFKNVFPLCLFVFFVENAYLALISGGDMTNGESKRVKLNRMKHLREAMEVLKDMFGPNIPDATDILVPRWWNNRFQRGSYSNYPVISNLQVVRDVKAPVGRIFFTGEHTSERFSGYVHGAYLAGINSSKELLEEMRKDNKRKNKSQSRVLEPLSALTECNIPRQ

SEQ ID NO: 7839 - protein, 316 aa, Glycine max
MALPYPFSYLLFLLLILLSSLPNISQATSRAPNRMLALVQNQPLVLKYHKGPLLKGNITLHLLWYGTFTPTQRSIVIDFLESLTSTSAPGAPSVSTWWQTTESYRGGPCTLVVGNQILDETYSLGKSLKNDHLVALASNPKLNSAPGDRVIHVILTAADVAVEDFCMNQCGTHGRGKNGNSEKIAYAWVGNSVTQCPGQCAWPFHQPLYGPQTAPLVAPNGDVGVDGMVINLATVLAGAVTNPFEDGYYQGPASAPLEAVSACTGIFGKGAYPGYAGNVLAENATGASYNAVGVRGRKFLLPAMWDPLTSTCKTLV

SEQ ID NO: 7840 - protein, 233 aa, Magnaporthe grisea 70-15
MADVDMTDAPGGAGPVAKKKGGDGAAGEGKKRFEVKKWNAVALWAWDIVVDNCAICRNHIMDLCIECQANQASATSEECTVAWGICNHAFHFHCISRWLKARQIPPPKSHDHHRSAFSSITMFCDVCSGFDPPPTGSHLTGWRLKNGQGGRTRANAEPLISLAYNNVAAQSPSLRQLNAIVGSKTGPDPTLGLSGLRSLPHKTSGCINSPLSLDSSRRKSCSIKIYKDLRRVW

SEQ ID NO: 7841 - protein, 334 aa, Bradyrhizobium japonicum USDA 110
MTSNPWLTLLGLINGFQVTQAIHVASTLRIADHLKGDSRSAEELAPLTQSHPGALYRLLRALAAVGVFEEDEDRRFALTPMGDCLRTDSATPIGAWAECVGSPYVWSTWGHLLHSIRTGENAFQSLNGKDIWNYRAERPEESAVFDRAMTEFSRGGAEAVIGAYDFSAFHHVVDVGGGRGLMLAAILTAHPRMQGTLFDQPGVIAGAEAVLEAHGVVDRCRMVSGSFFESVPEGGDAYVMRVVIHDWDDDEAIAILKACRRAMRETAKLVLIERIIAPANEVPATKFMDLHMLALPGGRERTRDEFSDLLAKSGFELTRVVPAGRINVIEARPY

SEQ ID NO: 7842 - protein, 279 aa, Bacillus cereus ATCC 14579
MKNLQSKAVLNNGVEMPWFGLGVFKVEEGPELVEAVKSAIKAGYRSIDTAAIYGNEKAVGEGIRAGIEATGIAREELFITSKVWNADQGYETTIAAYEESLKKLGLDYLDLYLVHWPSEGKYKDTWRALETLYKEKRVRAIGVSNFQIHHLQDVMKDAEIKPMINQVEYHPRLTQKELQAFCKEQGIQMEAWSPLMQGQLLDNETLQEIAEKHGKTTAQVILRWDLQNGVITIPKSTKEHRIIANADVFNFELTKEDMEKIDALNQNHRVGPDPDNFDF

SEQ ID NO: 7843 - protein, 169 aa, Oryza sativa
MASSATTVAPFQGLKSTAGMPVARRSNSSFGNVSNGGRIRCMQVWPIEGIKKFETLSYLPPLTVEDLLKQIEYLLRSKWVPCLEFSKVGFVYRENHKSPGYYDGRYWTMWKLPMFGCTDATQVLKELEEAKKAYPDAFVRIIGFDNVRQVQLISFIAYKPPGCEESGGN

SEQ ID NO: 7844 - protein, 153 aa, Glycine max
  misc_feature (112)..(112): Xaa can be any naturally occurring amino acid
  misc_feature (115)..(115): Xaa can be any naturally occurring amino acid
NFLYQWAFAIAAAGITSGSIAERTQFVAYLIYSSFLTGFVYPVVSHWFWSADGWASAISSADHVFSPGDRLLSTGVIDFAGSGVVHMVGGVAGFWGALIEGPRIGRFDHGGXRAXALRGHSASLVVLGTFMLWFGWYGFNPGSINKILVSYGN

SEQ ID NO: 7845 - protein, 278 aa, Corynebacterium sp.
MTVPSIVLNDGNSIPQLGYGVFKVPPADTQRAVEEALEVGYRHIDTAAIYGNEEGVGAAIAASGIARDDLFITTKLWNDRHDGDEPAAAIAESLAKLALDQVDLYLVHWPTPAADNYVHAWEKMIELRAAGLTRSIGVSNHLVPHLERIVAATGVVPAVNQIELHPAYQQREITDWAAAHDVKIESWGPLGQGKYDLFGAEPVTAAAAAHGKTPAQAVLRWHLQKGFVVFPKSVRRERLEENLDVFDFDLTDTEIAAIDAMDPGDGSGRVSAHPDEVD

SEQ ID NO: 7846 - protein, 161 aa, Oryza sativa (japonica cultivar-group)
MSDSEEHHFESKADAGASKTYPQQAGTIRKNGHIVIKNRPCKVVEVSTSKTGKHGHAKCHFVAIDIFNGKKLEDIVPSSHNCDVPHVNRTDYQLIDISEDGFVSLLTESGGTKDDLRLPSDEALLTQIKDGFAEGKDLIVTVMSAMGEEQICALKDIGPKN

SEQ ID NO: 7847 - protein, 355 aa, Trichoderma atroviride
MSRSTAPNASASRKISFNVSEQYDIQDVVGEGAYGVVCSAIHKPSGQKVAIKKITPFDHSMFCLRTLREMKLLRYFNHENIISILDIQKPRSYDSFNEVYLIQELMETDMHRVIRTQDLSDDHCQYFIYQTLRALKAMHSANVLHRDLKPSNLLLNANCDLKVCDFGLARSAASQEDNSGFMTEYVATRWYRAPEIMLTFKEYTKAIDVWSVGCILAEMLSGKPLFPGKDYHHQLTLILDVLGTPTMEDYYGIKSRRAREYIRSLPFKKKVPFRTLFPKTSDLALDLLEKLLAFNPVKRITVEDALKHPYLEPYHDPEDEPTAPPIPEEFFDFDKHKDTLSKEQLKQLIYQEIMR

SEQ ID NO: 7848 - protein, 135 aa, Brassica napus
  misc_feature (2)..(2): Xaa can be any naturally occurring amino acid
  misc_feature (12)..(12): Xaa can be any naturally occurring amino acid
  misc_feature (26)..(28): Xaa can be any naturally occurring amino acid
  misc_feature (33)..(33): Xaa can be any naturally occurring amino acid
  misc_feature (43)..(43): Xaa can be any naturally occurring amino acid
  misc_feature (45)..(45): Xaa can be any naturally occurring amino acid
  misc_feature (49)..(50): Xaa can be any naturally occurring amino acid
  misc_feature (55)..(55): Xaa can be any naturally occurring amino acid
  misc_feature (58)..(60): Xaa can be any naturally occurring amino acid
  misc_feature (62)..(62): Xaa can be any naturally occurring amino acid
  misc_feature (64)..(64): Xaa can be any naturally occurring amino acid
  misc_feature (67)..(67): Xaa can be any naturally occurring amino acid
  misc_feature (71)..(73): Xaa can be any naturally occurring amino acid
  misc_feature (79)..(80): Xaa can be any naturally occurring amino acid
  misc_feature (82)..(83): Xaa can be any naturally occurring amino acid
  misc_feature (85)..(85): Xaa can be any naturally occurring amino acid
  misc_feature (93)..(93): Xaa can be any naturally occurring amino acid
  misc_feature (99)..(100): Xaa can be any naturally occurring amino acid
  misc_feature (104)..(104): Xaa can be any naturally occurring amino acid
  misc_feature (107)..(109): Xaa can be any naturally occurring amino acid
  misc_feature (122)..(122): Xaa can be any naturally occurring amino acid
  misc_feature (125)..(125): Xaa can be any naturally occurring amino acid
  misc_feature (130)..(130): Xaa can be any naturally occurring amino acid
  misc_feature (133)..(134): Xaa can be any naturally occurring amino acid
MXSSMLSSAAVXTSPAQATMVAPFTXXXSSAAXPVTRKANNDXTXIASXXGRVSXMKXXXPXAXKKXETLXXXPDLTEXXLXXEXDYLLRNKXIPCVEXXLEHXLVXXXHGSTPGYYDGRDXTMXKLPLXFGXXD

SEQ ID NO: 7849 - protein, 230 aa, Oryza sativa (japonica cultivar-group)
MDSLYDISCFAAGLAGNIFALALFLSPVTTFKRILKAKSTERFDGLPYLFSLLNCLICLWYGLPWVADGRLLVATVNGIGAVFQLAYICLFIFYADSRKTRMKIIGLLVLVVCGFALVSHASVFFFDQPLRQQFVGAVSMASLISMFASPLAVMGVVIRSESVEFMPFYLSLSTFLMSASFALYGLLLRDFFIYFPNGLGLILGAMQLALYAYYSRKWRGQDSSAPLLLA

SEQ ID NO: 7850 - protein, 295 aa, Oryza sativa (japonica cultivar-group)
MPMSDPTAAVIPKPGGIGVGGGGGDDEEPVEIREVWADNLEEEFALIRDVVDEFPFVAMDTEFPGIVCRPVGAFRSPADYNYATLKANVDMLHLIQLGLTFSSPRGELPALGPGRRRCVWQFNFREFDDARDIFASDSIELLRRSGIDFRRNSERGVDARRFAELLMSSGVVLNDSVYWVTFHAGYDFGYLLKILTCSSLPDTQAGFFKLMKIYFPTVYDIKHLMKFCNSLHGGLNKLAELLDVERVGESHQAGSDSLVTSCAFWKLKDSFFAGSTEKYAGVLYGLNAENVVSAH

SEQ ID NO: 7851 - protein, 73 aa, Zea mays
  misc_feature (59)..(59): Xaa can be any naturally occurring amino acid
MADGRCCTFLEILFAIILPPLGVFLRFGCCRIEFCICLLLTILGYVPGIIYAIYVLVAXLDSDQHEREYYTLA

SEQ ID NO: 7852 - protein, 342 aa, Parachlamydia sp. UWE25
MKGLVKKISAPGLWMENLPIPSHVKDDEVLIKTIKTSICGTDVHIYKWDAWAQKNVPVPLVIGHEFIGEIAEFGKNVKGFKIGERVCGEGHIVCNQCPNCRMGRKHVCMHTKGLGYHISGCFAEYFVLPAENVFSLPPSISDDLGAIFDPYGNAVHTTLAFNLIGEDVLITGAGPIGIMAAAIAKQAGARHIVITDVNDYRLDLARTMGVSHAINVNRESLDNFMQSLGIKYGFTVGLEMSGHPDGLKTLTEKIRHGGNIALLGILPPATSIDWNLVIFKMLTLKGIYGREIFSTWYQMVHLLEIGLNLAPIITHHFSVDNFEKGFEVMLSGQSGKVILDWV

SEQ ID NO: 7853 - protein, 302 aa, Zea mays
  misc_feature (19)..(19): Xaa can be any naturally occurring amino acid
  misc_feature (231)..(231): Xaa can be any naturally occurring amino acid
MDPMDIVGKSKEDVSLPKXTTMFKIIKEMLPPDVRVARDAQDLLVECCVEFINLLSSESNEVCSREEKKTIAPEHVIKALSDLGFREYIEEVYAAYEQHKLDTLDSPKAGKFTGIEMTEEEAVAEQQRMFAEARARMNNGAPKPKETEQEPPQQPQAQPQLQLHTEPQQPVQSQVQLHSPTQHSLQPQVQLHPQPQQLPQVQVHSQTQLHPQPQQPQVQVHPQLQQLPQLXAHSQPPQPQVQIHPQPQQPPQVQLQSSVQQTSQPQPQVHLYNHRGGSQAQLQPQLPGQLQTQGQTGPGIDS

SEQ ID NO: 7854 - protein, 369 aa, Triticum aestivum
  misc_feature (342)..(342): Xaa can be any naturally occurring amino acid
MDRVLLPVRVKEEWPPPPPEEEEELEHGGLAPRPMEGLHETGPPPFLTKTFDLVADPATDGVVSWGRAGNSFVVWDPHLFAAVLLPRFFKHSNFSSFVRQLNTYGFRKIDPDRWEFANEGFIRGQRQLLKMIKRRRPLSYLPSPQHQALGSCLEVGQFGLDEEIEVLKRDKNALLEEVVKLRQEQQSSRADMRAMEERLHRVEQKQLQMMGFLARAIQNPDFFLQLIQQQDKLKDLEDAYSNKRRRSIDVMPFLGPEETSQSEPLESTFIFEDREFSELENLAMNIQGIRKGMEGDRGGRDQGCGEAELTDDFWEELLSEGMRDEAEMVELERRRSRYVDAXAPSMGHLSYSDPKSTRIHNHLIYIPLY

SEQ ID NO: 7855 - protein, 121 aa, Zea mays
KLAGCSGVRDHRRGTKARDNRCVNESIAMASRLVAAAASSSSLSSASPLARLISRRGLAGAADGHGSAKVPLWKDPLSPSKWKEEHFVLASLSMWGVIFYGGYKLFSGKKETKTEAASPQA

SEQ ID NO: 7856 - protein, 348 aa, Pyrococcus abyssi GE5
MSEKMVAIMKTKPAYGAELVEVDVPKPGPGEVLIKVIATSICGTDLHIYEWNEWAQSRIKPPQIMGHEVAGEVVEVGPGVEGIEVGDYVSVETHIVCGKCYACRRGQYHVCQNTKIFGVDTDGVFAEYAVVPAQNVWKNPKSIPPEYATLQEPLGNAVDTVLAGPISGKSVLITGAGPLGLLGIAVAKASGAYPVIVSEPSDFRRELAKKVGADYVINPFEEDVVKEVMDITDGNGVDVFLEFSGAPKALEQGLQAVTPAGRVSLLGLYPGKVSIDFNNLIIFKALTVYGITGRHLWETWYTVSRLLQSGKLNLDPIITHKYKGFDKYEEAFELMRAGKTGKVVFMLK

SEQ ID NO: 7857 - protein, 162 aa, Zea mays
MCPIKRETTSAESGSPCSSSTSTSSSSEHHQTAWASPPKKRPAGRTKFRETRHPVFRGVRRRGRAGRWVCEVRVPGRRGCRLWLGTFDTAEAAARAHDAAMLAVAAGAARLNFADSAWLLAVPTASYASLADVRRAVAEAVESCPVPQFGNCTKVTAASINE

SEQ ID NO: 7858 - protein, 296 aa, Methylobacillus flagellatus KT
MTSARKKAEETMEFTDVVIEVLDARVPEASHNPMIEELRLHRQRPSLKILNKADLADPAVTQAWLNHFNRQDGIKAVALSCKKPGDAKKIPDLCRSLAPHRGSHLKPLRMMIMGIPNVGKSTLMNALLNRRIAKVGDEPAVTKSQQRFELSPQLTITDTPGMMWPKIKYDSDGYMLAASHAIGRNAVIDEEVAEFLAGILLERYPALLQSRYKIDVSNMDAIDLLEAIGKRRGYLLKGGALDMEKTAMAFLVDYRSGTLGRISLETPESRAAMMTEALARQKAREESQEEKTKTEP

SEQ ID NO: 7859 - protein, 473 aa, Aspergillus nidulans FGSC A4
MSMPPAALSSLRTALTSSLVFTPGDEGYLDSLRRWSDTGRKEAGIVIQPTETADIQTALKWVQEHQIDLAVKCGGHSVSGTSSSAGGLVIDLSRMNGVSVDIQKKTVTVGGGAVWKDVDEAAAAYGLAAVGGTVNHTGVGGLTLGGGYGWLSGQYGLTIDNLVSATVILANGETVIASETENSDLFWALRGAGYNFGVVTSFTFQAHEQPEPVYAGILAYTPDKVERVVEILNALLLDKPDPRSGAICIFAEPPGAPTPMVNVLVFYNGTQAEGEARFADLLGLSPIANTVSMIPYSQMNSLQNPMATYGDRKSFKGVFFNPPLSPQFAKTMLEEFTAKVKSDPDLAASALLLEFYDMTKTVSVPRAATAFASRGTTQNGIITLRWSDATKDLEHRAWAREVQERWKDVLEKETDANLDAAGKAGVPQYINYAEPGDAVVGNIYGENLPRLKALKAKYDPTNVFRKMHPITLD

SEQ ID NO: 7860 - protein, 384 aa, Arabidopsis thaliana
MRNQGFTKEDRMNQLPEDLILRILSFLPTELVIATSVLSKQWRSLWKLVPNLEFDSDDYEINPVDIGLWIGIAFARHLRELVLYVAPKQTFTFPSSLCICNTLETLKLILGIHVDIPCPVLLKSLRTLHLDSVSYKDEESIRNLLSSCPILENLVVYEYWYNVVNFDIEVPSLKRLEICDVLHKKEFRRYTINVPCLKYLRIEGLNKDFELCLNAPELVEAYFTKGSLIIADKFLGSLKSAKRLSLDILALKMHTRREEWWNLLTVMLDSSPKLQVLKLIDHTQDVSKDNVVSEKWNEPKYVPECLLSHLETFVWIRYDWEREEEKEVATYILRNARWLKKGTISTNPIESKDLEKLEERRKMLNELDSVVRASNSCNLVFEFE

SEQ ID NO: 7861 - protein, 451 aa, Arabidopsis thaliana
MEQGESLRIRVVMGKDRISELPDGLLLKILSSLPTNIVVATSVLSKQWRSLWKLVPNLEFDSDDYESEHYTFSEIVCKSFLSHKAPVLESFRLKFVNFNPVDIGLWVGIAFSRHLRELVLDFYPAELGKGVTFTFPSSLCTCNTLETLKLVLCILVDIPSPVLMKSLRTLHLEFVRYKDESSVRNLLSGCPGLEELRLYRGDDSDIKVFTIEVPSLQRLTIHDNNDGPEFWGYVINAPFLKYLLIEELRCPEFCLNAPELVEANIAEVTSITIEKFLGSFTSVSRLLLNLSPLKITYPTGSMFYQLVSLEMYTREAEWWNLLTLMLENSPKLQVLKLTDRSQNFHKDGLVSGKWNEPKDVPECLLSQLETFVWRRFDWGREEEKEIATYILKNGRRLKKATFSTNPIESEELNKLKERRKVLNGLDGVVRASNSCQLVFKFDPSYLGSDSP

SEQ ID NO: 7862 - protein, 428 aa, Tropheryma whipplei TW08/27
MTRQSFFIKNVTLPGLGARTLFLSGGLIQEIICKDIEEHQFLSTKNTDKASCRVIDAEGFIALPGLVDLHTHLRNSRDGSIRDVTSAAIAGGYTTVSSMPNMHPVQDSPEAVNILKAIAKEDAVCDIRPVGAVTKGLRGNEITDMHSLLDAGVNIFSDDGNCVYDPGIIHQALSFAGRNNCVIAQHAQDPTLTKSAQGDTQGPIVAPKSLWPSIAESTIVARDILLARAANARLHVCHVSSQESVYAIAWGKSLGVQVTAEVTPHHLLFYDSLVMTGDTRFKVNPPLRSKESVECLRDALIRGVIDVVATDHAPHRNKSPFWHSAPNGMTGLEFSVSVIQKIFVNSGHLTWPEVVRIMSNKPAEILGMTPNTVKEGSAANFFLYNPDVTRFVTFDDSLGPSVNSPYAGMNLPGKVMYTFYEGRLVFEN

SEQ ID NO: 7863 - protein, 355 aa, Glycine max
GVLVCAAGQEFRGDVALCTVPLGVLKKGDIEFVPELPQRKKDAIHRLGFGLLNKVAILFPYNFWGGDIDTFGHLTEDLSMRGEFFLFYSYSSVSGGPLLVALVAGEAAIRFEMMLPVESVKRVLDILKDIFNPKGIVVPDPVQAVCTRWGKDHFAYGSYSYVAVGSSGDDYDILAESVGDGRVFFAGEATSKQYPATMHGAFLSGMREAANILRVAKRRSSMTIDTTKSVNQENDDLNKLFVKPDLTFGSFSALFDLNLNDHDSSSLLRVKIGGVVLDSGSLYLYAWLSKKRVIELSQVEGDENRMRMLNRNFGVSLVGRKGLSSAAESLIANIKLSRPNFNETENGLMAEKENS

SEQ ID NO: 7864 - protein, 427 aa, Arabidopsis thaliana
HREGIYLNDFAKFIVPINENGTTESERKRGVVREDLISELPEDLLLLILSYLPTKKVITTKNVGRSLFLHKAPVLESFHLKVCDINDDRPACDDIDIGIWIGIAFERHVRELVLDLCLQKSVRFPISSMFSTLETLILKYLALVDVPSPVCMKSLRTLHLDCVNFKHNESFSNLISGCPNLEDLFMYQYYPLDVVMNFIIVAPSLKRLVIIDYREAGGYVINAPTLKYLKIKGLSHCGFCLIENAPVLVEAKIRNLFYIYKEKILGSLKSAKRLSLDLSPLECPIDSIFYQLVHLEIYTCKEEWWNLLKLMLDSSPKLQVLKLIGKNLDFKKVGMVGGKWNEPKNVPECLLSQLKMFVWTSYHWESEVEKEVATYILKNARQLKNVSFSTRPIHSKEHNKLEEKCKMLKELDGVVRASSSCHLVFIE

SEQ ID NO: 7865 - protein, 247 aa, Brassica napus
  misc_feature (235)..(235): Xaa can be any naturally occurring amino acid
VGFKSNLKAVSLELGGKSPFIVCEDADVDQAVEMAHFALFFNQGQCCCAGSRTFVHERVYDEFVEKAKARAINRAVGDPFKSGIEQGPQVDSEQFEKILKYIRHGVDSGATLQAGGDRHGSKGYYIQPTVFSDVKDDMLIAKDEIFGPVQTILKFKNLDEVIARANNSRYGLAAGVFTQNLDTANRLMRALRVGSVWINCFDVFDATIPFGGYKMSGIGREKGIYSLNNYLQVKXAVVTSIKNPAWL

SEQ ID NO: 7866 - protein, 165 aa, Capsicum annuum
MASQREENVYMAKLAEQAERYEEMVEFMEKVVAALDGGDELTVEERNLLSVAYKNVIGARRASWRIISSIEQKEESRGNEDHVTSIKNYRSKIEIELTSICNGILKLLDSKLIGSAATGDSKVFYLKMKGDYYRYLAEFKTGAERKEAAENTLSLISLLRILLMP

SEQ ID NO: 7867 - protein, 307 aa, Staphylococcus aureus subsp. aureus Mu50
MNAAVRAVVRTAIYNEIEVYGVYHGYQGLLNDDIHKLELGSVGDTIQRGGTFLYSARCPEFKEQEVRKVAIENLRKRGIEGLVVIGGDGSYRGAQRISEECKEIQTIGIPGTIDNDINGTDFTIGFDTALNTIIGLVDKIRDTASSHARTFIIEAMGRDCGDLALWAGLSVGAETIVVPEVKTDIKEIADKIEQGIKRGKKHSIVLVAEGCMTAQDCQKELSQYINVDNRVSVLGHVQRGGSPTGADRVLASRLGGYAVDLLMQGETAKGVGIKNNKIVATSFDEIFDGKDHKFDYSLYELANKLSI

SEQ ID NO: 7868 - protein, 111 aa, Bartonella tribocorum
ANEACLKMLQEIGSIKRIPEFIARAKDKNDPFRLMGFGHRVYKNYDPRAKILQKTCHEVLKELNIQDDPLLDIAIELEKIALNDEYFIEKKLYPNVDFYSGITLKALGFPT

SEQ ID NO: 7869 - protein, 503 aa, Arabidopsis thaliana
MGNCCRSPAAVAREDVKSNYSGHDHARKDAAGGKKSAPIRVLSDVPKENIEDRYLLDRELGRGEFGVTYLCIERSSRDLLACKSISKRKLRTAVDIEDVKREVAIMKHLPKSSSIVTLKEACEDDNAVHLVMELCEGGELFDRIVARGHYTERAAAGVTKTIVEVVQLCHKHGVIHRDLKPENFLFANKKENSPLKAIDFGLSIFFKPGEKFSEIVGSPYYMAPEVLKRNYGPEIDIWSAGVILYILLCGVPPFWAESEQGVAQAILRGVIDFKREPWPNISETAKNLVRQMLEPDPKRRLTAKQVLEHPWIQNAKKAPNVPLGDVVKSRLKQFSVMNRFKRKALRVIAEFLSTEEVEDIKVMFNKMDTDNDGIVSIEELKAGLRDFSTQLAESEVQMLIEAVDTKGKGTLDYGEFVAVSLHLQKELCDALKEDGGDDCVDVANDIFQEVDTDKDGRISYEEFAAMMKTGTDWRKASRHYSRGRFNSLSIKLMKDGSLNLGNE

SEQ ID NO: 7870 - protein, 174 aa, Triticum aestivum
  misc_feature (173)..(173): Xaa can be any naturally occurring amino acid
MAPTVMASSATSVAPFQGLKSTAGLPVSRRSNGASLGSVSNGGRIRCMQVWPIEGIKKFETLSYLPPLSTEALLKQVDYLIRSKWVPCLEFSKVGFIFREHNASPGYYDGRYWTMWKLPMFGCTDATQVINEVEEVKKEYPDAYVRIIGFDNMRQVQVRQLHRFKPPGCEESXG

SEQ ID NO: 7871 - protein, 385 aa, Cupriavidus necator
MSEAQPLVTPKPKKSVALSGVTAGNTALCTVGRTGNDLHYRGYDILDIAETCEFEEIAHLLVHGKLPTKSELAAYKAKLKSLRGLPANVKAALEWVPASAHPMDVMRTGVSVLGTVLPEKEDHNTPGARDIADRLMASLGSMLLYWYHYSHNGRRIEVETDDDSIGGHFLHLLHGEKPSALWERAMNTSLNLYAEHEFNASTFTARVIAGTGSDMYSSISGAIGALRGPKHGGANEVAFEIQKRYDNPDEAQADITRRVENKEVVIGFGHPVYTTGDPRNQVIKEVAKKLSKDAGSMKMFDIAEALETVMWDIKKMFPNLDWFSAVSYHMMGVPTAMFTALFVIARTSGWAAHIIEQRIDNKIIRQSANYTGPENLKFVPLKDRK

SEQ ID NO: 7872 - protein, 355 aa, Pyrococcus abyssi GE5
MKQKKAWRIVKEVIGEADIVVEVVDARDPIGTRNRKLERMVIESGKKLLIVMNKADLVPKEWAEEYKKRSEIPVIFISARERKGTGILRKELKKMAKTIDKDKVKVALIGYPNVGKSTIINVLKGKHAVGTAPIPGYTKGKHLIRLTKRLWLLDTPGVVPIDDFDELVIKGGFPADKIEEPVKPALKLIRRILETRKEALTEKFDIREFRDEEDILRKIGERRGIIREGGEVDIEETARWFLREWQTGRFTLFSNDEEKKEEYIESFGEILEVIKQENLTEPRIILWKFRDLLEEYVGSEKRFGAIEVGDFTVAIATGFKKCPNAIKFIERITGKNVITSECFGKKWKGVVAILD

SEQ ID NO: 7873 - protein, 494 aa, Bacillus cereus ATCC 10987
MSQLAVNLHEKVEKFLQGTKKLYVNGSFIESASGKTFNTPNPATGETLAVVSEAGREDIHKAVVAARMAFDEGPWSRMSTAERSRLMYKLADLMEEHKEELAQLETLDNGKPIRETMAADIPLAIEHMRYYAGWATKIVGQTIPVSGDYFNYTRHEAVGVVGQIIPWNFPLLMAMWKMGAALATGCTIVLKPAEQTPLSALYLAELIEEAGFPKGVINIVPGFGESAGQALVNHPLVDKIAFTGSTPVGKQIMRQASETLKRVTLELGGKSPNIILPDADLSRAIPGALSGVMFNQGQVCSAGSRLFVPKKMYDNVMADLVLYSKKLNQGAGLSPETTIGPLVSEEQQKRVMGYIEKGIEEGAEVLCGGSNPFDRGYFVSPTVFADVNDEMTIAKEEIFGPVISAIPFNDIDEVIERANKSQFGLAAGVWTENVKTAHYVASKVRAGTVWVNCYNVFDAASPFGGFKQSGLGREMGSYALNNYTEVKSVWLNLN

SEQ ID NO: 7874 - protein, 447 aa, Zea mays
  misc_feature (141)..(141): Xaa can be any naturally occurring amino acid
  misc_feature (256)..(256): Xaa can be any naturally occurring amino acid
MSAAATKVKRRVGKYELGRTIGEGTFAKVRFAKNTETGEPVAVKILDKEKVLRHKMAEQIKREISTMKLIKHPNVVRIYEVMGSKTKVYIVLEYVTGGELFDTIANQGRMREGEARSYFQQLINAVDYCHSRGVYHRDLKXNLLLDSYGNLNVSDFGLSALSQQIKDDGLLHTTCGTPNYVAPEVLEDQGYDGAMADLWSCGVILFVLLAGYLPFEDSNLMTLYKKISNAEYTFPPWTSFPAKRLNLLTRLVEQSXENSCDFRITIPEILEDEWFKKGYKRPEFDEKYDTPLDDVDAVFNDSEEHHVTEKKEEEPVALNAFELISRSAGLNLGNLFDSEQEFKRETRFTSKCPPKEIIRKIEEAAKPLGFGVQKKNYKLRLEKVKAGRKGNLNVATEILQVAPSLHMVQVRKAKGDTLEFQKFYKNLSKTLKDVVWKSEDLQMRAAS

SEQ ID NO: 7875 - protein, 148 aa, Glycine max
  misc_feature (33)..(33): Xaa can be any naturally occurring amino acid
  misc_feature (139)..(139): Xaa can be any naturally occurring amino acid
  misc_feature (143)..(143): Xaa can be any naturally occurring amino acid
  misc_feature (146)..(147): Xaa can be any naturally occurring amino acid
IKYEKKALEVVGKRLKKNSVSLDVVNFGDDDDXDKPLKLEALLSSVNNNDGSHIVHVPSGPNALSDVLLSTPVFTGDEGASGYVSAAAAAAAAGGDFDFGVDPNIDPELALALRVSMEEERARQEAAAKKAADEAGQKXQDGXSAXXS

SEQ ID NO: 7876 - protein, 489 aa, Mesorhizobium loti MAFF303099
MLGIRAGDGDERAVFQQGKGHGEDKRLILQNGWPLRKPLTLPPQESMAMTYDLILTGGTVVNHDGEGARDIGVKNGRIAAIGDLRQASADETIDCRGLHILPGVVDSQVHFREPGLEHKEDLETGSRAAVLGGVTAVFEMPNTNPLTTSEATLADKVRRGSGRMHCDFAFWVGGTRDNARDVGELERLPGAAGIKVFMGSSTGDLLVEDDEGVASILRNTRRRAAFHSEDEFRLRERLGERIEGDPSSHPVWRDEIAALRCTERLVRIARDVRARIHVLHISTAEEILFLEQHKDVATCEATPHHLTLSADDYLRLGTLIQMNPPVRASRHRDGVWHGIAQGIVDVLGSDHAPHTLAEKAKPYPASPSGMTGVQTLVPIMLDHVNAGRLTLQRFVDLSSHGPQRIFGMARKGRIAAGYDADFTVVDMKRRETITNAQAGSKAGWTPYDGKEVTGWPVGTVIRGRRVMWEGEIVTPGQGRAVEFSEALPA

SEQ ID NO: 7877 - protein, 506 aa, Ralstonia eutropha JMP134
MNMAEIAQLGVTNPYKQQYENYIGGAWVPPAGGEYFEAITPITGKPFTRVPRSKQEDVDAALDAAHAAKAAWGRTSTTERANILNRIADRIEANLTLLAVAETIDNGKPVRETMAADLPLAVDHFRYFAGCIRAQEGGISEIDAETIAYHFHEPLGVVGQIIPWNFPLLMATWKLAPALAAGNCVVLKPAEQTPASILALMEVIGDLLPPGVVNVINGFGLEAGKPLASSPRISKVAFTGETTTGRLIMQYASQNLIPVTLELGGKSPNIFFEDVLAADDAYFDKALEGFAMFALNQGEVCTCPSRALIQESIYDRFMERALKRVAAIRQGHPLDKGTMIGAQASAEQLEKILSYIDLGRKEGAQCLAGGERNQFDGDLAGGYYVKPTVFKGHNKMRIFQEEIFGPVVSVTTFKDEEEALAIANDTLYGLGAGVWTRDGARAFRMGRGIQAGRVWTNCYHAYPAHAAFGGYKQSGIGRENHRMMLDHYQQTKNLLVSYSPNALGFF

SEQ ID NO: 7878 - protein, 147 aa, Myxococcus xanthus
MQTRNPFNSAVVVNPLMRDVDALFRELTQPMWRQAPRERTPAADITESESGLTLHLDMPGLEAKAIQVTVEKDILTVQSERKAEPRAEGVNVRRQERAFGTFARSFALPDTVDASRVEARYEQGVLTLTLPRREESKPRVIEVKVQG

SEQ ID NO: 7879 - protein, 490 aa, Pseudomonas aeruginosa PAO1
MARFEEQKLYIGGRYVEASSGATFETINPANGEVLAKVQRASREDVERAVQSAVEGQKVWAAMTAMQRSRILRRAVDILRERNDELAALETLDTGKPLAETRSVDIVTGADVLEYYAGLVPAIEGEQIPLRETSFVYTRREPLGVVAGIGAWNYPVQIALWKSAPALAAGNAMIFKPSEVTPLTALKLAEIYTEAGVPDGVFNVLTGSGREVGQWLTEHPLIEKISFTGGTSTGKKVMASASSSSLKEVTMELGGKSPLIIFPDADLDRAADIAVMANFFSSGQVCTNGTRVFIHRSQQARFEAKVLERVQRIRLGDPQDENTNFGPLVSFPHMESVLGYIESGKAQKARLLCGGERVTDGAFGKGAYVAPTVFTDCRDDMTIVREEIFGPVMSILVYDDEDEAIRRANDTEYGLAAGVVTQDLARAHRAIHRLEAGICWINTWGESPAEMPVGGYKQSGVGRENGLTTLAHYTRIKSVQVELGDYASVF

SEQ ID NO: 7880 - protein, 534 aa, Glycine max
MGNCCATPSTDETANKKGKKGKKENPFAIDYGFNATAANGSKLTVLKSPTGREIEARYELGRELGRGEFGITYLCTDKGTGEELACKSISKKKLRTAIDIEDVRREVEIMRHLPQHANIVTLKDTYEDDNAVHLVMELCEGGELFDRIVARGHYTERAAAAVTKTIVEVVQMCHKQGVMHRDLKPENFLFANKKETAALKAIDFGLSVFFKPGEKFNEIVGSPYYMAPEVLKRNYGPEVDIWSAGVILYILLCGVPPFWAETEQGVAQAIIRSVVDFKRDPWPKVSDNAKDLVKKMLDPDPKRRLTAQDVLDHPWLQNAKKAPNVSLGETVRARLKQFSVMNKLKKRALRVIAEHLTVEEAAGLKEGFQVMDTNNRGKINIDELRVGLHKLGHQVPESDVQALMDAGDVDGDGHLDYGEFVAISVHLRKMGNDEHLRKAFQFFDQNKSEYIEIEELSSALSDDLDTNSEEVVNAIMHDVDTDKDGRISYDEFSTMMKAGTDWRKASRQYSRERFASLSLTLMRDGSLHLNNEKQ

SEQ ID NO: 7881 - protein, 194 aa, Magnaporthe grisea
MVVATIKCVVVGDGAVGKTCLLISYTTNKFPSEYVPTVFDNYAVTVMIGDEPYTLGLFDTAGQEDYDRLRPLSYPQTDVFLVCFSVTSPASFENVREKWFPEVHHHCPGVPCLIVGTQVDLRDDPSVREKLSKQKMQPVRREDGERMAKELGAVKYVECSALTQYKLKDVFDEAIVAALEPPTPKRKSKKCLIL

SEQ ID NO: 7882 - protein, 374 aa, Zea mays
MVLEATMICVDNSEWMRNGDYPPSRFAAQAHAFAVLSGAKTEANLESTVGLVAMAGKGVSVLVPPTNDFGKVLSGMNGLEIGGEANLTAAIQVAQFALKNRQNKQLRQRIIVFVGSPVIDEKNWLEVIGKNLKKNNVALDVVNFGESDNEKPEKLEALVAAVNSGGNSHIIHIPAGRDLSDALFSSPIILSEDRGSDSAAAARGASGFEFDVDPNVDPELALVLLISMEEERLRQEAAAKKAREESSKTENEGQSSTSNGDIVMADAEPEPNSYTEDKGLHCKDEGQLLEKARKIRIEDYISFEELFDGVTSDTMSAFQEEETCTQSDAGKDFGHQPFEPSPKKRHKKYKRRHHQKKPKKKREKKEDEAEGDKL

SEQ ID NO: 7883 - protein, 301 aa, Arabidopsis thaliana [sequence omitted]

SEQ ID NO: 7884 - protein, 378 aa, Glycine max
SARDFVMEYAKGGELFKKVAKGKLKEEVAHKYFRQLVSAVDFCHSRGVYHRDIKPENILLDENENLKVSDFGLSALAESKRQDGLLHTTCGTPAYVAPEVIKRKGYDGAKADIWSCGVVLFVLLAGYFPFHDPNMMEMYRKISKAEFKFPSWFPQGVQRLLRKMLDPNPETRISIDKVKQCSWFRKGPNGRQKTQEGENLCVSPSVTNHSEQCGDESDDLAAEAREEQVVPVSINAFDIISLSPGFNLCGFFEDSIQKREARFTSRQPASVIISRLEEIAKQMRMKKKKRAAGLLKLEGLHEGRKGILSIDTEIFEVTPLLHLVEVKKSNGDTLEYEKILKEDIRPALKDVVWVWQGDQQEQSQQLEQQKQQQQLPQS

SEQ ID NO: 7885 - protein, 301 aa, Arabidopsis thaliana
MVFVKSSKSNAYFKRYQVKFRRRRDGKTDYRARIRLINQDKNKYNTPKYRFVVRFTNKDIVAQIVSASIAGDIVKASAYAHELPQYGLTVGLTNYAAAYCTGLLLARRVLKMLEMDDEYEGNVEATGEDFSVEPTDSRRPFRALLDVGLIRTTTGNRVFGALKGALDGGLDIPHSDKRFAGFHKENKQLDAEIHRNYIYGGHVSNYMKLLGEDEPEKLQTHFSAYIKKGVEAESIEEMYKKVHAAIRAEPNHKKTEKSAPKEHKRYNLKKLTYEERKNKLIERVKALNGAGGDDDDEDDEE

SEQ ID NO: 7886 - protein, 328 aa, Glycine max
SPRAEFGTRPRADLVPIRHEATIVFPNSSAQQRMPVVGMGSAPDFTCKKDTKEAIIEAVKQGYRHFDTAAAYGSEQALGEALKEAIHLGLVSRQDLFVTSKLWVTENHPHLVLPALRKSLKTLQLEYLDLYLIHWPLSSQPGKFSFPIEVEDLLPFDVKGVWESMEECQKLGLTKAIGVSNFSVKKLQNLLSVATIRPVVDQVEMNLAWQQKKLREFCKENGIILTAFSPLRKGASKGPNEVMENDVLKEIAEAHGKSIAQVSLRWLYEQGVTFVPKSYDKERMNQNLQIFDWALTEEDHHKIDEIYQSRLISGPTKPQVTDLWDDEI

SEQ ID NO: 7887 - protein, 497 aa, Chromobacterium violaceum ATCC 12472
MSTGTINWQKKAEQLHFEGRAYIDGAYRKALSGKEFTTINPATGKVLASIEWCGKEDVELAVCAARRAFDGGAWSELATRSRMEILKRFASLIQDNIEELALLESLDVGKPIANSLSVDISNTAYCISWFAELIDKAPGEVVPVDPALLGMVTREPVGVVAAIVPWNFPLMMASWKFAPALAAGNAVILKPSEKSPLTAIRVAALAEAAGIPPGIFQVLPGAGDVGQALASHLDVDCVAFTGSTAVGKQIANYAAQSNLKRVWLELGGKSPNIILADCKDLKEAAKAAAGAICYNAGQMCTAGSRVLVAREIREAFLSELKVAMADYRPGDPLSPETNLGAVVDQRQFDKILSYITQGQNEGAKLLQGGAAVQTVHPNGLFIEPAIFDCPQPNLTICREEIFGPVLSVITFDDVDEAVRIANDSQYGLGAAVWTQNVSTAHKVARRLRAGTVWVNCYEEGGDMNLPFGGYKQSGNGRDKSLHALEKYTELKSTLIKL

SEQ ID NO: 7888 - protein, 332 aa, Triticum aestivum
  misc_feature (27)..(27): Xaa can be any naturally occurring amino acid
  misc_feature (61)..(61): Xaa can be any naturally occurring amino acid
  misc_feature (186)..(186): Xaa can be any naturally occurring amino acid
MKTLLILTIIAVALTTTTANIQVDPSXGQVQWPQQQQPFPQPQQPQQIFPQPQQTFPHQPXQQAFPQPQQTFPHQPQQQFPQPQQPQQPFPQQPQQQFPQPQQPQQPFPQQPQQQFPQPQQPQQPFPQPQQPQLPFPQQPQQPFPQPQQPQQPFPQLQQPQQPLPQPQQPQQPFPQQQQPLIQPYXLQQQMNPCKNYLLQQCNPVSLVSSLVSMILPRSDCKVMRQQCCQQLAQIPQQLQCAAIHGVVHSIIMQQEQQQQQQQQQQGIQIMRPLFQLVQGQGIIQPQQPAQLEVIRSLVLGTLPTMCNVFVPPECSTTKAPFASIVADIGGQ

SEQ ID NO: 7889 - protein, 264 aa, Brassica napus
RFLWLCWSSGDIHGQYQDLLRLFEYGGYPPSANFLFLGDYVDRGKQSLETICLLLAYKIRYPSKIYLLRGNHEDAKINRIYGFYDECKRRFNVRLWKIFTDCFNCLPVAALIDDKILCMHGGLSPELDNLNQIREIQRPTEIPDSGLLCDLLWSDPDQKIEGWADSDRGISCTFGADKVAEFLDKNDLDLICRGHQVVEDGYEFFAKRRLVTIFSAPNYGGEFDNAGALLSVDESLVCSFEIMKPALASSSGHPLKKVPKMGKS

SEQ ID NO: 7890 - protein, 201 aa, Triticum aestivum
  misc_feature (173)..(173): Xaa can be any naturally occurring amino acid
SRPGVCAIRQLFPIIPSQRLQERPAVDGVLSDLTCDSDGKVDQFIGGRSSLPLHELPAHGTRGYYLGMFLGGAYQEALGGLHNLFGGPSVVRVSQSDGPHCFAGTPAAPGPSCADGLRAMEPARAATREVLKQRTTDDGATAAALARAFGSMPYLSFDAEEAVAMSGAESSGXMSSDSEGSAAGAAEDDDEEWEFMRGLTV

SEQ ID NO: 7891 - protein, 403 aa, Oryza sativa (japonica cultivar-group)
MKDLFGDGIFATDGDMWRHQRKLASYEFSTKVLRDFSSDTFRRNAAKLAEKISCAAANRISINIQDLLMRATMDSIFKVGFGFELNTLSGSDESGIQFSKAFDEANSLVYYRFVDIMWKLKRYLNIGSEAKLKRNIQIIDSFVMKLIHQKREQMKIAADYKTKEDILSRFVLASEQDPGTMDDRYLRDIVLNFLIAGKDTTGNTLTWFFYLLCKNPIVQDKVALEIREFVEWSKEDNTIESFTKRLDEGAISKMHYLQATISETLRLYPAVPVDAKMADEDDVLPNGYRVVKGDGINYMIYAMGRMTYLWGEDAQEFRPERWLVNGVYQQESPFKFVSFNAGPRICLGKEFAHRQMKIMAATLIHFFKFRLEDESKEPIYKTMFTLHIDNGLHLLANPREISP

SEQ ID NO: 7892 - protein, 482 aa, Oryza sativa (japonica cultivar-group)
MVPAGDQAEEAIVADAGKEEAEVRAAMGVEQDGKFSMTSLLWHGGSVWDAWFSCASNQVAQVLLTLPYSFSQLGMLSGLLLQVFYGLMGSWTAYLISVLYVEYRARKEKEGVSFKNHVIQWFEVLDGLLGPYWKAAGLAFNCTFLLFGSVIQLIACASNIYYINDRLDKRTWTYIFGACCSTTVFIPSFHNYRIWSFLGLGMTTYTAWYLAIAAAVHGQVDGVTHSGPSKMVLYFTGATNILYTFGGHAVTVEIMHAMWKPQKFKYIYLVATLYVFTLTLPSASAMYWAFGDALLTHSNAFSLLPRSGWRDAAVILMLIHQFITFGFACTPLYFVWEKAIGMHGTRSVLTRALARLPIVVPIWFLAIIFPFFGPINSAVGALLVSFTVYIIPSLSHILTYRSASARLNAAEKPPPFLPSWSGMFVVNVFVVAWVLVVGFGLGGWASVTNFIKQIDTFGLFAKCYQCPPRAHAGAPLPAPPRH

SEQ ID NO: 7893 - protein, 267 aa, Bordetella parapertussis 12822
MTIPSFGVGTFRLTGQTVIDSVRNAIDLGYRAVDTAQIYGNETEVGQAIAESGVARSELFVTTKIWTDNYARAKLLPSLRASLEKLRTDYVDLTLIHWPAPGNGVALPEYMEALAEAKALGLTRRIGISNFNIALTRQAIAAVGQGEIATNQIELSPYLQSARLTAFLREQGIAVTSYMTLAYGKVLKDPVLARIADKHRSTVAQVALAWALQQGYAVIPSSTKRENLASNLLARGLALDADDMARIAALERNGREVDPEGLAPAWD

SEQ ID NO: 7894 - protein, 386 aa, Arabidopsis thaliana
MVLEATMICIDNSEWMRNGDYSPSRLQAQTEAVNLLCGAKTQSNPENTVGILTMAGKGVRVLTTPTSDLGKILACMHGLDVGGEINLTAAIQIAQLALKHRQNKNQRQRIIVFAGSPIKYEKKALEIVGKRLKKNSVSLDIVNFGEDDDEEKPQKLEALLTAVNNNDGSHIVHVPSGANALSDVLLSTPVFTGDEGASGYVSAAAAAAAAGGDFDFGVDPNIDPELALALRVSMEEERARQEAAAKKAADEACQKDKDGDTASASQETVARTTDKNAEPMDEDSALLDQAIAMSVGDVNMSEAADEDQDLALALQMSMSGEESSEATGAGNNLLGNQAFISSVLSSLPGVDPNDPAVKELLASLPDESKRHEEEESSSKKGEDEKK

SEQ ID NO: 7895 - protein, 122 aa, Arabidopsis thaliana
MEHGSFTNVSHASFTLSEEDHTLANAVRFVLNQDPRVTVAAYTIPHPSLEQVNIRVQTTGDPAREVFKDACQELMQMNRHVRSVFDKAVAEYKDEQKRKEEAEEEELKRQRDMFGSMDIENN

SEQ ID NO: 7896 - protein, 443 aa, Glycine max
MREAQNDIVATEFATTTNDEEVPSGVVLFGKYELRRLLGVGAFAKVYHATSVDDTHQSVALKAVSKNKVLNGGFAANVEREISIMRRLHHPNIINLFEVLATKTKIYFVMEFAAGGELFHEVAGKGRLTEETARFYFRQLISAVKHCHSRGVFHRDLKLDNLLLDEDGNLKVSDFGLSAVTGQIRPDGLLHTVCGTPTYVAPEILAKRGYDGAKVDLWSCGVVLFALIAGYLPFNDYNPSVLYRKIYRGQFRFPRWISHDLRFLLSRLLDTNPKTRITVDEIYKDTWFNADGEYRFNRVLVKESECEKQLGRTGFKSLNAFDLISFSTGLDMSGLFEDPTGSNSVERVVSTVVPEKIMERVEAMTEEGRVVVRREKNGGGAKLEGQDGNLIGIVVVYQLTDELVVVEMKRSEKGGGFGGQFWKDKLRPLLLELASELEEPVSR

SEQ ID NO: 7897 - protein, 284 aa, Lactobacillus plantarum WCFS1
MANIQWYPGHMAKAIHQIQDNLHLVDIVFELVDARIPVASRNPEIEKTVQQKPHLLIMTKKDLADPQATADWVKYYEDQGQVAIAVDSRSRTIGKQMTQAASDMLADKLAKIAARGITNRPIRAVCVGIPNVGKSTLLNHIVNKKIAKVGDRPGVTKGQQWLKASNKLELLDTPGILWPKFEDQVVGTKLAVTGAIKENIYPNDDVALFALDFFKQHYAARLVDRYHLTAEQLTLPNPELLIAMTKNAGMRDDWERFCVAFLLDIRKGRLGRFTLDLTGDQPDA

SEQ ID NO: 7898 - protein, 258 aa, Triticum aestivum
LANVGAELAHQVPGRVSTEIDARLAYDTQGIIHRVHELLNLYNQHDVSTDRLLFKIPATWQGIEASRLLESEGVQTHLTFVYSFAQAAAAAQAGASVVQIFVGRLRDWARNHSGDPEIDEALKKGEDAGLALAKKVYAYIHRNGYKTKLMVAAIRNKQDVFSLLGIDYIIAPLKILQSLEESVTDPDVKYGYVPKLTPAIGKTYNFTEEELVKWDQLSLSAAMGPAAEELLASGLEGYVNQARRVEELFGKIWPPPNV

SEQ ID NO: 7899 - protein, 233 aa, Thermoplasma acidophilum
MGLKESKKENLNLNSGWLTLSIILLWVGWFGFNPGSELAFTTETVIVVITTFLAAASAMVSTMLTKFLVSKQDPGLIYAVNGVLMGLIVITPLAGYVSPGSAIILGLISGPIFVSAESIFSKHKWYSDPIGVLPGHMVGGIFGLLMIAFFTQTPFADASGASNLPNGILFGGGIMALHQLGLEAMAVVVVGAFVFTVSYASVYAISLLLNGILRDSEYSPARPANRLAKDTGA

SEQ ID NO: 7900 - protein, 133 aa, Zea mays
MSYYGDRRAESSIVEAFTLSPLPYPVILVLLMVTLLLGASWFFTYDDFIEEASQQLSWALLGVPIALVLLIRWISSVDSFEGYLGFYPRESRWKGRYERGPAEGSSPWGVALLVLLLLVLASFHSTIHDMWGP

SEQ ID NO: 7901 - protein, 171 aa, Brassica napus
  misc_feature (97)..(97): Xaa can be any naturally occurring amino acid
  misc_feature (168)..(168): Xaa can be any naturally occurring amino acid
MSAMTVPNLAVGSDHHLMPVIGFGTAASPPPEPLLLKQAVIDAIKLGYRPFDTSPRYLTEEPLGEALAEAVSLGLIGSRSELFVTSKLWCADAHGGXLVVPAIQRSLKNLKLDYLDLYLIHWPVSSKPGKYKFPIEEDDFLPMDYGAVCSEMEECKRLGLAKSRGLSXPHP

SEQ ID NO: 7902 - protein, 331 aa, Pseudomonas aeruginosa PAO1
MAAKYPLSPAMWRFVEHSRAFASDSPRLDAQRAAYARMCQAFAPPRPAGLRVLDSCLPAAPPVRVRRYRPDRPAPPGGWPALLYLHGGGWMLGGLDSHDFICADLAARLGLLVLAVDYRLAPEHPFPAALQDCLRAWQALSLGELDEALDGRRLLVAGDSAGGNLAAALCLALRDGGAPSPAAQILLYPLLSAAPSPSRIDCADAPLLGLGDVQACLDAYLPLAALHRQPLALPLEAADFTGLPPAFVAVAEFDPLRDDGERYGAALRAAGGEAGFYPGSGLVHGCLRGHGIDEVEALHEALRRAVQGFLAEDSGERQAGEESTAEHQPGE

SEQ ID NO: 7903 - protein, 496 aa, Nostoc sp. PCC 7120
MRSTVAEPPVLDKIIKNVRVVRPHNDAVELLDIGIKDGKFAQIAPNITPDTGQEIFDAKNLLGFPGVVDAHMHIGIYQPLDKDAVTESKAAAMGGVTTSLNYIRTGQYYLNKGGSYRDFFPEVLALSAGNFFVDYSYHVAPIASQHIDEIPLLFEEHGVTSFKIFMFYGGYGLHGLSDQQNLFLMINKEERYDFAHFEFIMRGVTRLMAEYPEARDYISLSLHCEVAEILNAYTKIVENDSSLSGLHAYSAARPPHSEGLAISIAAYLAHETNCANINLLHLSSRKAMEAALIMQTAFPHINFRREVTVGHLLLDVDTPNGTWAKVNPPIRPRADVEYLWQAVLNHQVDWIVSDHACCSAEQKRSAKDPNNIWLAKSGFGGTEYLLSGVVSEGSKRGMSYNHMAKLLSWNPSRRFGLLTKGDIAIGYDADLVLVDPNESFVVRAAESESQQGYTPFEGMELTGRVKSTFLRGSLIYHNGQVLGSPNGRYVRRSLGG

SEQ ID NO: 7904 - protein, 504 aa, Glycine max
MSALSNSSSSHGNSFLKMPAIKFTKLFINGDFVDSISGRTFETIDPRKEEVIARVSEGDKEDIDIAVKAARQAFDSGPWPRLPGSERAKIMMKWADLVDENIEELAALDTIDAGKLYYINKVAEIPSATNALRYYAGAADKIHGDVLKMNGDFHAYTLLEPIGVVGHIIPWNAPSLSFFIKVSPSLAAGCTMVLKPAEQTPLSALFYAHLAKLAGIPDGVLNIVPGFGPTAGAAISSHMDIDAVSFTGSIEVGREVLQAAAWSNLKPVSLELGGKSPLIIFNDADIDKASELALFGIMSNKGEICVAGSRVFVQEEIYDEFEKKLVEKAKSWVVGDPFDPKSLQGPQADRNQLEKILSYIEHGKREGATLLTGGNTVGNKGYYIEPTIFCNVKEDMLIARDEIFGPVLALMKFKTMEEAIKSANNTKYGLAAGIVTKNLDTANTMSRSIRAGIVWINCYLTVGSDVPFGGYKMSGFGRDLGLQALHKYLQVKSVVTPIHNSPWL

SEQ ID NO: 7905 - protein, 153 aa, Triticum aestivum
  misc_feature (120)..(120): Xaa can be any naturally occurring amino acid
  misc_feature (133)..(133): Xaa can be any naturally occurring amino acid
  misc_feature (138)..(138): Xaa can be any naturally occurring amino acid
  misc_feature (148)..(148): Xaa can be any naturally occurring amino acid
MAPTVMASSATSVAPFQGLKSTAGLPVSRRSNGASLGSVSNGGRIRCMQVWPIEGIKKFETLSYLPPLSTEALLKQVDYLIRSKWVPCLEFSKVGFIFREHNASPGYYDGRYWTMWELPXMFGCTDATKVINXWRSQXEYLTRIRIIXFENPQ

SEQ ID NO: 7906 - protein, 421 aa, Oryza sativa (japonica cultivar-group)
MQERCRVLLRFADLIEQHADEIAALETWDGGKTLEQTTGTEVPMVARYMRYYGGWADKIHGLVVPADGPHHVQVLHEPIGVAGQIIPWNFPLLMFAWKVGPALACGNAVVLKTAEQTPLSALFVASLLHEAGLPDGVLNVVSGFGPTAGAALSSHMGVDKLAFTGSTGTGKIVLELAARSNLKPVTLELGGKSPFIVMDDADVDQAVELAHRALFFNQGQCCCAGSRTFVHERVYDEFVEKARARALQRVVGDPFRTGVEQGPQIDGEQFKKILQYVKSGVDSGATLVAGGDRAGSRGFYIQPTVFADVEDEMKIAQEEIFGPVQSILKFSTVEEVVRRANATPYGLAAGVFTQRLDAANTLARALRVGTVWVNTYDVFDAAVPFGGYKMSGVGREKGVYSLRNYLQTKAVVTPIKDAAWL

SEQ ID NO: 7907 - protein, 344 aa, Sinorhizobium meliloti
MTNMMKALVKTKPEVGLWMERVPVPEIGPNDVLIRVRKSAICGTDVHIWNWDQWAEKTIPVPMVVGHEFMGEVVEVGPAVSKHHVGERVSGEGHIVCGKCRNCRAGRGHLCRNTLGVGVNRPGSFAEFVCLPEYNVVSIPDDVPDEIAAIFDPFGNAVHTALSFDLVGEDVLVTGAGPIGIMGAMVAKRCGARKVVITDINPVRLDLARKLGIDHVVDASKEKLADVMRVIGMTEGFDVGLEMSGAAPAFRDMIDKMNNGGKIAILGIAPAGFEIDWNKVIFKMLNLKGIYGREMFETWYKMIAFVQGGLDLSPIITHRIGIDDFRDGFEAMRSGNSGKVVMDW

SEQ ID NO: 7908 - protein, 231 aa, Brassica napus
  misc_feature (222)..(222): Xaa can be any naturally occurring amino acid
MEGIQNPVVSRSVEEVFGDFRGRRAGLLKALSTDVRKFYHECDPDKENLCLYGLPNETWEVNLPVDEVPPELPEPALGINFARDGMPEKDWISLGAVHSDSWLISVAFYFGARFGFGKNERKRLFQMINDLPTIFEVITGNAKQTKDQSANNHNSSRTKPSGVKASKTSPPPREDDDSGEDEEDDEQGAVCGACGDNHDDFWICCDACEKWFHGKCVKITPXKAEHIKHYN

SEQ ID NO: 7909 - protein, 201 aa, Thermococcus kodakaraensis
MAHGPRYRVPFRRRREGKTNYHKRLKLLKSKKPRLVVRKTLNHHIAQIVVYDPKGDKTLVSAHTMELMRDFGWKGHGGNTPSAYLLGLLIGYKAKQAGIEEAILDIGLHPPTRGSSIFAVLKGAVDAGLNVPHSEEIYPEDYRINGEHIANYAKALKEEDEALYRKQFSGYLVKGLEPEKLPEHFEEVKAKIIEKFEGARE

SEQ ID NO: 7910 - protein, 311 aa, uncultured archaeon
MPLDPQIKPILERIRALSIAASPQELRRQVEEQSRLLTAAVQEPIAETRDVHIPVSGGSIRARVYFPKKAAGLPAVLYYHGGGFVFGSIETHDHICRRLSRLSDSVVVSVDYRLAPEYKFPTAVEDAYAALKWVADRADELGVDPDRIAVAGDSAGGNLAAVVSILDRNSGEKLVKKQVLIYPVVNMTGVPTASLVEFGVAETTSLPIELMVWFGRQYLKRPEEAYDFKASPLLADLGGLPPALVVTAEYDPLRDEGELYAYKMKASGSRAVAVRFAGMVHGFVSFYPFVDAGREALDLAAASIRSGLQPS

SEQ ID NO: 7911 - protein, 267 aa, Picrophilus torridus DSM 9790
MIGMLTKDDVISVILEARDIIKSMENGPFLEPVNADRVLFVGDTHCAVDVTETVFRNYSDFDKIVFLGDYVDRGNTGIENLITILSMMINDPDKIIVLRGNHESPITNENYGFYNEITEKYDRETYYYAADLFSVMPYATVVNDYFCVHGGLASGLNYIDEIKELPLYDVVPDNQTAFELMWNDPREMINGFIPSPRGDNIFYFGEDIVDDFLNKNNLKGIIRGHETADGFRDDMNGKVRTVFSSRYHRLRAGVLRMENGEFFKDYI

SEQ ID NO: 7912 - protein, 124 aa, Glycine max
  misc_feature (49)..(49): Xaa can be any naturally occurring amino acid
MEPMDIVGKAKEDASLPKATMTKIIKEMLPPDVRVARDAQDLLIECCVXLGFGEYIEEVYAAYEQHKLEFMQDSLKGAKWSNRAEMTEEEALAEQQRMFAEARARMNGGAIQSKEPEADQSLES

SEQ ID NO: 7913 - protein, 357 aa, Chlamydomonas reinhardtii
MAAANQKPGPAGRPEPLIGHPRYEKIKDLNSGTFGFVQLARDKLTGETWAVKFIERGDKITKYVEREIINHRCLVHPHIVQFREVFLTPTHLCIVMEFAPGGDMFEYVVRKNGLREDEARWFFQQLIVGLDYCHRMGVVNRDIKLENTLLDSSPRPLVKICDFGYSKHEKFQSAPGSRVGTPAYLAPEVILTTKGKTYDGKIADIWSCGVMLYVMLVGAYPFERPEDKHDNQKLQKMIQRILHVDYHIPPHVRASEDCKDLLAKILVADPHKRITVDGIYNHKWYLKGLPPGVREMNDRVQPPPEGLQSVEEIKRLIEEARHVGVGAPGYVNPVETDEYIDDAMDNMYDEGSLDYND

SEQ ID NO: 7914 - protein, 362 aa, Sorghum bicolor
MGSTAEDVAAVADEEACMYAMQLASSSILPMTLKNALELGLLEVLQKDAGKALAAEEVVARLPVAPTNPAAADMVDRILRLLASYDVVKCQMEDKDGKYERRYSAAPVGKWLTPNEDGVSMAALALMNQDKVLMESWYYLKDAVLDGGIPFNKAYGMTAFEYHGTDPRFNRVFNEGMKNHSVIITKKLLEFYTGFDESVSTLVDVGGGIGATLHAITSHHSHIRGVNFDLPHVISEAPPFPGVQHVGGDMFKSVPAGDAILMKWILHDWSDAHCATLLKNCYDALPEKGGKVIVVECVLPVTTDAVPKAQGVFHVDMIMLAHNPGGRERYEREFRDLAKAAGFSGFKATYIYANAWAIEFIK

SEQ ID NO: 7915 - protein, 197 aa, Medicago sativa
  misc_feature (78)..(78): Xaa can be any naturally occurring amino acid
  misc_feature (110)..(110): Xaa can be any naturally occurring amino acid
MSASRFIKCVTVGDGAVGKTCLLISYTSNTFPTDYVPTVFDNFSANVVVNGSIVNLGLWDTAGQEDYNRLRPLSYRGXDVFILAFSLISKASYENVSKKWIPELKHYAPXVPIILVGTKLDLRDDKQFCIDHPGAVPITTAQGEELRKLINAPAYIECSSKSQENVKAVFDAAIRVVLQPPKQKKKKNKAQKACSIL

SEQ ID NO: 7916 - protein, 358 aa, Aspergillus oryzae
MGAPPKTAQNLSFVLEGIHKVKFEDRPIPQLRDAHDVLVDVRFTGICGSDVHYWEHGSIGQFVVKDPMVLGHESSGVISKVGSAVTTLKVGDHVAMEPGIPCRRCEPCKEGKYNLCEKMAFAATPPYDGTLAKYYVLPEDFCYKLPENINLQEAAVMEPLSVAVHIVKQANVAPGQSVVVFGAGPVGLLCCAVARAFGSPKVIAVDIQKGRLEFAKKYAATAIFEPSKVSALENAERIVNENDLGRGADIVIDASGAEPSVHTGIHVLRPGGTYVQGGMGRNEITFPIMAACTKELNVRGSFRYGSGDYKLAVNLVASGKVSVKELITGVVSFEDAEQAFHEVKAGKGIKTLIAGVDV

SEQ ID NO: 7917 - protein, 322 aa, Candida tenuis
MSASIPDIKLSSGHLMPSIGFGCWKLANATAGEQVYQAIKAGYRLFDGAEDYGNEKEVGDGVKRAIDEGLVKREEIFLTSKLWNNYHDPKNVETALNKTLADLKVDYVDLFLIHFPIAFKFVPIEEKYPPGFYCGDGNNFVYEDVPILETWKALEKLVAAGKIKSIGVSNFPGALLLDLLRGATIKPAVLQVEHHPYLQQPKLIEFAQKAGVTITAYSSFGPQSFVEMNQGRALNTPTLFAHDTIKAIAAKYNKTPAEVLLRWAAQRGIAVIPRSNLPERLVQNRSFNTFDLTKEDFEEIAKLDIGLRFNDPWDWDNIPIFV

SEQ ID NO: 7918 - protein, 285 aa, Xylella fastidiosa Ann-1
MTTNDTWFTEHFQATGSAIGFRVTGKLDEVQSPFQKIEIYNSTDWGKLMVIDGALMLTSRDNFLYHEMISHPALFTHTAPKCVVIIGGGDCGTLREVLKHPDIEQVTQCDIDEQVTRMAEKHFPELCTSNNDPRATLLFSDGVAYMADCPTNSVDVIIVDSTDPVGPAKGLFNRTFYESCFRALKNDGLLIQQSESPLALLELIKEMRHEMSKAGFKAFKTLPFPQPCYPTGWWSVTLSSKQPNANFAFRQTDAQTKPFDTLYYNAHLHHGVLVPPPFIAHALGE

SEQ ID NO: 7919 - protein, 384 aa, Bacillus anthracis str. A2012
MHEDLLGLEEIMMKAEEKFSPGLDGIVAAETKISFLDTVKGEIVIQGYDLIELSKTKEYLDIVHLLLEEHLPNEDEKATLEKKLKEEYAVPEGVFNVLKALPKETHPMDGLRTGVSALAGYDNDIENRSLEVNKSRGYKLLSKVPNIVANSYHILNNEEPIEPLKELSYSANFFYMLTGKKPTELEEKIFDRSLVLYSEHEMPNSTFTARVIASTQSDLYGALTGAVASLKGSLHGGANEAVMYMLLEAGNVEKFEELLQKKLYNKEKIMGFGHRVYMKKMDPRALMMKEALKQLCDVKGDYTLYEMCEAGEKIMEKEKGIYPNLDYYAAPVYWMLGIPIQLYTPIFFSSRTVGLCAHVIEQHTNNRLFRPRVNYIGERHVLSK

SEQ ID NO: 7920 - protein, 506 aa, Ruta graveolens
MDLLLLEKALLGLFAAAVVAIAVSKLRGKRFKLPPGPLGFPVFGNWLQVGDDLNQRKLANLSKKFGDVYLLRMGQRNLVVVSSPEMAKEVLHTQGVEFGSRTRNVVFDIFTGKGQDMVFTVYSEHWRKMRRIMTVPFFTNKVVQQQRFNWEDEAARVVEDVKKDPQAATTGIVLRRRLQLLMYNNMYRIMFDRRFESVDDPLFNKLKALNGERSRLAQSFEYNYGDFIPILRPFLRGYLKLVKEVKERRLKLFKDYFVEERKKLTSTKSMTEENFKCAIDHVLDAQQKGEINEDNVLYIVENINVAAIETTLWSIEWGIAELVNHPDIQKKLRAEIDRVLGPDHQITEPDTHKLPYLQAVIKETLRLRMAIPLLVPHMNLNDAKLAGYDIPAESKILVNAWWLANNPAHWKDPQVFRPERFLEEESGVEANGNDFRYIPFGVGRRSCPGIILALPILGITIGRMVQNFELLPPPGQSKIDTSEKGGQFSLFILNHSTIVLKPRSSV

SEQ ID NO: 7921 - protein, 465 aa, Oryza sativa (japonica cultivar-group)
MDDDGETPMPSLELHKLPTLAGAAIPNPIARHPLYHPSPSFFISPTDVVLRDILFDASPASAAGERRRRHVAAYHRAGPRREVAFDPATVRAAIFTCGGLCPGTNTVVRELVVGLSELYGVRGGVFGVRNGYRGFYSDEVVPLDPAAVEHWHKAGGAALGTSRGGFDLARIVDAIERHGFNQVYAVGGDGTMRGAARIHREVRRRGRLAVAVAGIPKTVDNDVGVVDRSFGFHTAVEAAQQAIAAGHVEAESAANGVGLVKLMGRSAGHIALHATLSSRDVDCCLIPEEDFYLRGAGGLFDFLYRRIKDNGHAVVVVAEGAGQRLIPRTTTTSASGACAGADESGNETFLDVGAWLKAEMRAWWEEEHAGEVFTVKYIDPTYMIRAVPANAGDNLYCTLLAHAAIHGAMAGYTGFVSGTINGNYAYIPMDEVAEAKNPVDTKDHKWAWVRSITNQPDFIRAGPTS

SEQ ID NO: 7922 - protein, 412 aa, Arabidopsis thaliana
MLLSKRFKSQWLLVPKLEFDDSTHLPETWGYQEPDYGNFRRFVDRSLLSREGRVLQTLFLKLGRQCSYDDIAIWVGIAVKRGLMELKLKYTDSYYPKRSSLPRSLYTCETLVVLKLKKGYLDVPDLVCLRSLKTLSLRDMNYSNASCLLRLLASCPVLEELFIQQGYYDSCALSFKIILPCLKKLSYLPKRKKKYSGIDRSEVSGGISGLVLDAPSLKYLHIVDRSGLFSVSEIININAVVKATLEVNASRPEKLLYSLVSVEHIRLCLSATEVVYPVGLGSSFHKLKRLEVCTCKSEWLDLFIHLLEDSPSLQDIKINQCHPVTNPRPQWNQPGSVPRCLSSSLETLEWVEYGGTHEEKELSTYLFKTAVCFKKASFTAKWSGGDANKKLQMLQELALSPRVSPTCELVFN

SEQ ID NO: 7923 - protein, 428 aa, Arabidopsis thaliana
MDKISQLHDELLLGILSLLPNAKDVVATMVLSKRWRYLWMMVPSLVYDDSYQDIDYGRFSRFVDRSLALHKAPVIDTLHFKLGHICGSGDTLIGAAEKCCVRKLIIKIDDTSSRSSKTDQVILPMSLCSGVHIMLADLKLQNVVLVDVSTPVSFPSLKRLRLKSVKYPGNEFVNNLISSCPVLEDLVVKQCSDDNVTILTVRVPSLKRLSLIQRAELEIDVPHDFVIDTPSLEHLKIVDYTYGSRVVKSTMNRIITASMDVFSPQTKEILGSLTSTKRLFLCLPTSKDAYPVGNIFGSLIHLTICTCETEWLNVLIRVLRDSPNLKTLKIEQYHNLRDEDPRPCWNETSLVPEYLLPSLETFEWVDYEGTKTEKQVVAFILRIASCLKQATIVSFKYIDHDKKLEMLNDFPVSSRRSPACMLAFSWNL

SEQ ID NO: 7924 - protein, 450 aa, Arabidopsis thaliana
MNLIRFLLVFQGKIQMNESRKKLNCQSRQFNVDKISDLPEDLLVHILSLLPTTNDIVATSGVSKRWESLWTKVHKLRFNDRIYDGKRYDSFLHFVEKSLILHKAPTLVSLRLSVGPKCTADDIGLWIKLALDRNICELIIKHYPDHGHIRLSRRLCDSKTLVSLKLKNAILGAIWLPTCFISLKTLHLRYVKYSGDESVRTLISSCPSLRNLVVKRHNEDNVKRFAIIVRYLQSLTVYLSPLHGVADSDAYVINTPNLKYLNIKDHYTDLCSFEDMPYLDEANLDVAFTHTENFFESLTSVKKLSLCLKKSNYPEGIIFSQLDHLELCTCDDSKWLNILAMLLPDSPKLRVLKLNDKYHPLRAKEPRPRWNEPSSVPECILYSLETFKWVHYEGMEEEKELVGFIFRNGSLLKKATIIPPNSIDSDTKLEMLMELSLSSRRSPICQLEFS

SEQ ID NO: 7925 - protein, 250 aa, Brassica napus
MNSVSTFSELLGSENESPVGSDYCPMLAASCPKKPAGRKKFRETRHPIYRGVRLRKSGKWVCEVREPNKKSRIWLGTFKTAEIAARAHDVAALALRGRGACLNFADSAWRLRIPETTCAKDIQKAAAEAALAFEAEKSDTTTNDHGMNMASQVEVNDTTDHDLDMEETIVEAVFREEQREGFYMAEETTVVGVVPEEQMSKGFYMDEEWMFGMPTLLADMAAGMLLPLPSVQWGHNDDFEGVADINLWSY

SEQ ID NO: 7926 - protein, 1305 aa, Neurospora crassa
MATTTALPTLATAVTTAVSTASISGSVLSTISSALASTITTSASLTSSSSSTSSRVLTTTTSVPPKQVPNTDAAGSAQKFGGISLVAFLTALATSLVVFGVQMGLFLLLRHKLARIFKPKTYLVPERERTEPPPASPWNLLSTVLRYNDREIIKKCGLDAYFFLRYLQTLLVLFIPIAIVVIPILIPINYVGGLGHQVVDTNTTDTDDSDVPTGLDTLAWGNVRPEHYRRRWAHLILALLVIIWVCGVFFAELRVYVKIRQDYLTSAEHRLRASANTVLVSSIPDKWLTEDALRGLFDVFPGGIRNVWLTRDFTKLLEKIHRRDAIHVQLEEAETELIREAKRRQLKQRSLEEKRIRKAHQVKAESKKERKHRAKAEDDEAKRRAEDNGGLSVGDDDAVPHDVATAVHGGEKLEGKGLGDIQEGESEGSPHHGPRGGNGLFKVGENLGRGLRKGVGFVEETGHNILVLPKALQHNVEGELERTGGFDFIKDGAQSSPTSSTSSEYDSKLHPGDDDAQPKPSFASETPLQASQARHAHTLSEATQASTVQKGPDTRTIGNTTRKVSNVNDMYVTEKTRWYEFWKPPSGGYVSPVPQGYEREDYPWKVERTKWQKFKAAIPFYHSDIEDVEYPPAFTKDYTTEKEEGAEWQKWLSAKDRPHHRLALFDWTPGWLPALPLLNKKVDTIYWCRAELAKLNLEIEEDQQHPERYPIMNSAFIQFNHQVAAHMACQSVTYHIPKQMAPRTVEISPNDVIWDNMAIKWWHEWARSALVFAVVTGMLVLWAFPVAWTASLAQLDALVEKYSWLHWLVENKTIHNVIKGVAGVLPAAVLAILLILVPIALDWLATFQGAKTGSQTTETVQTYYFAFLFVQVFLVVSITSSTFQTIANITQDITSTPEVLAENLPKAANYFFSYMILQALSTSSGTLLQIGTLFMWYIMARILDNTARAKWTRNTQLPSVTWGSFFPVYTNFACIALIYSVVAPLISIFAIITFALLWCAHRYNMLYVTRFRTDTGGVLYPRAINQTFTGLYVMELCLIGLFFLAVDENDQVACVPQAIIMIIALIFTILYQYLLNRSFGPLLRYLPITFEDEAVIRDEAFQRAQERRLGIIRDDDEATALNRSGPGASDGKDIELRNLHKRTKSEADSLSRLGKLNPVRGIVQAGSWAARGGRQVRQAAFGKAEENLRTATIYRNERRQKDIEAQRAIGDALFGGYHDEIEDLTPEERDVLVRKAFQHYALRARRPTVWIPRDDIGVSDDEIKRTQEFSKYIWISNEGTALDSKVRVVYGRNPPDFSEVDIINL

SEQ ID NO: 7927 - protein, 159 aa, Medicago sativa
MSDEEHHFEPAADAGASKTYPQQAGTIRKNGYIVIKSRPCKVVEVSTSKTGKHGHAKCHFVAIDIFNGKKLEDIVPSSHNCDVPHVNRTDYQLIDISEDGFVSLLTDNGSTKDDLKLPTDDSLLTQIKDGFADGKDLVVSVMSAMGEEQICALKDIGPK

SEQ ID NO: 7928 - protein, 294 aa, Glycine max
MSEALEEVVPSMKGGCEEEGLNLEATELRLGLPGCESPEREGVFKSVVVSGAKRGFSDAIDGNWNGGGSEKDAAALFSPTSRGAVSVSVSAAKSLTLTATDCTNQPTALGASVLKETVPHSPKPLHENKPQISAPAAKAQVVGWPPIRSFRKNSMASQPQKNDAAADAEAKSGCLYVKVSMEGAPYLRKVDLNSFTTYKDLSLALEKMFSCFTLSQCGSYGVSSRENLSESRLMDLLHGSEYVLTYEDKDGDWMLVGDVPWEMFTESCKRLRIMKSSEAIGLAPRAMEKCKSRY

SEQ ID NO: 7929 - protein, 160 aa, Azotobacter vinelandii
MSAFHDLTLRGLDGQDLPLAQFRDKVVLVVNVASKCGLTPQYAGLEKLHLQYRERGFSVLGLPCNQFAGQEPDNEAQIREFCSLNYGVTFPLAAKLEVNGSGRHSLYRLLAGEGAEFPGDITWNFEKFLVGRDGRVLARFSPRTAPDDPALLQAIEKALG

SEQ ID NO: 7930 - protein, 151 aa, Rhodobacter sphaeroides
MRLAALLLAALLATPAFAVQPDEILPDPALEARARDISQGLRCLVCRNENIDDSNAQLARDLRLLVRERLAAGDSDAEVVEFVVDRYGEYVLLNPTTGGANLILWIAGPAMLAGGLGLAALYLRRRRTAPDAASAALSDEEQARLPEILKD

SEQ ID NO: 7931 - protein, 402 aa, Bacillus cereus G9241
MPKHRKQSKIKIYRITSYKKDKRSELDSDKFELEQQEIENKQDKHGKQGKQDKHDKQDKQDKQDKQDEQDKQDKQDEQDEQDEQDKQDKQDKQVQTENVVIVPTDSHNLDIWDEISLKEIQAGEHTSLLNEKSNYQNINLVQVSDIRLYLDNQLQFSSVDEQIYHEALVHPIMAKVIDPKRVLILGGGDGLALREVLKYETVLHVDLVDLDEAMINMARNVPEIVSLNKNAFFDNRVNVHVCDAKEFLNSPSSLYDVIIIDFPDPATEVLSTLYTSELFARIATFLTEDGAFVCQSNSPADAPLVYWSIGNTIENAGLIVKSYHIIVPSFGTDWGFHIAANSSHILDQIEQLYVVPTPRTLPSLLFPLFQFKEEYLEQCNHALINSESNLILHQCYKQEMEF

SEQ ID NO: 7932 - protein, 319 aa, Lactobacillus sakei
MKRIGILTSGGDAPGMNAAVRAVARKAMHEGLEVYGINYGYAGLVAGDIFKMDPITVGDKIQRGGTFLYSARYPEFAQVEGQLKGIEQLNKFGIEALVVIGGDGSYHGALRLTEHGYNAIGLPGTIDNDIPFTDQTIGFDTAVNTVLESIDRIRDTAASHERTFVVEVMGRGAGDIALWAGVAGGAQDIIIPERDFDVKAVAEKLRASREHGQKHAIIVLAEGVMHADEFSEKLSEYGDFHLRSTVLGHVVRGGSPTASDRVLASRLGSKAVELLLEGKGGVALGIEKNEIIAHDMLDLFNHKHHAMLDLYDLNEDLAY

SEQ ID NO: 7933 - protein, 186 aa, Zea mays
MASLGLPGPSSYHDLCCYGAGIAGNIFAFVLFISPLPTFRRIVRNGSTEQFSATPYIYSLLNCLVCMWYALPFVSYGVVLVATVNTIGAAFQLAYTAVFIAYADAKKRLKVSVLLAGVFCVFGLIVYVSMALFDPKPRRTFVGYLSVASLIFMFASPLSIINLVIRTKSVEYMPFYLSLSMSLMSM

SEQ ID NO: 7934 - protein, 428 aa, Bacillus halodurans C-125
MKTLIKNGSIVTKEGTVKTQDVLLHDGVISAIGLNLEETDAHVIEANGKLVTPGLVDLHVHLREPGGEAKETIETGTKAAAKGGFTTVAAMPNTRPVPDSAEQMSWLTGRIDETGVVRVLPYAAITTRQLGRELTDFAKLKEAGAFAFTDDGVGVQSAAMMLEAMKEAAKLEMAIVAHCEENTLIQNGSVHEGVFSKKHGIAGIPSVCESVHIARDVLLAEAAGVHYHVCHISTKESVRVVRDAKRAGIRVTAEVTPHHLLLCDEDIPGLDAHYKMNPPLRGKEDREALIEGLLDGTIDFIATDHAPHTEEEKGQGMERAPFGIVGLETAFPLLYTHFVKKGTFTLKQLVDWLTIDPAETFQLPYGRLEEGAPADVTIIDLEAERAIDPAHFASKGRNTPFAGWTCQGWPVATLVGGKLVWEEKEVAR

SEQ ID NO: 7935 - protein, 154 aa, Oryza sativa (japonica cultivar-group)
MAEEQRWQEGCHRLCANNCGFFGSPATLDLCSKCYRDRQGRESTAPVVVAAAASACPATHPSSPSSSSCPAFLPSSTAAEAGVVVAAVAKASRCASCRKRVGLTGFACRCGGTFCGAHRYPERHACGFDFKAAGRDAIARANPLIKGDKLKDKI

SEQ ID NO: 7936 - protein, 157 aa, Zea mays
  misc_feature (29)..(29): Xaa can be any naturally occurring amino acid
  misc_feature (67)..(67): Xaa can be any naturally occurring amino acid
  misc_feature (99)..(99): Xaa can be any naturally occurring amino acid
MAASSTATSVHDFIVKDASGKDVDLSTYXKGKVLLIVNVASQCGLTNSNYTELAQLYEKYKDQGFEXPGTNEEIVQFACTRFKAEYPIFDKVDVNGNNXAPIYKFLKSSKGGLFGDSIKWNFSKFLVDKEGRVVDRYAPTTSPLSIEKDIKKLLGSS

SEQ ID NO: 7937 - protein, 496 aa, Pseudomonas fluorescens PfO-1
MTTTRNDWEQRFQSLTLESRAFINGEYRPAISGETFECLSPVDGRFLASVASTDEADANLAVEAARQSFNAGVWANKAPAERKRILIRFADLILQHQEELALLETLDMGKPISDSMSIDIPATANAIRWSAEAIDKIYDEVAATPHDQLGLVTREPSGVVAAIVPWNFPLIMASWKFAPALAAGNSFILKPSEKSPLTAIRIAQLALDAGIPKGVFNVLPGFGHTVGKALALHMDVDVLAFTGSTAIAKQLMIYAGQSNMKRVWLEAGGKSPNVVFADAPDLRAAAQAAAGAIAFNQGEVCTAGSRLLVERSIREQFIPLLVEALQAWKPGHALDPATTVGAVVDQRQLDNVLRYISIGREQGAELIAGGRRTLEDTGGTYIEPTIFDGVTNAMTIAKEEIFGPVLSLITFDTVEEALHIANDSIFGLAAGVWTSNLSKAHTFARGLRAGSVWVNQYDGGDMTAPFGGFKQSGNGRDKSLHAFDKYTELKATWIKL

SEQ ID NO: 7938 - protein, 361 aa, Erwinia carotovora subsp. atroseptica SCRI1043
MKALAKLRPEEGIWMMDAPMPELGHNDIMIKIRKSAICGTDVHIYNWDEWSQKTIPVPMVVGHEYVGEIVAIGQEVNGFHIGDRVSGEGHITCGYCRNCRAGRRHLCRNAIGVGVNRPGSFAEYLVIPAYNAFRIPDNISDELAAIFDPFGNAVHTALSFDLVGEDVLITGAGPIGMMAAAVCRHVGARNVVITDVNAYRLELASKMGATRAVNVAEEKLTDVMIELGMTEGFDIGLEMSGAPSAFRAMLKAMNHGGRIAMLGIPHEPMSIDWGEVIFKGLFIKGIYGREMFETWYKMSALIQSGLDLSPIITHRFHIDEFQKGFDAMRSGQSGKVILNWDEAYTRHTSSCMCVDCATRHT

SEQ ID NO: 7939 - protein, 1569 aa, Streptococcus gordonii
KSKVAKTLCGAVLGAALIAIADQQVLADEVTETNSTANVAVTTTGNPATNLPEAQGEATEAASQSQAQAGSKDGALPVEVSADDLKKVTDAKAAGVNVEQDQTSDKGIATTAAENAQKQAEIKSDYAKQAEEIKKTTEAYKKEVEAHQAETDKINAENKAAEDKYQEDLKAHQAEVEKINTANATAKAEYEAKLAQYQKDLAAVQKANEDSQLDYQNKLSAYQAELARVQKANAEAKEAYEKAVKENTAKNAALQAENEAIKQRNATAKANYDAAMKQYEADLAAIKKAKEDNDADYQAKLAAYQAELARVQKANADAKAAYEKAVEENTAKNTAIQAENEAIKQRNAAAKATYEAALKQYEADLAAVKKANEDSEADYQTKLAEYQTELARVQKANADAKAAYEKAVEDNKAKNAALQAENEEIKQRNAAAKTDYEAKLAKYEADLAKYKKKLAEYPAKLKAYEDEQAQIKAALVELEKNKDQDGYLSKPSAQSLVYDLEPNAQLDLKTEGKLLTAAAVDEAFKKDTDQYGKKNLQLDNLNVKNLENGATTSSVELYGNINNKSDWTTNVGNKTEVKWGSVLLERGQSVTATYTNLQNSYYNGKKISKIVYKYTVDPSSQFKNPSGKVWLGIFTDPTLGVFASAYTGQVEKDTSLFIKNEFTFYDENDQPINFDNALLSVASLNREHNSIEMAKDYSGKFVKISGSSIGEKNGMIYATETLNFRQGQGGSRWTMYPRANEPGSGWDSSDAPNSWYGAGAISMSGPNNYVTVGATSATNVMPVAEMPQVPGRDNTEGKRPNIWYSLNGKIRAVNVPKITKEKPTPPVAPTEPQAPTYEVEKPLEPAPVVPTYENEPTPPVKTPDQPEPSKPEEPTYETEKPLEPAPVAPTYENEPTPPVKTPDQPEPSKPEEPTYETEKPLEPAPVAPSYENEPTPPVKIPDQPEPSKPEEPTYDPLPTPPLAPTPKQLPTPPVVPTVHFHYSSLLAQPQINKEIKNEDGVDIDRTLVAKQSIVKFELKTEALTAGRPKTTSFVLVDPLPTGYKFDLDATKAASTGFDTTYDEASHTVTFKATDETLATYNADLTKPVETLHPTVVGRVLNDGATYTNNFTLTVNDAYGIKSNVVRVTTPGKPNDPDNPNNNYIKPTKVNKNKEGLNIDGKEVLAGSTNYYELTWDLDQYKGDKSSKEAIQNGFYYVDDYPEEALDVRPDLVKVADEKGNQVSGVSVQQYDSLEAAPKKVQDLLKKANITVKGAFQLFSADNPEEFYKQYVATGTSLVITDPMTVKSEFGKTGGKYENKAYQIDFGNGYATEVVVNNVPKITPKKDVTVSLDPTSENLDGQTVQLYQTFNYRLIGGLIPQNHSEELEDYSFVDDYDQAGDQYTGNYKTFSSLNLTMKDGSVIKAGTDLTSQTTAETDATNGIVTVRFKEDFLQKISLDSPFQAETYLQMRRIAIGTFENTYVNTVNKVAYASNTVRTTTPIPRTPDKPTPIPTPKPKDPDKPETPKEPKVPSPKVEDPSAPIPVSVGKELTTLPKTGTNDSSYMPYLGLAALVGVLGLGQLKRKEDESK

SEQ ID NO: 7940 - protein, 503 aa, Arabidopsis thaliana
MDKITGFSDDELLVKILSFLPTKAAVTTSILSKQWKFLWMRLPKLEYHDDIKIYILYMRGGSRSRTDSILLEKSQRMWRFIDKNLPLHSSPVIESLRLTIYNELFQPESINLWVEIAVSRCVKELSVRFSPFKGKRDALLPTTLYTCKSLVTLKLRENILVDVPHVFCLPSLKTLHLSHVTYADEESLQRLLSNCFVLEDLVVERRVGDNVRNFAVIIPSLLSLSFEILGQCSSEEYVIHTPSLKYFKARDFGECSTCLILNMPKLEEVFVSTAGHNIKKLLESVTYVKRLSLFIPDNNAEAFTALYGDVIVFNQLEHLTFIIWEAYCSKLLYWLLIASPKLRNLEFNDQFSSDGMDTLVFWEQMITSVPQCLLSSLQTFKWLGNGDSIEGKDLATFILRNSCQLKTATISIGQGQNKLEIEKELLLHQNMDKISGISDDVLLVKILSFRPTKVAVSTSVLSKQWKYLRKRVLKLEYDDTECKTKPSKSSHKRFRCFVKRFCK

SEQ ID NO: 7941 - protein, 268 aa, Zea mays
  misc_feature (99)..(99): Xaa can be any naturally occurring amino acid
MFGYRKAGPDLEAGGSSLLYPGMTESPELRWAFVRKIYVILAVQLAMTAAVSAFVVKVPAVSNFFVSSNAGVALYIFLIILPFLGKPGSPVFWGIFSPXAEIGCNLLRAVLCPLRYYHQKHPVNLLLLGLFTVAISFAVGMTCAFTSGKIILEAAILTAVAGISLTAYTFWAAKRGHDFNFLGPFLFAAIMVLMVFSLIQIFFPLGKISVMIYGGLASLIFCGYIIYDTDNVIKRYTYDEYIWAAVSLYLDVINLFLSLLQLLRAADS

SEQ ID NO: 7942 - protein, 422 aa, Arabidopsis thaliana
MVSYRDRLSQLPDDFLLQILSWLPTKDVLVTSLLSKRWRFLWTLVPRLNYDLRLHDNTCPRFSQFVDRSLLLHKAPTLESLNIKIGSICFTAEKDVGVWVRIGVDRFVRELSVSYCSGEEPIRLPKCLFTCSTLAVLKLENITLEDASCYVCFQSLKTLHLLDVKYLDDQSLPRIISSCSSLEDLVVQRCPGDNVKVVTVTAPSLKTLSLHKSSQAFEGDDDGFLIDTPKLKRVDIEDYWGGFCYIENMPEVVEANVDVIYKNTEKLLGSITSVKRLALCLITSDAAYPAGTIFSQLVHLELCTCAPRWWDLLTRLIEDSPKLRVLKLRQKHIRRAPSPRASWKQPALPKCLLFHLETFKWELYEGSQKQKEVATFILKHAIRLKTAIISPKPTSTLLEKHEMLKDLSSSPRGSSTCELLFD

SEQ ID NO: 7943 - protein, 482 aa, Ehrlichia canis str. Jake
MSIPITVAYGDGIGPEIMEAVLLILSEAESGLVIETIEVGHNLYKKEWSSGIAPSSWDSIFRTKVLLKSPTMTPQGQGHKSLNVTLRKKLGLYANIRPCISYHPVIKTKYPNLNIVIIRENEEDTYTGIEHRLTSDTYQCSKVITRSGSERICNYAFHYATVHNRKKVTCLIKDNIMKMTDGIFHKSFSKIAENYPSITSDHYIVDIGMAKVAANPENFDVIVTTNLYGDIVSDIVAELSGSIGLAGSANIGDNYAMFEAVHGSAPDIAGKNIANPSGLLNAAIQMLIYLKKFDKAELIYNALLKTLEDGMHTADIYQSQVSKGKVSTMGFAKAIIDNFGQSPTQFPKSIFQNSAGESGISYTYKPSYATKVLVGVDLSISCDSADLNLKQLISNIQGVTHDKLELVLIHSKGLEIWPDESSNANLSYMDQICCRFYMKGQSDKIVNEHVNQLLFDMSKKKIDVVKMEKLYLYDNQPGFFTM

SEQ ID NO: 7944 - protein, 322 aa, uncultured crenarchaeote DeepAnt-EC39
  misc_feature (315)..(315): Xaa can be any naturally occurring amino acid
MDHHHFKGNDIPHIKLDPDMSIEDLVKIYSESGFNGRKLGEAAKVYAKMIKEDATICLTASGALTPVGFGGIFKTLIERGFVDWIITTGANVYHEDHFAWGLPVKQGDFQVDDMKLYDMEIVRIRDVFIKFYETLEAQDQVIQKTFKNNFVDKPFTTAEFCNFLGKISSENSKYPEKSFVTTAYNYDVPVYISTLKDSSLALNLAIHRLREKTYNLDFVREILEQASILYNSKKSGIVELGGGVPKNAAQQTGPLLDQILRQNVGGQDYIIQITDARPDTGGLSGATLQEGKSWGKVQDAHHDMITVYADATIGXFLFLHCM

SEQ ID NO: 7945 - protein, 535 aa, Glycine max
MSVIAVLPFLLHVLMAASESEPFQDSILQCLSLYSDPSLPNPISAVTYFPNSPSYPPILDSYIRNLRFSSSTTPKPSFIVAPTHVSHIQASIICCKSFNLEIRIRSGGHDYDGLSYVSEAPFVILDMFMLRSVKVNLDDDDDTAWVDSGSTIGELYHAIAERSKIHAFPAGVCHSVGVGGHFSGGGYGNMMRMFGLSVDHVLDAIIVDAQGRVLDRKLMGEDLFWAIRGGGGASFGVVVSWKIRLVPVPEVVTVFRVERTLEQGATDVVHKWQYVADKLHDGLFIRVVLSSVKRKGVKTIRAKFNALFLGNSQELLGVMNKSFPELGLVAEQCIEMSWIDSVLFWDNYPVGTSVDVLLQRHNTQEKYLKKKSDYVQQPISKTGLEGIWNKMMELEKPALALNPYGGKMGEISEVETPFPHRAGNIYKIQYSVTWKEEGEDVANRYLDRIRRLYDYMTPYVSSSPRSSYINYRDVDIGVNGPGNASYAEARVWGEKYFKRNYDRLVEVKTKVDPSNFFRYEQSIPSLASGLSIMSE

SEQ ID NO: 7946 - protein, 430 aa, Arabidopsis thaliana
MDRISLLPDDVVFKILSFVPTKVVVSTNLLSKRWRYLWKHVPKLDYRDPSLVDTEHWRASRFVDKFLLLHEAPVLETLHLSLSRNCPPSDIETWISVAISRRVRNLHIYRYIPSTGPIRLPRSLYTCETLVSLYLLLDFTVDDAPFMFCFRSLKVLVLLFAKFSSDEIVNRLLSGCPVLEGLILIRRNDNVKNFTIAAPSLQRLIAIDCRSQVPGDDVGFVIKAPSLKSLTLLNFSPHSGFRSLVKMPDLVKASIKVRHGDSKMFMGCLTSTKRLALCLQPPLDSCPIGVFNQLVSLSLCTCSLGWCRLILNHTPKLRVLRFEQRQAKFYQLLDPLKRCCSSSVDVQTQWEQPSSVPKCLISSLETVEWIDYKGREVEKKVVMYLLENSRQLKTMAIRSLKSTNDNEKLKMLQELSSIHRICTKCGLSFT

SEQ ID NO: 7947 - protein, 396 aa, Gossypium hirsutum
  misc_feature (195)..(195): Xaa can be any naturally occurring amino acid
  misc_feature (284)..(284): Xaa can be any naturally occurring amino acid
  misc_feature (301)..(301): Xaa can be any naturally occurring amino acid
MSLSLQSSPSSFLSSSLPKLRLGFANGCPSSSLLFKFNASFPAIRASSGFSSSLDTGLRTELDAVSTFSEIVPDTVIFDDFEKFPPTAATVSSSLLLGILSLPDTIFRNAVDLALADSTCSRLDNPELRLACFFNKALVNVGGDLAKLVPGRVSTEVDARLAYDTHGIIRRVHDLLKLYNEIDVPPERLLFKIPXTWQGIEASRLLESEGIQTHLTFVYSFAQAAAAAQAGASVIQIFVGRVRDWARNHSGDPEIEAAIQRGEDPGLGLVTKAYNYIHKYGHKXKAYGLQQFETKQDLFSXLGVDYIIAPLKILQSLKESITAPDEKYSYIRRLSPQSAANHDFTAEELTKWDQLSLASAMGPASMQLLAAGLEGYVNQANRVEELLDKIWPPPNV

SEQ ID NO: 7948 - protein, 329 aa, Zea mays
  misc_feature (183)..(183): Xaa can be any naturally occurring amino acid
  misc_feature (241)..(241): Xaa can be any naturally occurring amino acid
MAAKCYPTVSDEYLAAVAKARRKLRGLIAEKNCAPLMLRLAWHSAGTFDVATKTGGPFGTMKCPAELAHGANAGLDIAVRLLEPIKEQFPILSYADFYQLAGVVAVEVTGGPEVPFHPGRQDKPEPPPEGRLPDATQGSDHLRQVFSTQMGLSDQDIVALSGGHTLGRCHKERSGFEGAWTAXNPLIFDNSYFTELLSGEKEGLLQLPTDKTLLTDPGLSAHLWDKYAADVDALRVADYGXRHNQASQLGFLRGAWSSNPSILRQLLLQGETERTKKKEGLLQLPSDKALLSDPSFRPLVDKYAADEDAFFADYAEAHLKLSELGFAEA

SEQ ID NO: 7949 - protein, 204 aa, Rubrivivax gelatinosus PM1
MMVLYSGTTDPYSHRCRFVLFEKGMDFEIRDVDLFAKPEDIALMNPYNEVPILVERDLILYESHIINEYIDERFPHPQLMPGDPVARARVRLFLFNFEKELFAHVNLLEGRSGVKATDKQLEKARSQIRDRLTQLAPIFLKNKYMLGDDFSMLDVAIAPLLWRLDYYAIDLSKNALPLLKYAERIFSRPAYIEALTPSEKVMRK

SEQ ID NO: 7950 - protein, 427 aa, Oryza sativa (japonica cultivar-group)
MRGGAGALPVPGGLALGVVLLLVLAVLPSRAAGVNVTAALAAFPSFADFARLLESSPVAGELAARSSLTLLAVPNNNLPRSPSAFAAASGADIADVLRYHVLLEYLSPSDLARLPASGKLVTTLFQTTGRAPSDLGAVNLTVGGNSTVVVRSPAPFPGSSATVLGAVTAVPYNLSVLAVGGLIVPSGLDVAASDSRPAGGVNITHVLADARGFNVAASMLEASGVADEFTADERGAGITVFVPTDDAFADLPATDRLQSLPADRKATVLRFHVLHSYYPLGSLESIVNPVQPTLATERFEAGQFTLNITRVNGSVAIDTGIVQASITRTVFDQNPVAVFAVSKVLLPKEMFGRGGADSDVMAPPPDAMAPDAAENVRTPPTRLSSPPALRGGADSESSSALSTARAVNWWCIRLVLLNLHLLLLPLV

SEQ ID NO: 7951 - protein, 356 aa, Tropheryma whipplei TW08/27
MRMKALVYHGPGKRSLDTVDDPTIKLGTDVILEMETTTICGSDLHILKGDVAAVKPGTVLGHEGIGKIVEVGKDVKSHSVGDRVIVSPMSSCGVCRFCRANNNGHCLGDSEGPGGWRLGGLINGVQAQFARIPLADNSLHKLPSGLDPKVGILVSDVLPTGHEVGAQAGQVTLGSVVAVIGCGPVGLGAIVTSLLYSPSKVIAVDADSNRLELARKLGATDTVRVNRERPLDAIEDVKKLTEGGFGVDVAIEAVGVPVTFSMALGIAAPGGRVANIGVHGAPVDFPLQDLWDKNIAVTLGIVSTHTIPLLLAALSEGKIDASQFVTHEFDLSDLERAYDVFSAAAQHNVVKVAIRA

SEQ ID NO: 7952 - protein, 472 aa, Mesorhizobium loti MAFF303099
MAAVRDLKATEMAASGGDDAIELGKRHLIQPWPYAGSVGAEARALIGEGDGIYITDNTGKRLIDGPAGMWCVNVGHRREELARVMYDQAMALSYNTPWYTMNAPSAELAMRIAGHAPDDLSHVFYTTGGSSAVETALRFMQFYNNVRGRPEKKLILSRGGAYHGSTYLSASLNGRPRDRDWMDGADELVIKLSSPDPFRRPQGMSLAAFTDFLVDQFRDTVARVGADKIGAFVGEPVQASGGVVIPPDGYLKRIREICRVNDILYVSDEVVTGFGRLGHVFASGDVFGIDPDMITFAKGVTSGYFPLGGVIISERLLQELRRSNHPDAMFGHGLTYTSHPVGCAVALKNLDLLEESVLAHTQAVAPYFQAQLKTLEELPLVGEVRGAGLMGCVECVADRESKNPLQLDKDVGKRIDAHCHELGLLVRPLINMCVMSPPLIITREQIDDMVGILREGISRTMDDLWKEGVWRG

SEQ ID NO: 7953 - protein, 225 aa, Halobacterium sp. NRC-1
MKQAGGSAEQKRRAGEAAVAEEVTEGAVVGLGTGSTVAHAIRALGAEASDVSGVATSFESRRRAVDAGVTVTSLEAASVDVAIDGADQVADGVLVKGGGAAHTREKYVAASADRFVVVADPSKESDVVDVPVPVAVVPDAWPVVVDRVEALGGTATLRDAERKDGPVVTDTGSLVVDCDFGAIETPEAVAASLSAVPGVVEHGLFVGMADAVYVGTDDGVRVRDP

SEQ ID NO: 7954 - protein, 508 aa, Burkholderia cepacia R1808
MNPFDLKQLGLDVEYPYRQQYDNYIGGKWVPPVKGDYFENVSPINGKPFCRVPRSGAEDIEAALDAAHAARRKWAKTSVTERANLLLAAADRMEKNLKLLAVAETIDNGKPLRETMAADLPLAVDHFRYFAGCIRAQEGGISEIDDNTVAYHFHEPLGVVGQIIPWNFPLLMAAWKLAPALAAGCCVVMKPAEQTPASVLVLMELIGDLFPAGTINIVNGFGKEAGEALATSKRIAKIAFTGSTPVGKHILRAAAESLIPSTVELGGKSPNIFFADVLDQDDAFLDKTLEGLAMFALNQGEVCTCPSRILIQESIYERFIEKAVARVERIKAGHPLDLQTMIGAQASQQQLDKILSYIDIGRGEGAQCLTGGERTAPAADLGAGYYVKPTMLLGNNKMRVFQEEIFGPVASVMTFKDEQEAIELANDTFFGLGAGVWTRNGTRAYRMGREIEAGRVWTNCYHLYPAHAAFGGYKQSGIGRETHKMALSNYQQTKCLLVSYQAEALGFF

SEQ ID NO: 7955 - protein, 277 aa, Corynebacterium sp.
MPNIPTISLNDGRPFAEPGLGTYNLRGDEGVAAMVAAIDSGYRLLDTAVNYENESEVGRAVRASSVDRDELIVASKIPGRQHGRAEAVDSIRGSLDRLGLDVIDLQLIHWPNPSVGRWLDTWRGMIDAREAGLVRSIGVSNFTEPMLKTLIDETGVTPAVNQVELHPYFPQAALRAFHDEHGIRTESWSPLARRSELLTEQLLQELAVVYGVTPTQVVLRWHVQLGSTPIPKSADPDRQRENADVFGFALTADQVDAISGLERGRLWDGDPDTHEEM

SEQ ID NO: 7956 - protein, 205 aa, Triticum aestivum
MASGNRALPIENGEVLPAAGGNGEGGNGGSGDGFNRNRSSVDQQIDDMRRRLRELEETEREMLAAAAAATHEDPAAAVTALEKAEVDARSIYVGNVDYGCLPEEVQEHFQDCGTINRVTILTDFYGNPKGYAYVEFHEAEAVQNALQLNDTELHGRPLKVCPKRTNVPGMSHHRGRHPFQPYYPPYPAFGRSPRFRRSPRFYPYY

SEQ ID NO: 7957 - protein, 277 aa, Staphylococcus aureus subsp. aureus MSSA476
MEVKTFYNGNTMPQIGLGTFRVENDENCMESVKYAIEQGYRSIDTAKVYGNEEQVGAGIRAGLESTGIAREDLFITSKLYFEDFGRENVAAAYEASLSRLGLKYLDLYLVHWPGTNEAVMVDTWKGMEDLYKNNKVKNIGVSNFEPEHLEALLAQVSIKPVINQVEYHPYLTQHKLKLYLAAQHIVMESWSPLMNAQILNDETIKDIAQELGKSPAQVVLRWNVQHGVVTIPKSVTPNRISENFQIFDFELSDEQMTRIDGLNQDKRIGPDPKTFEG

SEQ ID NO: 7958 - protein, 158 aa, Brucella melitensis biovar Abortus
MKKNNLFRALLISATFALQATAALAVNPDEVLSDPKLEKRAREISAELRCMVCQNESIDDSNADLARDLRILVRERLTKGDTDGQVIDFVVDRYGEFVLLKPRFNAQTALLWGFPVIILLIGGGALLVAFRRAARCWHSPTAPSESEKAELSRLLDGK

SEQ ID NO: 7959 - protein, 353 aa, Podospora anserina
MSNAQARGGARKISFNVSEQYDIQDVVGEGAYGVVCSAIHKPSGQKVAIKKITPFDHSMFCLRTLREMKLLRYFNHENIISILDIQKPRSYESFNEVYLIQELMETDMHRVIRTQELSDDHCQYFIYQTLRALKAMHSANVLHRDLKPSNLLLNANCDLKVCDFGLARSAASQEDNSGFMTEYVATRWYRAPEIMLTFKEYTKAIDVWSVGCILAEMLSGKPLFPGKDYHHQLTLILDVLGTPTMEDYYGIKSRRAREYIRSLPFKKKVPFRTLFPNTSDMALDLLEKLLAFNPVKRITVEEALKHPYLEPYHDPEDEPTAPPIPEEFFDFDKHKDNLSKEQLKQLIYQEIMR

SEQ ID NO: 7960 - protein, 443 aa, Arabidopsis thaliana
MGSGRDRDDPLSFTSNPSTASSPVTVSDYLDNFLGEPTSRSGSFQSESLLGGGGGESINDADFGFARPDFRSEQLAGTVQFYERHVFLCYKKPSVWPARIEAAEFDRLPRLLSAAVSARKGSMKKETRLTICEGHDGTETSNGDVLIFPDMIRYRRLTHFDVETFVEEVLVKDGEWLPGNPELLKGSYVFVCSHGSRDRRCGVCGPSLVSRFREELEFHGLQGKVSISPCSHIGGHKYAGNVIIYRSNINREVTGHWYGYVTPEDVPILLEQHINKGEIVDRLWRGEMGLSEEDQKKTQEGRFQLNGTVHSVKINGKVSQESSVHNADVSCCQSRAAEPNGCCQQNGNSSSCCQDDTTLMLSLGTSEDNQLESENNTEKLTPGRKIAEKTFFRINSDKGSSTRKVCGIPTWLESWEREDTYAALAVVCAAASVAVAYTCYKQL

SEQ ID NO: 7961 - protein, 112 aa, Bartonella sp. RN10617LA
ANEACLKMLQEIGSIQRIPEFIARAKDKNDPFRLMGFGHRVYKNYDPRAKIMQKTCHEVLKELNIQDDPLLDIAIELEKIALSDEYFIEKKLYPNVDFYSGIILKALGFPTE

SEQ ID NO: 7962 - protein, 205 aa, Juglans regia
KRRNGLLKKAYELSVLCDAEVALIVFSSRGRLYEYANNSVKSTIDRYKKARADSSNTGSVSEANTQFYQREAATLRQQINSVQESNRKMLGESLSGMAFRDLKSLESKLESGIRRIRSKKNELLFAEIEYMQKREVDLHNNNQLLRAKIAENERNQQNLNVMPGGGNLELMHSQPFDSRNYFQVDALQPNHDQYPRQDQMALQLV

SEQ ID NO: 7963 - protein, 262 aa, Rickettsia sp. ARANHA
LAAVGSLSAFYPDLLNFKEADYELTAIRMIAKIPTIAAMSYKYSIGQPFIYPDNSLDFTENFLHMMFATPCTKYKVNPIIKNALNKIFILHADHEQNASTSTVRIAGSSGANPFACISTGIASLWGPAHGGANEAVINMLKEIGSSEYIPKYIAKAKDKNDPFRLMGFGHRVYKNYDPRAAVLKETCKEVLKELGQLDNNPLLQIAIELEAIALKDEYFIERKLYPNVDFYSGIIYKAMGIPSQMFTVLFAIARTVGWMAQW

SEQ ID NO: 7964 - protein, 112 aa, Bartonella sp. RN10627LA
ANEACLKMLQEIGSIKRIPEFIARAKDKNDPCRLMGFGHRVYKNYDPRAKIMQKTCHEVLKELNIQDDPLLDIAIELEKIALSDEYFIEKKLYPNVDFYSGITLKALGFPTE

SEQ ID NO: 7965 - protein, 157 aa, Glycine max
  misc_feature (25)..(25): Xaa can be any naturally occurring amino acid
  misc_feature (144)..(144): Xaa can be any naturally occurring amino acid
MSSAKKITLKSSDGEAFEVEEAVAXLESQTIKHMIEDDCADSGIPLPNVTSKILAKVIEYCKKHVEAANPEDKPSEDDLKAWDAEFVKVDQATLFDLILAANYLNIKSLLDLTCQTVADMIKGKTPEEIRKTFNIKNDFTPEEXEEEVRRENQWAFE

SEQ ID NO: 7966 - protein, 2376 aa, Aspergillus nidulans FGSC A4
MSNETFYLLPLNDDGSPDVPGGFIYLPPPDHPKYSLRFLIEGSSSICRDGTLWINIPEIGKSFDRQSFRPFKLYPDFSRNIQIDVPVTCPGSFAYYVTYSPLPEFTITSSAPVKPARTPTHYIDVSPRLSLAGEGIPLNALSIFSVNSKFMGKYPEDWNQYLNSISRRKYNMVHFTPLMKRGASNSPYSIFDQLQFDDIAFPNGENDVQKLIKDMEEKHSLLSLADVVWNHTANNSKWLEEHPEAGYSVETAPWLEAALELDTALLKFSHELQKRGLPTDFKTVDDLTLVMNEVKNHVIEDLCLWEFYVLDVKSNARRVIDEWKVSTNSDIERGRWAQLDLGAYKAWSLEDQASLIRQKGVPTAGQILGRYSREIDTQLGVAIATALFGNFDATSSDLTAVENTLRKLLDVVNVPFYKEYNSDVTEIMSQLFNRIKYLRIDDHGPKLGPVTDQNPLIESYFTRLPLNEITKKHSPKALALANNGWIWNADAMRDNAGPNSRAYLRREVIVWGDCVKLRYGDGPEDNPFLWDFMARYTRLMAKYFSGFRIDNCHSTPLVVAEYLIDEARKIRPDLAIFAELFTGSEEADYIFVKRLGINALIREAMQAWSAGELSRLVHRHGGRPIGSFELDLPSPGLDLSKSQVSGSEREIIRSIRPIPVPALFMDCTHDNEMPAQKRTATDTLPNAALVAMCDSAIGSVMGYDEVYPKIVDLVHETRLYSFFDLPESPTLDELVNLKGISGLKRLLNELHTMMGQMGYDETFIHHDGEYITVHRVHPQTRKGIFLIAHTAFPGQNSGALLAPIHLAATRAKPIGSWLLKVQELSDDKERALSDKVYLQGLPSEVLKIEGARIEETDRETIISVLDPFIPGSIALFETSIPSLEHADELSNDAITDGAVEAFSELSLIDLNFVLYRCDAEERDSSGGQDGVYDIPNHGPLVYAGLQGWWSILEGIIRYNELGHPLCDHLRQGQWALDYIVNRLMKATKNPQYAALRRPAEWLEAKFQIVRGLPSFLLPRYFAIIVQTAYVAAWNRGIQLLGDDVRVGQAFTQQLAMVSVQQTGFVNSASLWPKKSVPSLAAGSGKLPRYNSRDSIWFLLQAIQDYTKMAPDGLELLQDKTPRRFLPYDDTWFPFDDPKAYSQTSTIVDIIQEVFQRHAQGISFREYNAGPELDVQMKSEGFNIDIRVNWETGLIFGGSQHNCGTWQDKMGESEKAGNKGVPGTPRDGAAIEITGLLYSALKWVTELNKQGLFPYDKVDIGNGKSITFEGWAAKVKTNFERCYYIPLDPNDDDQYDIDSGIVNRRGIYKDLYRSGKPYEDYQLRSNFPIAMVVSPELFDPSKALGALAIADSVLAGPLGMATLDPSDLNYRPDYNNAEDSTDFATSKGRNYHQGPEWVWLRGYFLRALLYFDLARRKTADERTEAFQQVTRRLAGCKKALRESPWKGLTELTNRNGNHCADSRPSIVKTNCRYSLASKTRSPLQGGLREYHVWYCYRSLALDKPDCSSTVVRLEKQHSASQCFNNGANPSTHLRRQEPPLHKAMSLTESVAAMATAITVANHHGTNNGTDDDGPGRKWDDQLKGDLYTQLVISLALGITAFLSFCFLRPKWTELYAARRRQRRAALYLPELPDSFFGWIPVLWKITEEQVLQSAGLDAFVFLSFFRFAIRFTSTVFILAFVVLLPIHYSYTKKLGIPDWDKSIDVGEDGKKKFIDDPPYLWTYVVFTYIFTGLAIFMLFQETKKIIQTRQKYLGSQTSTTDRTIRLSGIPAEMGSEENIREFIEGLHIGEVESITLCRNWSSLDHLIEERLKVLRNLETSWVQYLGYKRVRKSGDTLPLRRQPIDSSIFSEDDERMRLLLENGQDDAFDRSRKRPMVRLWYGPLKLRYRKVDAIDYYEERLRRLDEEIQSARQKEYPPTELAFVTMKSIAAAQMLVQAILDPHPMKLLARLAPAPADVIWKNTYLPRARRMFQSWSITVLICFLSVFWSVLLVPVGTLLKWETLHKVLPQLADALARHPLVKSLVTTGLPTLAFSLLTVAVPYLYNWLSNHQGMMSRGDIELSVISKNFFFSFFNLFVIFTVIGTATNFYGLWEHLRDSFKDATTIATALANSLENLAPFYMNVFVLQGLGLFPLKLLEVGSVFLYPINYLMAKTPRDYAELSTTATFSYGYSIPQSILILVICVIYGVFPASWLICFFGLVYFTIGNFIYKYQLLYAMDHRQHSTGRAWPMICNRVLVGLVVFQLAMAGTLGLRKAITLALLIVPLIGATVWFSYFYSQSYEPLTKFIALKSIYRDTPTSGDISPSTTSTFSPPLALDRDAFPIRLGGQVLGLKLKRYVNPSLILPLDSAWLPGRNPMPELQEDFEYYEDQNHVSV

SEQ ID NO: 7967 - protein, 477 aa, Burkholderia fungorum LB400
MSQYRSFINGEWLGTTSTLPNLNPSDLSDVVGEALLADDALVADAIAAARHAFRSWSLTTPQQRADILDAAGTRILQRKEELGTLLAREEGKRLPEAIGEVGRAGNIFKFFAGEALRIGGEVVSSVRPGMTVEVTREPLGVIGMITPWNFPIAIPAWKIAPALAYGNTVVIKPAEAVPACATELVKILEESGLPAGVVNLLLGPGRVVGEALVASPDIDAISFTGSESTGRAIAVKCVTSGKKVQLEMGGKNPLVVIDDADLDVAVEAALDGSFFSTGQRCTASSRLIVTSAIHGQFVAALQRKASELVVGHALDKATQIGPVLDDRQLQQNLKYLKIAAEEGGQVLGGERVERPTRGYFMRPALVIGTDNTMRINREEVFGPVASVIKVADYEEALAVSNDTPYGLAAGICTTSLKYASHFRRHAEAGMVMVNAPTAGVDYHVPFGGRKRSSYGPREQGTYAREFYTVVKTAYVKA

SEQ ID NO: 7968 - protein, 484 aa, Rubrobacter xylanophilus DSM 9941
MSGAAEHRMYVAGRWTGSASGARMEASSPATGERLGTVPEGTREDVRRAVAAAGKAATLWAGRSAFERAAAMERVAGIIEERREELSRTLVLDQGKTLAEARDEVEELALYFRMAAADAPRLEGSAPPSVDAGKRVLVYRVPRGVVGVISPWNWPYTMPAELIAPALACGNAVVWVPAPSTSVCAVALAGCLADAGLPAGVFNMVTGPGPVVGDEVAANPGTHAVGFIGSVETGRRVAARAAGKALLLEMGGNGPVVILDDADLDAAVEASISSAFMCAGQSCTAGELFMVHERVREAFLERLLAKVERGVRLGDPFSPETTMGPLNNEPTAQKVDRHVRDALERGARLLAGGSRAEGFPTRLYYEPTVLDGVTPQMQIFREETFGPVIPVAGIRDESEALSAVNASPYGLLSAVFTRDLERGLRFAEAVRTGWVNVNASSNHWESHLPFGGRSGSASGVGRVGGRYPMEAFTEPKTVILDLGR

SEQ ID NO: 7969 - protein, 315 aa, uncultured crenarchaeote DeepAnt-EC39
MNEPIKNIRLLLEEITIKCDASWIAFSGGLDSSILAEIKKEQNLNAITIISKDFLATDLSYSQITAKHIDIPLEIKYVSIDQMLGAIESTIKILKNFNDIEIRNSIVPYLYMNALKEKNITNVITGDGADEIFAGYNFLLKKDHNELKNELKRIKKIMHFTSQKIANKLGMSIQMPFIDEKIIELVETLPINLLINQKNGIKFGKWVLRKAFENTLPTNVIWRKKTAMQDGSGTTNLTKLFDSIITDDIFTKKVKKIKSECNIKIRTKESLYYYELFKENFIIPECEDKKNICPDCNAEIVSNSKFCRMCGKFPI

SEQ ID NO: 7970 - protein, 369 aa, Neurospora crassa
MSPNPEHGASAPTDPPAADAEQKSDSSAPATPPPAPVPSADPKLFRQITQSHTGESDQDVDDIYKVSPLAALKLLSAGIETLVSFTGDIPPTPPPRSPTIPHMRGMDAEKQSIVRSNSEKNLARLLQQKSATNSPRRPFSPAPQRHPHPPPSREGHKQSQSIDGVQLRTPNPTPPPGLSSSDAKSALEPYIIVGENSQPLNTQHSAITRKFYSRLPPPISITDYLLRIHQYCPMSTAVYLAASLYIHRLAIIERAIVVTKRNAHRLLLAGIRVAMKALEDLSYPHSKFAKVGGVSETELARLEISFCFLVGFELRVDEEALRGQWEMLKSGVEAWEGVEHDFYGKREVITLRNPPPGREGMQAEAAAEA

SEQ ID NO: 7971 - protein, 247 aa, Petunia integrifolia subsp. inflata
MVFPNQEFESSSSQRKSGRGKIEIKRIENTTNRQVTFCKRRNGLLKKAYELSVLCDAEVALIVFSSRGRLYEYANNSVRATIDRYKKHHADSTSTGSVSEANTQYYQQEAAKLRRQIRDIQTYNRQIVGEALSSLSPRDLKNLEGKLEKAIGRVRSKKNELLFSEIELMQKREIEMQNANMYLRAKIAEVERATQQMNLMPGGGSEYQQQPMSSTSQPYDARNFLPVNLLEPNPHYSRQDQTALQLV

SEQ ID NO: 7972 - protein, 156 aa, Brassica napus
IETSLVAEMAAALASRLTKGRSLLGGLTNAFSGLMSSSSGSILSQQQQRTFIQMGTTLKVVDNSGGKEVTCIQSLRGKKGARLGDIVIGSVKEAAHKVDVKKGKDAIQKGKVKKGNVVYGVVVRAAMQKGRVDGSQVRFDDNAIVILGIKEKKKDE

SEQ ID NO: 7973 - protein, 286 aa, Triticum aestivum
  misc_feature (35)..(35): Xaa can be any naturally occurring amino acid
  misc_feature (115)..(115): Xaa can be any naturally occurring amino acid
  misc_feature (153)..(153): Xaa can be any naturally occurring amino acid
  misc_feature (202)..(202): Xaa can be any naturally occurring amino acid
  misc_feature (226)..(226): Xaa can be any naturally occurring amino acid
  misc_feature (233)..(233): Xaa can be any naturally occurring amino acid
  misc_feature (240)..(240): Xaa can be any naturally occurring amino acid
REQKLELHRGGGRSRTSGSPGLQEFGTRATTMATXNMQVDPSGQVQWPQQQPFPQPQQPFWQQPQRTIPQPHQTFHHQPQQTFPQPQQTYPHQPQQQFPQTQQPQQPFPQPQQTXPQQPQLPFSQQPQQPFPQPQQPQQPFAQSQQPQQPFPXPQQQFPQAQQPQQSFPQQQQPAIQSFLQQQMNPCKNFLLQQCNHVSLVXSLVSIILPRSDCQVMQQQWCQQLXAQIPQQXRCAAIHXVAHSIIMQQEQQQGVPILRPLFQLAQGLGIIQPQQPGPPSTYHMPT

SEQ ID NO: 7974 - protein, 119 aa, Zea mays
  misc_feature (72)..(72): Xaa can be any naturally occurring amino acid
  misc_feature (83)..(83): Xaa can be any naturally occurring amino acid
MDRRPPARRRPGDPHRRGAAMHGAVEQQKQHRGRRSPQGTVPPQQPPPAGYFTAELLLAFVFVAASLAFLPXLVLPPLSPPAXLLLLVPVGLLAVLLALAFVPLDAHSHLVVVGSGSSR

SEQ ID NO: 7975 - protein, 147 aa, Aspergillus nidulans FGSC A4
MSDREFSSNDDLSLPKVTATVQKIITEILPPSSGQSFSKDARDLLMECCVEFITLISSEANDISEKEAKKTIACEHVERALRDLGFGDYVPDVLAVAEEHKEQLKSREKKQSKMEQSGLSEEELLRQQQELFRSATEKYHAAPEGTE

SEQ ID NO: 7976 - protein, 196 aa, Zea mays
HRVKKKKKEKKIEGPLKKYKKVHGNVDMAAAGDDATKLQELDEMKRRLKEMEEEAAALRDMQAKVAKEMQGGDPSASTAEAKEQVDARSVYVGNVDYACTPEEVQQHFQACGTVNRVTILTDKFGQPKGFAYVEFLEQEAVQEAINLNESELHGRQIKVAPKRTNVPGMKQRPPRGYNSYHGYPYRSFGAPSFPPL

SEQ ID NO: 7977 - protein, 278 aa, Zea mays
MASSSRSTVFSLLLLVALLLSCSGMSSAARLLEEAPPKEEHPHPAVPELPEPELPPHPTDVVPPELPKPELPPHPAVVPELPKPEVPHQVPEQPKPELPPHPTAVPELPKPEVPHPVPELPKPEVPPHPTAVPELPKPEVPHPVPELPKPELTPHPAAVPELPKSEVPHPVPELPKPEVPPQPTAVPELPKPEVPHPVPELPKPELPPHPAVPELPKPEVPHQVAPELPKPELPPHPTVPKLPHPEVPEVPNHELPPLPKAELPPKPEGHYPEPEAKP

SEQ ID NO: 7978 - protein, 384 aa, Mycobacterium tuberculosis H37Rv
MRAVVIDGAGSVRVNTQPDPALPGPDGVVVAVTAAGICGSDLHFYEGEYPFTEPVALGHEAVGTIVEAGPQVRTVGVGDLVMVSSVAGCGVCPGCETHDPVMCFSGPMIFGAGVLGGAQADLLAVPAADFQVLKIPEGITTEQALLLTDNLATGWAAAQRADISFGSAVAVIGLGAVGLCALRSAFIHGAATVFAVDRVKGRLQRAATWGATPIPSPAAETILAATRGRGADSVIDAVGTDASMSDALNAVRPGGTVSVVGVHDLQPFPVPALTCLLRSITLRMTMAPVQRTWPELIPLLQSGRLDVDGIFTTTLPLDEAAKGYATARARSGEELRFCLRPDSRDVLGAHETVDLYVHVRRCQSVADLQLEGAADGVDGPSMLN

SEQ ID NO: 7979 - protein, 320 aa, Lactobacillus plantarum WCFS1
MKRIGILTSGGDAPGMNAAVRAVAGKAMAEGLEAYGINYGFAGLVAGDIHKIEAADLDGVIQRGGTLLYSARYPEFAHEEGQLKGIEQLKRFGIDALVVIGGDGSYHGALRLTEHGYNTIGLPGTIDNDIPYTDFTIGFDTAVNTNVQALDRIYDTAHSHDRTFVVEVMGRGAGDVALWSGVSIGATAIVVPEVDWDMEEIANKIKHNRANGHRSNLIVLAEGVMGAQEFVEKLSEYGDFDARGNTIAHMQRGGNPTAKDRVMASKMGAYAVELLLAGKGGLAVGIQNNQLVNHNILDLFESKHDVEVSLDKLNEEISFK

SEQ ID NO: 7980 - protein, 185 aa, Oryza sativa (japonica cultivar-group)
MAAGTACRRYIGPLLCVNLVMHAAVLGLAGWSLNKFIDGETHHHLGGNTSSGYLLVFSLMAGVVGVCSVLPRLLHVRAWRGETLAAAASTGLVSWALTALSFGLACKHITLGNRGRRLRTLEAFIAILTLTQLLYLILLHTGSLGSSMTLGLSRRNCDDDEELRCDEIPREELYTNKKPAIVAGA

SEQ ID NO: 7981 - protein, 338 aa, Methanococcus maripaludis S2
MIFMSDPKNVVFKESEELNGVFIEGPDFDETIDLKDVLTDYYEKIGFQATHLGKAVKIWKQIEEVRKNEEVVVFMGYTSNMVSSGLREIISYLVKHKKVDVLVTTAGGIEEDFIKCIKPFVLGEWDMAGSDLREKGINRIGNVYVPNDRYIEFETYMTKFFETLLKKQQDENKIISASEFCFELGRFMDENLGQEKEKSIIYWAYVNKIPIFCPAITDGSIGDMLYFFKKNEKGTDLKIDVASDIVRLNDMAIDANKTACIVLGGSLPKHSIINANLFREGTDYAIYITTAVPWDGSLSGAPPEEGVSWGKIQEKADFVEIWADATIVFPMLVYGVFK

SEQ ID NO: 7982 - protein, 242 aa, Glycine max
  misc_feature (13)..(13): Xaa can be any naturally occurring amino acid
  misc_feature (222)..(222): Xaa can be any naturally occurring amino acid
ALFRLERATGQEXAELLEEFMPAVKQNYGEKVLVQFEDFANHNAFDLLEKYSSSHLVFNDEVRGTASVVLAGLLASLKLVGGTLADHTFLFLGAGEAGTGIAELIALEISKQTKAPVEKTRKKIWLVDSKVKMPQGLIVSSRLESLQHFKKPWAHEHEPVKTLLDAVKAIKPTVLIGSSGAGKTFTKEVVETMASLNEKPLILALSNPTSQSECTAEEAYTXWSKGKSNPLLVGSPFDPWWI

SEQ ID NO: 7983 - protein, 209 aa, Triticum aestivum
MEDEEHEVYGQEIPVDGEDVDMGAGGDDAAKLHELDEMKRRLKEMEEEAAALREMQAKVAKEMQGGDPNATTSEAKEEMDSRSVFVGNVDYACTPEEVQQHFNSCGTVNRVTILTDKFGQPKGFAYVEFVEAEAIQEAVKLSESELHGRQIKVAPKRTNVPGLKQPRGGRGFNPYGGHPYMRPYPPPFYNPYGGYGRAPRFRRPRRPFY

SEQ ID NO: 7984 - protein, 409 aa, Arabidopsis thaliana
MDRISGLPDEVLVKILSFVPTKVAVSTSILSKRWEFLWMWLTKLKFGSKRYSESEFKRLQCFLDRNLPLHRAPVIESFRLVLSDSHFKPEDIRMWVVVAVSRYIRELKIYSSHYGEKQNILPSSLYTCKSLVILKLDGGVLLDVPRMVCLPSLKTLELKGVRYFKQGSLQRLLCNCPVLEDLVVNLSHHDNMGKLTVIVPSLQRLSLSTPSSREFVIDTPSLLSFQLVDRNDNSHTFLIENMPKLREAYINVPFADIKSLIGSITSVKRLAISSEVGYGEGFIFNHLEELTLWNKYSSNLLVWFLKNSPNLRELMLVSETDDHENLGMLSWNQPSIVPECMLSSLQKFTWFKYLGRPQDRDIAVYILKNACRLRTATIKSDTRLFTKLEMITELRLSSQASSTCELNFS

SEQ ID NO: 7985 - protein, 142 aa, Glycine max
  misc_feature (24)..(24): Xaa can be any naturally occurring amino acid
  misc_feature (113)..(113): Xaa can be any naturally occurring amino acid
  misc_feature (126)..(126): Xaa can be any naturally occurring amino acid
FSFGIDAIEDVLYHIETYDVTTIXACTPICLMSRLIKSLGVKWVIPREGSSEIFGGYLYLHKAPYKEEFLREPCLWIKALDHYDRLRANRSTFGWGLEARVPFWDKACINAAXEFSPEWNMMKRDXGRIEKWVLRRAFDDEE

SEQ ID NO: 7986 - protein, 1037 aa, Saccharomyces cerevisiae
MTVANTETHSAAKPSSTIGPWKLGETLGFGSTGKVQLAQHERTGHRTAVKVISKSIFNNNGNHSNDDSVLPYNIEREIVIMKLLSHPNVLSLYDVWETNNNLYLILEYAEKGELFNLLVDHGPLPEREAINCFRQIIIGISYCHALGIVHRDLKPENLLLDSFYNIKIADFGMAALQTDADLLETSCGSPHYAAPEIVSGLPYEGFASDVWSCGVILFALLTGRLPFDEENGNVRDLLLKVQKGQFEMPNDTEISRDAQDLIGKILVVDPRQRIKIRDILSHPLLKKYQTIKDSKSIKDLPRENTYLYPLADSNNHTSASIDDSILQNLVVLWHGRHADDIVSKLKENGTNKEKILYALLYRFKLDSVRGSNKKNRNKIKKTKKNKRSSTLSSSSSLLLNNRSIQSTPRRRTSKRHSREFSSSRKRSSFLLSSNPTDSSPIPLRSSKRITHINVASANTQATPSGVPNPHKRNSKKRSSKRLSYMPNTKRSSLTSKSLSNFTNLIDDDDWEYIEKDAKRTSSNFATLIDEIFEPEKFELAKREKAELQRKVQEAKRQSVNAQKINEDEFGSEVSDGMKELKKINDKVSSPLINYEFSQQELLQDIDTLLTNRYQLSSYTRPISRLDPGLTPVTETLPNNLKEKTALLQDTEKKIIETIRRSKFLGSLLNVRGGLSPGKSELAPIEESPIVSTTPLIYNDRMEPRRISDVEVPHFTRKSKHFTTANNRRSVLSLYAKDSIKDLNEFLIKEDPDLPPQGSTDNESRSEDPEIAESITDSRNIQYDEDDSKDGDNVNNDNILSDFPQGVGISQEYDMKDKNPNQSPISKSAEPTLVVKLPSLSSFQGKNASGLGLYQREPSKVTLPSLTSNNSSVGENIEDGAEKGTESEKIAASLSDDDLKEDNDKKDNDTVNAPTTVKKPPNSVLLKKFSKGKILELEIHAKIPEKRLYEGLHKLLEGWKQYGLKNLVFNITNMIITGKLVNDSILFLRSTLFEIMVLPNGDGRSLIKFNKKTGSTKTLTKLATEIQIILQKEGVLDK

SEQ ID NO: 7987 - protein, 153 aa, Lactobacillus gasseri
MIDAQRFGLIRSVGVSNFEPEHIEYLYRETGVMPAVNQVELHPYWSSKKVREYDNQHHIITEAWSPLQRGGEAFQEKEIIELAQKYHKSPAQIILRWETQINVVPIPKASSYEHQLSNLDIFDFKLAPEEVQSLINLDKESARRFDPNEHEEF

SEQ ID NO: 7988 - protein, 411 aa, Anaplasma platys
MKENAVLMCGDKKVSLPMLSGTDGIQLIDITTLYRDHKVLTYDPGFMSTAACSSEITFIDGEKGILRHRGLDIADLIGIKGGFCSVAHLLLYGVLPSDTVFEQFSAAIGAQHALSSDVLGVISSFRRDAHPMAILMACFSTLAAKYHGDNRGNEELAVLAIAQVPSLVAAIYRHRMGLELVSPDTSLSYTGNFVKMMFGALEKTRADAIEEALDAIFIMHADHEQNASTATVRMAGSAGTELFACLAAGTATLWGPAHGGANEAVIRMLESIGSPDKVEEFIGFVKDNNSKVRLMGFGHRVYKSYDPRAKILGQISRSVLDNLGCSDELLGVAEELERCALQDEYFVERKLYPNVDFYSGIVLRAMGVPVEMYTTFFALARTAGWVSQWCELLRGSESLKICRPRQLYAGK

SEQ ID NO: 7989 - protein, 100 aa, Triticum aestivum
MCGILAVLGCGDESQGKRVHVLELSRRLKHRGPDWSGLHQVADNYLCHQRLAIIDPASGDQPLYNEDKSIAVAVNGEVYNHEELRARLSFFFFFLSNHPV

SEQ ID NO: 7990 - protein, 203 aa, Capsicum annuum
MNPEYDYLFKLLLIGDSGVGKSCLLLRFADDSYLDSYISTIGVDFKIRTVEQDGKTIKLQIWDTAGQERFRTITSSYYRGAHGIIIVYDITDQESFNNVKQWLSEIDRYASENVNKLLVGNKSDLNDNRAVSYDTAKAFADEIGIPFMEASAKSATNVEQAFMAMAAEIKNRMATQPASNNAKPPTVQIRGQPVNQKSGCCSS

SEQ ID NO: 7991 - protein, 399 aa, Pseudomonas syringae pv. syringae B728a
MSGNRGVVYLGAGKVEVQSIPFPKMEDPRGKRIEHGVILRVVSTNICGSDQHMVRGRTTAQTGLVLGHEITGEVLEAGRDVEHLKVGDLVSVPFNVACGRCRSCKEQNTGVCLTVNPARPGGAYGYVDMGDWVGGQAEYVLVPYADFNLLKLPDRDAAMEKIRDLTCLSDILPTGYHGAVTAGVGPGSTVYVAGAGPVGLAAAASARLLGAAVVIVGDVNPTRLVHAKAQGFEIADLSQDTPLHEQIAALLGEPEVDCAIDAVGFEARGHGHAGAQAEAPATVLNSLMGVVRVAGKIGIPGLYVTEDPGAVDAAAKMGSLSIRFGLGWAKSHSFHTGQTPVMKYNRQLMQAIMWDRIKIADIVGVEVISLDDAPRGYGEFDSGVPKKFVIDPHGLFGAA

SEQ ID NO: 7992 - protein, 283 aa, Ralstonia solanacearum
MRRIQHRTQGNAMNDTFTMPAFGLGTFRLTGEAAIDSVRTALELGYRAIDTAQIYANEAEVGQAIAASGVPRRDLFLTTKIWVDNLAADRLIPSLKASLARLRTEQVDLALIHWPSPGGAVPMAEYLGALDEARREGLTRALGVSNFTVALLREAIETVGAAQIATNQIELHPYLQNRKVAAFAQSQGIHVTSYMTLGVGRVLADPVLADIARAHGATPAQVVLAWAMQLGCSVIPSSTRRANLQSNLAARDLRLTGDDMARIGALDRGERIADPAGIAPDWD

SEQ ID NO: 7993 - protein, 478 aa, Burkholderia cepacia R18194
MKIYDQFYIDGAWRKPAGTGTIDVIDSGTEAVIGRIPEGVASDAQDAIRAARAAFDAWAATPPATRAGYLRKIVEHLLARSEELAQSITGEVGMPIKLSRAIQVGGPIYNWKAYAKLAESFEFEAQVGNSLVVREPVGVVAAITPWNYPLNQVTLKVAPALAAGCTVVLKPSEVAPLNAFMLAEAIHEAGLPAGVFNLVCGYGPVVGEVLATDPDVDMVSFTGSTRAGKRVAELAAAGVKRVALELGGKSASVILDDADFATAVKGTVNACYLNAGQTCSAHTRMLVPEARYDEARAIAKAAAETYVAGDPRQDATRLGALASAVQQQRVQDYIQRGIDEGAELVTGGTGLPEGLDKGFFVKPTVFGRVDPKSTIAQEEIFGPVLSIITYRDEDEAVRIANDSPYGLGGAVWAGSDERAMGIARRIRTGQVDINGGAWNMAAPFGGYKQSGHGRENGVYGLEEYLEYKSMQLKPAKPA

SEQ ID NO: 7994 - protein, 330 aa, Halobacterium sp. NRC-1
MTGDDADETHENVVPGSDEDLDTPDVRGYDFSGEFDFFELLDSYATTGFQASHLADAVDITREMREDDATIYLTLTSNIVSSGLREVVAHLVRENYVDVIITTSGSLTEDIIKTAKPFKMGEWDVDEAALREEGINRLGNIFVPSDRYVWLEEYLYDFFEEFFADQKVRTPTAFARELGATLDDEDSILKNAADNDIPVFCPALTDAEIGNFLYYYRQGYDSEVGIEILDDYDALIEEGLLADTTGLICVGAGVPKHHAIMTNLFRGGADYAVYISTGMEGDGSLSGAPPEEAVSWGKIKDEDAEPNYALIEAEATLVFPLLVAGAFENP

SEQ ID NO: 7995 - protein, 367 aa, Buchnera aphidicola (Tetraneura caerulescens)
MIKKFKLAILAGDGIGPEVMEEGIKILEVIKKKFMLKLDIKEYLVGGVAIDKFGTALPKSTIDGCLNADAVLFGSVGGDKWKHLPVEQQPERAALLPLRKILNLFVNIRSSKLYSSLSHLSPLKSKIVNNGFDILCVRELIGGIYYGIPKGQKMDNYKRRYAVDTSIYYEEEITRIANFAFEIATFRRKKVTSVDKANVLETSILWREVVNKVAKKYPEISLNHLYVDNASMQIIKNPMDFDVILCPNLFGDILSDECGMITGSIGMLPSASLNKSKFGLYEPAGGSAPDISGKNIANPIALILSISMLFKYSFEQLNIADAIESSVINVLKDGYRTFDILTTNTNEKLLSTSSMGSKISDYLKHEE

SEQ ID NO: 7996 - protein, 126 aa, Glycine max
YFVVGKGEVVTCSGNRNADLFYGVLGGLGQFGIITRARISLEPAPMMVKWIRVLYSEFSTFTMDQEYLISLNNTFDYIEGFVIINRTGILNNWRSSFDPKNPLQASQFSSDGKTLHCLEMAKYFNP

SEQ ID NO: 7997 - protein, 300 aa, Aegilops longissima
GTANMQVDPSGQVQWTQQQPVPLPQQPFSQQPQQTFPQPQQTFPHQPQQQIPQPQQPQQQFLQPQQPFPQQPQQPYPQQPQQPFPQTQQPQQLFPQSQQPQQPYPQQPQQPFPQTQQPQQQFPQSQQPQQPFPQPQQPQQSFPQQQPPFIQPSLQQQLNPCKNLLLQQCRPMSLVSSLWSMIWPQSDCQVMRQQCCQQLAQIPQQLQCAAIHSVVHSIIMQQEQQQQQQQQQQQQQGLRIPLPLYQQQQVGQGTLVQGQGIIQPQQPAQLEAIRSLVLQTLPTMCNVYVPPECSIIKAPL

SEQ ID NO: 7998 - protein, 320 aa, Chloroflexus aurantiacus
MQQVIDSAEAYGRKVMLAGRSMETNARIAFELGYLRADESTIIRPHEMSAYPDEEIAIVCTGSQGEPMSALNRMANRDYPNVKIKPGDTVVLSATPIPGNEVSVNKVINNLFKLGADVIYGPEARVHVSGHAAQEELKLVLALLRPSYIVPFHGDYRHLMLYRKLATTIGAVPDSERVLLAEGGTIMEFSPGFGKITGKAPVGYIYVDGTTVGDVGNVVVRDRQLLAKDGMLIVVVSIDSATGQLVAGPDVVSRGFVYMRQSQDLIEATKETVRAALANRNGSNPVDAAYINRKIRDVVSEFLYRETRRRPMVLPMVMEV

SEQ ID NO: 7999 - protein, 186 aa, Zea mays
  misc_feature (73)..(73): Xaa can be any naturally occurring amino acid
  misc_feature (87)..(87): Xaa can be any naturally occurring amino acid
  misc_feature (110)..(110): Xaa can be any naturally occurring amino acid
  misc_feature (125)..(125): Xaa can be any naturally occurring amino acid
MAPTVMMASSATAVAPFQGLKSTASLPVARRSSRSLGNVSNGGRIRCMQVWPAYGNKKFETLSYLPPLSTDDXLLKQVDYLLRNGWXIPCLEFSKVGFVYRENSTSPVLXDGRYWTMWKLPMFGXCTTPTQVYKELQEAIKSYPDAFHRVIGFDNIKQTQCVSFIAYKPPGQRLDRAAPAAPPPAS

SEQ ID NO: 8000 - protein, 486 aa, Pichia angusta
MEMAYTQINIDQEERDFQKEVEEIKKWWAEPRLEGHQESLSGRGDCEKTVHHQKPQRFRHDGKEGVQVARGAPKNKTVSFTFGALDPIHVTQMAKYLDTIYVSGWQCSATASTSTSLHQILPLPYGHCSNKVQHSVFVFAQLFHDRKQRHERFSLSKEERAKLPYIDFMRPIIADADTGHGGITAIVKLTKLFIEAGAAGIHIEDQAAGTKKCGHMAGKVLVPIQEHINRLIAIRTSADIFGSDLLCVARTDSEAATLITSTIDTRDHYFIIGATNPDVEPLVEVMNRAEQEGAYGAELEEIEKQWTEKAGLKLFHEAVIDEIKASDIKNKDEAIKKFTSTVTPLSGHSHRQARELAKSILGKDIFFDWDAPRVREGYYRYQGGTQCAINRARAVRSVRRHCCGWRRSYQSTKQAKEFAEGVLAKYPEKWLAYNLSPSFNWNAAMSPADQETYIKKLADLGFICNSFSCWFHTTVPAVQRRGVPLL

SEQ ID NO: 8001 - protein, 294 aa, Aegilops longissima
GTANMQVDPSGQVQWPQQQPVPLPQQPFSQKPQQTFPQPQQTFPFPHQPQQQFPQPQQPQQQFLQPQQPQQPYPQQPQQTFPQTQQPQQLFPQSQQPQQPYPQQPQQPLSQTQQPQQQFPQSQQPQQPFPQPQQPQQSFPQQQPPFIQPSLQQQLNPCKNLLLQQCRPVSLVSSLWSMIWPQSDCQVMRQQCCQQLAQIPQQLQCAAIHSVVHSIIMQQEQQQQQQQQQQGLRIPLPLYQQQQVGQGTLVQGQGIIQPQQPAQLEAIRSLVLQTLPTMCNVYVPPECSIIKAPL

SEQ ID NO: 8002 - protein, 340 aa, Cordyceps bassiana
MSRANPPNNASASRKISFNVSEQYDIQDVVGEGAYGVVCSAIHKPSGQKVAIKKITPFDHSMFCLRTLREMKLLRYFNHENIISILDIQKPRGFDSFNEVYLIQELMETDMHRVIRTQVLSDDHCQYFIYQTLRALKAMHSANVLHRDLKPSNLLLNANCDLKVCDFGLARSAASQEDNSGFMTEYVATRWYRAPEIMLTFKEYTKAIDVWSVGCILAEMLSGKPLFPGKDYHHQLTLILDVLGTPTMEDYYGIKSRRAREYIRSLPFKKKVLFRTLFADTSDLALDLLEKLLAFNPVKRITVEEALKHPYLEPYHDPEDEPTAPPIPEEFFDFDKHKDN

SEQ ID NO: 8003 - protein, 502 aa, Sinorhizobium meliloti
MLHQKIVENPYKQKYGNFIGGEWREPVAGRYFDNTTPITGGTLCEVARSDAADIEIALDAAHAAREKWGRTSTTERSNILMKIAARMEDNLELLARAETWDNGKPIRETMAADIPLAIDHFRYFAACIRAQEGSIGEIDHDTVAYHFHEPLGVVGQIIPWNFPILMAAWKLAPALAAGNCVVLKPAEQTPGSILVWAELIGDLLPPGVLNIVNGFGLEAGKPLATSPRIAKIAFTGETTTGRLIMQYASQNLIPVTLELGGKSPNIFFADVASEDDDFFDKALEGFAMFALNQGEVCTCPSRALVQESIYDRFMERAVKRVEAIRQGNPLDEATMIGAQASSEQLEKILAYIEIGKEEGAEVLTGGGRNVLEGDLSGGYYVKPTVFHGHNRMRIFQEEIFGPVVSVTTFKTEAEALEIANDTLYGLGAGVWSRDANRCYRFGRAIEAGRVWTNCYHAYPAHAAFGGYKQSGIGRETHKMMLDHYQQTKNMLVSYSPKALGFF

SEQ ID NO: 8004 - protein, 304 aa, Brassica napus
MAARSRVSSLLSRSFSASSPFLSRSQGKNLNNGSRIVRRFGTSSAAEEVISPSVQVSYTKLLIDGNFVDAASGKTFPTLDPRTGEVIAHVAEGDAEDINRAVKAARKAFDEGPWPKMTAYERSRVMLRFADLVEKHSEELAALESWDNGKTYEQALTAEIPMVARLFRYYAGWADKIHGLTVPADGNYHVQTLHEPIGVAGQIIPWNFPLLMFAWKVGPALACGNTIVLKTAEQTPLTAFYVGKLFLEAGLPPGVLNIVSGFGATAGASLASHMDVDKLAFTGSTDTGKVILGLAANSNLKPVT

SEQ ID NO: 8005 - protein, 219 aa, Rhodobacter sphaeroides 2.4.1
MKFFVDSADVAAIAELNALGMVDGVTTNPSLILKSGRNILEVTKEICNLVSGPVSAEVVAAKAEDMIEEGRHLAEIAPNIAVKVPLTWDGLRACKVLSDEGRMVNVTLCFSVNQALLAAKAGATFISPFIGRLDDINLDGMELIADIRQVYDNYDFKTEVLAASVRTPNHVADCARIGADVITAPPAVIKALANHVLTDKGLDMFNADWAKTGQSILLK

SEQ ID NO: 8006 - protein, 338 aa, Agrobacterium tumefaciens str. C58
MTMHAIQFVEKGRAVLAELPVADLPPGHALVRVKASGLCHTDIDVLHARYGDGAFPVIPGHEYAGEVAAVASDVTVFKAGDRVVVDPNLPCGTCASCRKGLTNLCSTLKAYGVSHNGGFAEFSVVRADHLHGIGSMPYHVAALAEPLACVVNGMQSAGIGESGVVPENALVFGAGPIGLLLALSLKSRGIATVTMADINESRLAFAQDLGLQTAVSGSEALSRQRKEFDFVADATGIAPVAEAMIPLVADGGTALFFGVCAPDARISVAPFEIFRRQLKLVGSHSLNRNIPQALAILETDGEVMARLVSHRLPLSEMLPFFTKKPSDPATMKVQFAAE

SEQ ID NO: 8007 - protein, 373 aa, Pichia stipitis
MSTVTKTITVLPGDHVGTEICNEAIKVLEAIEQATPYQKIHFEFKHHLIGGAAIDSTGVPLPDDSLAAAKLSDAVLLGAVGGPKWGTGAVRPEQGLLKIRKELNLYANLRPCNFASDALLELSPLKSEIVKGTNFTVVRELVGGIYFGERQEQEESADGESAWDTEKYSVAEVTRITRMAAFMALQHNPPLPIWSLDKANVLASSRLWRKTVDKVMKEEFPQLTIQHQLIDSAAMILVQSPTKLNGIVITSNMFGYIISDEASVIPGSLGLLPSASLASLPDTNSAFGLYEPCHGSAPDLPENKVNPIATILSVAMMLRLSLDSLKEAEALEEAVRQVLDSGVRTADLRGTNSTKEVGEAVVAGVTKILKDAA

SEQ ID NO: 8008 - protein, 297 aa, Sulfolobus tokodaii str. 7
MVIILFFSMSEEYSKVLELMEEAKEIFKIQGPFAGEYKARRIAFVGDTHGAVDVTQYVFNEIFDKVDLLVFLGDYVDRYPPSGVENLMIILEKFLQNKDKVVILRGNHESPITNLYYGFYEEVALKFGDEKVYEKFKDFFSYIPYVAIVNNYFCVHGGLPGKDNGGEMKLGIHSVDEIKSLPYPDINPDDPIAFQLLWNDPREGLDDFGFLPNIRGEGTFYFGEKIVKEFLDSTGYSGIIRGHEAVDGFRIDINGKVITVFSSRYHGQSAGVLLMDEGKIKRVYLYQDGSVKAFEGL

SEQ ID NO: 8009 - protein, 70 aa, Zea mays
MATPAVEKPEDVQIRDARTDNLETEIAVIRDIVYDYPYVAMHTEFPIVVSRPLGTHKSVIDFNYATLKAN

SEQ ID NO: 8010 - protein, 208 aa, Synechococcus elongatus PCC 6301
MIADPASRNVVWHDATITRSDRERLNGHRGVILWFTGLSGSGKSTLAHAVEAQLFERGCRTFVLDGDNVRHGLCADLGFSDSDRQENIRRIGEVAKLFMEAGVITLAAFVSPFRADRDRVRALVADGEYIEVYCQASLDICEQRDVKGLYAKARAGQIPEFTGISSPYEAPEAAELQIDTGSRSLEDCVAQVLDYLASQGIIPASDRA

SEQ ID NO: 8011 - protein, 294 aa, Glycine max
MLVLFLFLIFLQEHILTGGHGLMVQGYDPVVKALANDLDIRLNHRVTKISDGYNMVMVTVEDGRNFVADAVIVTVPIGILKANLIEFSPKLPHWKAEAIKDIGMGNENKIALRFDAVFWPNVEVLGIVAPTSYACGYFLNLHKATGHPILVYMAAGKFAYDLEKLSDESAANFAMQQLKKMFPDASKPVQYLVSHWGTDPNSLGCYACDLVGMPDDVYERLRAPVGNLFFGGEAVSMDDHQGSVHGAYSSGVMAAENCQRHLLQKQGHMESLPLVPSVRHEIFETTIPPQISRI

SEQ ID NO: 8012 - protein, 181 aa, Brassica napus
NVLVMGAGPIGLVTMLAARAFGVPKIVIVDVDDNRLSVAKRLGADGIVKVTTSLEDVGSEVEQIKKAIGSNIDVTFDCAGFNKTMSTALAATRCGGKVCLVGMGHGIMTVPLTPAAAREVDVVGVFRYKNTWPLCLEFLTSGKIDVKPLITHRFGFSQKEVEDAFETSARGSNAIKVMFNL

SEQ ID NO: 8013 - protein, 1063 aa, Saccharomyces cerevisiae
MDDYHVNTAFSMGRGNQQDDGNSERNSMHTQPSTMAPATLRMMGKSPQQQQQQNTPLMPPADIKYANNGNSHQAEQKERQVELEGKSRENAPKPNTTSQSRVSSSQGMPKQFHRKSLGDWEFVETVGAGSMGKVKLAKHRYTNEVCAVKIVNRATKAFLHKEQMLPPPKNEQDVLERQKKLEKEISRDKRTIREASLGQILYHPHICRLFEMCTLSNHFYMLFEYVSGGQLLDYIIQHGSIREHQARKFARGIASALIYLHANNIVHRDLKIENIMISDSSEIKIIDFGLSNIYDSRKQLHTFCGSLYFAAPELLKANPYTGPEVDVWSFGVVLFVLVCGKVPFDDENSSVLHEKIKQGKVEYPQHLSIEVISLLSKMLVVDPKRRATLKQVVEHHWMVRGFNGPPPSYLPKRVPLTIEMLDINVLKEMYRLEFIDDVEETRSVLVSIITDPHYGLLSRQYWTLAAKMNAESSDNGNAPNITESFEDPTRAYHPMISIYYLTSEMLDRKHAKIRNQQQRQSHENIEKLSEIPESVKQRDVEVNTTAMKSEPEATLATKDTSVPFTPKNSDGTEPPLHVLIPPRLAMPEQAHTSPTSRKSSDNQRREMEYALSPTPQGNDYQQFRVPSTTGDPSEKAKFGNIFRKLSQRRKKTIEQTSVNSNNSINKPVQKTHSRAVSDFVPGFAKPSYDSNYTMNEPVKTNDSRGGNKGDFPALPADRENMVEKQREKQIEEDIMKLHDINKQNNEVAKGSGREAYAAQKFEGSDDDENHPLPPLNVAKGRKLHPSARAKSVGHARRESLKYMRPPMPSSAYPQQELIDTGFLESSDDNKSDSLGNVTSQTNDSVSVHSVNAHINSPSVEKELTDEEILQEASRAPAGSMPSIDFPRSLFLKGFFSVQTTSSKPLPIVRYKIMFVLRKMINEFKEVKGGFVCMQRFSSNNVAAKREGTPRSIMPLSHHESIRRQGSNKYSPSSPLATNTHQRNSSITETYGDDKHSGTSLENIHQQGDGSEGMTTTEKEPIKFEIHIVKVRIVGLAGVHFKKISGNTWLYKELASSILKELKL

SEQ ID NO: 8014 - protein, 169 aa, Paracoccidioides brasiliensis
MSAPENSKITLIPSDEPEDGRGIEVERVIIERSILIKNMLEDLGDSGEPIPIPNVNKAVLEKVIEWCEHHRNDPPTTNDEDYDSRRKTTDIDEWDQKFMLVDQEMLFEIILAANYLDIKALLDVGCKTVANLIKGKSPDDIRKTFNIQNDFSEQEEAQIRAENEWAEDR

SEQ ID NO: 8015 - protein, 1153 aa, Saccharomyces cerevisiae
MPNPNTADYLVNPNFRTSKGGSLSPTPEAFNDTRVAAPATLRMMGKQSGPRNDQQQAPLMPPADIKQGKEQAAQRQNDASRPNGAVELRQFHRRSLGDWEFLETVGAGSMGKVKLVKHRQTKEICVIKIVNRASKAYLHKQHSLPSPKNESEILERQKRLEKEIARDKRTVREASLGQILYHPHICRLFEMCTMSNHFYMLFEYVSGGQLLDYIIHDGSLKEHHARKFARGIASALQYLHANNIVHRDLKIENIMISSSGEIKIIDFGLSNIFDYRKQLHTFCGSLYFAAPELLKAQPYTGPEVDIWSFGIVLYVLVCGKVPFDDENSSILHEKIKKGKVDYPSHLSIEVISLLTRMIVVDPLRRATLKNVVEHPWMNRGYDFKAPSYVPNRVPLTPEMIDSQVLKEMYRLEFIDDIEDTRRSLIRLVTEKEYIQLSQEYWDKLSNAKGLSSSLNNNYLNSTAQQTLIQNHITSNPSQSGYNEPDSNFEDPTLAYHPLLSIYHLVSEMVARKLAKLQRRQALALQAQAQQRQQQQQVALGTKVALNNNSPDIMTKMRSPQKEVVPNPGIFQVPAIGTSGTSNNTNTSNKPPLHVMVPPKLTIPEQAHTSPTSRKSSDIHTELNGVLKSTPVPVSGEYQQRSASPVVGEHQEKNTIGGIFRRISQSGQSQHPTRQSGTYSSKENLQHICQNQMKFPSKYRKAIVVLYQTYIPSARRYPSYVPNSVDVKQKPAKNTTIAPPIRSVSQKQNSDLPALPQKRQLIVQKQRQKLLQENLDKLQINDNDNNNVNAVVDGINNDNSDHYLSVPLSVPKGRKLHPSARAKSVGHARRESLKFTRPPIPAALPPSDMTNDNGFLGEANKERYNPVSSNFSTVPEDSTTYSNDTNNRLTSVYSQELTEKQILEEASKAPPGSMPSIDYPKSMFLKGFFSVQTTSSKPLPIVRHNIISVLTRMNIDFKEVKGGFICVQQRPSIETAAVPVITTTGVGLDSGKAMDLQNSLDSQLSSSYHSTASSASRNSSIKRQGSYKRGQNNIPLTPLTTNSIHQRKTSIPMSPNYGNQSNGTSGELSSMSLDYVQQQDDILTTSRAQNINNVNGQTEQTNTSGIKERPPIKFEIHIVKVRIVGLAGVHFKKVSGNTWLYKELASYILKELNL

SEQ ID NO: 8016 - protein, 176 aa, Glycine max
  misc_feature (46)..(46): Xaa can be any naturally occurring amino acid
  misc_feature (82)..(82): Xaa can be any naturally occurring amino acid
  misc_feature (90)..(90): Xaa can be any naturally occurring amino acid
  misc_feature (92)..(92): Xaa can be any naturally occurring amino acid
  misc_feature (106)..(106): Xaa can be any naturally occurring amino acid
  misc_feature (115)..(115): Xaa can be any naturally occurring amino acid
MVLEATMICIDNSEWMRNGDYSPSRFQAQADAVNLICGAKTQSNPXNTVGVLTMAGKGVRVFVTPTSDLGKILACMHGLDIXGEMKLAAXIXVAQLASKHPQNKNXQQRFMAFVXNPVKHEKKMLELLEKVKKKKGPLELEFWEKNRGKKKIGTPPPCLKKRTPPLFVVPRGQRRF

SEQ ID NO: 8017 - protein, 457 aa, Mesorhizobium loti MAFF303099
MLANSLIELDRAHLIHPVSSYRGHEALGVRVLKSAKGATVTEASGRQLVDGFAGLWCVNAGYGHDSIVEAAARQMRELPYATAYFDLGAEPAIRLASELAERAPGDLNHVFFTLGGSDAVDSTVRFVRYYWNARGAPKRDQFISIEQGYHGSSVVGAGLTALPAFHAGFGIPFEWQHKIPSPYPYRNPVGEDANAIIAASLAALKAKIEELGPERVAAFYAEPIQGSGGVIVPPKGWIKAMRELCREYGILFIADEVITGFGRTGPLFACTDEEIVPDFMTTAKGLTSGYVPMGAVFMADHVYDVIADGAGASSVGHGYTYSAHPVSAAVALEVLKLYEDGLLENGIKAGARLMAGLSGLSDHPLVGDVRGRGMLAAIELVVDKEKKTPLPASAMPARRIFDRAWDNGLIIRAFANGVLGYAPPLCCTDADIDAIIERTRRTLDQTLADPDVRQALA

SEQ ID NO: 8018 - protein, 143 aa, Zea mays
MAMAYKMATEGMDVKEECQRWFMEMKWKKVHRFVVYRIDERSRAVLVDRVGGPGEGYEELVAALPGDDCRYAVFDFDFVTVDNCQKSKIFFIAWSPAASRIRAKILYATSKQGLRRLLDGVHYEVQATDPSEMGFDVIRGRAQ

SEQ ID NO: 8019 - protein, 321 aa, Zea mays
KCGHMAGKVLVAVSEHVNRLVAARLQFDVMGVETVLVARTDAVAATLIQTNVDARDHQFIVGATNPGLRGQSLAAVLSAGMSAGKSGRELQGIEDEWLAAAQLKTFSECVRDAIAGLGVAAQEKQRRLQEWDRATGGYDRCVSNDQARDIAASLGVTSVFWDWDLPRTREGFYRFRGSVAAAVVRGRAFAPHADVLWMETSSPNVGECTAFAEGVKAACPEAMLAYNLSPSFNWDASGMTDAEMAAFIPSVARLGYVWQFITLAGFHADALVTDTFARDFARRGMLAYVERIQREERINGVETLEHQKWAGANFYDRVLKA

SEQ ID NO: 8020 - protein, 537 aa, Zea mays
  misc_feature (91)..(91): Xaa can be any naturally occurring amino acid
  misc_feature (404)..(404): Xaa can be any naturally occurring amino acid
MMAAVLKTSGSFCSTQQQHFQQSRRDQFLHGSYSYFKHCKSKKIIKPAPLCARVTSSKVELDVKDPYWKQKFQEDWENRFDLPSITDIYDXNQGRCSTICCCPSRTLTGDENVDMWNGYVNNDDRALLKVIKYSSPTSAGAECVDLDCSWVEQWVHRAGPRKEIYYEPEEVKAAIVTCGGLCPGLNDVIRQIVFTLETYGVKNIVGIPFGYRGFFEKGLKEMPLSRGLVENINLNGGSFLGVSRGGAKTSEIVDSIQARRIDMLFVLGGNGTHAGANAIHEECRKRKLKVSVVAVPKTIDNDILLMDKTFGFDTAVEEAQRAINSAYIEARSAYHGIGLVKLMGRSSGFIAMHASLSSGQVDVCLIPEVPFTLDGEFGVLRQLEHLLKSKGFCVVCVAEAAGQXYAKIHSCLDLLQESGATDASGNVILSDIGVHMQQKIKMHFKDIGVPADVKYIDPTYMVRACRANASDAILCTVLGQNAVHGAFAGFSGITSCICNTHYVYLPITEVITAPKRVNPNSRMWHRCLTSTGQPDFH

SEQ ID NO: 8021 - protein, 427 aa, Erwinia carotovora subsp. atroseptica SCRI1043
MTVRTSTLTAEGQASIALEMRSGVLGKTAVDIRPLGEHGLCSYDPGFANTAGCESAITYIDAANSVLLHRGFPVEQLAEQCDFTEVCYILLHGDAPSPEAYAKFADNITRHTLVHEQITRMFSGFRRDSHPMALMCAVVGALAAFYHDVLDINNAEHRELAAVRLLSKMPTLAAMCYKYSVEQPSVYPRNSLSYTGNFLHMLFSIPAEKYEVNPVLERAMNRILILHADHGQCPSTMAVRASGSSGANPFACIAAGLASMWGPLHGGANEACMRMLEEIKTVDRVPEFVRRAKDRCDSFRLMGFGNSVYQHFDPRAAILRKTCYEVLNELGMEDSLLQVAMELEHIAMTDAYFLENKLYPSVDFYTSVILKAMGLPSSMFTVISTVGRTIGWIAHWDEMHKQQEISIYRPRQIYTGQPQRDYVSLKG

SEQ ID NO: 8022 - protein, 526 aa, Triticum aestivum
  misc_feature (95)..(95): Xaa can be any naturally occurring amino acid
  misc_feature (118)..(118): Xaa can be any naturally occurring amino acid
  misc_feature (155)..(155): Xaa can be any naturally occurring amino acid
  misc_feature (176)..(176): Xaa can be any naturally occurring amino acid
  misc_feature (193)..(193): Xaa can be any naturally occurring amino acid
  misc_feature (219)..(219): Xaa can be any naturally occurring amino acid
  misc_feature (425)..(425): Xaa can be any naturally occurring amino acid
LSPPSLITPSPARPLRSLHSPNLPGQGGAAATCAACPAALRGAAGATATNSPCYRCTGSTAAVASTDPTFSAFPAFRVSARLLPFSTPCAASARXTMNIMIINVLKRARRRRPSALLXLFRFPFAFRSNGFVGKDFFGLRDMAQPGFDYGFFFFXLWAVVRAPDGMTYGVLLSVKXHLICDLIIGRCFPGTVXPMLCRSCVRWQDCKIGTQVRGASLLXSVIDYTRSGVVHIVGMVTCWWGVFTLGTRIDRFDHACRSVALKGHSASLVVLGTFLLWFGWYGFNPGSFVTILKSYGPPGSINGQWSGVGRTAVTTTLAGSVAALTTLFGKRLQTGHWNVVDVCNGLLGGFAAITAGCSVVDPWAAVICGFVSAWVLIGLNALAGRLKYDDPLEAAQLHGGCGAWGIIFTALFAKKQYVEEIYGAXGRPYGLFLGGGGRLLAAHIVQILVIAGFVSCTMGPLFLALKKLGLLRISAEDEMAGMDLTRHGGFAYVYHDDDEHDKSVGGFMLRSAQTRVEPAAAANSQV

SEQ ID NO: 8023 - protein, 485 aa, Mesorhizobium loti MAFF303099
MKTLKDKNLFREAGLIGGEWVAAGSGKTVDVIDPATQAAIGTVPDMAGSDTRAAIDAAASAYGDWKKKTNAERADLLEAWHGLMLAHLDDLALILTTEQGKPLDEAKGEIRYGASFVKWFAEEARRINGHTIPSPTQDRRIIVLKEPVGVCGIITPWNFPNAMITRKVAPALAAGCTVVIKPSEFTPYSALALGVLAERAGIPAGVINIVTGMPAEIGNEIMANETVRKISFTGSTRVGSLLMRGAADSVKRLSLELGGNAPFIVFDDADLDLAVEGALVSKFRNGGQTCVCANRILVQAGVYEAFAAKLSARVNAMTVGPGTQPGVAIGPMINMAAVEKINRHVEDALAKGAAIITEKPALPEGPQYVAPLVLSGATKDMQLAGEETFGPVAPLFRFETEEEAIALANGTPYGLASYFYTENLKRAWRVGEALEFGMVGLNTGSVSMEVAPFGGIKQSGLGREGAQAGIEEYLEMKSFHIGGLG

SEQ ID NO: 8024 - protein, 141 aa, Triticum aestivum
  misc_feature (30)..(30): Xaa can be any naturally occurring amino acid
LVETVARPSRSDAVCQQIRTFIQMRTNLKXVVDNSGAKRVMCIQSLRGKKGARLGDMIIGSVKEAQPRGKVKKGDVVYGVVVRAAMKKGRSDGSEVQFDDNAIVIVNNKGELIGTRVFGPVPHELRKKKHLKILALAEHIV

SEQ ID NO: 8025 - protein, 490 aa, Xanthomonas axonopodis pv. citri str. 306
MPRFPDQLLYIGGRYVPARGGHTLEVVNPATGEVLANVHNAGVDDLDAAVDSAKAGQQRWAALTTVERSRILLRAVALLRERNDALAQLETLNTGKPLSETRSVDVVTGADVLEYYAGVAQALQGAQVPLREGSFFYTRHEPLGVVGAIGAWNYPIQIALWKAAPALAAGNAMIFKPSEVTPLTALKLAEIFTEAGLPDGVFNVLPGDGASVGTALTEHPQIEKISFTGGTATGRKVMASASSSSLKEVTMELGGKSPLIVCADADLDVAADIAMMANFYSSGQVCTNGTRVFVPRALRHAFEARLLARVQRIHIGDPLDERTTFGPLASAAHMQRVLEHIEQGKAEGARLLCGGERLQDGALVQGYYVAPTIFSDCTDVMTIVREEIFGPVLSLLTYDDEDEAVTRANATTYGLAAGVVTPDLARAHRLIHRLEAGICWVNTWGESPAPMPVGGYKQSGVGRENGLATLQAYTRTKSVQIELERYASVF

SEQ ID NO: 8026 - protein, 487 aa, Mesorhizobium loti MAFF303099
MGLSFDPDTVSLPVGHFIGGELIAAEGAIEMRRPSDGKAYAASPVADVDMVDRAVASAKAALKASNWGGVRPRERTKALQAWADLIEAEAEALAKIEALCSTRPVGQLVAGDIAITAEQIRFFAEFADKEGSELVPTDDSSLGMIMSEPYGVVGAITPWNFPISMAGWKLGPALAAGNAVVLKPSEMTPFSAVYMAQLALRAGLPAGLVNVVLGDGPTTGTALTGHSEIAKVSFTGSTRAGSAIMENVARTGVKPMTLELGGKSPQIVFADADLDKAATAIAGSVTFNAGQACVAGTRLIAEKSVADRLTATILEKMKAARPGPTWDDATQYSPIISERQRARVDGIVRAAVEAGGECLTGGHTMDGPGYFYEPTLITDVDQANPAIVEEIFGPVLTVQTFETEEEALALSTHPTYGLASGLFTADLSRTIRFARKLEAGTVWVNRYSRSRDHILPTGGYKRSGIGKDLGREAYLANRRSKSVLISL

SEQ ID NO: 8027 - protein, 124 aa, Brassica napus
MSGVWVFNKNGVMRLVENPYNQSGGDWSESSSSGGSQQQRMRRKILVHLPTSEVVSSYKSLERILKCLGWERYYNGDNADHLLQFHKRTSIDLISLPRDFSKFNSIHMYDIVVKNPNVFHVRDM

SEQ ID NO: 8028 - protein, 363 aa, Buchnera aphidicola (Chaitophorus populeti)
MHKKYKIAILPGDGIGPEVMQETYKIIEIIKKKLLINIQTSEYDIGGISIDKHGIALPKKTLIGCEKSDAILLGSIGGPKWDILPPKERPEIASLLPIRKHFNLFANLRPSILHKKLNYLSPLKKNNIKDGFDILCVRELTGGIYFGKPRIEINKKNMHYAIDTSIYHKYEIQRIAEIAFQESLKRRCKVTSIDKANVLYTSKLWRKTVNKISKKYPKVHLSHLYFDNAVMQIIKNPNQFDVILCPNLIGDVISDECGSLTGSIGMLPSASLNTKNFGLYEPAGGAAPDTQGKNIANPIAQILSLSMLIKHSLKMNHISNLINTAVYKTLLKGFRTHDISHDKNFVTTKEMGNEIVKSFIEEL

SEQ ID NO: 8029 - protein, 175 aa, Triticum aestivum
MAPTVMASSATSVAPFQGLKSTAGLPISRRSSSAGLSSVSNGGRIRCMQVWPIEGIKKFETLSYLPPLSTEALLKQVDYLIRSKWVPCLEFSKVGFVFREHNSSPGYYDGRYWTMWKLPMFGCTDATQVLNEVEEVKKEYPDAYVRVIGFDNLRQVQCVSFIAFRPPGCEESGKA

SEQ ID NO: 8030 - protein, 367 aa, Mycobacterium tuberculosis H37Rv
MAIAETDTEVHTPFEQDFEKDVAATQRYFDSSRFAGIIRLYTARQVVEQRGTIPVDHIVAREAAGAFYERLRELFAARKSITTFGPYSPGQAVSMKRMGIEAIYLGGWATSAKGSSTEDPGPDLASYPLSQVPDDAAVLVRALLTADRNQHYLRLQMSERQRAATPAYDFRPFIIADAGTGHGGDPHVRNLIRRFVEVGVPGYHIEDQRPGTKKCGHQGGKVLVPSDEQIKRLNAARFQLDIMRVPGIIVARTDAEAANLIDSRADERDQPFLLGATKLDVPSYKSCFLAMVRRFTNWASRSSMVIFSMRLATASTRRPAVGLSAKAFSAWSPTRSTRGGRTASSRSTAFSTRSSRGSWRPGRTTRA

SEQ ID NO: 8031 - protein, 398 aa, Mycobacterium tuberculosis H37Rv
MTYGEAVADVLEFGQSEGEPIGMAPEEWRAFAARASLHAARAKAKELGADPPWDCELAKTPEGYYQIRGGIPYAIAKSLAAAPFADILWMETKTADLADARQFAEAIHAEFPDQMLAYNLSPSFNWDTTGMTDEEMRRFPEELGKMGFVFNFITYGGHQIDGVAAEEFATALRQDGMLALARLQRKMRLVESPYRTPQTLVGGPRSDAALAASSGRTATTKAMGKGSTQHQHLVQTEVPRKLLEEWLAMWSGHYQLKDKLRVQLRPQRAGSEVLELGIHGESDDKLANVIFQPIQDRRGRTILLVRDQNTFGAELRQKRLMTLIHLWLVHRFKAQAVHYVTPTDDNLYQTSKMKSHGIFTEVNQEVGEIIVAEVNHPRIAELLTPDRVALRKLITKEA

SEQ ID NO: 8032 - protein, 77 aa, Glycine max
MGLWTLLEGFLLLANALAILNEDRFLTPRGWGLSDFSAGQTKSFKGQLIGLIYATQYLRFPLLLLNSVFIIVKLVSG

SEQ ID NO: 8033 - protein, 641 aa, Zea mays
GDGIIFHTGDWKIDESPVDGKNFDRQALEELSKEGVTLMMSDSTNVLSPGRSISESVVAGSLLRHISEAKGRVITTQFASNIHRIGSIKAAADLTGRKMVFVGMSLRTYLEAAFKDGKAPLDPSTLIKVEDMDAYAPKDLLVVTTGSQGEPRAALNLASYGGSHALKLSKEDVLLYSAKVIPGNETRVMKMMNRLTDLGPKIIMGKDSGLHTSGHAYREELEEVLRIVKPQHFLPVHGELLFLKEHESLGRSTGIRHTTVIKNGEMLGVSHLRNRRVLSNGFVSLGKEDLQLMYSDGDKAFGTSTDLCIDERLRIASDGIIFVSMEIFRPQKEHGLAQSGLKGKFKITTRCLWLDNGRLLDALYKAAHAALSSCPVNCPHSHMERMVAEILRKMVRKYSGKRPDVIAVATENTTAGFSEHLDTKASGNFGPSSATSHLSRSPATSLEGSYKTHPDNPEVDAEEILPETVRTTPDDATTSSNGEALFSSDLHQPKTLEHFWESFKSPTAVKIARIVNGGNKQNFGKIGIMGQDSLIQSAPAPVKSSKRNKWKPEEIKSLIQMRGEMNEKFQSVKGRMVLWKEISDTMLNQGVSRTPAQCKSLWTSLVQKYEESKDTESMKTWPYFSAMDKILSQQGEMATKG

SEQ ID NO: 8034 - protein, 435 aa, Saccharomyces cerevisiae
MTTNEEFIGTQIFGTVFEITNRYNDLNPVGMGAFGLVCSATDTLTSQPVAIKKIMKPFSTAVLAKRTYRELKLLKHLRHENLICLQDIFLSPLEDIYFVTELQGTDLHRLLQTRPLEKQFVQYFLYQILRGLKYVHSAGVIHRDLKPSNILINENCDLKICDFGLARIQDPQMTGYVSTRYYRAPEIMLTWQKYDVEVDIWSAGCIFAEMIEGKPLFPGKDHVHQFSIITDLLGSPPKDVINTICSENTLKFVTSLPHRDPIPFSERFKTVEPDAVDLLEKMLVFDPKKRITAADALAHPYSAPYHDPTDEPVADAKFDWHFNDADLPVDTWRVMMYSEILDFHKIGGSDGQIDISATFDDQVAAATAAAAQAQAQAQAQVQLNMAAHSHNGAGTTGNDHSDIAGGNKVSDHVAANDTITDYGNQAIQYANEFQQ

SEQ ID NO: 8035 - protein, 150 aa, Brassica napus
MSGGDGNNGGGRRKGSVKWFDTQKGFGFITPDDGGEDLFVHQSSIRSEGYRSLAPEESVEFEVEVDNSGRTKAIEVSGPDGAPVLGNSGGSSGGRGGFGGGGRGGGRGGGGRGYGGGDSYGGGGYGGGGGYGGGGYGGRGGGGGDGACYK

SEQ ID NO: 8036 - protein, 284 aa, Zea mays
MTAVALALPTDDDKDGGRRGVDHSPTAPAPPPPPPPPQELVMVARAVQRLVARNDAVVPPAPDGRGGGRRLGMRAFEAAEGAAAPRIGVPEYLERVHRYAALDPECYVVAYAYVDMAAHRRPAAAVASRNVHRLLLASLLVASKVLDDFHHSNAFFARVGGVSNAEMNRLELELLDVLDFAVAVDHRVYRRYREHLEKETTLMMLRRDDGHGPPVPVPVPGSGAAPTKSRTAASSVVKPPLTEDRRRPAEAGDADGGGEHDDRRKLPNSATAAASLRELWAFDY

SEQ ID NO: 8037 - protein, 186 aa, Brassica rapa subsp. pekinensis
YIGLKQRRATGQEYAEFLHEFMCAVKQNYGEKVLVQFEDFANHNAFDLLSRYMDSHLVFNDDIQGTASVVLAGLIAAQKVLGKSLADHTFLFLGAGEAGTGIAELIALKISKETGAPIEETRKKIWLVDSKGLIVSSRKESLQHFKQPWAHEYEPVKDLIGAVNAIKPTVLIGTSGVGQTFTKEVV

SEQ ID NO: 8038 - protein, 344 aa, Zea mays
  misc_feature (306)..(306): Xaa can be any naturally occurring amino acid
MPFGLLAFLVQISSATLLFGTCRSYSLCIYIYASTGFTSFQIYKRFYFHTIFNYEHVCNICLMFGRAWEELKKEVREARRIKMLHQPSKAMDLENEIRILRNTFAEKSKDCVSLLKEWETHKRLKENGTIPSFDLEGLQCLGSMLRIVGLSGTHMDLSNISIQWFRIHPKESNKEIISGATRPVYALEPHDVGRYLQAEIDVGGEIAVAKTAGPVDPDAGLVDYVETLVRKPETEFNVVVLQSNGVDQPKESVHVLNVGRLRMRLTKGKSVVAKEFYSSSMQLCGVRGGGEAASQAMFWRPRNDLXLVLAFESTRERNTAIMLARRFAVDCNIILAGPGDKTPW

SEQ ID NO: 8039 - protein, 94 aa, Brassica napus
MSLFLKDDSIQIREVWNDNLLEEMDLIRQVVDDFPYVAMDTEFPGIVVRPVGTFKSNADYHYETLKLNVNILSIIQLGLTFSNEQGNLPTCGTD

SEQ ID NO: 8040 - protein, 407 aa, Yersinia pestis KIM
MEIILGVVMFTLIVLALTVMILFAKSKLVNTGDITVEINEDEDKSFTAPAGDKLLNMLSSHGIFVSSACGGGGSCGQCRVTIKEGGGDILPTELSHISKREAKEGCRLACQVNVKQNLKIELPEEIFGVKKWTCEVISNDNKATFIKELKLKIPDGDVVPFRAGGFIQIEAEPHTVKYADFDVPTEYRGDWDKFNLFRFESVVTEPTVRAYSMANYPEEHGIILLNVRIATPPPSVPDAPPGIMSSYIWSLKPGDKVVISGPFGEFFAKDTDAEMVFIGGGAGMAPMRSHIFDQLKRLHSKRKISFWYGARSRREMFYEEDFDQLQAENDNFRWHVALSDPQPEDNWTGYTGFIHNVLLENYLKDHPAPEDCEFYMCGPPMMNAAVIKMLKDLGVEDENIMLDDFGG

SEQ ID NO: 8041 - protein, 77 aa, Glycine max
MASLMLSSPAVTTDNRAGAGMVAPFTGLKSMAGFPTRKTINDITSIASTGGRVLCMQVRPPLGKKTFETLSYLPDLD

SEQ ID NO: 8042 - protein, 120 aa, Zea mays
ESGVSMLLHGDLDIQIIEAKCLPNMDLMTERMRKCFTGYGACSNDCGKSEPPHPDMRKIITSDPYVSVCLSGATVAQTRVIANSENPKWDEHFYVQVAHSVSRVEFHVKDNDVFGAELIG

SEQ ID NO: 8043 - protein, 506 aa, Oryza sativa (japonica cultivar-group)
MESPLSHPAMVALSLLLLVALYLARRAVLGKKRRYPPVAGTMFHQLLNFGRLLEYHTELSRKYRTFRMLTPTCNYVYTVEPANVEHILKTNFANYGKGPMTHDVLEDLLGDGIFNVDGGMWRQQRKVASLEFSTRVLRDYSSAVFRDTAAELAGILERGPAAKGRERVDMQDLLMRATLDSFFRVGFGVNLGVLSGSSKEGLVFARAFDDASEQVLFRFFDLLWKVKRFLNISSEATMKQSIRTINDFVYSIIDRKIEQMSREQHEFAKKEDILSRFLLEREKDPGCFDNKYIRDIILNFVIAGRDTTAGTLSWFLYAVCKNQRVQDKIAREVRDATTGDRDVGVQDFSSFLTEDAINKMQYLHAALTETLRLYPGVPLDVKYCFSDDTLPDGHAVKKGDMVNYQPYPMGRMKFLWGDNAEEFKPERWLDDSGMFVAESPFKFTAFQAGPRICLGKEFAYRQMKIVSAVLLYFFRFEMWDDDATVGYRPMLTLKMDGPFYLRALAR

SEQ ID NO: 8044 - protein, 206 aa, Aspergillus nidulans FGSC A4
MATNITHHAGITRNERNQLRKQKGLTIWLTGLSASGKSTIAVELEHQLLQRGLHAYRLDGDNVRFGLNKDLGFSDADRNENIRRIAEVAKLFADSSSIAITSFISPFRADRDTARKLHEVPTPNDSTGLPFVEVFVDVPIEVAEKRDPKGLYKKAREGIIKEFTGISSPYEAPENPEVHVKNVDLPIQEAVKQIIDYLDSKKLLDA

SEQ ID NO: 8045 - protein, 438 aa, Zea mays
  misc_feature (251)..(251): Xaa can be any naturally occurring amino acid
GSRKLLGQGTFAKVYHARNTATSESVAIKVIDKEKVMKVGLIDQIQREISVMKLVRHPNIVQLYEVMATKTKIYFVLEHVKGGELFNKIQRGRLKEDAARKYFQQLICAVDFCHSRGVYHRDLKPENLLLDENSNLKVSDFGLSALAECHRQDGLLHTTCGTPAYVAPEVINRKGYDGAKADIWSCGVILFVLLAGYLPFHDKNLMDMYKKIEKADFKCPSWFSTDVRRLLQRILDPNPSRRISVEKIMEXPWFRKGLGAKLLRYDLQNKNAPHVDKNADFDSLSTNVTTESKQHEEKKPTNMNAFDIISLSTGLDLSGLFEESNKKRESKFTSTNTSSTIISKIEDIAKNLRLNLTKKDGGLLKMEASKPGRKGVMGIDAEVFEVSPNFHLVEIKKTNGDTLEYQKVLNQEMRPALKEIVWAWQGEQSKQKQEQQSC

SEQ ID NO: 8046 - protein, 347 aa, Clostridium thermocellum ATCC 27405
MKGKMKVCVLTGKEKLEWVERDIPQPGRGELQIKLKHVGVCGSDLHFYKEGRLANWELDGPLALGHEPGGIVSAIGEGVEGFEIGDKVALEPGVPCGECEDCRKGHYNLCKHIKFMAIPHEKDGVFAEYCVHSASMCYKLPENVDTMEGGLMEPLSVALHATELSNAKIGETAIVLGSGCIGLCTVMALKARGVSEIYVTDVVDKRLEKALEVGATRVFNSQREDIVEFAKTLPGGGADQVYECAGSRVTTLQTCKLIKRAGKVTLVGVSPEPVLELDIATLNAMEGTVYSVYRYRNMYPIAIAAVSSGVIPLKKIVSHVFDFKDCIEAIEYSTNHKDEVIKSVIKF

SEQ ID NO: 8047 - protein, 279 aa, Glycine max
  misc_feature (161)..(161): Xaa can be any naturally occurring amino acid
MGVFSEDPNPNPNPIVIREVWASNLESEFELIRELIDRYPFISMDTEFPGVIFRPHVDPTKPFNHRNRPSDHYRLLKSNVDALNLIQVGLTLTDAAGNLPDLAGNRSIWEFNFRDFDVARDAYAPDSIDLLRRQGIDFARNTADGVDSTCFAELMMSSGLXVCNDAVSWVTFHSAYDFGYLVKILTRRNLPTRLEEFLKTVKVFFGDNVYDVKHMMRFCDTLYGGLDRVARTLNVDRAVGKCHQAGSDSLLTWHAFQKIVDIYFVKEEHRKHAGVLFGL

SEQ ID NO: 8048 - protein, 503 aa, Oryza sativa (japonica cultivar-group)
MATAIPQRQLFVAGEWRAPALGRRLPVVNPATESPIGEIPAGTAEDVDAAVAAAREALKRNRGRDWARAPGAVRAKYLRAIAAKIIERKSELARLETLDCGKPLDEAAWDMDDVAGCFEYFADLAESLDKRQNAPVSLPMENFKCYLRKEPIGVVGLITPWNYPLLMATWKVAPALAAGCTAVLKPSELASVTCLELADVCKEVGLPSGVLNIVTGLGSEAGAPLSSHPGVDKVAFTGSYETGKKIMASAAPMVKPVSLELGGKSPIVVFDDVDVEKAVEWTLFGCFWTNGQICSATSRLILHKKIAKEFQERMVAWAKNIKVSDPLEEGCRLGPVVSEGQYEKIKQFVSTAKSQGATILTGGVRPKHLEKGFYIEPTIITDVDTSMQIWREEVFGPVLCVKEFSTEEEAIELANDTHYGLAGAVLSGDRERCQRLTEEIDAGIIWVNCSQPCFCQAPWGGNKRSGFGRELGEGGIDNYLSVKQVTEYASDEPWGWYKSPSKL

SEQ ID NO: 8049 - protein, 362 aa, Saccharum hybrid cultivar
MGSTAEDVAAVADEEACMYAMQLASASILPMTLKNALELGLLEVLQAEAPAGKALAPEEVVARLPVAPTNPDAADMVDRMLRLLASYDVVKCQMEDKDGKYERRYSAAPVGKWLTPNEDGVSMAALTLMNQDKVLMESWYYLKDAVLDGGIPFNKAYGMTAFEYHGTDPRFNRVFNEGMKNHSVIITKKLLEFYTGFEGVSTLVDVGGGIGATLHAITSHHPQIKGINFDLPHVISEAPPFPGVQHVGGDMFKSVPAGDAILMKWILHDWSDAHCATLLKNCYDALPENGKVIVVECVLPVNTEAVPKAQGVFHVDMIMLAHNPGGRERYEREFHDLAKGAGFSGFKATYIYANAWAIEFIK

SEQ ID NO: 8050 - protein, 512 aa, Aspergillus nidulans FGSC A4
MALLGLLETYRDPLAFVAALSAVFYLLSCLHRRWRRYQFAKENGCEPVVGKIPSYDPFLSLDRLYRLTKLARNRKLLENNVQRFKEFGNTHRAKRITTPMIVTRDPQNIKAILSLKFGDYSMGDRIRIFGPLLGHGIFTSDGEDWARSRHMIRPNFVKEQVAHLEIFEELMDDLFALIPTDGSTVDLQELFFGFTIDSATEFLCGHNVHSLKKRRSGVIDDEPDFAEAFNYSLDNISKNGRFGPLMFLNRDPKAVESHRICHESMDQFVDKAIRMRERYNEEKIVDEAAERRYMFLYGLAQQTGDRRRIRDEVLNILLAGRDTTASLLSNMFFLLAKHPSTWAKLQEEVATLEGRAPTYEQLRNMKYLKYCLNETLRLFPVVPVNSRTAIRDTVLPVGGGPDGQSPAFVPKGTMVAYSVYAMHRREDYYGADAEEFRPERWADLRPGWEYLPFNGGPRICVGQQYALTEAAYVTTRLAQRYSILESRDPGPWEEKLTLTLCSYNGTQVSLRH

SEQ ID NO: 8051 - protein, 335 aa, Triticum aestivum
YQVYKQVDEGSPECGIIVNRHRRWLRNLLWATSKHDVYVTQNYSVMHWSSLLRRGKEVPNVAGPNQDMRGGRPLSRVQISTMTVKDNLLAAGGFHGELICKYVDQPGVAFCTNLAGNKKSITNAVEIYESPNGSTRVVAANNDCVVRTFDTEKYSLLTQFPFAWSVNNMSVSPDGKLLAVVGDSSDCLIADSGSGKEIASLRGHADYSFASAWHPDGRVLATGSQDRTCRLWDVRNPSDAFAVLEGRIGAVRGLRFSPDGRFLAAAEPADFVRVYDVAAGYARAQEIDLFGEIAGVSFSPDDGAEALFVGVADRTYGSLLEFRRRHRHAYLDCYL

SEQ ID NO: 8052 - protein, 293 aa, Saccharomyces cerevisiae; identical to SEQ ID NO: 315

SEQ ID NO: 8053 - protein, 52 aa, Triticum aestivum
DGSSKDDLKLPTDDAILTQLKGGFDEGKDLAMTVMSAMGEEQICAVKKVGPR

SEQ ID NO: 8054 - protein, 504 aa, Mesorhizobium loti MAFF303099
MTIAKETAELLAKLGVAKDALVGGDLIVRSPVTGEQIAALKTISPADAAKTIDAAHKAFQSWRLVPGPKRGELVRLLGEELRAHKAELGRLVSIEVGKIPSEGLGEVQEMIDICDFAVGLSRQLYGLTIATERPGHRMMETWHPLGVVGVISAFNFPVAVWSWNAALALVCGDAVVWKPSEKTPLTALACEAIFKRAVKRFGADAPQGLAPVLIGDRAVGEILVDHPKVPLVSATGSTRMGRDVGPRLAKRFARAVLELGGNNAGIVCPTADLDMALRAIAFGAMGTAGQRCTTLRRLFVHESVYDALVPRLKKAYQSVSVGNPLETSSLVGPLIDKAAFDAMQKALTEAAAHGGKVAGGARVENGHPDAYYVHPALVEMPKQVSPVTEETFAPILYVMKYSDFDAVLDEHNAVGAGLSSSIFTRDLQESERFLGVDGSDCGIANVNIGTSGAEIGGAFGGEKETGGGRESGSDAWKAYMRRATNTVNYSKALPLAQGVSFDID

SEQ ID NO: 8055 - protein, 105 aa, Triticum aestivum
MWTERRARRSGSMAGGGGGRARGAEGKRAAPQGQRAPAATAGYFTAELAALFLCLTALLVFLPLVLPPLPPPPSLLLLVPVGLMAVLVALAFVPSDSRSMASSCH

SEQ ID NO: 8056 - protein, 665 aa, Glycine max
KSRRQLALFPPSSGAYFFHGFVTSVYSVFVSIFMNTLGKSCLCKSDVQLSLSCRTEGINSRTNSNGTFRKLEKLSRATVIAKSSRLWGFFIACQWVSIVTFPVLWRSYKQLSWLGAKSSPYYQPMHEQFAIVVRDIPHVPQGQTRKEQVDSYFRDIYPETFYRSMIVTDNKVVNKIWESLEKYTKKLARAEAVYAGSKTTAKPEGTRPTNKTGFLGLVGKKVDTIEYCNEKINELEARLESEQKVTLREKQQDAAVVFFSSRVVAASASPNLHAQIPNMELIFRAYIPPRLRWEKIDDDRVEDALSQCSRTAPVGCNYLNFNLFLRVRCSLVEILLDVLLIVHIKPIVNIKALKTVLEAYLPQLALIIFLALLPKLLLFLSKFEGIPTESHAVRAASGKYFYFTVLNVFIGVTIGGTLFKAFKRIREHPTLDEISSLLAESLPGNATFFLTYVALKFFIGYGLELSRIVPLIIYHLKRKYLCKTEAELKEAWRPGDLGYGTRVPGDMLIVTIVFCYSVIAPVIIPFGALYFGLGWLVLRNQALKVYVPTFESYGRMWPHIHNRILASLILYQITMFGYFGTQKFYYTPLVLPLPILSLVFGFVCAKKFYPAFQHPALEVAANTLKEVPNMELIFGAYIPPSLRSEKIDGDRVEDALSQASRTTPV

SEQ ID NO: 8057 - protein, 422 aa, Streptococcus pyogenes M1 GAS
MILIKNGRVMDPKSQRDQVADVLIDGKQIVKIASAIECQEAQVIDASGLIVAPGLVDIHVHFREPGQTHKEDIHTGALAAAAGGVTTVVMMANTNPVISDVETLQEVLASAAKEKIHIYTNASVTQAFNGKDVTDFKALLEAGAVSFSDDGIPLESSKVLKEAFDLANANQTFISLHEEDPQLNGVLGFNEGIAEEHFHFCGATGVAEYSMIARDVMIAYDRQAHVHIQHLSKAESVQVVAFAQQLGAKVTAEVSPQHFSTTEDLLLIAGTSAKMNPPLRTQRDRLAVIEGLKSGVITVIATDHAPHHKDEKTVDDMTKAPSGMTGLETSLSLGLTHLVEPGHLTLMSLLEKMTLNPALLYGFDAGYLAENGPADLVIFADKQERLITENFASKASNSPFIGNKLKGVVKYTIADGEVVYPN

SEQ ID NO: 8058 - protein, 432 aa, Myxococcus xanthus
  misc_feature (265)..(265): Xaa can be any naturally occurring amino acid
  misc_feature (323)..(323): Xaa can be any naturally occurring amino acid
MAPPSSGEKISLQSGKLSVPDNPIIPFIEGDGTGRDIWRASQAVFDAAVEKAYKGKKKIAWYEVLAGEKSFKAVNNWLPEETVEAFRTYLVGIKGPLTTPVGGGIRSLNVALRQMLDLYVCLRPVRYFKGVPSPVKMPDKVDMTIFRENTEDIYAGIEFEAGTAAAEKFLGLLKQEFPKEFGKIRFPSDVGLGIKPVSHEGSDRLIRAAIQYAVDHKRKSVTLVHKGNIMKFTEGAFRKWGYELAAREFGDKVYTWDQWEATKAXKGEDAANAEQKAALAAGKILIKDSIADITLQQVLTRPDEFDVIATLNLNGDYLSDALXAQVGGIGIAPGGNINYVTGHAVFEATHGTAPKYADQDKVNPGSVILSGEMMFRHLGWYEAADLMIQGMDRAIASKTVTYDFARLMKQEGQSGVSEVKCSEFGQAIIKNM

SEQ ID NO: 8059 - protein, 447 aa, Arabidopsis thaliana
MSGSRRKATPASRTRVGNYEMGRTLGEGSFAKAKYAKNTVTGDQAAIKILDREKVFRHKMVEQLKREISTMKLIKHPNVVEIIEVMASKTKIYIVLELVNGGELFDKIAQQGRLKEDEARRYFQQLINAVDYCHSRGVYHRDLKPENLILDANGVLKVSDFGLSAFSRQVREDGLLHTACGTPNYVAPEVLSDKGYDGAAADVWSCGVILFVLMAGYLPFDEPNLMTLYKRICKAEFSCPPWFSQGAKRVIKRILEPNPITRISIAELLEDEWFKKGYKPPSFDQDDEDITIDDVDAAFSNSKECLVTEKKEKPVSMNAFELISSSSEFSLENLFEKQAQLVKKETRFTSQRSASEIMSKMEETAKPLGFNVRKDNYKIKMKGDKSGRKGQLSVATEVFEVAPSLHVVELRKTGGDTLEFHKFYKNFSSGLKDVVWNTDAAAEEQKQ

SEQ ID NO: 8060 - protein, 117 aa, Zea mays
LQAVIKRLMTDVPFGVLLSGGLDSSLVASVASRHLNETKVDRQWGNKLHTFCIGLKGSPDLKAAREVADYLSTVHHEFHFTVQMVISGEGSDEIFGGYLYFHKAPNKKEFHEETCRK

SEQ ID NO: 8061 - protein, 112 aa, Bartonella sp. RR13863PO
ANEACLKMLQEIGSIKRIPEFIARAKDKNDPFRLMGFGHRVYKNYDPRAKILQKTCHEVLKELNIQDDPLLDIAIELEKIALNDEYFIEKKLYPNVDFYSGITLKALGFPTE

SEQ ID NO: 8062 - protein, 320 aa, Emericella nidulans
MDKSQQPSSFQQLEKLGEGTYATVFKGRNRQTGELVALKEIHLDSEEGTPSTAIREISLMKELKHESIVSLYDVIHTENKLMLVFEYMDKDLKKYMDTRGDRGQLDQATIKSFMHQLMSGIAFCHDNRVLHRDLKPQNLLINKKGQLKLGDFGLARAFGIPVNTFSNEVVTLWYRAPDVLLGSRTYNTSIDIWSAGCIMAELYTGRPLFPGTTNEDQLQKIFRLMGTPSERSWPGISQLPEYRANFHVYATQDLGLILPQIDPLGLDLLNRMLQLRPEMRIDAHGALQHPWFHDLPQLQAQLQQQQMAGYGGMMPPQQAY

SEQ ID NO: 8063 - protein, 155 aa, Codonopsis lanceolata
MALIPSIFGGRRSNVFDPFSHDIWDPFQGLSSALANARDQETAAIANTRIDWKETPEAHVFKADLPGLKKEEIKVEVEDGRVLQISGERSKEQEEKTDTWHRVERSVGKFHRRFRLPENAKVDQVTASMENGVLTVTVPKKEEKEPEVKAIDISG

SEQ ID NO: 8064 - protein, 112 aa, Bartonella sp. MM5136CA
ANEACLKMLQEIGSIERIPEFIARAKDKNDPFRLMGFGHRVYKNYDPRAKIMQKTCHEVLKELNIQDDPLLDIAIELEKIALSDEYFIEKKLYPNVDFYSGITLKALGFPTE

SEQ ID NO: 8065 - protein, 433 aa, Oryza sativa (japonica cultivar-group)
MERYKVIREIGDGTCGNVFRAYNTETNEIVAVKKMKRKFFQWEECISLREVKALQKLNHPNIVKLKEVTMENHELFFIFENMECNLYDVIRERQAAFSEEEIRNFMVQILQGLAYMHNNGYFHRDLKPENLLVTDGTVKIADFGLAREVSSSPPYTDYVSTRWYRAPEVLLQSSAYTPAIDMWAVGAILAELFTLSPLFPGGSETDQLYKICAVLGTPDHTVWPEGMNLPRSSSFNFFQIPPRNLWELIPNATLEAIDLIQQLCSWDPRRRPTAEQSLQHPFFNVGNWVPRPLHASHTKTIETRPNPRLELNLWDFGTEPEDNYLDLTLSLKPSFPGTDFSNNVPEHTKEEILLYPGFENPPVQSGFWPLVASDRPMGDVPAMSSWPQAYVVDGQATLPAVGFSGSPFGLSPLQPNLFENRSFATPIRQVNFF

SEQ ID NO: 8066 - protein, 206 aa, Bartonella taylorii
AYKYSIGQAFVYPRNDLSYAANFLRMCFCVPCEEYKVNSVLTRAMDRIFILHADHEQNASTSTVRLAGSSGANPFACIAAGVACLWGPAHGGANEACLKMLQEIGSVERIPEFIARAKDKNDPFRLMGFGHRVYKNYDPRAKIMQKTCHEVLKELNIQDDPLLDIAIELEKIALNDEYFVEKKLYPNVDFYSGITLKALGFPTESL

SEQ ID NO: 8067 - protein, 367 aa, Triticum aestivum
  misc_feature (55)..(55): Xaa can be any naturally occurring amino acid
  misc_feature (86)..(86): Xaa can be any naturally occurring amino acid
  misc_feature (95)..(95): Xaa can be any naturally occurring amino acid
  misc_feature (106)..(106): Xaa can be any naturally occurring amino acid
  misc_feature (232)..(232): Xaa can be any naturally occurring amino acid
  misc_feature (253)..(253): Xaa can be any naturally occurring amino acid
  misc_feature (296)..(296): Xaa can be any naturally occurring amino acid
MGSTATDMAASADEEACMYALQLVSSSILPMTLKNAIELGLLETLVAAGGKLLTXSTWCRARWRRARMGACPGGTAPRPCASSSPXTRTASPWAXHALMNMLRLLXSYNVVSCTMEEGKDGRLSRRYGAAPVCKFLTPNEDGVSMAALALMNQDKVLMESWYYLKDAVLDGGIPFNKAYGMSAFEYHGTDPRFNRVFNEGMKNHSIIITKKLLEVYKGFEGLGTIVDVGGGXVGATVGAIVAAYPAIKGINFXLPHVISEAPPFPGVTHVGGDWSDEHCATLLKNCYDALPAHGKXVVLVECILPVNPEATPKAQGVFHVDMIMLAHNPGGRERYEREFEALAKGAGFKAIKTTYIYANAFAIEFTK

SEQ ID NO: 8068 - protein, 205 aa, Triticum aestivum
  misc_feature (28)..(28): Xaa can be any naturally occurring amino acid
  misc_feature (49)..(49): Xaa can be any naturally occurring amino acid
  misc_feature (136)..(136): Xaa can be any naturally occurring amino acid
  misc_feature (182)..(182): Xaa can be any naturally occurring amino acid
MKTFLIFVLLAMAMNIATAARQLNPSNXELQSPQESFSHQQQPFPQQPXAAFSQPQDSFPWQPHQPFPQTQQSFPLQPQQPFPQQPQQSFPQPQPQQPQQPFPQQPQQPFPLRPQQPFPQQPQQSQQSFPQPQPQXPQQPSILQPQQPLPQQPQQPFQQPQQQLSQQPEQTISQQPQQPFPXHQPQQPYPQQQPYGSSLTSIGGQ

SEQ ID NO: 8069 - protein, 157 aa, Brassica napus
MMDGVTGGDSKSGEATTAPPLRNPHPATLLGANALPPPFLSKTYDMVEDPASDAIVSWSPANNSFVVWDPPEFSRSLLPRYFKHNNFSSFVRQLNTYGFRKVDPDRWEFANEGFLRGQKHLLKTISRRKSTHGHGTSSSNTQSHQGSHGFVIFMRRG

SEQ ID NO: 8070 - protein, 484 aa, Mycobacterium avium subsp. paratuberculosis str. k10
MSRDDWISADEGPRRTVSTTIPVFNPSTEEQIAEVPDSDQAAVDAAVARARETFELGVWRKAPASHRANVLFRAARIIEERKDELAALESQDNGMNLTAAGHIIPVSVDMLKYYAGWVGKIHGESANLVSDGLLGTWETYHTFTQLEPVGVVGLIIPWNGPFFVAMLKVAPALAAGCSAVLKPAEETPLTALKLEEIFREAGLPDGVLNVITGYGETTGAALTAHPDVDKISFTGSTEVGRLIVKAAAGNLKRLTLELGGKSPLIMFDDANLDKAIMGAGMGLLAGSGQNCSCTSRIYVQRGIYDQVVEGLAEFAKMLPMGGSDDPNSVLGPLISEKQRQRVEGIVNDGVAAGAKVITGGKPMDRKGYFYEATIITNTTPDMRLIREEIFGPVGCVIPFDDEDEVIAAANDTHYGLAGAIWTENLSRAHRVVNELRAGQIWVNSALAADPSMPISGHKQSGWGGERGRKGIEAYFNTKAVYIGL

SEQ ID NO: 8071 - protein, 285 aa, Lactobacillus gasseri
MNFHSIEDTYTLNNGVEIPIIGFGTWQTPDGDIAKHAVEVALNAGYRHIDTAAAYGNEKSVGQAIKKSGINRHDLFITTKLWNADHGYQSTKAAIDRSLQNLKVDYLDLYLIHWPNPVAMRDHWAEANAESWRAMEEAVQAGKIRAIGVSNFRKRHLDELLKTAEIKPVVNQIMLNPSDLQSDVVKVNNKLGLLSEAYSPLGTGGLLGNETVKEIASEVGKSPAQVLIRWSLEHGFLPLPKSVHDKYIQANVEVFDFNLNSEQMNKLDSLHGVSGLATDPDTANF

SEQ ID NO: 8072 - protein, 433 aa, Neisseria meningitidis Z2491
MPSETARPLYADTCAAHTLVWFRQNLRIRDNAALCAAVAEGLPVIGIWIDDAETDNPRRAAFYRQSAAELAQGLAGRGIPLYTAASPAELVRLAVRLNIRAVIADESHTFADKLADNALWHELNKHGIALTFVNDRAVFGKTDLIPDGGTAHTDFDRYREVWLDRFSKQPPAGPDLFAAYRQPFPENLSAPPPAALSDGIFLPQNSGETAAWRQWRRFLEQADSYSVLKDFPSRKHTSLMGAYLSAGCISPRLLARESLERRLNAWADNIIRRDFFLQLALQHTDDDPSDGNPEHTLRLTLWQQGRTGIPIIDAAMRCLHKTGSLHPALRRLSADFFCHVLNLPRREGEIWFARQLTDFDAAINQGNWRLAASRHTCPDIAAAAHKTDPDGTFVRRHIPELAHLSADTVHTPWRFACSVDTHGYPAHPVAGIP

SEQ ID NO: 8073 - protein, 490 aa, Escherichia coli K12
MSRMAEQQLYIHGGYTSATSGRTFETINPANGNVLATVQAAGREDVDRAVKSAQQGQKIWASMTAMERSRILRRAVDILRERNDELAKLETLDTGKAYSETSTVDIVTGADVLEYYAGLIPALEGSQIPLRETSFVYTRREPLGVVAGIGAWNYPIQIALWKSAPALAAGNAMIFKPSEVTPLTALKLAEIYSEAGLPDGVFNVLPGVGAETGQYLTEHPGIAKVSFTGGVASGKKVMANSAASSLKEVTMELGGKSPLIVFDDADLDLAADIAMMANFFSSGQVCTNGTRVFVPAKCKAAFEQKILARVERIRAGDVFDPQTNFGPLVSFPHRDNVLRYIAKGKEEGARVLCGGDVLKGDGFDNGAWVAPTVFTDCSDDMTIVREEIFGPVMSILTYESEDEVIRRANDTDYGLAAGIVTADLNRAHRVIHQLEAGICWINTWGESPAEMPVGGYKHSGIGRENGVMTLQSYTQVKSIQVEMAKFQSIF

SEQ ID NO: 8074 - protein, 320 aa, Solanum chacoense
MEKNQEAEVMWKRGRTLGQGGFGFVSLACTTHSDDSPLIPSLIAVKSCMLSHSESLEDEIEFLRMCQDCPHVIRSFGVKVTQEDDILLYNLLLEYASAGSLADRLLNNDQLGLPEFQVQNHTKSVLLGLRFIHRKGIIHCDIKPHNILLTSTDDDDAEEVAKIADFGLSLTLEQSWTQTQGMRGTKRYMAPESLLKQEYGPEADIWALGCTVYELITGTPLWESSNSDPEFDDVLHRIMYEEPNLENDKLSTEAKDFMSYCLIKNPKSRWSAGLLLNHSFLKSADSVLPPKKRKRQQVTCPGYRGERKHSGHSHTFVIWL

SEQ ID NO: 8075 - protein, 304 aa, Solanum chacoense
MASIRWSRGRTIGKGAEGTVTLATTHNNFSIAVKSSLFSCSKSLQKEREFLNEFQDCSQIIRCFGADVTEEDNNILYNILLEYAIGGSLAHRIGKKSGLPDFEVKKYSKPILLGLRVVHGKGFVHGDIKPHNILLVGTEKRAKIADFGFASKVGIGSKKRKLRGTPMYMAPESVLDDEYGTPADIWAFGCTVFEMITGKKVWDCTGINDPLHLLCKIGMQSPDLHDDKMSKQAEDFLNKCVDRDPHSRWTADLLLNHPFLSSDNNDVHQRKRKELNLVDLCNSTELKPMKLLTNKRRRKLVERC

SEQ ID NO: 8076 - protein, 213 aa, Volvox carteri f. nagariensis
MSYAYLFKYIIIGDTGVGKSCLLLQFTDKRFQPVHDLTIGVEFGARMINIDGKQIKLQIWDTAGQESFRSITRSYYRGAAGALLVYDITRRETFNHLASWLEDARQHANPNMTIMLIGNKCDLTHRRAVTTEEGEQFAKEHGLIFLETSARTAHNVEEAFINTAKEIYKKIQDGVFDVSNESYGIKVGYGAGNAGPQAAKPGEGDARKSSSCC

SEQ ID NO: 8077 - protein, 436 aa, Triticum aestivum
MPSASSAVPSAAAPGDESQSLAAPKLLLGRYELGGLLGRGASAKVYRARDILTGRDVAIKSFPNPRAGAREGEGSAGSAAIEREAAILSRLRHRHVVRLHEILGTRKKVHFVLDLAAGGELFSLVDSDGRMTEDLARHYFRQLVSAVRYCHSRGVYHRDIKPENLLLDGDGDLKVADFGLGAIADESLHHTLCGTPAYVAPEILSKQGYHPAKVDIWSCGVVLFVLAAGYLPFNDASLINMYRKIYAGRFRCPNWFSPALRHLLRRILDPNPSTRIDTDGIMEHPWFRHGASGDGELEELMRGHEEEAWFKTEFKEDMARDMTAFDILAFSPGSDLSGLFGAGPGTERVFVGEPAAAVLARVEDAGKKQGHRVRREGKGRAGPVYVEAEAGGIVAKVTVFRIADAVSVVEVVKGHGAEAAAFWSDWLEPAVKPQAV

SEQ ID NO: 8078 - protein, 333 aa, Saccharomyces cerevisiae
MSEPSEKKQKVATSSLEQLKKAGTHVVADSGDFEAISKYEPQDSTTNPSLILAASKLEKYARFIDAAVEYGRKHGKTDHEKIENAMDKILVEFGTQILKVVPGRVSTEVDARLSFDKKATVKKALHIIKLYKDAGVPKERVLIKIASTWEGIQAARELEVKHGIHCNMTLLFSFTQAVACAEANVTLISPFVGRIMDFYKALSGKDYTAETDPGVLSVKKIYSYYKRHGYATEVMAASFRNLDELKALAGIDNMTLPLNLLEQLYESTDPIENKLNSESAKEEGVEKVSFINDEPHFRYVLNEDQMATEKLSDGIRKFSADIEALYKLVEEKM

SEQ ID NO: 8079 - protein, 381 aa, Staphylococcus epidermidis ATCC 12228
MLTEKEQDIIKQTVPLLQDKGTEITSIFYPKMFEANPELLNMFNQTNQKKGMQSAALAQAVLAAAMNINNLGAIKPAIMPVAHKHCALQVYPEHYPIVGENLLAAIQDVTGLESDDPVIQTWAKAYGEIADVFIKLEQEIYNHMLWKGFKPFKITNITQETSDIKSFTVESEEYDLSQFEPGQYITVDVSSEKLPYRAKRHYSIIDGDENHLVFGVKRDVTTEHEGEVSTILHDEISEGDMINLSAPVGGFSIENTERPQLFIGSGVGMTPLVSMFKKAASLNVPTQMIQAVVTEDERPFAQKLDSITDNYEQAQLHLHVKDKEGYLEAKELEQYLSEQPEIYICGGTKFLHSIINSLKELNYDMNHVHFETFIPRLSVQV

SEQ ID NO: 8080 - protein, 358 aa, Cordyceps bassiana
MAEFVRAQIFGTTFEITSRYSDLQPVGMGAFGLVCSARDQLTNQNVAVKKIMKPFSTPVLAKRTYRELKLLKHLRHENVISLSDIFISPLEDIYFVTELLGTDLHRLLTSRPLEKQFIQYFLYQIMRGLKYVHSAGVVHRDLKPSNILVNENCDLKICDFGLARIQDPQMTGYVSTRYYRAPEIMLTWQKYDVEVDIWSAGCIFAEMLDGKPLFPGKDHVNQFSIITELLGTPPDDVINTIASENTLRFVKSLPKRERQPLRNKFRNADDSAIDLMERMLVFDPKKRITAAEALSHDYLAPYHDPTDEPVAEEKFDWSFNDADLPVDTWKIMMYSEILDYHNVEAGASGLEDGSVPAQ

SEQ ID NO: 8081 - protein, 467 aa, Listeria monocytogenes str. 1/2a F6854
MLYSEDDKRKQESYRIPLFGSEEESTSIPKYVLKKEPMEPRIAYQLVKDQLMDEGNARQNLATFCQTYMEKEAEILMAETLEKNAIDKSEYPQTAELENRCVNILADLWNAPKDMSYLGTSTVGSSEACMLGGLAMKFRWRNNAEKRGLDIQAKRPNLIISSGYQVCWEKFCVYWDVDMRVVPMDKNHLSLDVDKVFDLVDEYTIGVVGILGITYTGKFDDIQLLDEKVEAYNATNEHQLVIHIDGASGAMFTPFVNPELPWDFRLKNVVSINTSGHKYGLVYPGVGWILWKDKEYLPKELIFEVSYLGGSMPTMAINFSRSASQIIGQYYNFLRYGFEGYREIHEKTKKTALYLAKTVEKSGYFEIINDGANLPIVCYKMKEGLDVEWTLYDLADQLLMKGWQVPAYPLPADLSDTIIQRFVCRADLGYNVAEEFAADFADAIHNLEHARVLYHDKERNDSYGFTH

SEQ ID NO: 8082 - protein, 289 aa, Arabidopsis thaliana
MDKINGLPDDLLVKILSYVPTDIAVSTSILSKRWEFLWMWLPNLDYTSRWCRKPGDVGLRDFIHKNLPLHRAPVIESLRFHSNSPDIKPEDIRRWIEIAVSRHVHDLDIDHFSENENIFLSSFFACKSLVTLKLRSVTLRDIPSMVCLPSLKTLLLDNVSFVEGKSLQELLSICPVLEDLSVYCDDYENTKELTIVVPSLLSLSLYIPDEWLLDGYWIDTPSLEYLKLEDWNSCDHLSLIKNMPKLREAYVDAKCFLPKSVIESITSVKHLTICSKVPFLSTAGCQSKL

SEQ ID NO: 8083 - protein, 298 aa, Arabidopsis thaliana
MGKEVMVSDYGDDDGEDAGGGDEYRIPEWEIGLPNGDDLTPLSQSLVPSILALAFSMIPERSRTIHDVNRASQITLSSLRSSTNASSVMEEVVDRVESSVPGSDPKKQKKSDGGEAAAVEDSTAEEGDSGPEDASGKTSKRPRLVWTPQLHKRFVDVVAHLGIKNAVPKTIMQLMNVEGLTRENVASHLQKYRLYLKRIQGLTTEEDPYSSSDQLFSSTPVPPQSFQDGGGSNGKLGVPVPVPSMVPIPGYGNQMGMQGYYQQYSNHGNESNQYMMQQNKFGKMVTYPSVGGGDVNDK

SEQ ID NO: 8084 - protein, 193 aa, Streptomyces coelicolor A3(2)
MRARPRDPGKIQTAPPSILCMTSAPNTRNDDNLPLDVEIGALQGGAADLSQYAGRVVLVVNVASKCGLTPQYAGLERLHERYAEQGFTVLGVPCNQFMGQEPGSADEIAEFCSATYGVTFPMTGKAEVNGEGRHPLYDRLTGFADAEGHSGDIRWNFEKFLIGRDGKVAARFSPQTEPEAAEVVAAVEERLAG

SEQ ID NO: 8085 - protein, 147 aa, Glycine max
MGDNNIGKVLEREGFKYNFTAAASDTSAQDEVIKEQDRLLPIANVGRIMKQILPPNAKISKEAKETMQECVSEFISFVTGEASDKCHKEKRKTVNGDDICWALATLGFDDYSEPLKRYLHKYREFEGERANQNKGNNNTYENNIANI

SEQ ID NO: 8086 - protein, 494 aa, Neurospora crassa
MAPKLKDPSLFKKDVCYVNGEWVKAHSGKTFEVNATGKLIGTCPEFDAQDTKKAIDAAETAFETFRHKTGRERSKLLRKWYDLMVENHDDLTTLITLENGKPLADAKGEVTYAANFFEWFSEEAPRIYGDTIPSSVPGNRVWTIKEPVGVCGLITPWNFPAAMITRKVGPALAVGCTVVCKAPGETPFTALAIAELAHRAGIPPGVVNVITALENTPEVGSTLTTDPVVRKISFTGSTAVGKLLMKQCSGTLKKLSLELGGNAPFIVFDDADVDAAVTGAIASKFRSSGQTCVCANRIYVQRGIYDEFSQKFAEQVKNNFRVGNGFEEGVTHGPLIHHRAIEKVEQHVRDAEKKGAKVVVGGHRLESLGPNFYEPTVITGMTPDMAMASEETFGPVAGLFPFDTEDEVVKLANATQVGLAGYFFSRDIHRCVRVAEHLEVGMVGINTGLISDPASPFGGVKESGFGREGSLYGIGEYQVTKMVTVGGMGQPLQK

SEQ ID NO: 8087 - protein, 451 aa, Burkholderia cepacia R18194
MTDITTAQQDETNLRTDAAWLDAHWMPFTANRQFKADPRMIVSGKGAYYTDGEGRKIFDGLSGLWCTGLGHGRTEIVEAVSRQVAQLDYAPAFQFGHPKSFELANKIKDLTPAGLDYVFFTGSGSEAADTSLKLARAYWRAKGKGTKTRLIGREKGYHGVNFGGISVGGIGPNRKLFGQGLDADFLPHTQLAENKFSRGMPEHGAELADRLLELIALHDASNIAAVIVEPFSGSAGVVVPPKGYLKRLRDICTAHDILLIFDEVITGFGRAGAMTGADAFGVVPDIMNFAKQVTNGVQPLGGVIATKEIYDTFMAAGGPEYMLEFPHGYTYSAHPVACAAGVAALDLLVKEDAVARVRDLAPHFEAAVHGLKGQRHITDIRNYGLAAGLTIAALPGEPARRPYEIAMRCWAKGFYVRYGGDTIQLAPPFISEKREIDNLVNALSDALNEVD

SEQ ID NO: 8088 - protein, 323 aa, Zea mays
MAAAARQRGTVKWFNDTKGFGFISPEDGSEDLFVHQSSIKSEGFRSLAEGEEVEFSVSEGDDGRTKAVDVTGPDGSFVRGGGGGGGGGGGGYGSRGGGGSGGGGRSYGGSWGGGRRSAPDAAFGSVLSGTAGDAAPSDQWFVDALNAPAPHPIERVRSESSSIVSDVPDYLFSLDSPSDDPSPGPSAARAKSDPAETPHHHGDDVPPSARQIPHVAGGASSWPAPPPPYMAQPMYYFPVPPPVHYLDQSAQSGYMPRPIYHIVGGGGSEAPGGDLHAAGGVYGVSHHMQGFPPMMYAPPRAVIYNYKSEGMPSLPPEGGAHSS

SEQ ID NO: 8089 - protein, 461 aa, Vibrio parahaemolyticus RIMD 2210633
MKSLENTTIEHFKSHFQGDVVLPTDSNYDEVRQIWNGMIDRKPSLIARCKSADDVVMAVNFARDNGQLLSVRGGGHNIAGNAVCDNGVMIDLSLLTQVRVDENAKRAFVEPGCTLGDLDEASQKHGLATPVGINSTTGIAGLTLGGGFGWLSRKYGMTIDNLVSANVVTADGRQLLASETENEDLFWALRGGGGNFGIVTQFEFQLHPVGPEVLSGLIVFPFDQAKSVITQFAKFTESAPEELSVWMVSRKAPPLPFLPESVHGKEVVVLAICYAGDPSEGEKLIAPLRDFGDAHGEHVGVQPFAAWQQAFDPLLTPGARNYWKSHNFNSLSEGVIDAAIEYAGKLPSPQCEIFIASLGCAASRPDPESMAYSSRDANYVLNVHGRWDSAEDDQACIAWARDFFTKTKPYASGGAYINFLTQDEAERTESAYGPTFARLQEVKKKFDPNNLFRMNQNIKPE

SEQ ID NO: 8090 - protein, 512 aa, Oryza sativa
MGLCSSSSARRDAGTPGGGNGAGNKDNAGRKGIVACGKRTDFGYDKDFEARYALGKLLGHGQFGYTFAAVDRRSSERVAVKRIDKNKMVLPVAVEDVKREVKILKALQGHENVVHFYNAFEDDNYVYIVMELCEGGELLDRILAKKDSRYSEKDAAVVVRQMLKVAAECHLHGLVHRDMKPENFLFKSTKEDSSLKATDFGLSDFIRPGKHFRDIVGSAYYVAPEVLKRKSGPESDVWSIGVITYILLCGRRPFWDKTEDGIFKEVLKNKPDFRRKPWPNITPCAKDFVQKLLVKDPRARLTAAQALSHEWVREGGQASDIPLDISVLHNMRQFVKYSRFKQFALRALASTLNAEELSDLRDQFNAIDVDKNGTISLEELKQALAKDVPWRLKGPRVLEIVEAIDSNTDGLVDFEEFVAATLHVHQLVEHDTEKWKSLSQAAFDKFDVDGDGYITSDELRMQTGLKGSIDPLLEEADIDRDGKISLDEFRRLLKTASMSSRNVQTPRSVHRS

SEQ ID NO: 8091 - protein, 168 aa, Triticum aestivum
MAAASSATSVHDFTVKDASGKDVDLSVYKGKVLLIVNVASQCGLTNSNYTELSQLYPKYKDQGFEILAFPCNQFGGQEPGTNDEIVQFACTRFKAEYPIFDKVDVNGNNVSPLYKFLKSSKGGLFGDSIKWNFSKFLVDKEGRVVDRYAPTTSPLSIEKDIKKLLGSS

SEQ ID NO: 8092 - protein, 171 aa, Triticum aestivum
  misc_feature (82)..(82): Xaa can be any naturally occurring amino acid
TRPPKSVNDIHKRGGTVLGSSRGGHDTHKIVDNIQDRGINQVYIIGGDGTQKGAYEIFKEIRRRGLKVAVAGIPKTIDNDIXDKSFGFDTAVEEAQRAIDAAHVEASSAENGIGLVKLMGRYSGFIAMYATLASRDVDCCLIPESPFFLEGEGGLFEYIERRLKENQPHGH

SEQ ID NO: 8093 - protein, 378 aa, Zea mays
SESEAASGRQGEMGKGAQGSDAAAAGGEVEENMAAWLVAKNTLKIMPFKLPPVGPYDVRVRMKAVGICGSDVHYLREMRIAHFVVKEPMVIGHECAGVVEEVGAGVTHLSVGDRVALEPGVSCWRCRHCKGGRYNLCEDMKFFATPPVHGSLANQVVHPADLCFKLPDGVSLEEGAMCEPLSVGVHACRRAGVGPETGVLVVGAGPIGLVSLLAARAFGAPRVVVVDVDDHRLAVARSLGADAAVRVSPRAEDLADEVERIRAAMGSDIDVSLDCAGFSKTMSTALEATRPGGKVCLVGMGHNEMTLPLTAAAAREVDVVGVFRYKDTWPLCIDFLRSGKVDVKPLITHRFGFSQRDVEEAFEVSARGRDAIKVMFNL

SEQ ID NO: 8094 - protein, 238 aa, Glycine max
MTSASELFHTRRHRLGRNALDLGLDTELHAADSLRQLRLRHYYLRRHHPERASDRIDGRYRRSFVSESVDSEENVRSSLRGSSSERLPVGVVLARARLLQRLRGEPLSTNRQYDRDSFGEDRESESSNEDPSGASLVTELTSQMARSQFLQELNTKPPGLTQEALDCLHQEVFSSSGNEIGLESRVLQDCSICLESFTDGDELIRLPCGHKFHSVCLDPWIRCCGDCPYCRRSIVVIN

SEQ ID NO: 8095 - protein, 348 aa, Chloroflexus aurantiacus
MRAVYYEAFGQMPWIATLPDPAPTPDGVVLAVRATGLCRSDWHGWMGHDPDIKLPHVPGHELAGEIVAVGSQVRRWRIGDRVTVPFVCACGFCPQCQAGQQQVCDNQFQPGFTHWGSFAEYVAIDRADLNLVRLPADMSFTTAASLGCRFATAFRAVVDLGQVRGGEWVAVYGCGGVGLSAIMLASALGGQVIGIDINLERLALARAVGATAVIDATTEPDVVSVVRDLSRGGVHLAIDALGSPMTCANAIASLRKRGRHVQVGLLLADQRMPPLPMDIVVARELTIMGSHGMQAYRYDAMLDLIQSGKVQPQRLIGRTISLSEAPAALVDLDSFRGSGVTVITEFQG

SEQ ID NO: 8096 - protein, 408 aa, Bacillus halodurans C-125
MKAIQFDLSIPKYALSKAMGKMNSSLYVESPFSCLQLRDVEKPALPNDHWVEIKVKYGGICGSDLNLIFLNDSPATSPFVSFPFTLGHEMVGTISKARKSVTNLQVGQRVVIDPLLSCEVRGITPVCSECANGNYNLCHHMNDGDIAPGLLTGTCKDTGGSWGRYLVAHQSQVISLPSSVDDDNGVLVEPFACALHAVLQNRPKPSDTVFVIGSGVIGICVIAAIRALEIPCKIVTLAKHPFQAELAKQFGADEIVFLSRKRDYVTAVAESFNANVLHPVFGEPIVHGGADIVYECVGNRKSLHDSLRFARKGGKVVLIGLASFIDNLDMTMIWLNELEVKGSFTYGMEDWQGGKKRTLQIAVDLIADGKVDLSPLITHRFPLEAYREALATAANKKKGQTMKVVFEP

SEQ ID NO: 8097 - protein, 220 aa, Triticum aestivum
  misc_feature (161)..(161): Xaa can be any naturally occurring amino acid
PVPDFPEILKPRFREWGPGALYWVEGYEKPRGPPPSRLYTYIAQPWAPTVMASSATSVAPFQGLKSTAGLPVSRRSNGASLGSVSNGGRIRCMQVWPIEGIKKFETLSYLPPLSTEALLKQVDYLIRSKWVPCLEFSKVGFIFREHNASPGYYDGRYWTMXKLPMFGCTDATQVINEVEEVKKEYPDAYVRIIGFDNMRQVQCVSFIAFKPPGCEESGKA

SEQ ID NO: 8098 - protein, 394 aa, Vibrio cholerae O1 biovar eltor str. N16961
MLTQEHINIIKSTIPLLESAGPALTQHFYQRMFSHNPELKHIFNMTHQKTGRQSVALFEAIAAYAKHIDNLAALTSAVERIAHKHTSFNIQPEHYQIVGHHLLETLRELAPDAFTQPVEEAWTAAYFFLAQVFIDREGALYLERKQALGGWRDGRTFVVREKQVESAYVTSFVLVPADGGAVLDYQPGQYIGIEVTPEGSDYREIRQYSLSHASNGREYRISVKREGVGSDNPGLVSHYLHNNVKVGDSVKLYAPAGDFFYVERERPVVLISAGVGATPMQAILHTLAKQNKSGVTYLYACNSAKEHTFAQETAQLIAQQGWMQQVWYRDESADDVLQGEMQLAELILPIEDGDFYLCGPIGFMQYVVKQLLALGVDKARIHYEVFGPHAQLAA

SEQ ID NO: 8099 - protein, 143 aa, Brassica napus
MSSKKVEGSSAPANRRDPYEVLSVARDATDQEIKSAYRKLALKYHPDKNANNPEASDLFKEVAFSYSILSDPEKRRQYDNAGFEALDADGMEMEIDLSNLGTVNTMFAALFSKLGVPIKTTVSANVLEEAMSRPGPPMFLRRL

SEQ ID NO: 8100 - protein, 227 aa, Eucalyptus occidentalis
MAREKIQIKKITNATARQVTFSKRRRGLFKKAEELSVLCDADVALIVFSSSGKLFEYCSSSMKEILERHHSHSENLGKLDQPSLKLQLVENGDYSRLSKEVAEKGHQLRQMRGEELQGLNIDELQQLEKSLEAGLNRVIEKKGEKIMKEITDLQQKGAKLMEENKRLKQQVTEISGRKTTATDSETIINEEGLSSESITNVCSSSSGPPQEDDSSDISLKLGLPYNG

SEQ ID NO: 8101 - protein, 209 aa, Triticum aestivum
MKTLLILTILAMATTIATANMQVDPSSRVQWPQEQPPPQSQQPFSQQPQQIFPQPQQTFPHQPQQAFLQPQQTFPRRPQQQFPQPQQPQQPFPQPQQPQLPFPQQPQQPFPQPQQPQQPFPQSQQPQQPFPQPQQQFPQPQQPQQSFPQQQQWMIQSFLQQQMNPCKNFLLQQCNPVSLVSSLVSIILPRSDCQLMQATMVANNLAQIP

SEQ ID NO: 8102 - protein, 307 aa, Mycobacterium avium subsp. paratuberculosis str. k10
MSLEPQIAAIIEQLDSGFPPVQQMSGAEARALIRSRLVPPAQPEPVAEVADRLVEGPGGPLRIRVYRPEAAAPLPVVVYAHGGGFVFCDLDSHDGLCRNLANLVPAVVVSVDYRLAPENAWPAAAEDVYAVTCWARDHADALGADPARLVVGGDSAGGNLAAVTTVMCRDRGGPAPAAQLLIYPVIAADFDTESYRLFGQGYYNPAPALRWYWDCYVPSTRDRAHPYATPLNADLRGLPPAVVVVAGHDPLRDEGLAFGAALEAAGVPTVQLRYEGGIHGFMTMPMLDIAHRARNEAAAALADLLQW

SEQ ID NO: 8103 - protein, 489 aa, Bordetella parapertussis 12822
MTQLTQPLSRAELLRDACYIDGKWVGAGNGPSIPVDNPSTGKTIISVPKLGRKEAEQAIDAAEAALPAWSARTGKERAAILLKWAQLTMENQQDLAVIMTSEQGKPVAEAAGEIAYAASFLEWFAEEAKRIDGDILQSPKGGQRLMVLKQPIGVTAAITPWNFPAAMITRKVGPALAAGCTMVVKPAQQTPLTALALAVLAEQAGVPAGVFQVVTGSSREIGAALCESEVVRKLSFTGSTEVGRTLMEQCAPTIKKLSLELGGNAPFIVFDDADLDRAIDGILASKYRNAGQTCVCANRIYVQAGVYEEVAKRLVEKVNAMKVGDGFEQGVTQGPLIDTAAVAKVQEHIADATAHGAKVIAGGQPHALGGSFFQPTVVRDVTQSMRFAVEETFGPVAPLFKFESEDEVIGMANNTIFGLAAYFYTRDYARIWRVSEALEYGIVGINTGIISNEVGPFGGVKQSGLGREGSKYGIEDYLELKYLCVDLGA

SEQ ID NO: 8104 - protein, 183 aa, Zea mays
GVKQEGEYQPEEHPEPGSDYIRAQEARRFMIYVHAKMLIVDDEYIIIGSANINQRSMDGARDSEIAMGAYQPYHLATRQPARGQIHGFRMSLWYEHLGMLDDVFQRPESVECVQKVNKIAEKYWDLYSSDDLEQDLPGHLLSYPIGVTADGTVTELPGMENFPDTRARVLGNKSDYLPPILTT

SEQ ID NO: 8105 - protein, 423 aa, Ehrlichia canis str. Jake
MYINTCAWFNKGYQNIWMPYTQMKNSPLPLSVKSASGCYIILEDGKRLLDGISSWWSVCHGYSHPHIVQKVQDQVAKLSHVMFSGLAHEQSYVLASRLVKISPEQKKVFFSDSGSTAVEVAMKMAVQYHQNLGNKNKYNFVSFVNGYHGDTMGCMSISDPTKIHGTKFKKYHPSQFILPLPSTEEEIKNFANTIYSIRDQVAAVILEPILQAAGGMLIHSANILKKIYDIAKANNILFIADEVATGFGRTGTMFGCNQANIVPDIIVIGKALTGGFCTLAATLTTQEVYDAFLSDNIDDAFMHGPTFMANALACAAANASLDIFESQDLIRNIGLIENQLKSELGVFKQLDCVTDIRVKGATGVIELKDGLIDKHDIINKGVELNIWIRPLNNVIYVMPPFIINSNELTQLITSIYKILKSNI

SEQ ID NO: 8106 - protein, 160 aa, Xylella fastidiosa Ann-1
MNVVRYTPWPGQAVLQNEIKQVFDRFFEHNGDTDESAVVTAQWVPRVDIKEEPNQFVLYADLPGIDPADIEVQMDKGILSIKGERKTESSSQTEHFSRIERRYGSFHRRFALPDSADADGITASGSHGVLRILIPKQAATTPRRIQVGNAVSSDVALQSM

SEQ ID NO: 8107 - protein, 239 aa, Leuconostoc mesenteroides subsp. mesenteroides ATCC 8293
MDNFNMNARRDVTGVDEGMRAFFKQTYSFMGIAVLLTAVTGFIVQNFFLEQVAKLLVGNVIGLLALLGIQMLIITMIGRATFKNPARAFGLLMAFAVVEGLTLGVLLAVYTGASVVMAFVSASAVFGGMAAYGVFTKRDLTGLGSILFGLLIGLLIASIANMFFYSGIVSLLLSWASVVVFSLFTAYDNQNLKVMYSQFAGQADTTGLAVNGALRLYLDFVNIFFALLRIFGVVSGSRD

SEQ ID NO: 8108 - protein, 379 aa, Methanococcoides burtonii DSM 6242
MEENGKTKEEILLFLKKAKSADASYERVLSSMCTYPHEIAVLAHTQFIESNMGDPGLFPGTFNLEKQVLAMFGKMLHHKNSPEKAGYLTTGGTESNIQAIRSMHNFRHDISRPNIVMPESAHFSFDKVANLSGIEIRKASLDKLLKVDLDSVRSLIDKNTIGLVGIAGTTEFGQLDPINELSKIAIEKGIFLHIDAAFGGFVIPFMDIDYTYDFRLEGVTSMTIDPHKMALSTIPSGGLLFKEPEYFECLEIHTPYLSVNKQYSLTGTRSGAGVASTYAVMKHLGRKGYKKVVSDCMSVTKKLVDGAEKLGINTVIDPVLNIVALDVPEADLVRKKLLDEYGWHVSITRNPRALRIVIMPHIKNETIELFLKDLAKVIK

SEQ ID NO: 8109 - protein, 419 aa, Thermotoga maritima MSB8
MAERLGILVGGGPAPGINSVISSVTIEAINNGLEVIGIYDGFKHLVEGKTNMVKKLSIEDVSRIHIEGGSILRTSRVNPAKSEETLEKTVQTLKKLGIKYLVTIGGDDTAFSASKVCERSKGEIKVVHVPKTIDNDLPLPENMPTFGFETARHVATELVYNLMQDSRTTNRWYFVAMMGREAGHLALGVGKAASATITIIPEEFKEGVTLEEVCDVLDGAILKRKLMGRDDGVAVIGEGIAEKMDPEELANIPGVIVEKDPHGHLRLAEIPLATILKRAIERRYAERGERIHIVDVTIGYELRSARPIPFDIVYTRTLGYGAVRFLLGDYSDLPGGMVCVVGGRIKILPFDAFMDPKTGRTKVRVVDVRSEDYRVARKYMIRLEKKDLEDPETLEKLAKLAKMEPEEFKKKYWHTTELP

SEQ ID NO: 8110 - protein, 367 aa, Thermotoga maritima MSB8
MIQKGLEGVKICESSICYLDGINGRLYYRGIPVEELAEKSTFEETAYFLWYGKLPTKSELEEFKRKMADYRELPAEALGILYHLPKNLHYIDVLKIFLSIHGSMDGNDEDLREKAIRVASVFPTILAYYYRYSKGKELIRPRKDLSHVENFYYMMFGERNEKIRLLESAFILLMEQDINASTFAALVIASTLSDLYSCIVGALGALKGPLHGGASEKVPPMLEEIGSEDRVEEFVQKCLKEKRKIMGFGHRVYKTYDPRAVFLKRVLQEHFPDSKLFRIASKLEEYIVSNKIKNIYPNVDLYSSVLFEELGFPRNMFTALFATARVVGWTAHVIEYVSDNKLIRPTSEYVGPMDVEYIPIERRDENG

SEQ ID NO: 8111 - protein, 496 aa, Nicotiana tabacum
MVLSKTASESDVSIHSTFASRYVRTSLPRFKMPENSIPKEAAYQIINDELMLDGNPRLNLASFVTTWMEPECNKLMMDSINKNYVDMDEYPVTTELQNRCVNMIAHLFNAPLGDGETAVGVGTVGSSEAIMLAGLAFKRKWQNKMKAQGKPCDKPNIVTGANVQVCWEKFARYFEVELKEVKLSDGYYVMDPEKAVEMVDENTICVAAILGSTLNGEFEDVKRLNDLLIEKNKETGWDTPIHVDAASGEFIAPFLYPELEWDFRLPLVKSINVSGHKYGLVYAGIGWAIWRNKEDLPDELIFHINYLGADQPTFTLNFSKGSSQVIAQYYQLIRLGFEGYKNVMENCQENARVLREGLEKSGRFNIISKEIGVPLVAFSLKDNSQHNEFEISETLRRFGWIIPAYTMPPNAQHVTVLRVVIREDFSRTLAERLVIDIEKVLHELDTLPARVNAKLAVAEANGSGVHKKTDREVQLEITTAWKKFVADKKKKTNGVC

SEQ ID NO: 8112 - protein, 279 aa, Caulobacter crescentus CB15
MSKLVPAVRSGDVLMPALGFGTWQLENGTAVPLVEKALEIGYRHIDTAQIYGNERDVGAAIRNSGVKRDEIFLTTKVWIDQFADGDLQRSAEKSLEKLGVDQVDLLLLHWPKPEVPLAETLKALNAVRAKGWTRAIGLSNFPSAQLEEAAKLSEAPIATDQVEYHPYLSLKTLKAKADQLGVSITAWSPLAQGKVAQDPVLIEIGRAHGKTPGQVTLRWIIQQGIIAIPRTSNPKRIEENFDILDFELSEKEMAQIHGLARPDGRIGDWIDRAYAWDAE

SEQ ID NO: 8113 - protein, 519 aa, Triticum aestivum
  misc_feature (140)..(140): Xaa can be any naturally occurring amino acid
MGNRTSRHRRAAADQPATAPPPTAQPKPQPPPKPQTAPAPAPTPEAGQVAMGRVLGRPMEDVRATYTFGRELGRGQFGVTYLVTHKATGQRFACKSIATRKLVHRDDIEDVQREVQIMHHLTGHRNIVELRGAYEDRHSXVNLIMELCEGGELFDRIIARGHYSERAAALLCREMVSVVHSCHSMGVFHRDLKPENFLFLNNKEDSPLKATDFGLSVFFKHGEQFKDLVGSAYYVAPEVLKRHYGAEADIWSAGIILYILLSGVPPFWADNEDGIFEAVLLGHIDFSSDPWPSISNGAKDLVKKMLRQDPKERLTAAEILNHPWIREDGEAPDKPLDITVISRMKQFRAMNKLKKVALKIVAESLSEEEIAGLREMFRSLDTDNSGTITLEELRSGLPKLGTKISESEITQLMEAADVDGNGTIDYSEFVSATMHMNRLEKEDHILKAFEYFDKDHSGYITVDELEEALKKYDMGDDKTIKDIIAEVDTDHDGRINYQEFVAMMRNNSPEIVPNRRRMF

SEQ ID NO: 8114 - protein, 514 aa, Glycine max
  misc_feature (80)..(80): Xaa can be any naturally occurring amino acid
  misc_feature (89)..(89): Xaa can be any naturally occurring amino acid
  misc_feature (295)..(295): Xaa can be any naturally occurring amino acid
MLSQKQGEDAIITNLNHTEHEDGSKISRDEEEQDHSMFNFKSLLWHGGSVWDAWFSCASNQVAQVLLTLPCSFSSSRIGXAQLGMVSGXILLQIFYGLIGSWTAYLVSVLYIEYRTRKEKENVSFKNHVIQWFEVLDGLLGRYWKAVGLAFNCTFLLFGSVIQLIACASNIYYINDKLYKRTWTYIFGACCAFTVFIPSFHNYRIWSFLGLGMTTYTAWYLAIAAILHGQVENVTHSGPTKLILYFTGATNILYTFGGHAVTVEIMHAMWQPRKFKSIYFLATLYVFTLTIPSAXAVYWSFGDQLLDHSNAFSLLPKNVFRDAAVILMLIHQFITFGFACTPLYFVWEKVIGMHDTKSIWLRALARFPVVLPIWFLAIIFPFFGPINSAVGSLLVSFTVYIIPALAHMLTYRNASARQNAAEKPPFFMPSWTAMYVFNAFIIGWVLVVGFGLGGWASMINLINQIDTFGLFAKCYQCPEPPPPAGAPPPLTHPVVEGGVDLVEPWAPPNLLKII

SEQ ID NO: 8115 - protein, 352 aa, Acinetobacter sp. NCIMB9871
MHCYCVTHHGQPLEDVEKEIPQPKGTEVLLHVKAAGLCHTDLHLWEGYYDLGGGKRLSLADRGLKPPLTLSHEITGQVVAVGPDAESVKVGMVSLVHPWIGCGECNYCKRGEENLCAKPQQLGIAKPGGFAEYIIVPHPRYLVDIAGLDLAEAAPLACAGVTTYSALKKFGDLIQSEPVVIIGAGGLGLMALELLKAMQAKGAIVVDIDDSKLEAARAAGALSVINSRSEDAAQQLIQATDGGARLILDLVGSNPTLSLALASAARGGHIVICGLMGGEIKLSIPVIPMRPLTIQGSYVGTVEELRELVELVKETHMSAIPVKKLPISQINSAFGDLKDGNVIGRIVLMHEN

SEQ ID NO: 8116 - protein, 280 aa, Triticum aestivum
MENDGVPNGPAAPAPTQGTPVVREQDRLMPIANVIRIMRRALPAHAKISDDAKEAIQECVSEFISFVTGEANERCRMQHRKTVNAEDIVWALNRLGFDDYVVPLSVFLHRMRDPEAGTGGAAAGDSRAVTSAPPRAAPPVIHAVPLQAQRPMYAPPAPLQVENQMQRPVYAPPAPVQVQMQRGIYGPRAPVHGYAVGMAPVRANVGGQYQVFGGEGVMAQQYYGYGYEEGAYGAGSSNGGAAIGDEESSSNGVPAPGEGMGEPEPEPAAEESHDKPVQSG

SEQ ID NO: 8117 - protein, 365 aa, Prunus dulcis
MGSTGETQMTPTQVSDEEANLFAMQLASASVLPMVLKAAIELDLLEIMAKAGPGVFLSPTDIASQLPTKNPDAPVMLDRMLRLLASYSILTYSLRTLADGKVERLYGLGPVCKFLTKNEEGVSIAPLCLMNQDKVLLESWYHLKDAVLEGGIPFNKAYGMTAFEYHGTDPRFNKVFNRGMADHSTITMKKILETYKGFEGLTSVVDVGGGTGAVLNMIVSKYPSIKGINFDLPHVIEDAPQYPGVEHVGGDMFVSVPKGDAIFMKWICHDWSDEHCLKFLKNCYAALPDNGKVILGECILPVAPDSSLATKGVVHIDVIMLAHNPGGKERTEQEFQALAKGAGFQGFNVACSAFNTYVIEFLKKN

SEQ ID NO: 8118 - protein, 416 aa, Zea mays
MGNICGGSGKDRVAEDFRPSSPGTTMTSKTSGSITTSLSTTGKLSSVGSSFMASAGSRSTSGGFDEGAKYSDGQILEAPNLRTFTFIELKTATKSFRPDSVLGEGGFGRVYKGWVDEKTMAPTRNGTGMVVAVKKLNSESMQGFEEWQSEINFLGRLSHPNLVKLLGYCWEDRELLLVYEFMAKGSLENHLFRRGCAPLSWELRLKIAIGAARGLAFLHASEKQVIYRDFKASNILLDANYNAKLSDFGLAKLGPTGSKSHITTRVMGTYGYAAPEYVATGHLYVKSDVYGFGVVMLEMLSGQRALDPNRPNGQLSLADWAKPFLADRRRLARLMDPRFEGQYNSKQAFQAAQLTLNCLAGEPRSRPSMKEVVETLEQIESVKSRAREARGGSSRDRHHGRAGAAHQRSPRAGGEP

SEQ ID NO: 8119 - protein, 411 aa, Oryza sativa (japonica cultivar-group)
MLACIACSTKDGGEGGHRSATATPNSGKSLTSQLKDMVLKFSGSGRHQYKSGGSPSLRTSRFHRSSRLAAYPGIIDESGFTSDGAGEAYTYMRTTTASAGARAAPSTWDLPPKVNHRSFQPRVIRSPSASGVPSIGEEDYDDDDDDDDEETVLLEEDRVPREWTAQVEPGVQITFVSIPGGAGNDLKRIRFSREMFNKWEAQRWWGENYDRVVELYNVQTFSRQQGFSTPTSSVDEAMQRDSFYSRVGSTRESPAMMMPPPPPLPSSGAGREHPISRTASSKAQLSSSSSVAAARPPFYPSTAVPDPSDHVWAHHFNLLNSAAAGPAAPYDPSRGTTSSRDEASVSISNASDLEATEWVEQDEPGVSITIREFGDGTRELRRVRFSRERFGEERAKVWWEQNRDRIHAQYL

SEQ ID NO: 8120 - protein, 368 aa, Nostoc punctiforme PCC 73102
MTTNVTSSIVERGKTNVKAQVFRGVNQLSYEDIPVPTVEPDEVLVQVRVVGLCQSDIKKIRYPLYEPPRIFGHETAGTIAAIGNNVKGWQVGQRVAVMHHIPCMRCAYCLNDNFSMCDVYKNISTTAGFNASGGGFADYVKVPGHIVENGGLIPIPDNISFEEASFVEPTNCCLKAVRKAQIAPGQTVLVTGAGPIGLMFIMLVKYFGAKAIATDLLPSRIDKALSVGAEAAFDARDPDLPAKISALTGGLGVDVTLLAVPSEKAFFQALDSTRKGGKILFFAEFPDEVEIPINPNILYRREIDLIGSYSSSYRLQNLSADIVFNQRIDVKALISDRYPLKDLSAAVEQAIAPTPDTYKILIYPQKED

SEQ ID NO: 8121 - protein, 122 aa, Triticum aestivum
  misc_feature (68)..(68): Xaa can be any naturally occurring amino acid
  misc_feature (79)..(79): Xaa can be any naturally occurring amino acid
  misc_feature (91)..(91): Xaa can be any naturally occurring amino acid
  misc_feature (110)..(110): Xaa can be any naturally occurring amino acid
  misc_feature (115)..(115): Xaa can be any naturally occurring amino acid
MAPTVMASSATSVAPFQGLKSTAGLPVSRRSNGASLGSVSNGGRIRCMQVWPIEGIKKFETLSYLPTXSTTEALLKQVXYLIRSKWVPCLXFNKVGFIFREHNASPWVLXWPYWXMWKLLSG

SEQ ID NO: 8122 - protein, 484 aa, Medicago truncatula
MLPQKQGEEAIVSSFNETDQQEGVVGREEEVEDHSFSVKNFLWHGGSVWDAWFSCASNQVAQVLLTLPYSFSQLGMLSGILLQVFYGILGSWTAYLISVLYVEYRSRKEKENVNFKNHVIQWFEVLDGLLGPYWKALGLAFNCTFLLFGSVIQLIACASNIYYINDNLDKRTWTYIFGACCATTVFIPSFHNYRIWSFLGLGMTTYTAWYLTIASIVHGQAENVTHTGPKKLVLYFTGATNILYTFGGHAVTVEIMHAMWKPQKFKYIYLMATLYVFTLTIPSATAVYWAFGDELLNHSNAFSLLPKNGWRDGAVILMLIHQFITFGFACTPLYFVWEKVIGMHDTRSICLRALARLPVVIPIWFLAIIFPFFGPINSAVGALLVSFTVYIIPSAAHMLTYRKASARKNAAEKPPFFMPSWTAMYIFNAFIVIWVLVVGFGFGGWASMTNFIRQIDTFGLFAKCYQCKPPPVMAAAPPPHALHH

SEQ ID NO: 8123 - protein, 446 aa, Fusobacterium nucleatum subsp. vincentii ATCC 49256
MISNLSELQKKDLKYVFHPCAQMKDFEENPPLVITKGDGIYLIDENGNRYMDCISSWWVNLFGHCNKRINKVITEQVNTLEHVIFANFAHEPAAELCEELTKVLPKGINKFLFSDNGSSCIEMALKLSFQYHLQTGNPQKTKFISLENAYHGETIGALGVGDVDIFTETYRPLIKEGRKVRVPYINSKLSDEEFTKLEDECIKELEDLIKKKHNEIACMIVEPMVQGAAGIKIYSARFLKAARDLTKKYNIHLIDDEIAMGFGRTGKMFACEHAGIEPDMMCIAKGLSSGYYPIAMLCITTDIFNAFYADYKEGKSFLHSHTYSGNPLGCRIALEVLKIFKDDDVLRTINKKGTHLKNKMEEIFKDKSYIKDIRNIGLIGAIELKDNLLPNVRIGREIYNLALKKGIFVRPIANSVYFMPPYIITYEEINKMLQVCKESIEEILKI

SEQ ID NO: 8124 - protein, 289 aa, Arabidopsis thaliana
MSLFNTENTWAFVFGLLGNLISFAVFLSPVPTFYRIWKKKTTEGFQSIPYVVALFSATLWLYYATQKKDVFLLVTINAFGCFIETIYISMFLAYAPKPARMLTVKMLLLMNFGGFCAILLLCQFLVKGATRAKIIGGICVGFSVCVFAAPLSIIRTVIKTRSVEYMPFSLSLTLTISAVIWLLYGLALKDIYVAFPNVLGFALGALQMILYVVYKYCKTSPHLGEKEVEAAKLPEVSLDMLKLGTVSSPEPISVVRQANKCTCGNDRRAEIEDGQTPKHGKQSSSAAAT

SEQ ID NO: 8125 - protein, 147 aa, Funaria hygrometrica
MDFPLFQILSFPDELEKSLNPQSQKYVRDTKAMVSTAVDVKELPDAYIFVADMPGLKSADVKVQLENDNVLVIGGTRKREEPDPKVKYIRMERNSGSFMRKFTLPQNSNLDKIAASCVNGILTVTVPKIPPPEPAKPRTIEVTMGNQ

SEQ ID NO: 8126 - protein, 161 aa, Funaria hygrometrica
MDFVVFDTDPFLTTLHQLVHEPGSDLERKIKRQRRNHHDEPRHVTIATPVDVKEIKDAYLFVADVPGLQKTDIEVQVENENVLTMRGKRKLDEKVNEKEEDTKFIRMERSPVKLLRKFTLPSDANADAITANCVDGVLTVTVPKIPPPEPAKSKTVQIAVD

SEQ ID NO: 8127 - protein, 482 aa, Medicago truncatula
MLSQNQAEEAIVTNMNETEQEGGSSLEEIAEDQSMFNFKSFLWHGGSVWDAWFSCASNQVAQVLLTLPYSFSQLGMVSGIVFQIFYGLIGSWTAYLISVLYVEYRARKEKENVNFKNHVIQWFEVLDGLLGRYWKALGLAFNCTFLLFGSVIQLIACASNIYYINDKLDKRTWTYIFGACCATTVFIPSFHNYRIWSFLGLGMTTYTAWYMAIAAIVNGQIENVVHSGPTKLVLYFTGATNILYTFGGHAVTVEIMHAMWKPQKFKYIYFLATLYVFTLTIPSAVAVYWAFGDELLNHSNAFSLLPKNGFRDAAVILMLIHQFITFGFACTPLYFVWEKVIGMHDTKSICLRALVRLPVVIPIWFLAIIFPFFGPINSAVGALLVTFTVYIIPALAHMLTYRTASARKNAVEKPPSFLPSWTAVYVLNAFIVVWVLVVGFGFGGWASMTNFIRQIDTFGLFAKCYQCKPPTPPQAPSPHARH

SEQ ID NO: 8128 - protein, 113 aa, Zea mays
RVHDFASSSREKAEIEELRKEVREARRIKMLHQPSKVMDMEFELQALRTLISEKTQLCNQLKKELAMIKRLEDDSSGLFELEGSNTLGSQLCIIPRVDGASNRWPKRPKHLMK

SEQ ID NO: 8129 - protein, 434 aa, Nostoc punctiforme PCC 73102
MTELLQKVRVIDPVSEIDEIFDVLIADGHIKEVASHIADIHPNTQIRDCQGLVLGPGLVDLYSHSGEPGFEERETLLSFLQAATAGGFTRVSILPDTSPAIDNPALVAQLQQKRAEGQRGRGVEENLSPLLPCSPAPLLHIWGAITLDVAGNQMTELADLASAGVVGFSDGKPFENLALVRRVLEYLQPLGKPVAFWPSDRQLTANGVMREGPDALRFGLPPIPASAETTAIAAMLELVAAIGTPVHIMRVSTSRSVELIASAKAAGLPITASTTWMHLLLDTKAVKSYHTSLHLDPPLGNPRDVAALRAGVRAGAIDAIAIDHTPYSYEEKVQAFAEAPPGAIGLELALPLLWQYLVETEEFTALELWRALSIRPAKCLGQEVSAIVPHQPAELTLFDPQKIWNVERKSLYTLSQNTPWLGQQLKGHVVQTWC

SEQ ID NO: 8130 - protein, 379 aa, Neurospora crassa
MLALRSIAAPAQRQAFRAAPRAVSVSFQNRFYSSRVAQFTGQKDASGKYTVSLIEGDGIGPEIAVAVKDIFAAAQTPINWEPINVDPILKDGKTAIPDAAIESIRRNKIALKGPLATPIGKGHVSLNLTLRRTFNLFANLRPCRSVAGFKTPYDGVDTVLIRENTEGEYSGIEHVVVDGVVQSIKLITREASERVLRYAFEQARAINRKKVRVVHKATIMKMSDGLFLNTAREVAQDFPDIEFDAELLDNTCLKMTTDPTPYNDKVLVMPNLYGDILSDMCAGLIGGLGLTPSGNIGDECSIFEAVHGSAPDIAGKGLANPTALLLSSMMMLRHMGLNEYADKIEKAAFDTLAEGKVLTGDLGGKASTKDFTSAIIDRL

SEQ ID NO: 8131 - protein, 253 aa, Haloarcula marismortui ATCC 43049
MDLPPVGLGTMGIEDEAVVRTAIDCGYRHLDTAQIYDNESTVGAGIAAADTDRADLTVATKLWIDALEATAVRPATEASLDRLGLDAVDLLYVHRPRGDYDPETTLPAVEAVREAGLTAHVGLSNFDPDQLVVAREFLDKIAAHQVEFHPLFWRESLLTDAQKHDYPLVAYAPLAGGRVFEEPTILNIAAQHETTPAAVSIAWVTSYENVVTIPKASSQSHLEANLAAADLELTDAEIARIEAIEREEELFPE

SEQ ID NO: 8132 - protein, 117 aa, Legionella pneumophila
MLDFSLNRDPQTGELYIETSLCGKPLLTTPQLNKGTAFTQEERKDFGLLGKLPHRVETLDEQVKRAYLQYSSYTTRLQQHIYLNNLHDKNQIVFYKLLSRHLGEMLPIIYTPIVGAA

SEQ ID NO: 8133 - protein, 295 aa, Brassica napus
  misc_feature (195)..(195): Xaa can be any naturally occurring amino acid
MNRGIEVMSPATYLETSPNWLFQENRGTKWTAEENKKFENALAFYDKDTPDRWFKVAAMLPGKTVGDVIKQYRELEEDVSDIEAGLIPIPGYASDSFTLDWGGYDADNMNGYYFAAVGGKRGSAARAAEHERKKGVPWTEEEHRQFLMGLKKKGKGGRRNIARNFVTTRTPTQVASHAQKYFIRQVNGGKDKRRXSSIHDITTVNIPDSFDAAAADTAITNAPCSPPSLGGSQREGSGQWDGQTINDETAGTFYNPNAFQETLLGMSSTPYMAKLQEQSFLNASQFESYNAYLQM

SEQ ID NO: 8134 - protein, 223 aa, Zea mays
  misc_feature (44)..(44): Xaa can be any naturally occurring amino acid
NIPVILTGGFPCVHYRQEGIAHEVLQGYLCPMEGWFAPDANSIXLQGWDQEVLFPGGHGLMVRGYRPVINTLAKGLDIRLNHKVLEIVRHRNRVEVTVSSGQTFVADAAVVTVPLGVLKVKTIRFEPRLPEWKEEAIRELTVGVENKIVLHFGQVFWPNVEFLGVVSSSTYGCSYFLNLHKATGPPVLVYMPAGRLARDIEKMSDEAAAQFAFSQLKKILPTA

SEQ ID NO: 8135 - protein, 275 aa, Bacillus subtilis
SELWYTEKQTKNFGITMKVNKTLHTEQTEFQHLEMVETEEFGNMLFLDGMVMTSEKDEFVYHEMVAHVPLFTHPNPEHVLVVGGGDGGVIREILKHPSVKKATLVDIDGKVIEYSKKFLPSIAGKLDDPRVDVQVDDGFMHIAKSENQYDVIMVDSTEPVGPAVNLFTKGFYAGIAKALKEDGIFVAQTDNPWFTPELITNVQRDVKEIFPITKLYTANIPTYPSGLWTFTIGSKKYDPLAVEDSRFFDIETKYYTKDIHKAAFVLPKFVSDLIK

SEQ ID NO: 8136 - protein, 218 aa, Thermotoga maritima MSB8
MKIFLDTANLEEIKKGVEWGIVDGVTTNPTLISKEGAEFKQRVKEICDLVKGPVSAEVVSLDYEGMVREARELAQISEYVVIKIPMTPDGIKAVKTLSAEGIKTNVTLVFSPAQAILAAKAGATYVSPFVGRMDDLSNDGMRMLGEIVEIYNNYGFETEIIAASIRHPMHVVEAALMGVDIVTMPFAVLEKLFKHPMTDLGIERFMEDWKKYLENLKK

SEQ ID NO: 8137 - protein, 441 aa, Geobacter sulfurreducens PCA
MALKETLKQKIEEHRPRTTRLVKEFGKVIIDQVTIDQCIGGARDIRCLVTDISYLDPQEGIRFRGKTIPETFEALPKAAGSDYPTVESFWYFLLTGEVPTQAQVDEVVAEWKVRQEVPQYVFDAIRALPRDSHPMVMLSVGILALQKDSKFAGFYNSGKFNKMTAWEYVYEDAYDLVARIPVIAAFIYNLKYKGDKQLPIDPSADCGANFARMIGQCKEYEDVARMYFILHSDHESGNVSAHTTHLVHSALSDPYYAYSAGLNGLAGPLHGLANQEVLDWTIKFQEKYCKDVEPTKELVTKALWDTLNAGQVVPGYGHAVLRKTDPRYTSQREFCLKTPGLKDDPLFKLVAMIFETAPGVLMEHGKAKNPWPNVDAQSGVIQWYYGLREWDFYTVLFGVGRALGCMANITWDRGLGYAIERPKSVTTPMLEKWAEEGGRKF

SEQ ID NO: 8138 - protein, 128 aa, Glycine max
  misc_feature (13)..(13): Xaa can be any naturally occurring amino acid
  misc_feature (64)..(64): Xaa can be any naturally occurring amino acid
  misc_feature (117)..(118): Xaa can be any naturally occurring amino acid
MGERVKGTVKWFXVTKGFGFISPEDGSEDLFVHQSAIKSDGYRSLNENDTVEFEVITGDDGRTXASDVTAPGGGALSGGSRPGDGGGDRGGRGGYGGGGYGGGGGGGGYGGGGGGYXXGGGGYGGGGG

SEQ ID NO: 8139 - protein, 205 aa, Triticum aestivum
  misc_feature (84)..(84): Xaa can be any naturally occurring amino acid
  misc_feature (91)..(91): Xaa can be any naturally occurring amino acid
MPESDNDSGGPSNTGGEGELSSPREQDRFLPIANVSRIMKKALPANAKISKDAKETVQECVSEFISFITGEASDKCQREKRKTXNGDHASXLLWAMTTLGFEDYVDPLKHYLHKFREIEGERAAATSTSTSTTPDMPRNNNNNATGYADAPGGMMMMGQPMYGSPPPPQQQQQHQHQIAMGGRAGFPYLGGGGGSSSSSGFGRKE

SEQ ID NO: 8140 - protein, 193 aa, Monacrosporium haptotylum
MADIRRKLVIVGDGACGKTCLLIVFSKGTFPEVYVPTVFENYVADVEVDGEHVELALWDTAGQEDYDRLRPLSYPDSHVILICFAIDSPDSLDNVQEKWISEVLHFCQGLPIILVGCKKDLRFDSKTMEELRKTSQKPVTPEEGEQVRGKIGAAKYLECSAKTNDGVREVFEHATRAALTTFKKKKSSKCSIL

SEQ ID NO: 8141 - protein, 134 aa, Zea mays
  misc_feature (22)..(22): Xaa can be any naturally occurring amino acid
  misc_feature (109)..(109): Xaa can be any naturally occurring amino acid
TLPRPLGTRKRFLFLNRRAITXTGVLNAWAGYFGNKGIKVVFSNGQLALVPMKLGGMAKSVPFVATPKGRGRGLFPRPVRAGIVGFPNVGKFSLINRLLKRKMCPAEPXRPGLTGKLKWFRFGTDLKLLDSPGI

SEQ ID NO: 8142 - protein, 194 aa, Monacrosporium haptotylum
MTTQSLKCVVTGDGAVGKTCLLISYTTNAFPGEYIPTVFDNYSASVMVDGKPISLGLWDTAGQEDYDRLRPLSYPQTDVFLICFSLVSPPSFENVKTKWFPEISHHAPNVPIILVGTKLDLRDDPKIQQSLKDKKMAPIQFTNGVAIAKDIGAVKYLECSALTQKGLKNVFDEAIRAVLSPPPKPTKSKKCTIL

SEQ ID NO: 8143 - protein, 357 aa, Lycopersicon esculentum
MKKGSFAPNLKLSLPPPDEVALSKFLTESGTFKDGDLLVNRDGVRIVSQSEVAAPSVIQPSDNQLCLADFEAVKVIGKGNGGIVRLVQHKWTGQFFALKVIQMNIDESMRKHIAQELRINQSSQCPYVVICYQSFFDNGAISLILEYMDGGSLADFLKKVKTIPERFLAVICKQVLKGLWYLHHEKHIIHRDLKPSNLLINHRGDVKITDFGVSAVLASTSGLANTFVGTYNYMSPERISGGAYDYKSDIWSLGLVLLECATGHFPYKPPEGDEGWVNVYELMETIVDQPEPCAPPDQFSPQFCSFISACVQKHQKDRLSANDLMSHPFITMYDDQDIDLGSYFTSAGPPLATLTEL

SEQ ID NO: 8144 - protein, 62 aa, Glycine max
  misc_feature (8)..(8): Xaa can be any naturally occurring amino acid
  misc_feature (20)..(20): Xaa can be any naturally occurring amino acid
  misc_feature (29)..(29): Xaa can be any naturally occurring amino acid
GSVWISSXLKGLNDDCEHFXCFPPVHLFXSYKEGFLHSTIPPWFYNATPYTPYYPLLLIHTF

SEQ ID NO: 8145 - protein, 450 aa, Bacillus anthracis str. Ames 0581
MMKTKQTDELLAKDEQYVWHGMRPFSPNSTMVGAKAEGCWVEDIQGKRYLDGMSGLWCVNSGYGRKELAEAAYKQLQTLSYFPMSQSHEPAIKLAEKLNEWLGGEYVIFFSNSGSEANETAFKIARQYYAQKGEPHRYKFMSRYRGYHGNTMATMAATGQAQRRYQYEPFASGFLHVTPPDCYRMPGIERENIYDVECVKEVDRVMTWELSETIAAFIMEPIITGGGILMPPQDYMKAVHETCQKHGALLISDEVICGFGRTGKAFGFMNYDVKPDIITMAKGITSAYLPLSATAVKREIYEAFKGKGEYEFFRHINTFGGNPAACALALKNLEIIENENLIERSAQMGSLLLEQLKEEIGEHPLVGDIRGKGLLVGIELVNDKETKEPIDNDKIASVVNACKEKGLIIGRNGMTTAGYNNILTLAPPLVISSEEIAFVIGTLKTAMERI

SEQ ID NO: 8146 - protein, 320 aa, Vibrio parahaemolyticus RIMD 2210633
MIKKIGVLTSGGDAPGMNAAIRGVVRTALSEGLEVFGVYDGYLGLYEGRIEKLDRSSVSDVINKGGTFLGSARFPEFKQVEVREKAIENLKKHGIDALVVIGGDGSYMGAKKLTEMGYPCIGLPGTIDNDIAGTDYTVGYLSALNTVIDAIDRLRDTSSSHQRISIVEIMGRHCGDLTLMSAIAGGCEYIITPETGLDKDKLISNIQDGIAKGKKHAIIALTELMMDANELARDIEAATGRETRATVLGHIQRGGRPTAFDRVLASRMGNYAVHLLLEGHGGRCVGIVKEQLVHHDIIDAIENMKRPVRNDLYKVAEELF

SEQ ID NO: 8147 - protein, 130 aa, Cyanidium caldarium
MDKIDEIVEKIKLLSLLEASELVKRIEDTFQVNVSNIQPVTGLSSNLTTTQQTPESAEVKEKWDVILENVPADKKIAILKVVRSITGLGLKEAKEFVESVPKIIKQSISQADAEHIKQQIEDAGASVVLK

SEQ ID NO: 8148 - protein, 512 aa, Ralstonia eutropha JMP134
MQGADTPAHARPPYRIDHQFDRGLVWFRRDLRSTDHAALHYALKHCREVWCVFVFDRDILDPLLARGLKGDRRVDFIRASLIELDATLRAAGGGLIVMNDSAASAIPALARELGVQAVFANHDYEPDAVARDAAVRDSLAGDARVLFTFKDQVIFERDEILTSQGKPFAVFTPYKNAWLKTIQPFDLRPYPIEPYLHALAPLPSKRLVPLPSLEDLGFAPSNLAEVAMPTGSSGGQALFEEFTSRMGDYGRRRDYPALRGPSYLSVHLRFGTVSIRTLARAAHGAVLRGGADSAGAATWLSELVWRDFYFMILHHHPRVAAGEAFHPAYDIIRWRDGETGDRYFESWRDAATGYPLVDAAMLQIRQSGYMHNRLRMVTASFLVKDLGVDWRRGEHYFADQLNDFDFAANNGGWQWAASTGCDAQPWFRIFNPVTQSEKFDPQGRFIRKYLPQLAALPDKYVHAPWTAPQDVLLAAGVRLGENYPRPLVQHDVARKETLERYAVVKEWRRPEG

SEQ ID NO: 8149 - protein, 326 aa, Glycine max
MDQALLDDIINRLLEVRSRPGKQVQLSESEIRHLCAASREIFLQQPNLLELEAPIKICGDVHGQYSDLLRLFEYGGLPPEANYLFLGDYVDRGKQSLETICLLLAYKIKYPENFFLLRGNHECASINRIYGFYDECKRRFNVRLWKTFTECFNCLPVAALIDEKILCMHGGLSPDILNLDQIRNLQRPTDVPDTGLLCDLLWSDPSKEVQGWGMNDRGVSYTFGADKVSEFLQKHDLDLICRAHQVVEDGYEFFANRQLVTIFSAPNYCGEFDNAGAMMSVDETLMCSFQILKPADKKAKLNFGSTTTTKPGNSPAGIKSFLGTKV

SEQ ID NO: 8150 - protein, 1112 aa, Gibberella zeae PH-1
MADIMIPNVRSPLSEASNRINSNHPPQEAHRYKPRHDRPPASTNNPPRASYGHPAAYFSGRPPPTQPQSTGPKPQGNPTLKPPTDMDDDRRHSGASYDSSGSGHSKKNYKTHIGPWQLGKTLGKGSSARVRLCRHNVTHQLAAVKIVNRRMAYLVQDSSLAALSKWDNNLPEQIDGEIRVPMAIEREVAILKLIEHPHIMKIYDIWENRSEVYLILEYIDQGDLFTFINMKGRLSEEVSVYFFRQIISAISYCHSFNICHRDLKPENILISANLKIKIADFGMAALHQTDTHRLNTACGSPHYAAPELLKNRQYRGDKADLWSMGVILFAMLTATLPFDDPDIRVMMSKTKKGQYEMPDYLSPEAEDLIRRMLQVNPDRRITLKEIWRHPLVKKYAYLDNLDDLNSQPPDIRKGFQYTPVPAQDVDSQLVRQLRSMWHTFSENDLKLKLTCDEPNDQKAFYWLLYQYREQQLEDFKPEIAHSTSDYHHMKPGTWKKHPQAASLSKKTTMALTPGNQKGFEVDQVRAVDVEHQLEPPPQDAYYHREARCRPCTAVDKARRMHATRATNEESTSRMSGSVPPYVTEQGSTYQLEMARPFTPDVSELPSTVLPKTKDRHEAQVNTKRASGQAMRIALGSRYASEIFKEELRHFSSNIAKDCDEAFKSSLIEEDSIAGSLTEPDRTQYESTPISFTIDAPDESAPDILDLTAKSFSNRPLPPLPTPLQGHDERSLAPTPIGSRPTTGDSHLEELRAEQVKVAQPVILTRHAERRVVSAPAYHQKSKMNPALPSINETGAISNDKARIVSAPPHTPTKRGVDRIRGIEYLSQVENSIRVVNSPGDESPVKMPKPLNVRKKFCDSEEEEEDVMVKRASKVESTHGRESVDWQDCNSYLTSSDGKRSDSTTTDAPSKKKTFNFNFWKSNKQRDSIMSITKEPDDKEERPSVELSVVGKTNTSTKVSQSRWHESNSGPVRNIEVKQNWLARLFRVKPATDHICMTISRRRARQEVTILLREWRKYGIRDIQVDKQRNIVFARVADKNFLNLKEVSFAAEVITVIEHGKKQPLSIIRFTQERGAASSFYRVVDTMRMMFETRALVISDKNKQKMMIKTLNS

SEQ ID NO: 8151 - protein, 447 aa, Zea mays
  misc_feature (150)..(150): Xaa can be any naturally occurring amino acid
  misc_feature (165)..(165): Xaa can be any naturally occurring amino acid
  misc_feature (183)..(183): Xaa can be any naturally occurring amino acid
  misc_feature (193)..(193): Xaa can be any naturally occurring amino acid
  misc_feature (220)..(220): Xaa can be any naturally occurring amino acid
  misc_feature (238)..(238): Xaa can be any naturally occurring amino acid
MSNYYDDYDDIDGMEDDYDMDDPIDDMVDEQQGIRDSDVEDNDYGQPNDKIPDTSSADARKGRDIQGIPWEQINITRKKYRQSRLEQYKNYENVPNSGEEAMKDCKPTEKGGIYYEFRRNTRSVKSTILHFQLRNLVWATSKHDIYLVSXYSIRHWSALRGVDTXVAPSEKHSGSLSEGSIYXYKISTLAVKXDLLTAWAGLHGAVMCKNLAGECYFILXEINFCCRSTYDYNAITNXVGVFNSSRGAVHFMASINYSGVRYYDMERFQLFKHFQFEWPVNHASLSPDRKVVVIVGDDPDGLLIDANSGKTVHSIKGHRDYSFASAWSPDGRTFATGNQDKTCRIWDVRNLSKSVHVLRGNLGAIRSIRFTSDGQFMSMAEPADFVHIYDVKSDYNKRQELDFFGEISGTSFSPDTDTLFVGVWDRMYGSLLQFGRLYNYSYLDSLF

SEQ ID NO: 8152 - protein, 375 aa, Capsicum annuum
MVDANMGAAGGQFPEFPNIVTHGGQYVQYDIFGNFFEITTKYRPPIMPIGRGAYGIVCSVFNAELNEMVAVKKIANAFDNYMDAKRTLREIKLLRHLDHENVIGLRDVIPPPLRREFSDVYIATELMDTDLHQIIRSNQGLSEDHCQYFMYQLLRGLKYIHSANVIHRDLKPSNLLLNANCDLKICDFGLARPNLENENMTEYVVTRWYRAPELLLNSSDYTEAIDVWSVGCIFMELMNRKPLFAGKDHVHQIRLLTELLGTPTESDLSFLRNEDAKRYIRQLPQHPRQQLAKVFPHVNSLAIELVDKMLTLNPTGRITVEEALAHPYLAKLHDAADEPVCPVPFSFDFEQQGIGEEQIKDMIYQEALVLNPEYA

SEQ ID NO: 8153 - protein, 457 aa, Staphylococcus epidermidis ATCC 12228
MAIGVILNRVFRLNNNPLFDYIYSNKESINHCYFIIPTEEFEEEAKKKAQYYYGSIQKFMYELQRYDIEPFLMSYDKLIDFCKKQAIDKVVVAGDIMSYHHEEYDILHQRKRFKQANIQVISLRANHYFNPRKTYNKQGEPYKVFTSFYRKWRPYLMIRDEYDYHLEDISKVVVKSQHKIKEDYHSYGISERDVQNRWSEFLSQDIENYKENREYLPEVLTSQLSIYLAYGMIDIIQVFNDLLQNYDKNEQNYETFIRELIFREFYYVLMTNYPETAHVAFKEKYQQLKWSYNEENFKLWKDGNTGFPIIDAAMEELKTTGFMHNRMRMVVSQFLTKDLFIDWIWGESFFKQKLIDYYAASNVHGWQWSASTGTDAVPYFRMFNPIRQSERFDNNARYIKTYIPRLNQVDAKYLHDTHKFEQQIKGQGVEIGKDYPKQMIDHKESRQRVMSEFKALD

SEQ ID NO: 8154 - protein, 1367 aa, Neurospora crassa
MASELSPRAVRFSQTDDEPIARLDKHKTVSRPNPRANDSDNSNPSTDAHDDLHVREQIDELGSLSRYVESHSGSVPSLVPGSLTSSLPLANGSSSRRGASSETYANGTPSRPQRPTAPARTPSNTYQPYNQRRPPQGQPSSYMANNPHARDGSRPRPLAGTSTFRAQEREYVRRLRQQDYNNDYFDAYGSGEQYDSDSEGETPSSEGAFDSYDDAHIMFASNEDIQITEEDLRDPESRERLEWHGMLEAVLTGDVVRQEKKRLIGSNDEAFGKSAHNVELWLGIRARLCGRHLPVQKRVVEDARAALDRSINDIINFAIAGESEAGKPPFEQVRDVVNKIERIESLYPSSRELMTALKPGVYSAYQETCDAVISWYNVNEMINTELSILKKWVGNDALDFSRTKEKSPSGNGLSDESSFLDRLMKEEGLKSLHEDKGSEPKSLKKKSRLDGISRVITKAKDTLIQNAEGFQKRHLPPYIEELLTLISFPSRLIEEIIKMRLAYAKKMKDSAQQNPMMQDQMISQFQVLLKLAIKIKREYMEIARPEPGWDLPPCIDEDFDRVILEALKYYFKLLNWKLSGNKNTFKEAELLFQEWGFGNEIGRYLAHGDVEVAEQFSSLTYKAWNRLSQTFEKEVQRRPKESVPEMTKRYKQILDSVRVRQRMLQRFSRMLNDNYENACDYTIAFEQPQMLHQLYDRLIETGHFQVYSASPEHKDILIIASPTLHNRDDEIQVLMGTFTYEAAIEDPSDPYLLIIKAEDPPQWLGPVHTLRVRNEPLDIKLGHMRLIAGGCQPRLLNARKAFVDRIDMQVDPVVEQRSNLQKVNFRLMEIRKVAFKLSNAFMDSVEAIRRQTRGLNCQELIQTCFIFATEFGQRSLLYMDNNRRTMNNLKLTKLALDWVSFICDDCISSDRKTFRWAVQALEFAMGMTRGRHILGLGEDEYARLRAKVAGCMALLISHFDIMGARSSVAAQAEKKRLEGLVNQIKRLNKGQMLDDNEAAKYYQEHRLEELAKVDNYRKEILLQQSAMGRVLEASNEVDRSLAWLSSTATNFTMRWQQGHFVGGGTFGNVYAAVNLDTGQLMAVKEIRLQDPKLIPTIAGQIRDEMRVLETVDHPNVVSYYGIEVHRDRVYMFMEFCSGGSLANLLEHGRIEDEQVIMVYALQLLEGLAYLHELKIAHRDIKPENILLDHNGIIKYVDFGAAKLIARQGRTLVQDVASTKPNKSMTGTPMYMSPEVIKGENAGHFGAVDIWSLGCVILEMATGRRPWANLDNEWAIMYNIAQGNPPQLPSQDQLSPEGIDFLRRCFMRDSTKRATAMELLQHEWIMTIRNRVVEPATPSSDAGSSTTSQGALNPGNSSRGGFPGDGMY

SEQ ID NO: 8155 - protein, 394 aa, Capsicum annuum
MDGPAQQTDTVMAEAAAAQQPAPPSQPVAGIDNIPATLSHGGRFIQYNIFGNVFEVTAKYKPPIMPIGKGAYGIVCSALNSETNEHVATKKIANAFDNKIDAKRTLREIKLLRHMDHENIVAIRDIIPPPQREAFNDVYIAYELMDTDLHQIIRSNQGLSEEHCQYFLYQILRGLKYIHSANVLHRDLKPRNLLLNANCDLKICDFGLARVTSETDFMTEYVVTRWYRPPELLLNSSDYTAAIDVWSVGCIFMELMDRKPLFPGRDHVQQLRLLMELIGTPSEAEMEFLNENAKRYIRQLPLYRRQSFVEKFPHVNPAAIDLVEKMLTFDPRRRLTVEDALAHPYLTSLHDISDEPVCTTPFSFDFEQHALTEEQMKELIYREGLAFNPEYQHM

SEQ ID NO: 8156 - protein, 448 aa, Glycine max
MVIINLVKKKKKSEREGMRLGKYELGRTLGEGNFGKVKFARNTDSGQAFAVKIIEKNKIVDLNITNQIKREIATLKLLRHPNVVRLYEVLASKTKIYMVLEYVNGGELFDIIASKGKLTEGECRKLFQQLIDGVSYCHTKGVFHRDLKLENVLVDNKGNIKITDFGLSALPQHLREDGLLHTTCGSPNYVAPEVLANKGYDGATSDTWSCGVILYVSLTGHLPFDDRNLVVLYQKIFKGDAQIPKWLSPGAQNMIRRILDPNPETRITMAGIKEDPWFKKGYIPANPEDEDVHVDNEAFSSHEEPNEAEQRNSGSPTLINAFQLIGMSSCLDLSGFFEKEDVSERKIRFASILSVKDLIDRIEDTVTEMEFRVEKKNGKLKVMRENKVHKTLGCLSVVVEVFEISPSLYVVELRKSYGDGSVYKQLCKKLLNDLGVPPKQGLVRSAAN

SEQ ID NO: 8157 - protein, 379 aa, Cercospora zeae-maydis
MATEQIPDKGLAGVCVNEGPDFKVEVQEVDIPEPSKQNCWTISVNSSLTERWPESGELLIRLNCTGLCMSDIHFMVNDWAVPPMSQFGTKCAGHEGAGVVVKLGPNVSGWEVGDRAGIKPLWDVCHNCEHCWNGRENYCQHGVYTGLVAEGTYRQYLTSPAIYTSRIPEGVPDEVAGPIMCSASTMHRALVDSGLKAGDFVVFPGGGGGVGIQGVQLAKAMGMRPIVIDSGEAKSKLSKELGAEEFIDFKEHEDVAARVKEVAGGIGAHGVLVTAYQAYKDSFSYLGNRIGGRIMCIALPPAGTVNMGTDPNFIVFKNVRVIGTLVGTMQDTAAALEYARRGLLKGIAKVQGVSRFDKSVQALQRGKVAGRIVIDFNKK

SEQ ID NO: 8158 - protein, 168 aa, Avena agadiriana
VMASSATTVAPFQGLKSTAGLPVSRRSSGSLGSVSNGGRIRCMQVWPIEGIKKFETLSYLPPLSEEALLKQIEFLIRSKWVPCLEFSKVGFIFREHGSTPGYYDGRYWTMWKLPMFGCTDASQVIKEVEEVKKEYPDAYVRIIGLDNIRQVQCVSFIAFKPPGCEESG

SEQ ID NO: 8159 - protein, 399 aa, Bacillus subtilis subsp. subtilis str. 168
MLDNKTIEIIKSTVPVLQQHGETITGRFYDRMFQDHPELLNIFNQTNQKKKTQRTALANAVIAAAANIDQLGNIIPVVKQIGHKHRSIGIKPEHYPIVGKYLLIAIKDVLGDAATPDIMQAWEKAYGVIADAFIGIEKDMYEQAEEQAGGWKEYKPFVIAKKERESKEITSFYLKPEDSKPLPEFQAGQYISIKVRIPDSEYTHIRQYSLSDMPGKDYYRISVKKDGVVSSYLHDGLQEGDSIEISAPAGDFVLDHASQKDLVLISAGVGITPMISMLKTSVSKQPERQILFIHAAKNSEYHALRHEVEEAAKHSAVKTAFVYREPTEEDRAGDLHFHEGQIDQQFLKELIANTDADYYICGSPSFITAMHKLVSELGSAPESIHYELFGPQLSLAQSV

SEQ ID NO: 8160 - protein, 492 aa, Burkholderia fungorum LB400
MDSFNPDDVAIRSGHYIGGEYVEAGGRRIEVARPSDGVVYATVPLADAGMVDRAVENAWQAFRHSGWARMAPRERAKILRRFAELVEADAPTLGRLEALGSTRPIAQAIGWDVPFTAEGIRFYAEFADKLGGDVAATDHDHLGMTIAEPYGVIGAIAPWNFPLVMASWKIAPALAAGNAVVLKPSEMTPFSVLRLAELAVQAGVPAGIFNVIQGDGRVTGDELVRHPKISKVTFTGSTRTGASIMAACANSGTRPVTLELGGKSPQIVFADAPRLDDVARRIAGAITGNAGQVCVAGSRLLVERSLAEPLAERIGKIFAELKPGATWAAGTTLSPIISAPQAARIEGIVGRTLEAGATLRYGGVRADVGSNGAFYTPTLLTNVTAHSEAVREEIFGPVLTLQTFDTEEEALALAQHPEYGLAAGVHTADLGRALRFVRGLEAGTVWVNRYGRTSDFMIPTGGYKRSGIGKDLGRQAYEANLRFKSVLIDLRP

SEQ ID NO: 8161 - protein, 327 aa, Haloarcula marismortui ATCC 43049
MTHEIAVIPGDGIGQEVTPAAVEVLEAIDGVDFDFVEGEAGDAVKEETGDALPEETRELAADADATLFGAAGETAADVILPLRQVVGSFANVRPARSYPGLDAVQPDTDIVFIRENTEGVYKGIESEISEGVTTCTRVITEDASEKIAEYGFSYAKQNSYDDVTIAHKANVMRTTDGLFLDAASAVGEDRDASYDTALMDALAMHLVMNPQDYGVVICPNLAGDMLSDLAAGLVGGLGLLPSANIGEENALFEPVHGSAPDIAGEGIANPSAMILSAAMLLDHLGYDEQGDAVRTAVESVLDSGPRTPDLGGDASTEDVTAAVIDEL

SEQ ID NO: 8162 - protein, 168 aa, Avena strigosa
VMASSATSVAPFQGLKSTAGLPVSRRSNAGLGSVSNGGRIRCMQVWPIEGIKKFETLSYLPPLSEEALLKQIDFLIRSKWVPCLEFSKVGFIFREHGSTPGYYDGRYWTMWKLPMFGCTDASQVIKEVEDVKKKYPDAYVRIIGFVNIRQVQCVSFIAFKPPGCEESG

SEQ ID NO: 8163 - protein, 168 aa, Avena clauda
VMASSATTVAPFQGLKSTAGLPVSRRSSASLGSVSNGGRIRCMQVWPIEGIKKFETLSYLPPLSEEALLKQIDFLIRSKWVPCLEFSKVGFIFREHGSTPGYYDGRYWTMWKLPMFGCTDASQVIKEVEEVKKEYPDAYVRIIGFDNIRQVQCVSFIAFKPPGCEESG

SEQ ID NO: 8164 - protein, 455 aa, Triticum aestivum
MARDEPSAAAVDVADGDSPSSSPTLTRLREALAALSKAFESGDTASSDAAAALVAEILSPSDADASAALSEQMLREVHAFLSRPSSNQMAIDALSLELPKPVAKLGARMGNCRDIARTIIEFFVSNCSPRDMLCILCEALDTPVALNGSAYLVILLDGLASTLILIQRRHIEQVKVVLPAILRVMHANLSECDGEHGMSAVDLFSAALRIGNAIQEMCKTMVNHRKEELCSILGLYALQNIALVSSESKHQNIQSTCGSVVLQYSKLLMFCGFTYLGLLTGNDVTSATTKLSKEEDDNFLDCFSSAMDGASLVVVWTSMHDDMSKYAGAEFESALKEVQDNCIRKWEAINMFRYVLSSVNYSWAIKSHSLDLLLTLVDDKCSEETNDHVHFPYSTQIFATLNAIERVMIAAPDTLMRKKAFSALKRVISAVPSTQRFDILQALIENSMFPSLTAI

SEQ ID NO: 8165 - protein, 369 aa, Ustilago maydis 521
MTASTVPIIVNAASQLEIDVDTLDVALTQQLASVGVQPNDMTSNQFIVADALRLAQNEALLDDVVRGSGAGDWLAILDRVSVRLCAQNLANISGRALLQVSPTHAYDTEQIVEHALAYDREFSALGIGKHRYCIKILATPAGVKAAWILESQHAIRTLATGVFSVAQALAAAQAGCLYISPYYNEILAHFTAPDERAVYDDPVSQHPMSPRMAHIYQAYRELTLANPAARPPVIKSASFIGINEVLAMPQLGAQQATILAPILSEMIQRTGMRATTKPYRPSKTYDVALPDSTLALLKIDRLRADGVAQQFDLSVDYLSHNAQQLALAISNDPETQRRLNDAIRVFETAQLNAKTVIDAAIARVNAAHS

SEQ ID NO: 8166 - protein, 138 aa, Mycobacterium avium subsp. paratuberculosis str. k10
MRPVPTGKVKWYDADKGFGFLSQEDGEDVYVRSSALPAGVEGLKAGQRVEFGIASGRRGPQALSLKLIEPPPSLTKARREGPAEHKHSPDELHGMVEDMITLLESTVQPELRKGRYPDRKTARRVSEVVRAVARELDA

SEQ ID NO: 8167 - protein, 475 aa, Geobacter sulfurreducens PCA
MAKRYKVLVGGEWTGDDRPGIEVVNPYDDSVIGVVPEATNEDVDHAIRAAQAGFAEMSALPAYRRSDILDRTSELIKRDREEIAEIIAREAGKSWKFALAEADRSAETFRFASLEARNAHGEIVPMDASPVSAGRFGFYLRTPIGVIGAIAPFNFPLNLVAHKVAPAIAAGNAIVLKPATKTPLSSIKLAELMVEAGLPAGALNLVIGSGRTVGNRLVEDDRLAMVTFTGSPPVGVQIKERSGLKRVTLELGSNSPTIIEDDGDVDAAVARCVVGSFANSGQVCISVQRIFVHQRRYREFVDKFVAATQKLKVGDPMDRDCDIGPMISREELQRAVEWLGEATSLGARLETGGTVAGNCLTPAILSGVTPDMKVVCSEVFAPIVSVIPYETFDQALDMADDSIYGLQAGVYTSDINKAFKAIRRLDVGGVIINDIPTFRVDHMPYGGNKQSGLGREGIRYAMEEMTNIKFVCLNL

SEQ ID NO: 8168 - protein, 224 aa, Populus tomentosa
IMHAMWKPQKFKYIYLMATLYVFTLTIPSATAVYWAFGDDLLNHSNAFALLPKNGFRDAAVILMLIHQFITFGFACTPLYFVWEKVIGMHDTKSICLRALARLPVVIPIWFLAIIFPFFGPINSAVGALLVSFTVYIIPSLAHMLTYRKSSARQNAAEKPPFFLPSWTAMYVVNTFVVVWVLVVGFGFGGWASMTNFVRQVDTFGLFAKCYQCKPAGAAPPRPH

SEQ ID NO: 8169 - protein, 334 aa, Nostoc punctiforme PCC 73102
MSKNLLEQLREVTVVVADTGDIQAIEKFKPQDATTNPSLITAAAQMPEYQGIVDQTLLQAKKDAGDGATQAQIVSLAFDRLAVAFGLKILQIIPGRVSTEVDARLSYDTEATLTKARDLIAQYKAAGIGRDRVLIKIASTWEGIRAAEILEKEGIHCNLTLLFGLHQAIACAEAGVTLISPFVGRILDWYKKDTGRDSYPATEDPGVLSVTKIYNYYKKFGYKTEVMGASFRNLGEITELAGSDLLTISPSLLAELQSTVAELPRKLDPAKAASLSIEKISIDKASYDKMHAADRMATDKLDEGIKGFTKALEDLEKLLADRLVRLEGEVVASH

SEQ ID NO: 8170 - protein, 58 aa, Glycine max
  misc_feature (33)..(33): Xaa can be any naturally occurring amino acid
QNGRQSRTSCLDMLLDIILPPVGVFLKHCCKVXIWIRMVLTLVGYISGIIYAVYAITK

SEQ ID NO: 8171 - protein, 115 aa, Brassica napus
  misc_feature (114)..(114): Xaa can be any naturally occurring amino acid
MSAINITNVTALDNPAPFVSPFQFEISYECLTSLKDDLEWKLIYVGSAEDETYDQTLESVLVGPVNVGNYRFVLQADPPDPSKIREEDIIGVTVLLLTCSYMGQEFLRVGYYVXN

SEQ ID NO: 8172 - protein, 419 aa, Neurospora crassa
MPALTGIAVSAALAVTTRRTHLGVGTVVMGIEGFNVESSLRIPMTSREAFHKFLRSASPSSSQSPRSLSPAAQGTNRVARAPYLLRSQAVLVTTLTPPSFGVTQPKVLENPPIPISPSKRTWRRRDGTAAEGQTTFFASTRAPSFSPIVPSSAPSHHATNTFFLATSFSRLYKKAVLSRSTKRVDRIARDTIATSSSSINHTSNMSSVVNEGEKPQEAAQEQQEEQQQQQQQQEQQNAGDDVNDDEEEISAMKRRVAEMEEEAAKLREMQASLDQQHHELTENKEDIDSRSIFVGNVDYSASPEEIQAHFQSCGSINRVTILLDKFTGQPKGYAYVEFTEPSLVAQALVLNESVFKGRNIKVVPKRTNIPGMSRGGRGGRGSFRGGGRGGYFGGRGGFPPRGGYRGGYRGRGRGGYAPY

SEQ ID NO: 8173 - protein, 247 aa, Gerbera hybrid cultivar
MGRGRVELKRIENKINRQVTFSKRRNGLLKKAYELSVLCDAEVGLIIFSSRDKLYEFGSVGVMKTLERYQRCCFNPQDNNNERETQSWYQEVSKLKAKFESLQRTQRHLLGEDLGPLSVKELHNLEKQLEGALTQARQRKTQIMVEQMEELRRKERELGDMNKHLKIKVSHELSTFDAEGQGYRAQLPCPWNSGTNNTFTMHPSQSNPMDCQQEPILQIGYNQFMHGEGSSVQRNMVGENGIHGWVL

SEQ ID NO: 8174 - protein, 1021 aa, Candida albicans SC5314
MEAMKKRMTTHSPKPESPKPATSPDSDSLEGLSPELVPIVTLLSSQAHRRYNEGIFMLYYDLNGDGKPADREWREVYGILTGNQLAYWDAANLAQFKNNPSALLETSSKPNYINFTDSVYNAMKTLPAAKQNLDNVIIVSTTLKNRYLLQFKSYKDLTVWYAALRLSNFEYSSLQEAYTGALLSARGSRLSDIRTILAEKRFDHEDWVSIRYGSGMAWKRCFAVVEPSTLKKKVFTPGRILFYENEQKKKKQLMAVVTNATAVAAIYPQSHLLIDHSTMLKMEGYINFTSPSLSTKVSKKSASDFKHTSLFLMPEQHSSVPGFDTLIRFLVPLLDSFGLYGRPKRLKANRNDTDSLLFGLPTLPHVHYLELNDVLDLTRGDFLSWDLKTWTDNIKGILKTKIDRGYEGCGSQRGIKGAVTSLSSPVTSTGSPRFASGQGFSSRSTSSSSSQPRQNQQTPQQRKPPPPGPELKPAGKSFDKNVNDLHIGVSNDNLLSADKMKNNHKSVQLAEIYQKYSDLKTPSDNYTDRNILLNGSHEHLMEDELPAGIQQMKLHDNIYPKDDDGLFSDDDDDDDLAKVDVRKIGMNNDGSSQSLDPTLGALKVPYSDDRAGSYSSVISPMSQFNNLKESYQNVDRRAPYPNNSDNESDDDSPPPPVPSHDQKYQTGLQGKSSAFSQGAATSRGAGGMINGSSSESRSQGQQKPKYISSPNSSQNHIHRIHSPEKGSPLGRANVQYPISPERLTDVHKSSDNLADAIKLPVLPAINKVPPQEEQRQPQKYPQPQPQPQSQPHPYQQQQQQQQPRQQQLYSPQQVQQQKYHQQQQQQLQQQQQQYYQQQKFQQSQQPQRPLQQQQQQPPQQQHYQKQPQQQPQQQPHRVPPPQQQPQQQLSQAYRAAPPTQQKQPPPQQQLYGRSQPQSFPREPPNGHPQGSGFMQNRGVIPRNNGQAPPPQPQNGARGFVSQQQQQQQQQYQYSYLPSGASGQPKQQQQQQPQQQPQPHRGHHPYGAQYTSQNPNGQARYY

SEQ ID NO: 8175 - protein, 354 aa, Petroselinum crispum
MKKGNLGPGLKLSLPPPDEDSLTKFLTQSGTFMDGDLLVNRDGVRIVSQTDVQAAPPIQATDNQLSLADFDAIKVVGKGSGGIVRLVQHKWTGQFFALKVIQMNIQESARKQIAQELKINQSSQCLNVVVCYQSFYDNGAISIILEYMDGGSLADFLKIVKNIPEPYLAAIFKQVLKGLWYLHHEKHIIHRDLKPSNLLINHRGEVKITDFGVSAILATTSGQANTFVGTYNYMSPERISGGQHGYSSDIWSLGLVLLECATGYFPYSPPEQDEGWSNVFELMDTIVNQAPPCAPPDEFSPEFCSFVSACVQKDPRKRPSANELLRHPFINMYEHLNIDLAGYFTEAGSPLATL

SEQ ID NO: 8176 - protein, 116 aa, Glycine max
MASSMISSPAATTDNRAGAAMGASFTGLKPMAGYPTRKTSSDITYIASNGGRVHCLLVWPPGGLKKYVTLSYLPDLDDAQLAKAVEYLITMGRIPCSAFEMERCFQHREHTREPGY

SEQ ID NO: 8177 - protein, 347 aa, Thermoanaerobacter tengcongensis
MDGLMTAVVKQYHKEGADIVKKEIPKIGPDEVLIKVKATSICGTDVHIYVWNEWAKSRIKPPKTMGHEFVGEVVEIGENVTSVKVGDLVSAETHIVCGKCRACRTGNAHICENTLILGVDTDGAFAEYIKVPESNVWINDKNIPLEILSIQEPLGNAVHTVFSGDVVGKSVAVIGCGPIGMMAIPLLKRTGAAAIFAIEPADYRRELAHKLGATRVINPLREDVVSIIKSETEGYGADVVLDFSGNPTAIRQGLEYIAKGGRMSILGLPDNEVPIDITNNVVFKGITIQGITGRRMYDTWYTVKGLLKSGLAEDLKPIITHTFPLTEYQKGMELMIKGQCGKVVLYP

SEQ ID NO: 8178 - protein, 299 aa, Glycine max
MVYVKSQKSKAYFKRYQVKFKRRREGKTDYRARIRLINQDKNKYNTPKYRFVVRFSNKDIVAQIISASIAGDIVLAAAYAHELPRYGLEVGLTNYAAAYCTGLLLARRVLKTLEMDEEYEGNVEATGEDYSVEPAESRRPFRALLDVGLIRTTTGNRVFGALKGALDGGLDIPHSDKRFAGFDKEKKELDAEVHRKYVFGGHTTFFFLQILAEDEPEKYQSHFSEYIKRGIEADGIEALYKKVHAAIRADPSLKKSEKQPPKEHKRYNLKKLTYEERKAKLIARVAAINSAADNDEDDE

SEQ ID NO: 8179 - protein, 526 aa, Triticum aestivum
  misc_feature (520)..(520): Xaa can be any naturally occurring amino acid
MAAIKPPPPDRPPQAARLPSPSSSSSAAAAAKRGGTGSRGLLMGRYELGRVLGKGTFAKVYHARHVQTGESVAIKVLDREKAVRSGLVSHIKREIAVLRRVRHPNIVHLFEVMATKTKIYFVMELVLGMEVVRGGELISRVSKGSVQEDFARRYFQHVFSAAGGCHTRGVFHRDLKPDEAGNLKVSDFGLSAVAEPFQPEGLLHTFCGTPAYVAPEVLARRGYEGAKADIWSCGVILFVLMAGYLPFHDQNLMAMYRKVYKGEFRCPRWFSKDLTSLIMRFLDTNPSTRITLPEVMESRWFKKGFRPVKFYIEDDQLYNVIDAENDMLDLGLPDPLPQPLPPPPPSPSPQQVDGDDSGSESDASVVSCPATSSFEERHRLRGPLPRPASLNAFDIISFSRGFNLSGLFEEKGDEVRFISGEPMPDIITKLEEIANVKSFAVRKKDWRVSLEGTREGVKGPLTICAEIFELTPSLVVVEVKKKAGDKEEYDDFCNKELKPGMQHLVHQMAPVPITPTISEXAERPSR

SEQ ID NO: 8180 - protein, 384 aa, Arabidopsis thaliana
MLTCIARSKRAGDESSGQPDDPDSKNAKSLTSQLKDMALKASGAYRHCTPCTAAQGQGQGQGPIKNNPSSSSVKSDFESDQRFKMLYGRSNSSITATAAVAATQQQQPRVWGKEMEARLKGISSGEATPKSASGRNRVDPIVFVEEKEPKEWVAQVEPGVLITFVSLPGGGNDLKRIRFSRDMFNKLQAQRWWADNYDKVMELYNVQKLSRQAFPLPTPPRSEDENAKVEYHPEDTPATPPLNKERLPRTIHRPPGLAAYSSSDSLDHNSMQSQQFYDSGLLNSTPKVSSISVAKTETSSIDASIRSSSSRDADRSEEMSVSNASDVDNEWVEQDEPGVYITIKVLPGGKRELRRVRFSRERFGEMHARLWWEENRARIHEQYL

SEQ ID NO: 8181 - protein, 219 aa, Arabidopsis thaliana
MADQIEIQRMNQDLQEPLAEIMPSVLTAMSYLLQRVSETNDNLSQKQKPSSFTGVTKPSISIRSYLERIFEYANCSYSCYIVAYIYLDRFVKKQPFLPINSFNVHRLIITSVLVSAKFMDDLSYNNEYYAKVGGISREEMNMLELDFLFGIGFELNVTVSTFNNYCCFLQREMAMLMKMKSLFLEPSSFKISSKTKLVMYPHEEDSLSTHHNKKQLAAA

SEQ ID NO: 8182 - protein, 145 aa, Monacrosporium haptotylum
MSRSGVRVQPECTTAFDELKLGKKFKYIIYGLTNGNTEIEVVKAAPAAGSSEEEAYEDFMAQFPENGCLWAIYDFAFKTAEGAPRNKIVFYAWSPDGAPIKAKMVSASSKESLRKSMSGIAVEVQGTDFDEVSFDTVLEKCMKGR

SEQ ID NO: 8183 - protein, 341 aa, Rhodobacter sphaeroides 2.4.1
MRALVKAKAEPGLWMEERPVPEIGPDEVLIRVRKTGICGTDVHIWNWDDWAAKTVPVPLVTGHEFAGEIVEVGRDVRDLSPGQRCSGEGHLIGHHSRQVRAGRFHLDPETRGIGVNVPGAFADYLRLPAFNVVPLPDAIDDEVGAILDPLGNAVHTALSFDLVGEDVLVTGAGPIGIMAAAVARHVGARHVVITDVNADRLRLSTEVADVVPVNVATEDLRSVMGRLKIVQGFDVGMEMSGAPAGFDQMVEAMVMGGRIAMLGIPPGRSPVDWSRIVFKALTIKGVYGREIFETWYKMIAMLENGLDIRRVITHRFPVADFAEGFAAMRSGASGKVVLDWG

SEQ ID NO: 8184 - protein, 222 aa, Solanum macrocarpon
MVRQKIQIKKIDNLTARQVTFSKRRRGLFKKAQELSTLCDADIGLIVFSATGKLFEYSSSSMMQLIEKHKTQSERDNMNGSEQLKSSNLQSEKKTYAMLSRELVEKNRELRQLHGEELQGLGLDELMKLEKLVEGGISRVLKIKSDKFTREISSLKKKEAQLQEENSQLKHQSQARLNEEGQNAIEQGHSADSITNNRSLVSSHQDYDDSDTSLKLGLGFPY

SEQ ID NO: 8185 - protein, 429 aa, Caldococcus noboribetus
MVSHPCTADEAKPPSEGQLARFENGKLIVPDNLIVAYFKGDGIGPEIVESAKKVLDAAVDKAYGGTRRIVWWEVTAGEEAQKECGSLLPDGTLQAFKLARVNLKGPLTTPVGGGFRSLNVTLRMVLDLYSNVRPVKWYGQPTPHCHPENIDWVIFRENTEDVYAGIEWPFDSPEAQKIRDFLKKEFGIELTPDTGIGIKPISKWRTQRHVRRAMEWAIRNGYKHVTIMHKGNIMKYTEGAFRQWAYDLILSEFRDYVVTEEEVNTKYGGKAPEGKIIVNDRIADNMLQQIITRPGEYNVIVTPNLNGDYISDEANALVGGIGMAAGLDMGDGIAVAEPVHGSAPKYAGKNVINPTAEILSGMYLLSDFVGWPEVKLLVEYAVKQAIAHKQVTYDLAREMGGVTPISTTEYTDVLVDYIRHADLKALKGQ

SEQ ID NO: 8186 - protein, 100 aa, Triticum aestivum
  misc_feature (39)..(39): Xaa can be any naturally occurring amino acid
  misc_feature (68)..(68): Xaa can be any naturally occurring amino acid
  misc_feature (70)..(70): Xaa can be any naturally occurring amino acid
  misc_feature (74)..(74): Xaa can be any naturally occurring amino acid
  misc_feature (79)..(79): Xaa can be any naturally occurring amino acid
  misc_feature (85)..(85): Xaa can be any naturally occurring amino acid
  misc_feature (88)..(88): Xaa can be any naturally occurring amino acid
  misc_feature (90)..(90): Xaa can be any naturally occurring amino acid
  misc_feature (96)..(97): Xaa can be any naturally occurring amino acid
SSATTAAPFQGLKSTAGLPVSRRSCSAGLSSVSNGGRIXRCMQVWPIEGIKKFETLSYLPPLSKEALXKXVDYXIRSSXVPASNXTKXGXSSGEQXXSPR

SEQ ID NO: 8187 - protein, 119 aa, Brassica napus
MFFTSRLLSLPRRNMVLSRTSIDSNDTVSSTFGSRYDLIALPTYHIGDSSILVDAAYHIIKYDLMRASNPRLNLVSFVTTCMESTCDKLIMDFINRSYVDMDQYPVITELNKRCLNMIT

SEQ ID NO: 8188 - protein, 279 aa, Staphylococcus epidermidis ATCC 12228
MTNDVQILNNGYPMPAVGLGVYKIADEQMEEVVRTALDAGYRAFDTAYFYGNEKALGSALKHSNVERDELFITSKLWNDYQGYDQTIEYFNKSLDNLGLDYLDLFLIHWPCENDQLYIESYKALEHLYEEGKIKAIGVCNFKIHHLEKLMKETKITPQVNQIELHPYFNQQDVQDFCDEHDIKVTAWMPLMRNKGLLDDPVITDIAHRYDKTPAQIVLRWHLAHNRIIIPKSQTPKRIKENFDIFDFNLELTDVAEIDSLNKNARQGKDPDDVSIGDLK

SEQ ID NO: 8189 - protein, 161 aa, Lactobacillus salivarius subsp. salivarius
LLNQSKDTIIYLCVLKKQHLFQSDKPESIETTLKNAADGRDIRLIVVTDAEGILGIGDWGVDGVDIAIGKLMVYTAAAGINPAQVLPVSIDAGTNNKELLNDPLYLGNKHKRVYGEKYNELIDKFVAAVQKLFPESMLHFEDFGRSNADVILNKYKDKILT

SEQ ID NO: 8190 - protein, 507 aa, Burkholderia fungorum LB400
MLLGHPVLFKSLCYVDGRWVHSASAASVAVHNPADQQVLGHVPMLDAAQITEAVGAAQRAFSTWRWLPVSQRSALLLRWHELILRHQHDLAAILSLEQGKPLAEARGEIAYGASFVEWFAHEVRRLNGRTIPTHIDGAHLGTMIEPVGVAALITPWNFPCAMITRKAAAALAAGCTVVVKPAHETPFSALALAQLAEEAGFPAGVFNVVLGEPQMAMERLVGDSRVRSVSFTGSTRVGALVMQAAARAGIKKTALELGGNAPFIVTGDADLDQAVRVAVAAKFQTSGQDCCAANRIFVARPLYEAFVAQYSDAVKALKVGAAFEANVDVGPLMHQAAFDSTAQRVADAKARGARITAGGGAHERGGWFFEPTVVADAAPGMRIYDEENFAPISAVSPFDSLDEVVERANDTEYGLAAYVCARDLNTVFQLIRRLDFAMVSVNGAKFTGAPIPFGGIKSSGLGREGGAEGFEPFVETRYFCLGQLGLPVTESLPAHRLAAATGAAATA

SEQ ID NO: 8191 - protein, 162 aa, Lactobacillus rhamnosus
VVADSIEQYNELFLDPQNAAFVSVDAPEDIEATLKNAADGRDIRLVVVTDAEGILGMGDWGVNGVDIAIGKLMVYTAAAGIDPSQVLPVSIDAGTNNQKLLDDPLYLGNRHKRVSGEQYYDVIDKFVAAEQQLFPDSLLHFEDFGRDNAQVILDKYKDQIAT

SEQ ID NO: 8192 - protein, 380 aa, Lactococcus lactis subsp. lactis Il1403
MVDFNKVLDLHELHTGVLDIQADIDVKKPSDLAEAYTPGVAELSKLIQSDPEAKRKYTMSGKLVAVVTDGTAVLGLGNMGPAGGLPIVEGKALLYKELAGVDAIPIAVEQIGAEKIIETIKNISQSFAGIHLEDISAPQCFEIEERLSKNLNIPVYHDDQAGTAIVVLAGLMNAAKLVNKKLEDLKIVINGVGAAGVATGRLFAEVGIKNVTLIDIEGKVNDKVKSYNRYQLELAKRFNQVAGTTLDEVIDGQDVFIGLSDAKVLTGTQVERMAKDAIIFALANPVPEILPEEALKHGAAVVATGSNQWPNQVNNVLVFPGLFKGLLSANVQHVDYKLQANIATAIADVIKNPDRNHIVPGVFDAGVVESVTKAVKDSAK

SEQ ID NO: 8193 - protein, 236 aa, Streptomyces coelicolor
MKAVQVVGYGKNLEMAEVPAPEVTGPYDVIVRIGGAGVCRTDLHILEGQWAEKSGVELPYTIGHENAGWVHAVGSAVTNVSEGDKVIVHPLITCGLCRACRAGDDVHCENNRFPGIDTAGGYAEYLKTSARSVVRLDDSLEPADVAALADAGLTAYHAAAKAARRLRPGDRCVVIGAGGLGHIGIQVLGALTAAEIVVVDRNPDAVDLAVSVGADHGVLADGGHVDRVRELTGGHG

SEQ ID NO: 8194 - protein, 238 aa, Glycine max
MEYTYSAGVEAETHTSSSTTPSRSKKRNNNTRRFSDEQIKSLETMFESESRLEPRKKLQLARELGLQPRQVAIWFQNKRARWKSKQLERDYGILQSNYNSLASRFEALKKENQTLLIQLQKLNHLMQKPMEPGQRCTQVEAANSMDSESENGGTMKCEAEGKPSPSMEISEHLLGVLSDDDTSIKVEDFGLEDEHGLLNFAKHVDGSLTSPEDWNAFESNDLLGQSTTDDYQWWDFWS

SEQ ID NO: 8195 - protein, 178 aa, Lactobacillus brevis
NPVVYDPTVADSIEQYSHLFTDPQNAAFISVDAPEDIEATLKNAAGDRDIRLVVVTDPKNFGYGPTGVLTGLDIAVGKLMVYTAAAGMIQHKSCQLALMAGTNNQTLLNDRYYLGNHHERVYGDKYHAVIDQFVAAEQKLFPESLLHWEDFGRSNAQVILDKYKDKIATFNDDIQGTG

SEQ ID NO: 8196 - protein, 77 aa, Glycine max
  misc_feature (66)..(66): Xaa can be any naturally occurring amino acid
MVSSFTCLKSMAGFPTRKTNNDITSIACNRLRVQCIHVSPPIVKKKFDTFSYLPYLYYSQLSNEVXYLLTKGLIPFF

SEQ ID NO: 8197 - protein, 210 aa, Brassica juncea
MLCSEYESPVTLGGEYCPKLASSCPKKPAGRKKFRETRHPVYRGVRLRKSGKWVCEVREPNKKSRIWLGTFLTAEIAARAHDVAAIALRGKSACLNFADSAWRLRIPETTCPKEIQKAAAEAAVAFQAELNDTTADHGLDVEETIVEAIFTEESSEGFYMDEEFMFGMPTLWASMAEGMLLPPRPYNSDLTMTSTEMLTCPFGVMSTCNH

SEQ ID NO: 8198 - protein, 180 aa, Lactobacillus fructivorans
NSVVYDPTIADSIENYSRLYVNPQNAAFLSIDHDDPETIRESLKNTAAGRNIKLIVVTDGEGILGIGDWGTQGIDIPVGKLMVYSAAAGIDPSEVLPVVMDVGTTNKSLLDNPLYLGNHQDRDYGQKYYDFVDKFVKEAEDLFPNLYLHFEDFGRRNASNILDKYKDDYLVFNDDIQGTG

SEQ ID NO: 8199 - protein, 112 aa, Bartonella sp. strain Pm650nm
GANEACLKMLQEIGSVKRIPEFIARAKDKNDPFRLMGFGHRVYKNYDPRAKIMQKTCHEVLKELNIQDDPLLDIAIELEKIALNDEYFVEKKLYPNVDFYSGITLKALGFPT

SEQ ID NO: 8200 - protein, 112 aa, Bartonella sp. strain Pm662wy
ANEACLKMLQEIGSVKRIPEFIARAKDKNDPFRLMGFGHRVYKNYDPRAKIMQKTCHEVLKELNIQDDPLLDIAIELEKIALNDEYFVEKKLYPNVDFYSGITLKALGFPTE

SEQ ID NO: 8201 - protein, 276 aa, Anabaena variabilis ATCC 29413
MIEPSVEEFPADNGPQLTPELAIANLQSSDLSLRYYAAWWIGKYRVKEGAAVDGLIAALEDEADRTELGGYPLRRNAARALGKLGDRKAVPGLIKCLDCPDFYVREAAAQSLEMLKDKAAAPALIKLLDGGVAQAVQVTGRPHLVQPYEAVLEALGAIGATDAIPLIQPFLKHPVSRVQCAAARAMYQLTQEPVYGELLVKVLEGNDLNLRRVALGDLGAIGYLAAAEAIANAKAENSFKLIALKGLLEHQMSAESNALSISDQAIRVMKLMDSLL

SEQ ID NO: 8202 - protein, 283 aa, Listeria monocytogenes str. 4b H7858
MKTVKLNNGVEVPILGFGTYQITDAAEAEQAVKDAIETGYRHIDTAQSYMNEEAVGRGIVASGVDRKELFITTKIWVENVSYKGVMSSFDRSLKRLGLDYIDLLLIHQPFNDVYGAWIAMEELQASGKIRAIGVSNFSPDRVIDLAAFNEVTPQVNQIEVNPFQQQAANLAVLRKEGVAIEAWAPFAEGKNDIFNNPVLTKIGAKYGKSAAQVILRWLVEQDIIVLAKSVKPERMAQNLAIFDFELTEADKGEIASLDQGESQFFSHADPEMVKWMASRKLNV

SEQ ID NO: 8203 - protein, 286 aa, Listeria monocytogenes str. 1/2a F6854
MILPGNGTIPYIGLGVFQVTEQEFIAGAVEKAIEVGYRLFDTAAVYNNEAIVGQAIASSAVSREELFISSKVWNGDLGYDETLFAFERTLRNLKLDYLDLYLIHWPVAGKYRDSWRAMERLHDEKLIKSIGVANFKQHHLSDLLVAANEKPVLNQVETHPLLPQNDLRKYLVEQNIAHAAWSPLAKGILMQNPVITEIAKKHQASVDQVILQWHLNRNTIIFPKSITSSRIEENSRLSYFQLDASDMEKIDRLETGKRVGPDPDDLEYFLSSIERERAYLASENEE

SEQ ID NO: 8204 - protein, 225 aa, Pisum sativum
MLQCLEGFKSLLASVLRCCDIDINQPRGLEDPELLARETVFSVSEIEALYELFKKISSAVIDDGLINKEEFQLALFKTNKKESLFADRVFDLFDTKHNGILGFEEFARALSVFHPNAPIDDKIEFSFQLYDLKQQGFIERQEVKQMVVATLAESGMNLSDDVIESIIDKTFEEADTKHDGKIDKEEWRNLVLRHPSLLKNMTLQYLKDITTTFPSFVFHSQVDDT

SEQ ID NO: 8205 - protein, 184 aa, Magnaporthe grisea 70-15
MHEHTFDSTDAGASTTYPMQCSALRKGGHVVIKGRPCKIVDMSTSKTGKHGHAKVHLVAIDIFTNKKLEDLSPSTHNMDVPNVTNETFELIDIEGDGFLQLMDSNGEMREDIKLPEGSDKAEEVAKEIRRLHELKQQDENKEVCRLLIQPSAAHSFDSDTDNMCAQLSSSPRLWVRRFLPRPSN

SEQ ID NO: 8206 - protein, 231 aa, Sinorhizobium meliloti
MDARQMKIKAAEAALEHVESGMRLGIGTGSTAEEFVRLLAEKVASGFQISGVPTSERTARLCLELGVPLKSLDELPELDLTIDGADEVDGKLRLIKGGGGALLREKIVASASTRMIVIADESKVVDVLGAFKLPIEINPFGQVATRLAIEKTASRLGLAGEIVVRSSGDGVFMTDGGHLILDASFGRIPDADALAVELNAIPGVVEHGLFIDVASMAIIAGPEGARTLTAS

SEQ ID NO: 8207 - protein, 503 aa, Pseudomonas putida KT2440
MRYPMKDSSDTHPNHLPDSCYGLFIDNQWVTAEYGETLDIINPANGKILTNIPNATAADVDRAVQAAQRAFVTWRTTSPAERANALLKIADLLEADADRFAVLETLDVGKPIRESRSVDIPLAIDHFRYFAGVIRSQSDEAVMLDEQTLSIALSEPLGVVGQVIPWNFPLLMAAWKIAPAIAAGNTVVIKPSELTPVTILELAKIFAKVLPAGVVNIVTGLGTTVGQALLDHPDLRKLAFTGSTRVGELVANAAAKKIIPATLELGGKSANIVFPDANWDKAVEGAVLAILWNQGQVCESGARLFVHESIYERFLAELKHKFEAVRVGDPLNPDTMMGAQVSKTQMERILGYVDIAKEEGAEVLIGGGRLTGADYDAGFFIQPTILVGVRNDMRVAYEEIFGPVLCVIPFKDEAEVIAMANDSEYGLAGAVWTQDINRALRVARAVETGRMWVNTYHEIPAHAPFGGYKKSGLGRETHKSMLEAYSQKKNIYVSLNEAPLGLF

SEQ ID NO: 8208 - protein, 352 aa, Amycolatopsis methanolica
MTSTTFRRSDQMRVGVLTGGGDCPGLNAVIRAVVRKGIEAHGWEIVGFRSGWRGPLTGDSRPLGLDDVEEILIRGGTILGSSRTNPYKEEGGVEKIRAVLADQGVDALIAIGGEDTLGVAKKLTDDGIGVVGVPKTIDNDLAATDYTFGFDTAVHIATEAIDRLRTTAESHYRAMVVEVMGRHAGWIALHAGLAGGANVILVPERPFSVEQVVEWVERRFEKMYAPIIVVAEGAVPEGGAEVLRTGEKDAFGHVQLGGVGTWLADEIAERTGKESRAVVLGHTQRGGTPTAYDRVLATRFGLHAVDAVADGDFGTMVALRGTDIVRVKLAEATAELKTVPPERYEEAEVFFG

SEQ ID NO: 8209 - protein, 222 aa, Physalis peruviana
MVRQKIQIKKIDNLTARQVTFSKRRRGLFKKAQELSTLCDADIGLIVFSATGKLFEYSSSSMMQLIEKHKMQSERDNMDSVEQLQSSNLQSEKKTHAMLSREFVDKNRELRQLHGEELQGLGLEELMKLEKLVEGGISRVLKIKGDKYMREISSLKKKEAQLQEENSQLIHQSQARLNEGGQNVIEQGHSADSIANNLSLVNSHQDYDDSDTSLKLGLAYPY

SEQ ID NO: 8210 - protein, 443 aa, Zea mays
MEDAMAADGKSVLQGRYELGRVLGHGNFGRVHAARDLRTGRSVAVKVVAKDKLERAGMAEQIKREIAVMKMVSHPNIVELHEVMATRSKIYLALELVRGGELFSRIARAGRVREDVARCYFRQLVAAVDFCHGRGVFHRDLKLENLLLDEVGNLKVADFGLSALAGHARSDGLLHTACGTPSYVAPEVLGGKGYDGAKADLWSCGVILYVLLVGSLPFHEDNLMVMYRKMQRGEFLCPPWVSADARKLIGELLDPDPSTRITVARLVETPWYRKPLPVLPPLNLKEPTPDARRATSDKEEPEVLNAFHLISFSEGFDLSPLFDQGRGGGVGRSSAGGIRFVTREAASSVVSRLESLVTGRGANMRVTKSGSRGVRLEAVSRGRSGARLAVAAEIFSVAPSVLLVDVKKDGGDTMEYRSFCSEELRPALKDIVWASSQDTPGAA

SEQ ID NO: 8211 - protein, 222 aa, Physalis peruviana
MVRQKIQIKKIDNLTARQVTFSKRRRGLFKKAQELSTLCDADIGLIVFSATGKLFEYSSSSMMQLIEKHKMQSERANMDSLEQLQSSNLQSEKKTHAMLSREFVDKNRELRQLHGEELQGLGLEELMKLEKLVEGGISRVLKIKGDKYMREISSLKKKEAQLQEENSQLIQQSQARLNEEGQNVIEQGHSADSIANNLSLVNSHQDYNDSDTSLKLGLAYPY

SEQ ID NO: 8212 - protein, 506 aa, Zea mays
MASPFSVPSLIMEEEGRFEAEVAEVESWWGTERFRLTKRPYTARDVVLLRGTLRQSYASGEMAKKLWRTLKAPARVYHDRKQREARMSLPRAERARAPYVDFLKPIIADGDTGFGGATATVKLCKLFVERGAAGVHLEDQSSVTKKCGHMAGKVLVAVSEHVNRLVAARLQFDVMGVETVLVARTDAVAATLIQTNVDARDHQFIVGATNPGLRGQSLAAVLSAGMSAGKSGRELQAIEDEWLAAAQLKTFSECVRDAIAGLGVAAQEKQRRLQEWDRATGGYDRCVSNDQARDIAASLGVTSVFWDWDLPRTREGFYRFRGSVAAAVVRGRAFAPHADVLWMETSSPNVAECTAFAEGVKAACPEAMLAYNLSPSFNWDASGMTDAEMAAFIPSVARLGYVWQFITLAGFHADALVTDTFARDFARRGMLAYVERIQREERINGVETLEHQKWSGANFYDRVLKAVQGGISSTAAMGKGVTEEQFKDPRPATGSSGLQVMAKSRI

SEQ ID NO: 8213 - protein, 239 aa, Solanum macrocarpon
MAREKIKIKKIDNITARQVTFSKRRRGLFKKAEELSVLCDADVALIIFSATGKLFDFASTSMKDILGKYKLQSASLEKVEQPSLDLQLENSLNMRLNKEIADKTRELRQMRGEELEGLSLEELQQIEKKLEAGFNRVLEIKSTRIMGEITNLQRKGAELMEENKQLKQKMEIMKKGKLPLVTEMVMEDGQSSESIITSNNVCSSNSGPPPDQDDSSKIGGNAVEDDCSITSLKLGLPFS

SEQ ID NO: 8214 - protein, 176 aa, Rhodobacter sphaeroides 2.4.1
MTVRPHLALAFACLAGPALAAGPPPVTFDSIDGGQIRLDELRTAGPVLVVNTASLCGFTPQYDDLQALWDRYRDAGLTVLAVPSNDFKQELDDAGAVRDFCATNFDLTLPMTTITPVTGAEAHPFYRWLAEEHGVEPRWNFHKVLIDRDGDLVASWSSPVRPTDREIVGRIEALLP

SEQ ID NO: 8215 - protein, 178 aa, Oenococcus oeni
PIVYDPTIADTIENYSELFVEPQGAAFLDINHPENIQSTLKNAANGRDIKLLVVSDAEGILGIGDWGVQGVDIAVGKLMVYTVAAGIDPSTVLAVVIDAGTNNEKLLKDPMYLGNKFNRVRGDKYYDFIDKFVNHAESLFPNLYLHWEDFGRSNASNILNSYKDKIATFNDDIQGTGI

SEQ ID NO: 8216 - protein, 420 aa, Thermus thermophilus HB27
MGPLLVWHRGDLRLHDHPALLEALARGPVVGLVVLDPNNLKTTPRRRAWFLENVRALREAYRARGGALWVLEGLPWEKVPEAARRLKAKAVYALTSYTPYGRYRDAKVQEALPVPLHLLPAPHLLPPDLPRAYRVYTPFARRFLGVEAPLPAPEALPKGPEEGEIPREDPGLPLPEPGEEAALAGLRAFLEAKLPRYAEERDRLDGEGGSRLSPYFALGVLSPRLAAWEAERRGGEGARKWVAELLWRDFSYHLLYHFPWMAERPLDPRFQALPWQEDEALFRAWYEGRTGVPLVDAAMRELHATGFLSNRARMNAAQFAVKHLLLPWKRCEEAFRHLLLDGDRAVNLQGWQWAGGLGVDAAPYFRVFNPVLQGERHDPEGRWLKRWAPEYPSYAPKDPVVDLEEARRRYLRLARDLARG

SEQ ID NO: 8217 - protein, 392 aa, Prochlorococcus marinus subsp. marinus str. CCMP1375
MEQKAIDNQNDPCNMVLKPGLEGVPVTQSAICDINGLKGELKYRGYSIAELAAKSSFLETTYLLIWGDLPSSKQLREFEDAIQMHRRLSFRVRDMMKCFPATGHPMDALQSSAASLGLFYSRRAIDNPQYIYDAVVRLIAKIPTMVAAFQLIRKGQDPIQPRDDLPYSANFLYMLTEREPDPLAARVFDRCLILHAEHSLNASTFSARVTASTLTDPYAVVASAVGTLAGPLHGGANEDVIAMLEEIGAPENARNYLKQAIDQKSKIMGFGHREYKVKDPRATLLQGFAEDLFARFGKDEMYDVARSVEEEASPLLGPRGIYPNVDFYSGLVYRKLGIPRDLFTPIFAISRVAGWLAHWREQLSANRIFRPTQIYTGKKTRAWCALEERNKN

SEQ ID NO: 8218 - protein, 178 aa, Lactobacillus hilgardii
PVVYDPTIADTIENYSHLFLDPQNAAFLSIDDQDDIEASLKNASAGCDIKLIVVTDGEGILGIGDWGVQGVDISVGKLMVYTAAAGVDPKSVLPVVLDVGTNRKELLADDLYMGNHTQRVTGDKYYNFVDKFVETAENLFPDMYLHFEDFGRSNAANILNKYKDNILTFNDDIQGTGI

SEQ ID NO: 8219 - protein, 323 aa, Oryza sativa (japonica cultivar-group); identical to SEQ ID NO: 347

SEQ ID NO: 8220 - protein, 178 aa, Leuconostoc mesenteroides subsp. mesenteroides
PVVYDPIVAESIEQYNEIYTNPQNAAFLSIDHPENIESSLKSVADGRDIELVVVTDAEGILGMGDWGVNGVDIAVGKLMVYTAAAGIDPATVLPVSIDAGTNNKILLENPLYLGNKHERIAGEKYLEFIDEFVTAEQKLFPASLLHWEDFGRSNAQVILDKYKDSIATFNDDIQGTGI

SEQ ID NO: 8221 - protein, 177 aa, Lactobacillus plantarum
NPVVYDPVVADSIEQYNELFLDPQNAAFVSVDAPEDIEATLKNARGRRDIRLVVVTDAEGILGMGDWGVNGVDIAIGKLMVYTAAAGIDPSQVLPVSIDAGTNNQKLLDDPLYLGNRHKRVSGEQYYDVIDKFVAAEQQLFPDSLLHFEDFGRDNAQVILDKYKDQIATFNDDIQGT

SEQ ID NO: 8222 - protein, 102 aa, Triticum aestivum
  misc_feature (33)..(33): Xaa can be any naturally occurring amino acid
  misc_feature (52)..(52): Xaa can be any naturally occurring amino acid
  misc_feature (70)..(70): Xaa can be any naturally occurring amino acid
  misc_feature (88)..(88): Xaa can be any naturally occurring amino acid
MAPTVMASSATSVAPFQGLKSTAGLPVSRRSNXLALGSVSNGGRIRCMQVWXPSRGIKKFETLSYLPPLXAREGLLKQVDYLIRSKWXCPCLQFNKVGFIFP

SEQ ID NO: 8223 - protein, 201 aa, Prochlorococcus marinus subsp. marinus str. CCMP1375
MTAQASNIVWHKASVDRESIEKERGHKSVIIWFTGLSGSGKSTLANALNVALFKKGLATYVLDGDNIRHGLCNDLGFSDSDREENIRRIGEVAKLFLDAGVIVLTAFVSPFRSDREKARKLVKENDFLEIYCAANLDICETRDTKGLYAKARAGEIKDFTGISSPYEEPENPDLKIDTGLKDIDQCVEEVISKLIELNLVK

SEQ ID NO: 8224 - protein, 390 aa, Mycobacterium avium subsp. paratuberculosis str. k10
MLPAGSVRPRAGCENFPMTVVPENFVPGLEGVVAFTTEIAEPDKDGGALRYRGVDIEDLVSQQVTFGDVWALLVDGKFGHGLPPAEPFPLPIHTGDVRVDVQAGLAMLAPIWGYKPLLDTDDATARDQLARASVMALSYVAQSARGIYQPAVPQRVIDECETVTARFMTRWQGEPDPRHIEAIDAYWVSAAEHGMNASTFTARVIASTGADVAAALSGAIGAMSGPLHGGAPARVLPMIEEVERTGDARGLVKKILDSGDKLMGFGHRVYRAEDPRARVLRATAERLGAPRHEVAVALEQAALAELRERRPDRAIETNVEFWAAVILDFARVPANMMPAMFTCGRTAGWCAHILEQKRLGKLVRPSAIYVGPGPRSPESVEGWDRSLTNA

SEQ ID NO: 8225 - protein, 161 aa, Pediococcus parvulus
IADTIENYSDLFIQSQNAVFLSIDDPDSMKASLKNAADGRDIRLIVVTDAEGILGIGDWGTNGVDISVGKLMVYTAAAGIDPSQVMPVVLDVGTNNQDLLKNPMYLGNRHERITGDRYYKFVDQFVNTAEDLFPKLYLRFEDFGRDNAANILNKYKDQITT

SEQ ID NO: 8226 - protein, 431 aa, Mycobacterium avium subsp. paratuberculosis str. k10
MADTDDIATLKYPGGETDLEIVSATEGADGIALGSLLSKTGYTTFDNGFVNTASCKSAITYIDGDAGILRYRGYPIEQLAEKSTFLEVSYLLIYGELPDKDQLAEFTKRIQLHTMLHEDLKRFFDGFPRNAHPMPVLSSAVNALSAYYPDSLDPMDTEDVELSTIRLLAKLPTIAAYAYKKSVGQPFLYPDNKLSLVENFLRMTFGLPAEPYQADPEVVRALDMLLILHADHEQNCSTSTVRLVGSSQANLFTSISGGINALWGPLHGGANQAVLEMLEKIRQSDDDVSEFVRKVKNREAGVKLMGFGHRVYKNYDPRARIVKEQADKILAKLGGDDDLLDIAKQLEEAALTDEYFIERKLYPNVDFYTGLIYRALGFPTRMFTVLFALGRLPGWIAHWREMHDEGDSKIGRPRQIYTGYTERDYVTIDAR

SEQ ID NO: 8227 - protein, 378 aa, Weissella paramesenteroides
MNRVLKVHKSHTGVLDIKADISIKTPDDLSEAYTPGVSGIAKMIAEDEALKNVYTMSGKLIPIITDGSAVLGLGNIGPAAGLPIVEGKALIYKEFSGVNAIPMALNQVDVDEFVETIKTMAPSFAGIHLEDIAAPRVFEIEKRLNEELDIPVYHDDQTGTAVVVLAALINAAKVVNKPLKDLKVVINGMGAAGVATAKILLASGMKNLTLVDIHGVIRADDNDYNEYQRELATAVNQVDGRSLDDVIDNQDVFIGLSDANVLSKEQVTRMAQDAIVFALANPVPEILPEEAHEGGATITATGSSQWANQVNNVLVFPGLFKGLLATDIKKVELSLQVKLAEGLAQMVTTPTADHIVPRVFDDGVVDAVSNAVIAYAKA

SEQ ID NO: 8228 - protein, 128 aa, Brassica napus
  misc_feature (106)..(106): Xaa can be any naturally occurring amino acid
MADSDNDSGGHKDGGSASSREQDRFLPIANVSRIMKKALPANAKISKDAKETVQECVSEFISFVTGEASDKCQREKRKTINGDDLLWAMTTLGFEDYVEPLKVYLXKYREVEGERTTTGKQVDKEGGA

SEQ ID NO: 8229 - protein, 310 aa, Hordeum vulgare
MKTFLTFVLLAMVMSIVTTARQLNPSSQELQSPQQSYLQQPYPQNPYLPQQPFPVQQPFHTPQQYFPYLPEELSPQYQIPTPLQPQQPFPQQPQQPLPRPQQPFPWQPQQPFPQPQQPIPYQPQQPFNQQPQQIISQQPQQPFPQQPQQPFPQPQQPFPWQPQQPFPQPQQPFPLQPQQPFPWQPQQPFPQPQQPIAHQPQQPFSFSQQPQQPFPLQPQQPFPQQPQQPFPQQPQQIIFQQPQQSYPVQPQQPFPQPQPVPQQRPQQASPLQPQQPFPQGSEQIIPQQPQQPFPLQPHQPYTQQTIWSMV

SEQ ID NO: 8230 - protein, 335 aa, Glycine max
SSQLRRPPPEAEALTDEIEKESQYVEEVFRIKDIFLNYEEESDSVLFDSLRRLQLMELTVDLLKATEIGKAVNPLRKHGSRDICQLARTLIDGWKQMVDEWVKDTTAIAGSEGTPDSVNPSVVDDEEGLPSPPMDEGALFAAPTGSMELSQFFDGMDDDGNPQHSGEFIKNHEHGRRPSLNSQNTAKRKPQASNEANIIAKDSKGQQAKKNEAAVRPNKSVIADSGPSRPPKSTMQKKGNIEPKMQQNIVKSAIPRNPHIHQLDKPKCSDDAAVHVKLEATKRKLQERYQQAEKAKRQRTVQVMELHDLPKQGIGHRNPHVKPGNHKRQWGHGRR

SEQ ID NO: 8231 - protein, 120 aa, Triticum aestivum
  misc_feature (72)..(72): Xaa can be any naturally occurring amino acid
  misc_feature (86)..(86): Xaa can be any naturally occurring amino acid
  misc_feature (95)..(95): Xaa can be any naturally occurring amino acid
MAPTVMASSATSVAPFQGLKSTAGLPVSRRSNGASLGSVSNGGRIRCMQVWPIEGIKKFETLSYLPPLSTEXLLKQVDYLIRSKWXPCLDSASWXIFREHNALLGTTMAYWHVELPISVH

SEQ ID NO: 8232 - protein, 359 aa, Aspergillus nidulans FGSC A4
MSSQTPTAQNLSFVLEGIHRVKFEDRPIPKLKSPHDVIVNVKYTGICGSDVHYWDHGAIGQFVVKEPMVLGHESSGIVTQIGSAVTSLKVGDHVAMEPGIPCRRCEPCKAGKYNLCEKMAFAATPPYDGTLAKYYTLPEDFCYKLPESISLPEGALMEPLGVAVHIVRQANVTPGQTVVVFGAGPVGLLCCAVAKAFGAIRIIAVDIQKPRLDFAKKFAATATFEPSKAPATENATRMIAENDLGRGADVAIDASGVEPSVHTGIHVLRPGGTYVQGGMGRSEMNFPIMAACTKELNIKGSFRYGSGDYKLAVQLVASGQINVKELITGIVKFEDAEQAFKDVKTGKGIKTLIAGPGAA

SEQ ID NO: 8233 - protein, 334 aa, Phytophthora infestans
MAASPNKKLREASQLDQLKQFTTVVADTGDFEQINKYKPQDATTNPSLLFKAAQMEQYSALVDDAVSYGKGLSADLSEKERLGYVIDKLSVNFGLEILKVVPGYVSTEVDARLSFDTESTIARAHRIIDLYEKAGIKKDRILIKIASTWEGIQACKHLQKEGISCNMTLLFGFAQAVGCAEAGATLISPFVGRILDWHKAKTGKSSYESHEDPGVVSVTKIYQYYKKYDYKTIVMGASFRNTGEITELAGCDRLTISPALLEELTKSTATLAKKLDAETAGKAYTGEKLSYDEKDFRLSMNEDAMATEKLAEGIRGFSADIVKLEQILKTKLGA

SEQ ID NO: 8234 - protein, 205 aa, Erwinia carotovora subsp. atroseptica SCRI1043
MSLRHSPTDDNVVWHAHNVTRESREKLRGHQGVVIWFTGLSGSGKSTLAGALEQALHQRGVSTYLLDGDNVRHGLCRDLGFTDDDRRENIRRVGEVAKLMVDAGLVVLTAFISPHRAERKMVQDLLGEGQFIEVFVDTPLATCEARDPKGLYKKARAGELRNFTGIDSAYEAPEAPDSHLDGEQFVTNLTDQLLDLLGKRAIIKL

SEQ ID NO: 8235 - protein, 511 aa, Zea mays
  misc_feature (293)..(293): Xaa can be any naturally occurring amino acid
  misc_feature (442)..(442): Xaa can be any naturally occurring amino acid
  misc_feature (484)..(484): Xaa can be any naturally occurring amino acid
MGAFAKEEHQFLAELGLAQRNPGAFACGAWGGSGPTVTSTSPTNNQVIAEVVEASVHDYEEGMRACFDAAKTWMAIPAPKRGEIVRQIGDALRAKLHHLGRLVSLEMGKILPEGIGEVQEIIDMCDYAVGLSRQLNGSIIPSERPNHMMMEVWNPLGVVGVITAFNFPCAVLGWNACIALVCGNCVVWKGAPTTPLITIAMTKIVASVLEKDNLPGAIFTSFCGGTEIGQAIALDIRIPLVSFTGSTRAGLMVQQQVSARFGKCLLELSGNNAIIVMDDVDIQLAVRSVLFAXAVGTAGQRCTTCRRLILHENIYQTFLDQLVEVYKQVRIGDPLEKGTLLGPLHTPASKENFLKGIQTIKSQGGKILFGGSAIESEGNFVQPTIVEITPSAPVVKEELFGPVLYVMKFQSLKEAIEINNSVPQGLSSSIFTKRPDIIFKWXGPHGSDCGIVNVNIPTNGAEIGGAFGGEKATGGGREAGSDSXWKQYMRRATCTINYGSELPLAQGINFG

SEQ ID NO: 8236 - protein, 170 aa, Zea mays
  misc_feature (19)..(19): Xaa can be any naturally occurring amino acid
  misc_feature (66)..(66): Xaa can be any naturally occurring amino acid
MAPTVMMASSATAVAPFQXLKSAASLPVARRSTRSLGNVSNGGRIRCMQVWPAYGNKKFETLSYLXPLSTDDLLKQVDYLLRNGWIPCLEFSKLGFVYRENSTSPCYYDGRYWTMWKLPMFGCTDATQVYKELQEAIAAYPDAFHRVIGFDNVRQTQCVSFIAYKPPGSE

SEQ ID NO: 8237 - protein, 447 aa, Methanococcoides burtonii DSM 6242
MTDIGIIAVGGYNEMGRNMTAIRVDEDIIIVDMGLRLDRVQIHEDVEIDKMHSLELIEMGAIPDDTIMKQVNGNVAAIVCTHGHLDHIGAIPKLAHRYTAPIIGTPYTAALIKQQIESERKFGVKNKIIPIEAGGTYQINDDVSIELIRVQHSIIDAVFVAVHTPVGAVLYACDFKLDRTPTLGEAPDFERLRELGKEGVICMIVESTNANRKGKTPSEQIAHDMVRDVLLGTEESDVGMIVTTFASHIARINSIIQVAGEMGRIPVLMGRSMDKYVVTAKNMGYIDFPKNVEIYGKRKDIDRAFKKIMSEGKEKYLPIVTGHQGEPGAILSRVASGDTPFEVESGDRIIFSANIIPSPMTQANRYALETKLKMKGARIYDDVHVSGHAYREDHWELLRMINPEHVIPAHGNIGMHSAYIEMAEDAGYILGDTVHMLRNGEELYIEE

SEQ ID NO: 8238 - protein, 250 aa, Raphanus sativus
MTKNYPAVSEEYQKEIEKCKRKLRGLIAEKNCAPIMVRLAWHSAGTFDCASRTGGPFGTMRFDDELAHGANNGLHIALRLLEPIREQFPTISHADFHQLAGVVAVEVTGGPEIPFHPGREDKPQPPPEGRLPDATKACDHLRQVFLKQMGLTDQDIVALSGAHTLGRCHKDRSGFEGAWTSNPLIFDNSYFKELLSGEKEGLLQLPSDKALLDDPVFRPLVEKYAADEEAFFADYAEAHLKLSELGFADA

SEQ ID NO: 8239 - protein, 183 aa, Xanthomonas axonopodis pv. citri str. 306
MSQTLYDIPVTRIDGQPTTLADYRGKVLLVVNVASKCGLTPQYEGLEALYRDKRAQGLEVLAFPANDFNGQEPGSEAEIAQFCQLTYDVTFPMFAKIAVAGDQAHPLYGALTSTHPHTTGEGPMREKLAGYGIAPNPAPGVVWNFEKFLIGRDGKIIDRFAPDIPADDARLRAAIDAALATRS

SEQ ID NO: 8240 - protein, 249 aa, Physalis peruviana
MAREKIKIKKIDNITARQVTFSKRRRGLFKKAEELSILCDADVALIIFSSTGKLFDFSSSSMKDILGKYKLQSANLDKVDQPFLDLQLENSLNVRLRKQVADKTRELRQMKGEELEGLSLEELQQIEKRLEAGFNRVLEIKGTRIMDEIANLQRKGAELMEENKKLKQKMEMMKLGKLPLLTDMDCMVMEEGQSSDSIITTNNVCSSNTGPPPEDDSSNASLKLGCNNGLAPVDDDCSITSLKLGLPLS

SEQ ID NO: 8241 - protein, 464 aa, Deinococcus radiodurans R1
MPGKLSSLNEGRWPQRKTPPHGGRGGPDSHSRSDTMTPTPKTPAEILEKTWQTEERWQGIKRNYTAEDVVRLRGSLPIEYTLAKHGANKLWQQMKEMPFVNALGALTGNQAMQQVKAGLKAIYLSGWQVAGDANNAGQMYPDQSLYPASSVPDVVKRINNTLRRADQIQTSEGKNDIDYFVPIVADAEAGFGGPLNAFELMKAMIEAGAAGVHFEDQLASEKKCGHLGGKVLVPTSQFIRTLNAARLAADVSGVPTVLIARTDADAANLLTSDVDDNDKPFCTGERTPEGFFYVKPGIDQAISRALAYAPYADVIWCETSVPNLEDAKKFADAVHAQFPGKLLAYNCSPSFNWKKNLDDETIAKFQVELGKMGYKFQFITLAGFHALNMSMFDLAYGYARKQMSAFVELQEREFAAQERGFTAVRHQREVGTGYFDLVSQAAGGGQSSTTALAGSTEAEQFAHH

SEQ ID NO: 8242 - protein, 247 aa, Physalis peruviana
MAREKIKIKKIDNITARQVTFSKRRRGLFKKAEELSILCDADVALIIFSSTGKLFDFSSSSMKDILGKYKLQSANLDKVDQPFLDLQLENSLNVRLRKQVADKTRELRQMKGEELEGLSLEELQQIEKRLEAGFNRVLEIKGTRIMDEIANLQRKGAELMEENKKLKQKMEMMKLGKLPLITEMECMVMEEGQSSDSIITTNNVCSSNTGPPPEDDSSNASLKLSCNNGLAPVDDDCSITSLKLGLS

SEQ ID NO: 8243 - protein, 107 aa, Schizosaccharomyces pombe
MEDEMQIDKKEVEIEQKPPRFEIKKWNAVALWQWDIVVDNCAICRNHIMDLCIECQANTDSAAAQECTVAWGTCNHAFHFHCISRWLNTRNVCPLDNREWEFQRYGH

SEQ ID NO: 8244 - protein, 132 aa, Brassica napus
  misc_feature (2)..(2): Xaa can be any naturally occurring amino acid
  misc_feature (11)..(11): Xaa can be any naturally occurring amino acid
  misc_feature (16)..(16): Xaa can be any naturally occurring amino acid
  misc_feature (32)..(32): Xaa can be any naturally occurring amino acid
  misc_feature (35)..(35): Xaa can be any naturally occurring amino acid
  misc_feature (40)..(40): Xaa can be any naturally occurring amino acid
  misc_feature (47)..(47): Xaa can be any naturally occurring amino acid
  misc_feature (51)..(51): Xaa can be any naturally occurring amino acid
  misc_feature (60)..(61): Xaa can be any naturally occurring amino acid
  misc_feature (65)..(65): Xaa can be any naturally occurring amino acid
  misc_feature (67)..(67): Xaa can be any naturally occurring amino acid
  misc_feature (70)..(70): Xaa can be any naturally occurring amino acid
  misc_feature (75)..(75): Xaa can be any naturally occurring amino acid
  misc_feature (84)..(85): Xaa can be any naturally occurring amino acid
WXSSMLSSAAXVTSPXQATMVAPFTGLKSSAXFPXHPAKXTTNITSXASNXRKELTCMKXXPPPXKXKVXNLSYXPDLTEIELXXEVEYPPPRGFPWVPWKGFPGSGKGLGFGKGENFPPFGRPQRGPKGKG

SEQ ID NO: 8245 - protein, 1401 aa, Schizosaccharomyces pombe
MGLEHTFYPAEDRFEPLLEHSEPVNFVPKENAKSYVRQGFASPHQSLMDNLVDSTESTKRSENFVSHIPLTPSHSGQSEKLMSTRTSHSPYISPTMSYTNHSPANLTRNSSFNHQHYSTTLRSPPSMRGRGIDVNSSHYPHISRPRTSSDSQKMYTRAPVDYYYIQENPYFNNIDQDSISDKSLPSTNQSLHHSEEDTESDNDFSESIHPEFDIDVFYKVSNILYDESDLQDPEKRERLEWHSMLSSVLKGDVMQTEKRRLRLTEPDGHSGTYISEVWLGLQAWLHGRLNADQAEVIRKSREGVEPVLREVIDFQIQDEETTKPPLEQVTEILEKVEQCKQFYISSREMEENVPLSASKEFNYKLNALISWSNVMESIQVETLVLQKWVGNDEFDLTMRTPQFNYDGVENTSSFVERIFRQSGLQRTFEQRTLTTLNRIIHQAKQTISENAQAFEEMKLPTYEDKLLPLVRFPIKLLEEALRLRLAYAKKIKGPNFLIVDSMLDDFKIALSVAVRIKREYIKIASPSPGWSLPTNVDEDYDNVLLDSLKFYFKLLTLKLSSGNKNLYFKEIDFLENEWAFLNEHIYWINGGDIHMAGQFSYLSNSLLLNVHRYVESHLNGPTERTAASLTNWYSTLLKNTQIRFRKILRFSETLNSRFENASDFVISEGHLPDLVNRLSTTGHFLAYTANLERDGVFVIADHTLSENPEALKALLFSKDISNLETIQQNCSYVLILCPVHPIVWKGRIEKVDVPDFSVDLKTNRVRIIASNKREHLQAAKSVFQSISGDLVTLAVECRSSITRVYKEFIRLSKLCMRISSTVVDCVSAVREACSGVNCHDLIYHVFSFAAEFGQRILRFLSFDSYWQTKLKRKITSLAVEWISFICDECDLMDRKTFRWGVGALEFLMLMIRGNNILLIDDAMFLKIREKVGKSMAFLLTHFDVLGAKSKVAAKLQRESTEVSSSPRLTSFGDVEEEALSIQLLQKETMLRIDELEIERNNTLLERLAIGHVLDDSVFRNRDFIKLASSFSNITIRWQQGHFVRSGMFGDVYTGVNMETGDLLAVKEIKLQDSRTFRSTVDQIHNEMTVLERLNHPNVVTYYGVEVHREKVYIFMEFCQGGSLADLLAHGRIEDENVLKVYVVQLLEGLAYIHSQHILHRDIKPANILLDHRGMIKYSDFGSALYVSPPTDPEVRYEDIQPELQHLAGTPMYMAPEIILGTKKGDFGAMDIWSLGCVILEMMTGSTPWSEMDNEWAIMYHVAAMHTPSIPQNEKISSLARDFIEQCFERDPEQRPRAVDLLTHPWITDFRKKTIITMPPATITKKTSLSHTITEEKTAQLLAGRHDDSKAETDSLAASYKEESALPVASNVGLRQPNELRIDSINLPPAIVTPDTINYSVD

SEQ ID NO: 8246 - protein, 229 aa, Oryza sativa (japonica cultivar-group)
MGSRLGRRVIHFANLPLKLMLPPAPLSSVQEFAVKTVPSASKVDIRRCLESMYGFSVAEVRTLNMEGKKLRRGPFLAAKPDYKKAYVTLRAPLPVSPDLFPIGLVLGERERKASAAAARRKAVEGAEVEGEGKGKHWMEDEKVGFSRAGRGKVVYGNPGRLGKKRNGGTKVKDRAGEEVGKFPWSGTRLATEKKPARKQQYAPKKKGIVLKQKSWKGSVHRQPKKKVEA

SEQ ID NO: 8247 - protein, 321 aa, Arabidopsis thaliana
MGEPKDSLALFLCHESESSLNEDDDETIERSDKQEPHFTTTIDDEDYVADLVLKENLRFETLPSKTTSSSDRLIAIDWILTVHKNKIWVPTSNSLHCNLILRSVSPQKIHRYETWAMRLLSVACLSLAAKMEERIVPGLSQYPQDHDFVFKPDVIRKTELLILSTLDWKMNLITPFHYFNYFLAKISQDNHSVSKDLVLLRSSDSLLALTKEISFTEYRQFVVAAVTTLLASSSTSSDIRLTREEIANKFGSISWWTSNENENVYLCYQRTLEIEERKHMTPPPEIAVSREPPASGSGAKRRLSFDDSDQSSPPAKRMRRL

SEQ ID NO: 8248 - protein, 455 aa, Glycine max
EKATGQEYACKYIAKRKLVTDDDVEDVRREIQIMHHLAGHPNVISIKGAYEDAMAVHVVMELCAGGELFDRIIQRGHYTERQAAELTRTIVGVVEACHSLGVMHRDLKPENFLFVNQHEDSLLKTIDFGLSVFFKPALKTDDLSLPGDIFNDVVGSPYYVAPDVLRKRYGPEADVWSAGVILYILLSGVPPFWAENEQGIFEQVLRGDLDFSSDPWPSISESAKDLVRKMLVRDPRRRLTAHQVLCHPWIQVDGVAPDKPLDSAVLSRLKQFSAMNKLKKMALIIIAESLSEEEIAGLKEMFKMIDADNSGQITFEELKAGLKRVGANLKESEIYDLMQAADVDNSGTIDYGEFLAATLHRNKIEREDNLFAAFSYFDKDGSGYITQEELQQACDEFGIKDVRLEEIIKEIDEDNDGRIDYNEFVAMMQKGNLPAVGKKGLENSFSIKFREALKL

SEQ ID NO: 8249 - protein, 146 aa, Pediococcus acidilactici
TIADTIENYSELYVQSQNATFLSIDDPDNMETALKNAADGRDIRLIVVTDAEGILGIGDWGTNGVDISVGKLMVYTAAAGIDPSQVLPVVLDVGTNNEKLLKDPMYLGNRHERIKGDRYFEFVDQFVQTAENLFPNMYLHFEDFGA

SEQ ID NO: 8250 - protein, 175 aa, Triticum aestivum
NSPDGTYDAIIVDSSDPIGPAQELVEKPFFETIARALRPGGVLCNQAESMWLHTHLIQDMLSICCETFKGSVHYAWASVPTYPSGAIGFLLCAKEGPPVNFLAPINPIEKLEGAMTAGRDIRFYNTEMHRAAFVLPTFAKRELEAYGGSTRRAQEEKSAEPAKVAVAPHSEILTA

SEQ ID NO: 8251 - protein, 204 aa, Burkholderia fungorum LB400
MAVVAPLTPGTDVPETLVPVSATVVPTAVMRLLAWVTMLPTGVEEVPEVPEVPEVPEVPEVPEVPEVPEVPEVPEVPEVPEVPEVPEVPEVPEVPEVPEVPEVPEVPEVPEVPEVPEVPEVPEVPEVPEVPEVPEVPEVPEVPEVPEVPEVPEVPEVPEVPEVPEVPEVPEVPEVPEVPEVPDPEVPPSPPPPILGVLRVDPQP

SEQ ID NO: 8252 - protein, 476 aa, Ralstonia eutropha JMP134
MQQRDKLFINGKWVSPHGTGLIDVIHSTTEAVMGRIPEGSARDAEDAIQAARAAFDGWAATPPAERAGYIRKIAEGLKARTEELAQLIAGEVGMPIKLARAIQVGGPVYNWGQAAKLLEGFDFEEEVGNSLVVREPVGVVAAITPWNYPLNQITLKVAPALAAGCTVVLKPSEVAPLNAFVLAEVIAEAGLPPGVLNLVTGYGPVVGEVLASHPEVDMVSFTGSTRAGKRVSELASQSVKRVALELGGKSASVILDDADLPAAVKGTINACFLNSGQTCSAHTRMLVPRSRYDEVKAIAAKVVEGFTVGDPLQETTRLGPLISAVQKDRVMGYIRRGLEEGAELVAGGPDAPAGLEKGFFVKPTVLGNVEPRATVAQEEIFGPVLSIICYNTEEDAVRIANDSIYGLGGGVWAGDEARAVRVARRIRTGQVDINGGPFNMSAPFGGYKQSGNGREAGKYGLEEFLEYKSLQFKKPA

SEQ ID NO: 8253 - protein, 129 aa, Glycine max
  misc_feature (77)..(77): Xaa can be any naturally occurring amino acid
  misc_feature (100)..(100): Xaa can be any naturally occurring amino acid
  misc_feature (110)..(110): Xaa can be any naturally occurring amino acid
FLQLSFIARLPDVLKNLLESLQSVIDYAIQSGGFEFYFQGTYSVKCIQDRFLVKDFEKFNSPFRLGLEAGSKPELLXGMSCLLKSNPDALLICNGFKDAXYILLALAANXLALKTVIVEEQDEEGALIR

SEQ ID NO: 8254 - protein, 63 aa, Brassica napus
  misc_feature (53)..(53): Xaa can be any naturally occurring amino acid
CSGQEIYQQFSRRKKECSSRRHLDLASRGLCLMPISASYPVAAAAASAAEMNXHLTSGILHSR

SEQ ID NO: 8255 - protein, 213 aa, Glycine max
MALEVAVKAAVGAPNVLGDCPFSQRVLLTLEEKKIPYKLHLIDLSSKPEWFLGVNPEGKVPVVLFDGKWVADSDVIVGILEEKYPEPSLVTPPEFASVGSKIFGSFVSFLKSKDTNDGTEQTLVAELSALDEHLKAHGPYIAGEKVTAVDLSLAPKLYHLVVALSHFKNWNIPESLTHVHNYTKLLFSRESFEKTKPPKVEYVISGWAPKVNA

SEQ ID NO: 8256 - protein, 160 aa, Citrullus lanatus
IIAKGHYTERAAASLLRTIVQIVHTCHSMGVIHRDLKPENFLLLSKDEDSPLKATDFGLSVFYKQGEVFKDIVGSAYYIAPEVLKRRYGPEVDIWSVGVMLYILLCGVPPFWAESEHGIFNAILRGHIDFTSDPWPTISPAAKDLVRKMLNSDPKQRLTA

SEQ ID NO: 8257 - protein, 263 aa, Triticum aestivum
  misc_feature (28)..(28): Xaa can be any naturally occurring amino acid
  misc_feature (36)..(36): Xaa can be any naturally occurring amino acid
  misc_feature (73)..(73): Xaa can be any naturally occurring amino acid
NPEGWAATWRRVWPNPKVLQRVPFVPMXTEFPGMVXRPLGAFRSPAEYKYATLKGQGGLLHLIQLGSPFSGPXGEVPALGAGPRRCVWQFNFREFDDERDIFATDSIELLRHSGIDFRRNAERGVDARRFAELLMSSGVVLNDAVYWVTFHAGYDFGYLLKILTCNSLPDTQAGFFKLMKIYFPTVYDIKHLMKFCNSLHGGLNKLAELLDVERVGESHQAGSDSLVTSCAFWKLKDSFFAGSTEKYAGVLYGLNAENGVSAH

SEQ ID NO: 8258 - protein, 467 aa, Listeria monocytogenes str. 1/2a F6854
MTSVMWFRRDLRVSDNKALYHACKEDDLLLLFQVNPAQFITGSPSHQAFFASVAHFKQEVDKTALLQIMFGEPVECLKQLKETLPSWDKVYFNRDETGYGAERDEAAKTFFDEQEIEVQAFHDSYLHSAEEVKKSPTEYYKIFTPYYKKWREEIKETPFKVTLKADNIRKENLFPKYEEQFAEMTCDLPILDSGEKTANTRLANFIKHDVADYDKARDFPELDKTSHLSRYLRTGEISVRTIWQALQENEATEGRAIFEKELCWRDFYNMIYVSFPNQKNEPIQENYRFIEWENNREFFKAWQDGKTGFPLVDAAMRQLKETGWMHNRLRMVTASFLTKDLLIDWRFGEKYFQQMLIDYDPASNIGGWQWAASTGTDAVPYFRIFNPTTQSQKFDPTGKFIRKYVKELANLPDKYIHQPEKMSEIEQKEYGLLLGKDYPFPLIDHKERRKLAIARYEFSKEHYRGNI

SEQ ID NO: 8259 - protein, 459 aa, Schizosaccharomyces pombe
MTETVTTTSSDKSEKKNYLFYTSPNHRPPTVVRAEGVYLYLEDGTRIMDATGGAAVACLGHGNKEVIDAMHKQSEKVCYIHSMGFSNEPADKLANLLVSEHPDVFARAYFANSGSEAVETCLKLILQYWQLVGEKQRCHIIARKQGYHGNTLFALSVGGMKPRKQPYEGVFSHTTSHVSPCFEYRYKENGETTEEYVARLAKELEDEILRVGPEKVAAFVAETVSGACTGCATPVPGYFKAMRKVCDKYGVIFYLDEVMSGIGRTGTMHAWEQEGVTPDIQSIAKCLGGGYQPISGALVGHRIMNVFEQKDAAMAGFFTYQAHPIACSAALAVQTILRRDHLVERAAEMGKYLSEKLHETFDSHPNVGNIRGRGLFWGLEIVKDKATKECFPPEYKVGSLANKIGCEHGVFVYPGMGTIDGTRGDHVLLAPPYIITREQIDELVEALSKTITSTVAALP

SEQ ID NO: 8260 - protein, 343 aa, Listeria monocytogenes str. 4b F2365
MKAVVKTNPGYDQMELRDVEEPQVYGDKVKIKVAFTGICGSDIHTFKGEYKNPTTPVTLGHEFSGVVVEVGPDVTSIKVGDRVTSETTFETCGECIYCKERDYNLCSNRRGIGTQANGSFAEFVLSREESCHVLDERISLEAAALTEPLACCVHSALEKTTIRPDDTVLVFGPGPIGLLLAQVVKAQGATVIMAGITKDSDRLRLAKELGMDRIVDTLKEDLAEVVLGMTDGYGAERVFDCSGAVPAVNQGLPLTKKKGDFVQVGLFAEKKNAIDEESIIQREIAYIGSRSQKPSSWILALDLLANGKINTDKMITKVYGLDDWREAFEAVMAGNEIKVLVKS

SEQ ID NO: 8261 - protein, 350 aa, Listeria monocytogenes str. 4b F2365
MRAAVLYENNVIKAEQIDEATCGKDQVRVEVKAVGICGSDIHKMQTRWKYPLPAVMGHEFAGVVTEIGSEVTNVAIGDRVAGIPLEPCMECNYCKAGDFALCDNYRMVGSHFHGGFAENVVMKADNVISIGDLDFEEGAMIEPLAVSMHGVLGIQPRLGDTVIVFGIGTIGILVVQCLLLAGVKDIIAVDISDKKLADAREFGCKYTINPKNEDLKERVFAYTNGLGADIALECAGSKITQEQCLLVTKKKGKVGYLGIAYADVLLHEEAFENIFRRELTLKGFWNSYSAPFPGEEWRTSIEFVKQGRIKLKPLISHRYKLEETKEAFDMILSREHDYNKVMILPQKGDD

SEQ ID NO: 8262 - protein, 328 aa, Magnaporthe grisea 70-15
MAKTSIKLNSGYEMPLVGFGIWKVPVDKTAQAVYDAIKLGYRQIDGAYDYTNSKEAGEGVRRAIEEGIVKREDLFITSKLWNNYHKHEHAIEMAKHEVDTWGIGYLDLFLIHFPISLEYISHSKMPYPCFWPDREKSRSTPLQYTPVAETWAALESLVKTDSNPDGILRSIGVANFRAQLLTDLWGSAKIKPAVNQIEHHPYLVQPQLLAFLKDHGIAITAYSSFGPQSFVELDHPRVSKVEPLFTHPTIKAIADKHGRTGAQVLLRWATQRDIVVIPKSNNVDRLKQNLDCVSFDLSDDEVKQISDLDCGVRFNDPADLSPPIYIFD

SEQ ID NO: 8263 - protein, 205 aa, Triticum aestivum
  misc_feature (6)..(8): Xaa can be any naturally occurring amino acid
  misc_feature (83)..(83): Xaa can be any naturally occurring amino acid
IRHQIXXXHQTFHHQPQQTYPHQPQQQFPQTQQPQQPFPQPQQTFPQQPQLPFPQQPQQQFPQPQQIPQQQQIPQQPQQFPQXQIPQQRGPQQHQMPQQPQQFPQQQFPQQHQSPQQQFPQQQFPQQQQFPQQQQLTQQQFPRPQQSPEQQQFPQQQFPQQPPQQFPQQQFPIPYPPQQSQEPSPYQQYPQQQPSGSDVISISGL

SEQ ID NO: 8264 - protein, 1122 aa, Burkholderia cepacia R18194
MMIKVWPDETHPTGHAMCMKGKAAPELVHSPNRVLYPMRRTRPKGAADPGWKRIGWEEALSEIAERLAYFKRENGAESVAFGVTTPSGTPMSDSIDWVERFVWLFGSPNICYATEICNWHKDSAHVFTFGCGMPTADYQQADLIVLWGNNPANTWLAQADAIAKGRRRGAKLIVVDPRPTPLAREADLWLRVNPGTDGALAMAIARQMIAIGNVDEPFVRRWTNGPLLVRADTGRFLRERDIDPHASGNRYALWNQTLDRLELVEEEAGTALSDLSMTGTRHVGITDSAGRCTQVECTPAFDLYARALAAYTPELASTITGIDAADIMKAAQMLHPGQGIAYHAWSGVGMHTNATQTERAIATLYALTGAFDTRGSNREWAKQPANAVSSYAMLNPGQRAKALGLAERPLGPPSQGWVTARDVYRAILDAEPYRVRALFAFGTNMVLSQADGGIAHNALCALDFHVHCDLFETPSSRYADILLPVNTPWEREGLRLGFEINERAVELVQLRQRMVPPRGESRADYDIVFDLAVRLGMKDRFFGGSIEAGWNHVLEPLGMDVALLRTHPEGIARPLTQYERRYASATPDGVRGFNTETLRVELYSEKLHRHGYPAVPQYVPPQHGLGEGVNDRRRFPYTLTSMKNGYYCHSQHRGLPSLRRRAPYPVAELNDALAAEHGIVDDDWFLVETTNGSARFKARIVPELAHDVIVAEYGWWQACDEIGMDALAVEGRNHSNFNRLVSAARLDPVSGSSPLRSVRCRIRPDPSTDPSRRAWKGRRDFVVSAIHEEASGVRTVTFRASDRGALPDYLPGQHVTVHVPALGDGGTTRAYSLTGAASEDDRRTYSISVRHQKGRTGEGVPFEGAMSSYIHGSLKVGDPVLLGAPAGTFIVPPASKQPVVMFAGGIGITPFISYLESIRDRGAQAPESRLFYANQNSGTHAFRERIERLKQRLPKLEVVNCYNQPHDEVLGRDYQIRGYLTADVVSDDLIQRRARFYLCGPEPMMQAITAGLIERGVPPFDIFKEAFRSPSRPALDPSKRFVVQFTRSRRVSTWTPRDGSLLSFAESLGVVMPSGCRVGQCESCAVKVVSGEVAHLSGHGPDEPDVCLACQAIPATDVAIDA

SEQ ID NO: 8265 - protein, 424 aa, Hordeum vulgare
MVVTVAATGPDTAETLHSTTFASRYVRDQLPRYRMPENSIPKEAAYQIISDELMLDGNPRLNLASFVTTWMEPECGKLIMDSVNKNYVDMDEYPVTTELQVCWEKFARYFEVELKEVKLTEGYYVMDPKKAVEMVDENTICVAAILGSTLTGEYEDVKLLNDLLVEKNKETGWNVPIHVDAASGGFIAPFLQPELEWDFRLPLVKSINVSGHKYGLVYPGVGWVIWRSKDDLPEELIFHINYLGADQPTFTLNFSKGASQIIAQYYQLIRLGFEGYKHIMENCKLNAAVLKEGIDATGRFDVLSKADGVPLVAIRLKDSTNFSVFDISENLRRFGWIVPAYTMPADAEHVAVLRIVIREDFNRSLAQRLLADINKIIGELDAHAVHAIKLSTAAAGGDGASKSAVDAATEAFKDLAGKKKAGVC

SEQ ID NO: 8266 - protein, 318 aa, Zea mays
  misc_feature (27)..(27): Xaa can be any naturally occurring amino acid
MLHGRELGPVHGGSRARIRLEPAPRRXRWVPLAYTDVATFTKDQEFLISNRASQVGFDYVEGQVQLSRSLVEGPKSTPFFSGADVARLAGLASRTGPAAIYYIEGAMYYTKDTAISVDKKMKALLDQLSFEPGFAFTKDVTFVQFLDRVREEERVLRSAGAWEVPHPWLNLFVPRSRILDFDDGVFKALLKDSNPAGIILMYPMNKDRWDDRMTAMTPATNDDDVFYAVSFLWSALSADDVPQLERWNKAVLDFCDRSGIECKQYLPHYTSQDGWRRHFGAKWSRIAELKARYDPRALLSPGQRIFPVPVEASGIASA

SEQ ID NO: 8267 - protein, 439 aa, Escherichia coli CFT073
  misc_feature (394)..(394): Xaa can be any naturally occurring amino acid
MEHLHMKTRTQQIEELQKEWTQPRWEGITRPYSAEDVVKLRGSVNPECTLAQLGAAKMWRLLHGESKKGYINSLGALTGGQALQQAKAGIEAVYLSGWQVAADANLAASMYPDQSLYPANSVPAVVERINNTFRRADQIQWSAGIEPGDPRYVDYFLPIVADAEAGFGGVLNAFELMKAMIEAGAAAVHFEDQLASVKKCGHMGGKVLVPTQEAIQKLVAARLAADVTGVPTLLVARTDADAADLITSDCDPYDSEFITGERTSEGFFRTHAGIEQAISRGLAYAPYADLVWCETSTPDLELARRFAQAIHAKYPGKLLAYNCSPSFNWQKNLDDKTIASFQQQLSDMGYKFQFITLAGIHSMWFNMFDLANAYAQGEGMKHYVEKVQQPEFAXAKDGYTFVSHQQEVGTGYFDKVTTIIQGGTSSVTALTGSTEESQF

SEQ ID NO: 8268 - protein, 195 aa, Methanocaldococcus jannaschii DSM 2661
MATGPTYRVKFRRRREAKTDYRKRLKLLLSRKPRLVARRTLNHCIAQIVLYDEKGDKTVVSAHSRELIKLGYKGHTGNLPSAYLTGYLLGKKALAKGYTEAVLDIGLHRATKGNAIFAILKGALDAGMEIPHGEEILPSEERIRGEHIKAYAEMLKEQDEERYKKQFSKYLEKGLEPEKLPEHFEEIKAKIDSMF

SEQ ID NO: 8269 - protein, 135 aa, Triticum aestivum
  misc_feature (98)..(98): Xaa can be any naturally occurring amino acid
  misc_feature (112)..(112): Xaa can be any naturally occurring amino acid
MRDDPEDVDSRSIFVGNVDYSSSPEEIQAHFQSCGSINRVTILLDKFTGHPKGYAYVEFTEPSFVAQALVLNESVFKGRNLKVVPKRTNIPGMTRGKXRGGPRGRGYGGRGXTHQEESGYRGGFRGSRGRGYSPY

SEQ ID NO: 8270 - protein, 409 aa, Vibrio vulnificus CMCP6
MELTTTVSELRYALDTFFFLISGALVMWMAAGFAMLEAGLVRSKNTTEILTKNFCLYAIACTTYLVVGYNIMYVDNSEGGWLPSIGALIGSQAEGADHSLESDFFFQVVFVATAMSVVSGAVAERMKLWSFLLFSAILTAFIYPVEGYWTWGGGFLSAAGFSDFAGSGIVHMAGAAAALAGVLLLGARKGKYGKNGEVYPIPGSNMPLATLGTFILWFGWFGFNGGSQLMVSDFENATAVGQIFLNTNAAAAAGAITALLVCKTTWGKADLTMILNGALAGLVAITADPLSPSPLYAVAIGAVAGALVVFSIVGLDKLKIDDPVGAISVHGVCGFFGLMVVPISNGDASFLSQLFGAAVIFAWVFGASLAVWAVLKATIGIRVSEDEEMEGMDMHDCGVGAYPEFVTVK

SEQ ID NO: 8271 - protein, 348 aa, Deinococcus radiodurans
MRALSKQQPGEGIWMIETEVPTPGPNDLLIRIRKGSICGTDVHIYKWDDWASQTVPVPMVVGHEYVGVVAGMGSEVRGFEIGDRVSGEGHVTCGHCRNCRAGRRHLCRNTQGVGVNRPGSFAEYLVLPAFNAFKLPDDIPDDVAAIFDPFGNAVHTALSFDLVGEDVLITGAGPIGCMAAAVARHVGARNVVITDVNDYRLDLARQMGVTRAVNVAREDLWTVATQELDMHEGFDVGMEMSGSGPAFAQMVSVMNNGGKVALLGIPSGEVQIDWNAVIFKMLTIKGIYGREMFETWYKMAALIQSGLDLTPVITHHYGIGDFQQGFDAMLSGQSGKVILDWETEEQSA

SEQ ID NO: 8272 - protein, 235 aa, Solanum tuberosum
MAREKIKIKKIDNITARQVTFSKRRRGLFKKAEELSVLCDADVALIIFSATGKLFDFASTSMKDILGKYKLQSASLEKVDEPSLDLQLENSLNMRLSKQVADKTRELRQMRGEELEGLSLEELQQIEKRLEAGFNRVLEIKGTRIMDEITNLQRKGAELMEENKQLKHKMEIMKKGKFPLLTDMVMEEGQSSESIITTNNPDQDDSSNASLKLGGTTAVEDECSITSLKLGLPFS

SEQ ID NO: 8273 - protein, 127 aa, Desulfovibrio desulfuricans G20
MSDITKEQVVEFIAGMTVLELSEFIKELEEKFGVSAAAPVAAMAAAPAEAAAPAEEEKTEFDVILKSPGANKIAVIKVVRALTGLGLKEAKEKVDGTPSTLKEAVSKDDAEEAAKQLKEAGAEVEVK

SEQ ID NO: 8274 - protein, 352 aa, Sinorhizobium meliloti 1021
MSGAPTRTRFARLYGPRDLRLEVADVPAPGDGEVLLKMAAGGICGSDLHYYQDGGFGPVRVREPIIPGHEASGRVAVLGAGVSGLAIDDLVAVNPSQPCGTCRFCGEGLPVHCLDMRFLGSAMRLPHTQGMFRDWLVVPAVQCHPAGSQVSPGEAACAEPLAVCLHAAAQAGEIRGKKVLVTGAGPIGALVVAAARHAGADEIVVTDLADAALDRAKAMGATRIVNVHRDPAGLAAYEADKGKFHVAFECSAAEPALRGAVAAVRPRGTIVQVGVTGEITLPLHALVGKELRLVGSQRFDGEFALAVALISDRRIDVRPIISHQFPVDEAVRAFEQAGDRSAACKVQLTFLS

SEQ ID NO: 8275 - protein, 295 aa, Zea mays
MAGLSLQHPWAFTFGLLGNVISFMTFLAPTPTFYRIYKSKSTEGFQSVPYVVALFSAMLWIFYALIKSNETFLITINAAGCVIETVYVVMYFVYATKKGRMFTAKIMLLLNVGAFGAILLLTLLLFKGDKRVVMLGWICVGFSVSVFVAPLSIMRRVIQTKSVEYMPFSLSLSLTLSAVVWFLYGLLIKDKYVALPNILGFTFGVVQMVLYVVYMNKTPLPVADGKAAGKLPSAADEHVVVNVTKLSPGRLPPVTQMAAVPTKSCATEAAAPATLPSRDVVDVLVNRHSPAVHVT

SEQ ID NO: 8276 - protein, 184 aa, Pseudomonas aeruginosa PAO1
MKPRVLLSVLALAGLPLSGWAADCPELLQGQLTKLRSKESIDLCQRYAGKPLVVVNTASHCGFTPQFKGLEALYQRYKGQGLEVLGVPSDDFKQEAADTAETAKICYGNYGVTFAMTQPQHVRGDEAIPLFRQLAEQSGQAPRWNFYKYVVDRQGRVVAQFSSKTTPDDPQLQAAIEKAIASQP

SEQ ID NO: 8277 - protein, 107 aa, Zea mays
RTRGFFLSYFSLYFPHHLFLGLSLLLSLHFFFFLLLFFFLSLKSIPSNLFTKHSFHFHYTPHHKNKLSLTSSQILSTVTNLKAITMLYCLQLLHSHIGSHIPTTSLL

SEQ ID NO: 8278 - protein, 119 aa, Bartonella sp. Bb6966bgl
GPAHGGANEACLKMLQEIGSIKRIPEFIARAKDKNDPFRLMGFGHRVYKNYDPRAKIMQKTCHEVLKELNIQDDPLLDIAIELEKIALSDEYFIEKKLYPNVDFYSGITLKALGFPTEM

SEQ ID NO: 8279 - protein, 113 aa, Bartonella sp. Bb7700bgl
GPAHGGANEACLKMLQEIGSIKRIPEFIARAKDKNDPFRLMGFGHRVYKNYDPRAKIMQKTCHEVLKELNIQDDPLLDIAIELEKIALSDEYFIEKKLYPNVDFYSGITLKAL

SEQ ID NO: 8280 - protein, 433 aa, Methylococcus capsulatus str. Bath
MPLIFGVCCLVVAAAHMVPAARAAAGEFFNGLLGKRMTKSADVLFVLLGAIMVLAMHAGFAFLEVGTVRRKNQVNALVKILSDFAMSTIAYFFIGYELAYGVDFFDSALALTVDNGYGLVKFFFLLTFAAAIPAIVSGGIAERSKFNPQLAATFLLVGFVYPLFEGIAWNSNLGFQGWLQTRFGAQFHDFAGSVVVHAVGGWIGLAAVLLLGPRRGRYHRDGMIAAHPPSSIPFLALGAWILTVGWFGFNVMSAQNLNGISGLVAVNSLMAMVGGTLAALLAGRNDPGFVHNGPLAGLVAVCAGSDLMHPIGALAVGAVAGFLFVYLFTLTQNRWKIDDVLGVWPLHGLCGAWGGIAAGIFGQSALGGIGGISFMAQVLGTGLGVAIALAGGLAVYGAAKTLIGLRLTPEEEFDGADLTLHRISSSPEKEAGW

SEQ ID NO: 8281 - protein, 110 aa, Bartonella sp. Rr7684bgl
GGPAHGGANEACLKMLQEIGSVKRIPEFIARAKDKNDPFRLMGFGHRVYKNYDPRAKIMQQTCHEVLKELNIQDDPLLDIAIELEKIALNDEYFVEKKLYPNVDFYSGIT

SEQ ID NO: 8282 - protein, 471 aa, Blumeria graminis
MPTFGFLKKRKKVSLGHRDLDSPASTLSQPASPITPSTSRGLGEPIDTTSSKITSPGQKLGSNITKDHRGTRTTVEDLPSMTDVSHLQQAYRNLSQGSTASKSNLLTIHNLINPPQHDGAGQSKVMPEKHMNNKTERPVQGKAAVAQVRQTKGKYSLSDFEILRTLGTGSFGRVHLVQSKHNQRFYAVKVLKKQQVVKMKQVEHTNDERSMLQEVKHPFLITLWGTFQDSKNLYMVMDFVEGGELFSLLRKSQRFPNPVAKFYAAEVTLALEYLHKKDIIYRDLKPENLLLDRHGHLKITDFGFAKKVTDITWTLCGTPDYLAPEVVSSKGYNKSVDWWSLGILIFEMLCGYTPFWDNGSPMKIYENILKGRVKYPPYIHPDAQDLIQRLITADLTKRLGNLHGGAEGIKSHQWFAEVTWERLAKKDIDAPYVPPVKAGSGDASQFDKYPEETERYGQTGPDEHGSLFENF

SEQ ID NO: 8283 - protein, 252 aa, Prunus microcarpa
AHYKSEADVGNAIAEAIQSGLVKREELFITSKASNHGHVVEACKNSLKKLQLDYLDLYLVHYPLATKHSGVGTTASLLDENKVLDIDVTVSLETTWHDMEKTVDLGLVRSIGLSNYELFLTRDCLSYAKIKPQVSQFETHPYFQRESLVRFCKKHGVIPMAHTPLGGATANVKAFGSISPLEDPVLIGLAKKYQKSVAQIALRWNLERGTPVIPKSSKVERLKENLEVLNFKLEKEDIELINTIDKKSRTTL

SEQ ID NO: 8284 - protein, 183 aa, Pseudomonas syringae pv. tomato str. DC3000
MKIRFVSIPLLLLSMSGAVMAADCPPLLQGELPKLRAKENIDLCKRFAGKPLVVVNTASFCGFAPQFKGLEELSQRYKGQGLEVLGLPSNDFKQEAKDGEETAKVCYVNYGVTFTMTEPQAVRGDDATHLFKVLAEQSSAPRWNFYKYVVDRQGKVVANFSSMTKPDDPELIAAIEKAIASKP

SEQ ID NO: 8285 - protein, 252 aa, Prunus lusitanica
AHYRSEADVGNALAEAFETGLVKREELFITSKASNHGHVVEACKNSLKKLQLDYLDLYLVHYPLATKHSGVGTTASLLDENKVLDIDVTVSLESTWHDMEKTVSLGLVRSIGLSNYELFLTRDCLSYAKIKPQVSQFETHPYFQRETLVRFCRKHGVCPMAHTPLGGATANVKAFGSISPLEDPVLRALAKKYKKSVAQIALRWNLDRNTPVIPKSSKIERLKENLEVLNFKLEKEDIELINTIDKKSRTTL

SEQ ID NO: 8286 - protein, 199 aa, Colletotrichum trifolii
MAQPGVQSLKCVVTGDGAVGKTCLLISYTTNAFPGEYIPTVFDNYSASVMVDGKPISLGLWDTAGQEDYDRLRPLSYPQTDVFLICFSIVSPPSFDNVKAKWYPEIDHHAPNIPIILVGTKLDLREDPNTLESLRQKRMEPVSYDQALICAKEIKAHKYLECSALTQRNLKSVFDEAIRAVLNPRPVAQQKKKSKCTIL

SEQ ID NO: 8287 - protein, 252 aa, Prunus virginiana
AHYKSEADVGNALAEAFDTGLVKREELFITSKASNHGHVVEACRNSLKKLQLDYLDLYLVHYPLATKHSGVGTTASLLDENKVLDIDVTVSLESTWHDMEKTVSLGLVRSIGLSNYELFLTRDCLSYAKIKPQVSQFETHPYFQRETLVRFCRKHGVCPMAHTPLGGSTANVKSFGSISPLEDPVLHGLAKKYKKSVAQIALRWNLDRNTPVIPKSSKIERLKENLEVLNFKLEKGDIELINTIDKKSRTTL

SEQ ID NO: 8288 - protein, 57 aa, Zea mays
MPFTASDICKILLAIILPPVGVFLERGCGADFLINILLTILGYIPGIIHALYIIFKF

SEQ ID NO: 8289 - protein, 295 aa, Onion yellows phytoplasma OY-M
MKAFNWFPGHMKKTFDQIKNNLSLVDIVLVILDARIPLSSLNSQIFSLINQRQKPLLILLNKFSLTDPCKINNFIANYHKKQIPVLTIDAIKSPKLQEIYQKALTTIKAKNPLFKSRRIATQTPNIKAMIVGTPNVGKSTLINSFAQKKVLKTANLAGTTKRIQWIDIAKPNIQFLDTPGVLWHNFSDPRISLALALAGCFKDSILPLEKLGIHALCYLIKHYGTNLQKRFNLDQNDLSNPNLVDIIGQKRNIYTKNQKVDQSRVYQMLLQEIRQGNLGKLNFDLDVLSLFEKLF

SEQ ID NO: 8290 - protein, 275 aa, Gibberella moniliformis
MLEDPAHQDVARWGKDGDTFVVVENEKFTRSILPKHFKHSNMASFVRQLNKYDFHKVRQTNDSGSAANGANTLEFKHPNFRVGSKDDLDNIRRKAPAPRRTQATEDFTTSHHISVMTEQLTATQQQVQQLQELFTEVSQTNRLLVNEVLTLQKMLNAQKQSQHEMLNYLSPSNNRHQQSMHLNVGTSPLDGSDDSAPELRRARELLSSVTPDQIADRELERLQGVYGSPADSAVVIPQASMPMMHDPMNDINRYPVYPVGQTVGIDPFHSDHIHK

SEQ ID NO: 8291 - protein, 458 aa, Streptococcus mutans UA159
MAYKTTYPYTNEVLKEFANNSDADLEKALVTGHALYKKWRAEGGLEERKAQLHKVADILRRDVDKYAEVMTKDMGKLFTEAKGEVELCAEIADYFADKAEEFLEPKAFEPIHGDAYYIKQAVGVLFMVEPWNFPFYQIMRVFAPNFMIGNPTVLKHASICPASAQAFENLVKEAGAPEGSFKNLFLTYDQVNKAIADPRIQGVALTGSERGGASIAAEAGANLKKSALELGGNDAFLILEDADFELLKDTIFFARLYNAGQVCTSSKRFIVVGEENYKKFLDMVVETFKTAKWGDPMDPETTLAPLSSAEAKEEVLGQIKLAADNGARVVYGNKPIDHPGNFVFPTVLTDITKENPIYNQEIFGPVASIYKVDTEEEAIALANDSSYGLGGTVFSKDLEHAKAVAAKIETGMTFINSGWSSYPEVPFGGIKNSGYGRELSNLGFDAFVNEHLVFIPKQ

SEQ ID NO: 8292 - protein, 539 aa, Glycine max
MASSLRISRLLSRSFLSASTTTPLFSRGGSGALGAGLSKFSTAAAIEEPIKPPLKVEHTQLLIDGKFVDAATGKTFPTLDPRTGDVISHVAEGDHEDVDRAVAAARKAFDRGPWPKMTAYERQRILLRAADLFEKHNDELAALETWDNGKPYEQSAQIEIPMLVRLFRYYAGWADKIHGLTVPADGPYHVQTLHEPIGVAGQIIPWNFPLVMFAWKVGPALACGNTIVLKTAEQTPLSALYASKLFHEAGLPAGVLNVISGFGPTAGAAIASHMDIDKLAFTGSTETGKIVLELAARSNLKPVTLELGGKSPFIVCEDADVDEAVELAHFALFFNQGQCCCAGSRTFVHERVYDEFIEKAKARALKRAVGDPFKGGIEQGPQIDSEQFQKILKYIRSGVESGATLETGGDRFGNSGFYIQPTVFSNVKDDMLIAKEEIFGPVQSILKFKDLDDVIQRANNTHYGLAAGVFTKNINTANTLTRALRAGTVWVNCFDTFDAAIPFGGYKMSGQGREKGEYSLKNYLQVKAVVTSLKNPAWL

SEQ ID NO: 8293 - protein, 187 aa, Zea mays
SARGLSIALVYPPPTGLRQSAMAAASSVHGFTVKDASGEDVHLSTFKGKVLLIVNVASQCGLTNSNYTELAQLHEMYKDQDFEILAFPCNQFGGQEPGTSEEIVQLVCARFKAKYPILHKVDVNGEDAAPIYKFLKSSKTGPMGEDIKWNFAKFLVDRQGHVAERYAPTTYPLSIQKDIKKLLGGSY

SEQ ID NO: 8294 - protein, 332 aa, Onion yellows phytoplasma OY-M
MKNENQKAKTKTKENKKIAVLTSGGDAPGMNAAIRALVFESAKQGFEVFGVKDGYLGLFNNQIEILNPQTFPRVLNVSGTFLGTSRFLDFQNNLDVRKQCAQNLKTLGIDKLVVIGGDGSYKGASKLHELGIKCVGLPATIDNDICATDFTIGFSTALNNIVDAIEKLRDTSVSHNRCSIIEVMGRHKGDLALFGGLAAGADVIVTRENLLSQKTICQKIKSLRQANQRHAIVVVTEHIFDVASLAKEVENYSGFETRAQVLGHIQRGGKPTAEDLVLAFRMGSYAVSLLQQNIFNCAVGTCGLNLHYTTFGDLFEKTYEKNELFNVVAKLL

SEQ ID NO: 8295 - protein, 363 aa, Neurospora crassa
MASSASKTNIGVFTNPQHDLWISEASPSLESVQKGEELKEGEVTVAVRSTGICGSDVHFWKHGCIGPMIVECDHVLGHESAGEVIAVHPSVKSIKVGDRVAIEPQVICNACEPCLTGRYNGCERVDFLSTPPVPGLLRRYVNHPAVWCHKIGNMSYENGAMLEPLSVALAGLQRAGVRLGDPVLICGAGPIGLITMLCAKAAGACPLVITDIDEGRLKFAKEICPEVVTHKVERLSAEESAKKIVESFGGIEPAVALECTGVESSIAAAIWAVKFGGKVFVIGVGKNEIQIPFMRASVREVDLQFQYRYCNTWPRAIRLVENGLVDLTRLVTHRFPLEDALKAFETASDPKTGAIKVQIQSLE

SEQ ID NO: 8296 - protein, 112 aa, Arabidopsis thaliana
MADTPSSPAGDGGESGGSVREQDRYLPIANISRIMKKALPPNGKIGKDAKDTVQECVSEFISFITSEASDKCQKEKRKTVNGDDLLWAMATLGFEDYLEPLKIYLARYREVW

SEQ ID NO: 8297 - protein, 322 aa, Arthrobacter nicotinovorans
MPVIPALQTLLDSLPATGLGDLTDLPAVRQAGLEGANALAALVAQEPLDVGSVHTAMVPVNGGEIKVRIYQPGTPGPHPIHVFYHGGGWMAGTIEETFVDNVCRERTALAGYVTVAVEYRLAPEFKFPIPLEDSYAALEWVVEHAADYDGDPENVTIGGGSAGGNLSAAIALKARNENGPHITFQVLEVPALDLTLASPSVEQYSGGEYPLPKAEIDLCVEGYLRSPEDARNPYASPLLADDVSGLPPALIISSEFDPLQMDGSRYAQRLQEVGVHAAFRLGEGHVHGSSQFTKLLPEAAAWRDQVIDALKTHAADHRRVTP

SEQ ID NO: 8298 - protein, 292 aa, Aeropyrum pernix K1
MECYRDIHGFMAGHLAEAVEVLREGLEASSVRVLTFTGNLVATGLRGVLAQLIDGGLFNVVFTTAGALDHDIARFMGGKYLKGRFEADDTELHRRGVHRLGNVFIPVESYGPLVERFVRTLAEQAAGVRGEWGVYELLRLAGSLMEGDRDSILAAAARRGVDVFVPGWPDGAFGTSLFMERQRGTSITVDYFRDMARLADIFFPQEGEAAALIVGGGISKHHAIWWSQFRGGLDYAVYVTTAVEYDGSLSGAHPREAVSWGKIKESSRRVVVYGDATITLPVIAYCLLHGCG

SEQ ID NO: 8299 - protein, 510 aa, Eustoma grandiflorum
MAVGNGVLLHIARSLMLFFHVQKLVQYLWMNSRRHRLPPGPIGWPVLGALPLLGTMPHVALANMAKKYGPVMYLKVGSCGLAVASTPEAAKAFLKTLDMNFSNRPPNAGATHLAYNAQDMVFADYGPRWKLLRKLSNIHILGGKALQGWEEVRKKELGYMLYAMAESGRHGQPVVVSEMLTYAMANMLGQVMLSKRVFGSQGSESNEFKDMVVELMTVAGYFNIGDFIPSIAWMDLQGIQGGMKRLHKKFDALLTRLLEEHTASAHERKGSPDFLDFVVANRDNSEGERLHTVNIKALLLNMFTAGTDTSSSVIEWALAELLKNPIILKRAQEEMDGVIGRDRRFLEADISKLPYLQAICKEAFRKHPSTPLNLPRIASQACEVNGHYIPKGTRLSVNIWAIGRDPSLWENPNEFNPDRFLERKNAKIDPRGNDFELIPFGAGRRICAGTRLGILLVEYILGTLVHSFDWELPSSVIELNMDEPFGLALQKAVPLAAMVTPRLPLHIYCP

SEQ ID NO: 8300 - protein, 436 aa, Streptococcus pneumoniae
MFASKNERKVHYSIRKFSIGVASVAVASLFMGSVVHATEKEVTTQVATSSNKANKSQTEHMKAAKQVDEYIEKMLSEIQLDRRKHTQNVGLLTKLGAIKTEYLRGLSVSKEKSTAELPSEIKEKLTAAFEQFKKDTLKSGKKVAEAQKKAKDQKEAKQEIEALIVKHKGREIDLDRKKAKAAVTEHLKKLLNDIEKNLKKEQHTHTVELIKNLKDIEKTYLHKLDESTQKAQLQKLIAESQSKLDEAFSKFKNGLSSSSNSGSSTKPETPQPETPKPEVKPELETPKPEVKPELETPKPEVKPELETPKPEVKPELETPKPEVKPELETPKPEVKPELETPKPEVKPELETPKPEVKPDNSKPQADDKKPSTPNNLSKDKQSSNQASTNENKKQGPATNKPKKSLPSTGSISNLALEIAGLLTLAGATILAKKRMK

SEQ ID NO: 8301 - protein, 340 aa, Burkholderia cepacia R18194
MENAAKQVLDTLFGRWRSRILYAGTRLGVFDAVTTDTPASSAALAAKLDVDEPLLYRLLRALASLGLLDEDTRRGFRATASGALLHADAPSTLRDFVLLQEGPEHYAIWAHLPDMVREGQQNGFVREFGAMAFDYAKDHERYRTDFKRAMSSFSTVQSEQVVDALRDVTFAPGTHACDIGGGQGHMLCSVLRRFQSLTGVVFDLPEVIDGDADDWAQRMGVSARCSKAGGNMFDAVPAADVYLLKLILHDWNDDECVAILKRARESARDGARVFVIERVVPAPGVAHFSKLYDIHMMCWGSGRERTRDEYDALLVAAGWRPAGVRPAPDGQIDVIEAVAA

SEQ ID NO: 8302 - protein, 442 aa, Synechocystis sp. PCC 6803
MKPKNFPLARYVLGAMLAFLFVGVAQAQTETTSIAEVTYAINNLFLLAAAVLVLFMQAGFAMLEAGLSSHKNTVNVLFKNTFDVCVGVLLYFLFGYSLMYGENPVLGGFFGWGGFGITNNLDNVEGLSPQVDWLFQAAFAATAATIVSGAVMGRMYFKAYLIYSAVITGLVYPISGHWKWGGGWLDKLGFHDFAGSLLVHSVGGFAALAAVVVMGPRIGRFEGNKINSLGYQGITSSSLGVFILWVGWYGFNPGSQLAFVGALNTNTTMLIAVNTTLSAAAGGLAALAFDWITENKRKPNLLVTLNGILGGLVGITAGCDTVSNWSAIAIGVVAGILSVLGTKLLDRLRIDDGVGAWPVHGLCGIWGGIAVGIFSTNVEHKLSAQIVGSLVIPFWAFITMFFLFYVMDLWGILRVKPSQEKVGLDIVEHGQTEKGVEIAFED

SEQ ID NO: 8303 - protein, 366 aa, Triticum aestivum
MKTLLILTILAMAITISTANMQVDPSGQVQWPQQQLVPQPQQPLSQQPQQAFPQPQQTFPHQPQQQVPQPQQPQQPFLQPQQAFPQQPQQPFPQTQQPQQPFPQQPQQPFPQTQQPQQPFPQQPQQPFPQQSQQPFPQTQQPQQPFPQQPQQPFPQTQQPQQPFPQFQQPHQPFPQPQQQFPQPQQPQQSFPQQQRPFIQPSLQQRLNPCKNILLQQCKPASLVSSLWSIIWPQSDCQVMQQQCCQELAQIPQQLQCAAIHSVVHSIIVQQQQQQQQHHPQPRPFQHTQGTHILLPLSQQQQLGQGTLVQGQGIIQPQQLAQLEAIRSLVLQTLPTMCNVYVPPECSIIRAPFASIRASSGHHLPA

SEQ ID NO: 8304 - protein, 121 aa, Bartonella sp. Rr7703bgl
GPAHGGANEACLKMLQEIGSVKRIPEFIARAKDKNDPFRLMGFGHRVYKNYDPRAKIMQQTCHEVLKELNIQDDPLLDIAIELEKIALNDEYFVEKKLYPNVDFYSGITFKALGFPTEMFT

SEQ ID NO: 8305 - protein, 177 aa, Synechocystis sp. PCC 6803
MQQRGVTIWLTGLSGAGKTTITHALEKKLRDSGYRLEVLDGDVVRTNLTKGLGFSKEDRDTNIRRIGFVSHLLTRNGVIVLVSAISPYAAIRQEVKHTIGDFLEVFVNAPLAVCEERDVKGLYAKARSGEIKGFTGIDDPYEPPTNPDVECRTDLEELDESVGKIWQKLVDLKYIEG

SEQ ID NO: 8306 - protein, 125 aa, Bartonella sp. Rr7624bgl
GPAHGGANEACLKMLQEIGSIQRIPEFIARAKDKNDPFRLMGFGHRVYKNYDPRAKILQKTCHEVLKELNIQDDPLLDIAVELEKIALSDEYFIEKKLYPNVDFYSGITLKALGFPTEMFTVLFA

SEQ ID NO: 8307 - protein, 364 aa, Nicotiana tabacum
MGSTSESQSNSLTHTEDEAFLFAMQLCSASVLPMVLKSAVELDLLELMAKAGPGAAISPSELAAQLSTQNPEAPVMLDRMLRLLASYSVLNCTLRTLPDSSVERLYSLAPVCKYLTKNADGVSVAPLLLMNQDKVLMESWYHLKDAVLDGGIPFNKAYGMTAFEYHGTDPRFNKVFNRGMSDHSTMSMKKILEDYKGFEGLNSIVDVGGGTGATVNMIVSKYPSIKGINFDLPHVIGDAPTYPGVEHVGGDMFASVPKADAIFMKWICHDWSDEHCLKFLKNCYEALPANGKVIIAECILPEAPDTSLATKNTVHVDIVMLAHNPGGKERTEKEFEALAKGAGFTGFARLVALTTLGSWNSTSN

SEQ ID NO: 8308 - protein, 110 aa, Bartonella sp. Pm6740co
GPAHGGANEACLKMLQEIGSVKRIPEFIARAKDKNDPFRLMGFGHRVYKNYDPRAKIMQKTCHEVLKELNIQDDPLLDIAIELEKIALNDEYFVEKKLYPNVDFYSGITP

SEQ ID NO: 8309 - protein, 343 aa, Chrysosplenium americanum
MLFAMQLASASVLPMVLKSAIELDLLEIIRGQDTCMSPTEIASHLPTTNPDAPAMVDRILRLLSCYSVVTCSVRSVDDQRVYGLAPVCKYLTKNQDGVSIAALCLMNQDKVLMESWYHLKDAVLDGGIPFNKAYGMSSFEYHGTDPRFNKVFNRGMSDHSTITMKKVFQAYQGFQGLTSLVDVGGGTGATLTMILSKYPTIRCINFDLPHVIEDAPEYPGIEHVGGDMFVSVPKGDAIFMKWICHDWSDEHCLKLLKNCYDALPNNGKVILAECILPEVPDSSLATKGVVHIDVITVAHNPGGKERTEKEFEALAKAAGFQGFQVFCNAFNTYIIEFSKQICN

SEQ ID NO: 8310 - protein, 159 aa, Streptococcus pyogenes SSI-1
MPNLYDFTVKAQDGSDISLVNYKEKVVLVVNTATKCGLTPQYQALQALYDTYHDKGFEVLDFPCNQFLNQTPGEAEEINRFCSLTYHTTFPRFAKIKVNGKDADPLFTWLKEEKSGPLGKRIEWNFTKFLIDQNGQVIKRYSSKTDPKLIEEDLKALLG

SEQ ID NO: 8311 - protein, 328 aa, Methanosarcina acetivorans C2A
MLDSGMLTRNAYRVKLPLSLEKKLLHRKYCRQADFEVSGKALKPLRTFFQGIYRGGSVTSANNHEKAKMKEELGLLLPKINDLLESEPAVLRIDPEPAESIMLIGDIHGDLDALDFVMGMREELGCKQMLFLGDYVDRGMQGTEVLVKLFRLKLEEPQNIFLLRGNHETVDMNLYYGFFEEIGFDRGFLLNISRTYDRLPVAAVISGQIFCVHGGINGIESIDTITKEGAFPYLWNDPSKHPGMSSSLRGSTVKEFGPDIVDGFLETNGLKRIVRGHTALRTGYEWWFDGKLLSLFSCPDYVGLGNAAAFAVIEKGEIKIITFKNRNR

SEQ ID NO: 8312 - protein, 119 aa, Bartonella sp. OH_CU1214
GPAHGGANEACLKMLQEIGSVKRIPEFIARAKDKNDPFRLMGFGHRVYKNYDPRAKIMQQTCHEVLKELNIQDDPLLDIAIELENIALNDEYFVEKRLYPNVDFYSGITLKALGFPTEM

SEQ ID NO: 8313 - protein, 252 aa, Prunus emarginata
AHYKSEADVGNALAEAFETGLVKREELFITSKASNHGHVVEACKNSLKKLRLDYLDLYLVHYPLATKHSGVGTTASLLDENKVLDIDVTVSLETTWHTMEKTVYLGLVRSIGLSNYEFFLTRDCLSYAKIKPQVSQFETHPYFQRESLVRFCKKHGVTPMAHTPLGGATANVKAFGSISPLEDPVLLGLAKKYKKSVAQIALRWNIERDTAVIPKSSKVERLKENLEVLNFKLEKEDIELINTIDKKSRTTL

SEQ ID NO: 8314 - protein, 252 aa, Prunus emarginata
AHYKSEADVGNAIAEAIQRGLVKREELFITSNASNHGHVVEACKNSLKKLRLDYLDLYLVHYPFATKHSGVGTTASLLDENKVLDIDVTVSLETTWHTMETTVYLGLVRSIGLSNYEFFLTRDCLSYAKIKPQVSQFETHPYFQRESLVRFCKKHGVTPMARTPLGGATANVKAFGSISPLEDPVLLGLAKKYKKSVAQIALRWNIERDTAVIPKSSKVERLKENLEVLNFKLEKEDIELINTIDKKSRTTL

SEQ ID NO: 8315 - protein, 466 aa, Shigella flexneri 2a str. 301
MDKKQVTDLRSELLDSRFGAKSISTIAESKRFPLHEMRDDVAFQIINDELYLDGNARQNLATFCQTWDDENVHKLMDLSINKNWIDKEEYPQSAAIDLRCVNMVADLWHAPAPKNGQAVGTNTIGSSEACMLGGMAMKWRWRKRMEAAGKPTDKPNLVCGPVQICWHKFARYWDVELREIPMRPGQLFMDPKRMIEACDENTIGVVPTFGVTYTGNYEFPQPLHDALDKFQADTGIDIDMHIDAASGGFLAPFVAPDIVWDFRLPRVKSISASGHKFGLAPLGCGWVIWRDEEALPQELVFNVDYLGGQIGTFAINFSRPAGQVIAQYYEFLRLGREGYTKVQNASYQVAAYLADEIAKLGPYEFICTGRPDEGIPAVCFKLKDGEDPGYTLYDLSERLRLRGWQVPAFTLGGEATDIVVMRIMCRRGFEMDFAELLLEDYKASLKYLSDHPKLQGIAQQNSFKHT

SEQ ID NO: 8316 - protein, 252 aa, Prunus emarginata
  misc_feature (193)..(193): Xaa can be any naturally occurring amino acid
AHYKSEADVGNALAEAFETGLVKREELFITSKARHHGHVVEACKNSLKKLQLDYLDLYLVHYPLATKHSGVGTTASLLDENKVLDIDVTVSLESTWHDMEKTVSLGLVRSIGLSNYELFLTRDCLSYAKIKPQVSQFETHPYFQRETLVRFCRKHGVCPMAHTPLGGATANVKAFGSISPLEDPVLRALAKKXKKSVAQIALRWNLDRNTPVIPKSSKIERLKENLEVLNFKLEKEDIELINTIDKKSRTTL

SEQ ID NO: 8317 - protein, 550 aa, Zea mays
  misc_feature (115)..(115): Xaa can be any naturally occurring amino acid
MARRAASSLVSRCLLARAPAGAPPAAPSAPRRTVPADGMHRLLPGVLQRFSTAAAVEEPITPSVHVNYTKLLINGNFVDSASGKTFPTLDPRTGEVIAHVAEGDAEDINRAVAAXARKAFDEGPWPKMTAYERSRILLRFADLIEKHNDELAALETWDNGKPYEQAAQIEVPMVARLMRYYAGWADKIHGLIVPADGPHHVQILHEPIGVAGQIIPWNFPLLMYAWKVGPALACGNTLVLKTAEQTPLSALYISKLLHEAGLPEGVVNVVSGFGPTAGAALASHMDVDKIAFTGSTDTGKIILELAAKSNLKTVTLELGGKSPFIIMDDADVDHAVELAHFALFFNQGQCCCAGSRTFVHERVYDEFVEKAKARALKRVVGDPFRKGVEQGPQIDDEQFNKILRYIRYGVDGGATLVTGGDRLGDKGFYIQPTIFSDVQDGMKIAQEEIFGPVQSILKFKDLNEVIKRANASQYGLAAGVFTNSLDTANTLTRALRAGTVWVNCFDVFDAAIPFGGYKMSGIGREKGVDSLKNYLQVKAVVTPIKNAAWL

SEQ ID NO: 8318 - protein, 251 aa, Prunus emarginata
AHYKSEADVGNAIAEAIQRGLVKREELFITSKANHGHVVEACKNSLKKLRLDYLDLYLVHYPLATKHSRVSTTASLLDENKVLDIDVTVSLETTWHTMEKTVYLGLVRSIGLSNYEFFLTRDCLSYAKIKPQVSQFETHPYFQRESLVRFCKKHGVTPMAHTPSGGATANVKAFGSNSPLEDPVLLGLAKKYKKSVAQIALRWNIERDTAVIPKSSKVERLKENLEVLNFKLEKEDIELINTIDKKSRTTL

SEQ ID NO: 8319 - protein, 287 aa, Prochlorococcus marinus subsp. marinus str. CCMP1375
MSTQIIQWYPGHIAKAEQQLSKSLEKVDLVVEVRDARIPLATGHPCLHKWIRNKKHLLVINRRDMISQKAFNSWDNWFKENGQEAWWCNAKDGNGTNKIKEAAIKLGNDLNNRRESRGMRKRAVRALILGFPNVGKSALINRLVNKKVVKSARRAGVTKSLQWVRVGQQLDLLDAPGVLPPQLEDQEAAVKLALCDDIGQASYDVESVAIKFLNILNQVKNESDFETSNQILEKRYGISWEESNNNVHLWLENAANYHTSGNTNRMSQRLLDDFRKRLIGTISLELP

SEQ ID NO: 8320 - protein, 364 aa, Glycine max
  misc_feature (41)..(41): Xaa can be any naturally occurring amino acid
  misc_feature (95)..(95): Xaa can be any naturally occurring amino acid
  misc_feature (151)..(151): Xaa can be any naturally occurring amino acid
  misc_feature (194)..(194): Xaa can be any naturally occurring amino acid
  misc_feature (289)..(289): Xaa can be any naturally occurring amino acid
MASQLLRRTFGSRILANPRAFSFSSAASTPIRATLFPGDGXSGPEIADSVKQIFQAADVPIEWEEHYVGTEIDPRTQSFLTWESLESVRKNKVGXKGPMATPIGKGHRSLNLTLKKELNSYVNFRPCYSLPGYKTRYDNVNLITIRENTEXGEYSGLEHQVVRGVVESLKIITRQASLRVAEYAFHYAKAHGKXKVSAIHKANIMQKTDGFFLKCCREVAEKYPEITYEEVVIDNCCMMLVKNPALFDVLVMPNLYGDIISDLCAGLIGGLGLTPSCNIGEGGIALAEXAVHGSAPDIAGKNLANPTALLLSGVTMLRHLDLHDKAEQIQKAILNTIAEGKYRTADLGGSSKTTEFTKAIIDHL

SEQ ID NO: 8321 - protein, 252 aa, Prunus emarginata
SSLQSEADVGNAIAEAIQSGLVKREELFITSKASNHGHVVEACKNSLKKLRLDYLDLYLVHYPLATKHSGVGTTASLLDENKVLDIDVTVSLETTWHDMEKTVSLGLVRSIGLSNYELFLTRDCLSYAKIKPQVSQFETHPYFQRESLVRFCKKHGVTPMAHTPLGGATANVKAFGSISPLEDPVLLGLAKKYKKGVAQIALRWNIERDTAVIPKSSKVERLKENLEVLNFKLEKEDIELINTIDKKSRTTL

SEQ ID NO: 8322 - protein, 189 aa, Lycopersicon esculentum
MESALKDLSTPTGGVEDVYGEDCATEDQVITPWTIAVSGYNLLRDPRYNKGLAFTERERDADYLRGLLPPVISSQELQEKKLMQSIRQYDVPLHKYVAMMELQERNERLFYKLLIDNVEELLPIVYTPTVGEACQKYGSLFKRPQGLYISLNEKGRILEVLKNWPEKSIQVIVVTDGERILGLGDLGCQ

SEQ ID NO: 8323 - protein, 1196 aa, Aspergillus nidulans FGSC A4
MANDLGSALEHAGGKGQEREGISLKTFIASLAAALIIFAVEFLLFLVLKGKLTRIYQPRTYLVPDRERTEPSPPGLFKWISPIFRTSSSEFVQKCGLDAYFFLRYLRMLLKIFVPLGCIIVPTLITVNRVDGKNQTYKNGTDTGDRWNVTGLDQLAWGNVAPENTHRYWAHLVMAVILIVYVCFVFFDELRGYIRLRQAYLTSPHHRLRASATTVLVTTIPKKWLTVEALEGLYDVFPGGIRNIWINRNFDDLNEKVKERDRLALKLETAETELIIKCKKAQMKQAKAAAKKARRKGAEQKEQDVADTKASKPTIGAGISSGNPHQAHTLQEVLHRDTMASNDGRTHKRKYMNPLEPAVGLAGAVGQGVGKLGKSVLGTVKKHDHHGAPDEELPHQDNLSDANAADRSVWEGSAAMPAGESTEGDSSQPKRPFWRSRPSAMSKSSNRTEADELPLTAPESPVDVEDGEFSSSSGNSLTKARDENDIDITRNDGAEIEDDTYPVAYNENFEKEDLGEPLWKKYIRQEDRDTMRLPIFGISWMPSIWLLGKKVDTIDYCRKEVARLNLEIEIDQQHPERFPLMNSAFIQFNHQVAAHMACQAVSHHVPKQMAPRTVEISPDDVIWDNMSIKWWERYLRTFGVYAIVTGMVIGWAFPVAFTGLLSQLSYLEGAFTWLSWINRMPEWLISAVQGILPPLFLAILMALLPLMLRFLCRAQGLQTGMGIELTVQNYFFAFLFVQLFLVVAIASSFSTIIDNITNFTNWPELLAQNIPSSSNYFFSYMILQALSVSAGALVQIFSLVSWFILAPILDSTARRKWARTTNLNQMQWGTFFPVYTTLASIGLIYSVIAPLIMVFNVITFGLFWFVYRYNTLYVTKFRFDTGGLLFPRAINQLFTGIYVMELSLIGLFFLVRDTHGSVSCKGQAIIMIIMTILTVGFQILLNEAFGPLIRYLPITLEDDAVRRDEEFARVQRARLGLDDDNEEEAEEEQDTLEHRLKERERVEIQANEDSREIELKKIEGGISRRASGLRHKGQGLGPETAAKLGASRRPSWAVQTAQSPNRRSKYFGANSADAVPSIQRMREKLEKDAEAQGPVAGHSRSSALFAGIHDELEDLTPDERDQLVQRAFQHDALRSKRPVIWIPRDDLGVSDDEIYRTQRFSKHIWISNEYQALDGKCRTIFSRSPPDFSEVDLIQL

SEQ ID NO: 8324 - protein, 303 aa, Zea mays
MQIAGFNVHYRVGWFKKKKKKKKQAPQQLLRSSLSRVAPHRILRFEALCSQGTMAKNYPTVSAEYSEAVEKARRKLRALIAEKSCAPLMLRLAWHSAGTFDVSSRTGGPFGTMKCPAELAHGANAGLDIAVRLLEPIKEEFPTLSYADFYQLAGVVAVEVTGGPEIPFHPGREDKPQPPPEGRLPDATKGSDHLRQVFGKQMGLSDQDIVALSGGHTLGRCHKERSGFEGAWTTNPLVFDNSYFKELLSGDKEGLLQLPSDKALLSDPVFRPLVEKYAADEKAFFDDYKEAHLKLSELGYADA

SEQ ID NO: 8325 - protein, 314 aa, Triticum aestivum
  misc_feature (70)..(70): Xaa can be any naturally occurring amino acid
MPGRLLWATTKHVVCTAHTQSMTHWSSLNQISTELINGDDCIIPKQRGHGSQSVSMVQFTTMAVDNDFLXVVGGFHGELICKRLEDDGIVFSTRVTDDENAITNSLEIYQDPNGSRRLVVANNDCSVRIFDTKYFDLLNHYVFPWSVNSVSVNPDATLFAVLGDHEDGLVVDPKCGKPIGKVRGHLDYSFSSAWHPDGNILATGSQDTTCRLWDIRNLSQSLAVLGGRLGSIRCIKFSSDGRFLATAEPIDFVHIYDCFADYGKSHEIDFFGEIAGLSFSPDTEAFYIGVADQTYGGLMEFKRRHQHHYLNCLW

SEQ ID NO: 8326 - protein, 197 aa, Beta vulgaris subsp. vulgaris
MSASRFIKCVTVGDGAVGKTCLLISYTSNTFPTDYVPTVFDNFSANVVVNGATVNLGLWDTAGQEDYNRLRPLSYRGADVFILAFSLISKASYENVSKKWIPELKHYAPGVPIVLVGTKLDLRDDKQFFIDHPGAVPITTAQGEELRKLIGAPAYIECSSKTQQNVKAVFDAAIKVVLQPPKTKKKKSKAQKACSIL

SEQ ID NO: 8327 - protein, 395 aa, Dichomitus squalens
MAFKWSSILALVTLATLASAAPTQSTVTCSDGTVVPDSVCCEFIPLREALNDQVIQSDCGEDAHELLRLTFHDAIAISQSLGPSAGGGADGSMLLFPTVEPAFFANLGIADSVNNLIPFMSQFPNISPGDLVQFAGAVAITNCPGAPQLEFLAGRPNGTAPAIDGLIPEPQDSIDDILARFDDAGGFTPFEVVSLLASHTVARADHVDPTLDAAPFDSTPFTFDTQIFLEVLLKGTGFPGTDNNTGEVASPIPVTNGTDVGELRLQSDFGLAHDSRTACFWQGFVNQQDFMAQSFKAAMAKLAVLGHNAADLVNCSAVIPTPLPATGKPATFPATLGPDDLELSCTTEPFPSLTTDPGAQETLIPHCSDGSMDCESVQFDGPATNFGGDDDDDDS

SEQ ID NO: 8328 - protein, 235 aa, Zea mays
GRVGGRVGGRVGGRVGCAPLMLRLAWHSAGTFDVATKTGGPFGTMKNPAEQAHGANAGLEIAIRLLEPIKEQFPILSYADFYQLAGVVAVEVTGGPDVPFHPGRQDKPEPPPEGRLPDATQGSDHLRQVFSTQMGLSDQDIVALSGGHTLGRCHKDRSGFEGAWTSNPLIFDNSYFTELLSGEKEGLLQLPSDKALLSDPSFRPLVDKYAADEDAFFADYAEAHLKLSELGFAEA

SEQ ID NO: 8329 - protein, 482 aa, Brevibacterium flavum
MNANVRVFILNSLAMNDPQRPPTLLWFRDDLRLSDNAALKWAADHGPVIGLFIDETINRSIGAAARWWREQSLNALAQDLSFYGVPLLRRTGNPLEILPKIVSEMEVKAVTWNRRYHQPLCEVDATLKKNLRDQGIEVHSHPGFLLTEPWEVSTATGTPYKVFTPFSKAAWEVARGHAYETVKNNVTVPSHLTGPEGVELPIPEMEQPFWATTLVKECAPGEKNASEKLFDFLEHLQDYPQARDSLARSATSKLSAHLRFGEISIHRVWAETAAIDSEGTELFLKELLWRDFAWHRLYALPHMDTQNVRMQFNRFGWSWDPSEKDKLNTPSTPLIPTKADQFHEDLAAWRAGKTGIPLVDAGMRELWATGSMHNRVRMVVASFLTKNLQIHWRHGEEWFWETLVDADPASNAFNWQWAAGSGDDASPYFRIFNPVTQAKKFDPDETYIRRWVPEYGTPSYPDPIVDLKESRQIALDAYSAIK

SEQ ID NO: 8330 - protein, 390 aa, Dichomitus squalens
MAFKLWSMLPLVALATVAVAAPSRQTVCSDGTVVPDSVCCEFVPLAQALQKEVLMGDCGEDAHELLRLTFHDAIAISRSKGPSAGGGADGSMLIFPTVEPAFFANLGIADSVNNLIPFLSQFPKISAGDLVQFAGAVAVGNCPGAPQLEFRAGRPNATAPAIEGLIPEPQNNITEILERFDDAGGFSPFEVVSLLASHTVARADHVDPTLDAAPFDSTPFTFDTQIFLEVLLKGVGFPGTGNNTGEVSSPLPVSSGTDVGELRLQSDFGLAHDERTACFWQGFVNEQEFMAQSFKAAMAKLAVLGHNADDLVDCSAVVPKPKPATGKPASFPATKGPKDLELSCTSKKFPTLTTDHGAQETLIPHCSNGSMNCTTVQFDGPATNFDGDDS

SEQ ID NO: 8331 - protein, 402 aa, Triticum aestivum
  misc_feature (52)..(52): Xaa can be any naturally occurring amino acid
  misc_feature (71)..(71): Xaa can be any naturally occurring amino acid
MSLRATRAALSPKVKRRDGLYKFGPTIGQGTFARVRFAKNTETLEPVAIKIXILLEYITGRELLDNIYTNXRLKEEEARKYFQQLINAVDYCHSRGVYHRDLKLENLLLDAAGNLKVSDFGLSALTEQVKADGLLHTTCGTPNYVAPEVIEDRGYDGAAADIWSCGVILFILLAGFLPFEDENIIALYKKISEAQFTCPSWFSTGAKKLITRILDPNPATRITIPQILEDPWFKKGFKPPVFDDKYETSFEDVYAAFGDSEDQHVKEETEHKPTSMNAFELISLNQGLNLDNLFEAKEEHKRETRFTSQCPPKEIISKIAEAARPLGFDIQKKNYKMRMENPKAGRKGNLNVATEVFQVAPSLHVVELKKAKGDTLEFQMFYRSLSTQLKDVVWKCGGRGRR

SEQ ID NO: 8332 - protein, 497 aa, Ustilago maydis 521
MPTLNLDLPNGIKSTIQADLFINNKFVPALDGKTFATINPSTGKEIGQVAEASAKDVDLAVKAAREAFETTWGENTPGDARGRLLIKLAELVEANIDELAAIESLDNGKAFSIAKSFDVAAVAANLRYYGGWADKNHGKVMEVDTKRLNYTRHEPIGVCGQIIPWNFPLLMFAWKLGPALATGNTIVLKTAEQTPLSAIKMCELIVEAGFPPGVVNVISGFGPVAGAAISQHMDIDKIAFTGSTLVGRNIMKAAASTNLKKVTLELGGKSPNIIFKDADLDQAVRWSAFGIMFNHGQCCCAGSRVYVEESIYDAFMEKMTAHCKALQVGDPFSANTFQGPQVSQLQYDRIMEYIESGKKDANLALGGVRKGNEGYFIEPTIFTDVPHDAKIAKEEIFGPVVVVSKFKDEKDLIRIANDSIYGLAAAVFSRDISRAIETAHKLKAGTVWVNCYNQLIPQVPFGGYKASGIGRELGEYALSNYTNIKAVHVNLSQPAPI

SEQ ID NO: 8333 - protein, 423 aa, Pseudomonas putida KT2440
MTISILGARVIDPNSGLDQVTDLHLDGGRIVAIGAAPAGFSASRTIQADGLVAAPGLVDLGVSLREPGYSRKGNIASETRAAVAGGVTSLCCPPQTKPVLDTSAVAELILDRAREAANSKVYPVGALTKGLEGEQLAELVALRDTGCVAFGNGLKEIPNNRTLARALEYAATFDLTVVFHSQDRDLAQGGLAHEGAMASFLGLPGIPESAETVALARNLLLVEQSGVRAHFSQITSARGARLIAQAQALGLPVTADVALYQLILTDESLREFSSLYHVQPPLRTAADRDGLREAVKSGVIQAISSHHQPHERDAKLAPFGATEPGISSVELLLPLAMTLVQDGLLDLPTLLARLSSGPAAALRLPAGELKVGGAADLVLFDPQASTVAGEQWFSRGENCPFIGHCLPGAVRYTLVDGHICHEA

SEQ ID NO: 8334 - protein, 198 aa, Candida albicans SC5314
MVNGPAELRRKLVIVGDGACGKTCLLIVFSKGTFPEVYVPTVFENYVADVEVDGRKVELALWDTAGQEDYDRLRPLSYPDSNVILICFSVDSPDSLDNVLEKWISEVLHFCQGVPIILVGCKSDLRDDPHTIEALRQQQQQPVSTSEGQQVAQRIGAADYLECSAKTGRGVREVFEAATRASLRVKEKKEKKKKCVVL

SEQ ID NO: 8335 - protein, 1313 aa, Ustilago maydis 521
MQPMNSVSGSASLVLAALLVQQAAAQDAANSGASTSTVISAIVLNAVIFAILFTVFLLARPRFKRVYAPRTYLVTPEEQIEPLPQSLFGWLPVWLKTPTSTILEKNGLDAYMFVEYLEMMLWIFIPIFLLSWIVLMPVYGAGTNGIGDGFNRFILSRVGKSPQQQKRYIAPLLIQWIFTFWLMWNIRSRVAKFIKLRQDFLVSPQHAASVQARTVLITGIPNELLSEKKLRALYSQLPGGVAKVWLNRNLKDLPDLFDEREKWCNKLEAAETSLIKTAYKLVKKGKAQDASGSLPETDVEINAEVADQYVPKKKRPTHKLGKIPCMGEKVDTIHWCREEIARLNKEIQTKRSEIAVDYKNYPAQSSAFILFNTQIAAHMAVKTQAHHQPYRMTNRYVEAHPDDVVWANMNMNPYERKIRTVVGWAITIGLIIFWAIPVAFVGIISNVKGLADNVPFLGWLNDIPNVVVGIIQGILPTVLLAVLNMLLPIFLRLLSRLSGTPTRSAIELDLQGRFAAFQIVQNFLFLTLVSGNAGQIAEYVQRVASQPTQFPGLLAEAIPKGSLFFLSFIALQGLSGAAGLFAQIAPLIVYYVKKFLLASTPRKVWHIDHDTSGPAWGTLFPSMTLITVIGTGYVVIAPILNGFVAFTFFLFFLGYKYLFLYVYDTKPSSETSGLFFGKAIRHIFAGLYVEMVMLTAIFFLAQSEDAAGQKKQSAIPEGAFMVVLIVIVVAFHYFLNDSFKALETALPLTLVAGNNAEVQLHGNPTRTSGETAYNEKKPLNEHAASSYDATPVSQGDLNGKGVQGAGVSGEKHQAVAGLSEEQESAFYHPSLTGEQKPIWLPNDKFGIGRAGVASARKAGLEATYEQTSVTEKGQVQTDAYEPPAFTEKWSVNCSARPRRRVEVEKLRTQQGGLLTIARGHAHAKGFAVYGDRSADDSDTRLAIMARCTHVFDWPPSILSAAVCEVPPVRNCKFSEARMMTGTCSNSSGVGRSGTFAQGNLPRFDDIPAVDGMPHGCAWNVWGQGDELGTLNLLTPEVVARSAAENIRTGERVQIDWGLDSVDVPANQRMHFQHDLIDLKPKLGVYATDDEMHLNTQTSSQWDGFNHFAHQATHMYYGGVKHDDLHSGKIDKQHRNSMHKWCLNGGIAGRGVLVDWVRWWEATRTEPLPAGNSSYAIPLSQIQEVLEWQKTELRTADILLLRTGVVRWFEHATDAEKVKGMIENDNFPGIEATEQVKRWLWDNHFAAVASDNMSFEFGPHGDLWLHEWILPMFGCPIGELFDLERLSTACQNHQRWTFFLTSAPLRASRTESLF

SEQ ID NO: 8336 - protein, 174 aa, Triticum aestivum
MAPAVMASSATTVAPFQGLKSTAGLPVSRRSSGSLGRVSNGGRIRCMQVWPIEGIKKFETLSYLPPLSTEALLKQVDYLIRSKWVPCLEFSKVGFVFREHNSSSGYYDGRYWTMWKLPMFGCTDATQVLNEVEEVKKEYPDAYVRVIGFDNLRQVQCVSFIAFRPPGCEESGKA

SEQ ID NO: 8337 - protein, 364 aa, Nicotiana tabacum
MGSTSQSQSKSLTHTEDEAFLFAMQLASASVLPMVLKSALELDLLELMAKAGPGAAISPSELAAQLSTQNPEAPVILDRMLRLLATYSVLNCTLRTLSDGSVERLYSLAPVCKFLTKNADGVSVAPLLLMNQDKVLMESWYHLKDAVLDGGIPFNKAYGMTAFEYHGTDPRFNKVFNRGMSDHSTMSMKKILEDYKGFEGLNSIVDVGGGTGATVNMIVSKHPSIKGINFDLPHVIGDAPAYPGVEHVGGDMFASVPKADAIFMKWICHDWSDEHCLKFLKNCYEALPANGKVIIAECILPEAPDTSLATKNTVHVDIVMLAHNPGGKERTEKEFEALAKGAGFTGFARLVALTTLGSWNSTNN

SEQ ID NO: 8338 - protein, 394 aa, Aeropyrum pernix K1
MSQQPECRVEGNYIIVPKGLVNVIVDETRISGVDPKGEATIYRGYTIEDIGEHASFYEAAHLILFGRLPCDEELKEIKSKIDKYRGQIPEKLFDAMKHVPVTHPMYYGIYGTALLGQYYAPEWRFDEDFLYDHALRLTAQLPVIFTTGWNLAHHGTFLRPDPSKDHAWDVLRMIVMREPSDIEARAFESTLVLYMDHGFNASTFTTRVIGSTLSDLYSAVAGGIAALKGPLHGGANEKAMEMFLDAMKKAEEKGVPLYDYIEEYIKEKLARKEKIMGFGHRIYKLHDPRTDVAAKFVAKLKDGEFWMKVLKKAEEVMWREKKIPANIDLYTAVLYYQLGIPIPMYTPIFAMGRVVGWSAHYIEQVLNNKLIRPTEKYVGPTGLKYQPIEERCRK

SEQ ID NO: 8339 - protein, 350 aa, Moorella thermoacetica ATCC 39073
MKALVLFGPNDVRLVEKPVPKPGPGEVLVRVAACGICGTDVKIITKGMPKMPPYGEFTFGHEWAGTIVALGETVDEFQVGDRVAIEAHKGCGRCENCIDGKYTACLNYGRLDKGHRAAGMTVDGGFAEYAVQHVNSVYKIPDNITFNEATYVTTAGCALYAIDKSGGYIAGDTVLVIGPGPIGLSVVQGARSLGAEKIILMGTREDRLVKGRELGATHTINIREVADPVAEVMAITGGKGCKRVFECAGNSQSFEYGIKAAKKGGVMVLVSFYKEPVMANLDYVVLNQISLLTVRGEGNQNCKRALSLMAQGKIDAKPIMTHAFPLEEFQKGLDYFVNRKDGAMKVVINP

SEQ ID NO: 8340 - protein, 295 aa, Glycine max
MVSHYYLASLLLLLLLNPHTTLGAQNLMLPYHNGALLKGTITVNLLWYGSFTPIQRSIILDFINSLSSTAGAPLPSVASWWKTTDKYRGGSTTIVLGKQILEQTYSLGNYLNGTQLVSLSSRFDHLNAINVVLTSSDVGVDGFCRSRCGTHGSITNGQKARIPYVWVGNSEAQCPGQCAWPFHQPAYGPQAPPLIAPNGDVGLDGMVINVATLLAGTVTNPFNEGFYQGPPTAPLEAVSACTGIFGSGAYPGYPGRVLVDKTTGASYNSYGAGNGRKYLLPAMWDPQTSACKTQV

SEQ ID NO: 8341 - protein, 418 aa, Triticum aestivum
  misc_feature (355)..(355): Xaa can be any naturally occurring amino acid
MIGGGGGGALRRVGKYEVGRTIGEGTFAKVKFAQNTETGESVAMKVLDRSSILKHKMVDQIKREISIMKLVRHPNVVRLHEVLASRKKIFIILEFITGGELFDKIIRHGRLSEADARKYFQQLIDGVDFCHSKGVYHRDLKPENLLLDSQGNLKISDFGLSAWPAQGAALLRTTCGTPNYVAPEVLSHKGYDGALADTWSCGVILYVLLAGYLPFDEVDLTTLYGKIESAEYSFPAVFPSGAKSLIRRILDPSPDTRIRIEEIRKDEWFKKDYEPVREVENEEVNLDDVNAAFDDPEEDNQHTFDDEAGPLTLNAFDLIILSQGLNLSALFDRRQDYGQLHNRFLSRKTSKCYIXSSMEVVAQSMGVKTHIRHYKMRVGGSKCEQDLAISQLCLKFLKLPHPPLWWELERSAGRFFRV

SEQ ID NO: 8342 - protein, 501 aa, Sphingomonas chungbukensis
MATQLKSTENDYGIKSEYGHYIGGEWIAGDSGKTIDLLNPSTGKVLTKIQAGNAKDIERAIAAAKAAFPKWSQSLPGERQEILIEIARRLKARQSHYATLETLNNGKPMRESMFFDMTQTIGQFELFAGAAYGLHGQTLDYPDAIGIVHREPLGVCAQIIPWNVPMLMMACKIAPALASGNTVVLKPAETVCLSVIEFFVEMADLLPPGVINVVTGYGADVGEALVTSPDVAKVAFTGSIATARRIIQYASANIIPQTLELGGKSAHIVCGDADIDAAVESATMSTVLNKGEVCLAGSRLFLHQSIQDEFLAKFKTALEGIRQGDPLDMATQLGAQASKMQFDKVESYLQLATEEGAEVLTGGTRADAANLAGGNFIKPTVFTNVKNTMRIAQEEIFRPVTTVISWNDQTHMMQQANATTYGLAGGVWTKDLARAHRIARQLETGTVWINRYYNLKANMPLGGYKQNGFGREFSHEVLNHYTQTKSVVVNLQEGRVGMFDQ

SEQ ID NO: 8343 - protein, 359 aa, Nostoc sp. PCC 7120
MSKSRRIGILTSGGDCSGLNAVIRAVVHCASGKGWEVFGIRQATLGLMARPPQVSKLEIDQVDPLLTSGGTMLGTTNKGDPFAFPMPDGSFCDRSSEIIAGYHQLDLDALIGIGGDGSLAILRRLAQQGAINLVGIPKTIDNDIGITEHAIGFDTAVNIATEALDRLHFTAASHSRVMILEVMGRDAGHIALAAGIAGGADVILIPEILYSMDDICYHIKHRQEEGKNYCLIIVSEAVRTQDGEILTLTNRLGQSRYGGIGEYLADQISDRIGAETRVTVLGHIQRGGIASPLDRLVASAFGVAAVNLIEAAKYDYMVAWQNRQVITVPIEEAIAQYKAVNPEDALVKTARGLGIYLGE

SEQ ID NO: 8344 - protein, 200 aa, Mesorhizobium loti
MGKYKDHREPRRHRHDDDAASFTERPSEPSYFQRPSIVTADPVDAEVVWFNTSKGFGFVKLPQGIQAYLHIRVLEAAGSRGVSEGTRLKVTTEESPRGGHQVAQVLEVGDQTARTQLHTRCAGESTAGTSAQLESEATVKWYNPEKGFGFIAPENGEKDIFVHATALTRSGLSMLMEGQKVFVQCGQGKKGLEVRSIRLA

SEQ ID NO: 8345 - protein, 267 aa, Pseudomonas fluorescens PfO-1
MSVPAFGLGTFRLQGQVVIDSVSTALELGYRVIDTAQIYENEADVGEAIAASGIARDKLFITSKIWIANFAKDRLIESLKASLQKLQTDYLDLTLIHWPSPEDQVPVEEFMGALLEAKRLGLTRQIGVSNFTIDLMKQAIAAVGAENIATNQIELHPYLQNRKVVEFAQSQGIQITSYMTLAYGEVLKDPLIVQIAERLQATPAQVTLAWAMQSGYAVIPSSTKRANLQGNLGAMALTLSDADMALIATLDRGHRLTSPKGIAPQWD

SEQ ID NO: 8346 - protein, 141 aa, Glycine max
MRGGLPSGGGWGSRVWGAPFFKGMAPGTFIGGTMVVCRLSKSKWDDGISSVTPAEEVFYAVSLLFSSVNNDLKRLEAQNQKILRFCDLAGIGYKEYLAHYTAHGDWVRHFGGKWQRFVEMKDKYDPKRLLSPGQDIFNLLL

SEQ ID NO: 8347 - protein, 478 aa, Brucella melitensis 16M
MDAVIIASSLPFAPSLRKPQCKGSQVPSEKQETPMAATFDTILKGATIVNHDGIGQRDIGIRNGRIAAIGSLAGNSAGEVIDCTGLHILPGVVDSQVHFREPGLEHKEDLETGSLAAVLGGVTAVFEMPNTKPLTTSAEMLEDKIRRGRHRMHCDFAFWVGGTRDNAKDVAELERLPGAAGIKVFMGSSTGDLLVEDDDGVRSILRNTRRRAAFHSEDEFRLKEREGLRVEGDPSSHPVWRDEIAALQCTQRLVRIARETGARIHVLHISTAEEIDFLKDYKDVATCEATPHHLTLSADDYKALGNLIQMNPPVRDKRHREGVWKGIDQGIVDVLGSDHAPHTLEEKQKSYPASPSGMTGVQTLVPIMLDHVNAGKLSLERFVDLSSHGPNRIFGMARKGRIAVGYDADLTIVDMKRRETITHEQAGSKAGWTPYHGKTVTGWPVGTFVRGIKVMWEAEIVNPHKGEPVEFLEALPRR

SEQ ID NO: 8348 - protein, 483 aa, Pseudomonas aeruginosa UCBPP-PA14
MQLKDAKLFRQQAYVDGAWVDADNGQTIKVNNPATGEIIGSVPKMGAAETRRAIEAADKALPAWRALTAKERANKLRRWFDLMIENQDDLARLMTIEQGKPLAEAKGEIAYAASFLEWFGEEAKRIYGDTIPGHQPDKRIIVIKQPIGVTAAITPWNFPSAMITRKAGPALAAGCTMVLKPASQTPYSALALAELAERAGIPKGVFSVVTGSAGEVGGELTSNPIVRKLTFTGSTEIGRQLMAECAQDIKKVSLELGGNAPFIVFDDADLDAAVEGALISKYRNNGQTCVCANRLYVQDGVYDAFVDKLKAAVAKLNIGNGLEAGVTTGPLIDAKAVTKVEEHIADAVSKGAKVVSGGKPHALGGTFFEPTILVDVPKNALVSKDETFGPLAPVFRFKDEAEVIAMSNDTEFGLASYFYARDLARVFRVAEQLEYGMVGINTGLISNEVAPFGGIKASGLGREGSKYGIEDYLEIKYLCLGGI

SEQ ID NO: 8349 - protein, 371 aa, Listeria monocytogenes EGD-e
MDYEKALAFIKSNSTLEQEEGTEVIFKQAQETARGNLDPFLLKDLKQHLGGTNDAIKEAPQEIQMPDFSNLEIATAAALQMRATMGSPNIDLSNGVTTEYRVVEGDYGDIPVRIYRHEEATKPVPAFIFYHGGGFVGGTPAVVENFCKGIAEKLPAVVINVDYHLAPEFPAPAAPKDCYRVLEWVVEQSNELGIDASKIGVSGDSAGGTLAAAVSYMDYEAETNYVGFQALLYPALTLVDEDNDKYQWDISKFGASEDTLPLVAPGIIGMNSSGELLRKAYVRDENPAAPIYSPLSAVDKSIYPPTLIASAEFDALRAFADVFAKELRASGVQTKAIVYQGMCHAFIDKYGIFPQAEDVADEIVQMMKEIF

SEQ ID NO: 8350 - protein, 136 aa, Triticum aestivum
MSEAVGTPESSGAKEQERFLPIANIGRIMRRGVPENGKIAKDAKESIQECVSEFISFITSEASDKCMKEKRKTINGDDLIWSMGTLGFEDYVEPLKLYLKLYREMEGDTSKGSISEQAAKKVGALNGQPGSSFNGM

SEQ ID NO: 8351 - protein, 439 aa, Methanosarcina mazei Go1
MVSDPDGGLNEKTEKNSEYNSQKASGQGTEKDIEPDDGTHASLYQESLAMHRRLGGVLEVASKVRLRTIHDLGVAYTPGVAEPCRKIRENRDLAYLYTLKKNTVAVVTDGSAVLGLGNIGPYAALPIMEGKAIIFKEFAGIDAFPICLGTQDTEEVIKAVKNMAPAFGGINLEDISAPRCFEIEARLREELEIPVLHDDQHGTAIVVFAGLLNALKIVKKDLAELKIVISGLGAAGVAILKFLVRAGANPAKILACDSQGIVYEGREKGMNTIKDEISRITNPERLKGELKEVFPGADLFIGVSVGGIVTGSMVRSMAKDAIVMAMANPVPEIMPEAAKRAGARIVATGRSDFPNQLNNCLSFPGIFKGALGTCARKITPEMEMAAAHALANVVTSGELSEDHIIPDPLDKHVVPAVAKAVASASLESCAARKRLEETF

SEQ ID NO: 8352 - protein, 479 aa, Chloroflexus aurantiacus
MYIHWFRRDLRLRDNTALMAAATAAGGAVVPVFIFDDAILRGRFASPARTQFLLDCLAALDAELRTFGLHLVVRRGDPLRTLFDVLRESGASGVTWNRDYTPYAVRRDTAIKQALREAGYEAHSFKDTVIFEMKEVATADGRPYTVYTPYAKRWRSRLAAEPVTVQDMPRLATIPLPVSEPLPHLTDLLPDAPATLPRFPAGEAVALEALERFVRGPLASYAQGRDLMAVAGTSRLSPYLRLGVLSPRQCVAAALAAPPGPGPESWIGELIWRDFYVQVLYHFPHALRGSFKPAYNRIDWPNDPVLFAAWQQGLTGYPIVDAAMRQLQREGWMHNRARMIVASFLTKDLLIDWRWGERHFMHLLIDGDPAANNGGWQWAAGTGTDAQPFFRIFNPVSQGQKFDPEGAYVRRYVPELVNVPTRYIHEPHKMSLAEQRKAGVLIGRDYPAPIVDHATQRTKALELYRAATRHNDSSAEQYA

SEQ ID NO: 8353 - protein, 301 aa, Neurospora crassa
MAFHKLVKNSAYYSRFQTKYKRRREGKTDYYARKRLITQAKNKYNAPKYRLVVRFTNRDIILQIVSSEITGDKVFASAYSHELKAYGIEHGLTNWAAAYATGLLLARRVLKKLGLDETFKGVEEADGEYKLTEAAETDDGERRPFKAFLDVGLARTSTGARVFGAMKGASDGGIFIPHSENRFPGYDMESEELDAETLKKYIFGGHVAEYMETLADDDEERYKSQFNRYIEDDLEADGLEDLYAEAHAAIREDPFKKAESEAPKKTKEEWKAESLKYKKSKLTREQRAAGVQERIAALRSE

SEQ ID NO: 8354 - protein, 224 aa, Bradyrhizobium japonicum USDA 110
MGSGVMGSSDGFESKKLGVPGQGTSPGRMTPGEHGSGRESGLSPFTGLGEASANLVEVHGVIKWFDASKGYGFIVPDNGWPDVLLHVTVLRRDGFQTAYEGARIVVECIQRAKGYQAFRVVSMDESTAIHPAQMLPPRTHVTVTPTSGLERAQVKWFNRLRGFGFLTCGEGTPDIFVHMETLRRFGMTELRPGQYVLVRFGPGSKGMMAAEIHPETGSPGPQSH

SEQ ID NO: 8355 - protein, 426 aa, Desulfovibrio desulfuricans G20
MSDHISGTLFVSGALLSGRTVDVTVSGGRIAAVSEHGAAPAPQHAETVEAAGKILFPSFIDCHVHLREPGFEYKEDIASGLAAAAHGGFGAVLPMANTSPVNDQGSVTELMLERARKAWPHGPRVHPVGAATKGLKGEELAPMGELAAAGCVAFSNDGLPVGGAEMFRRCMEYAADFGKIVIDHCEDPSLARGTHMNEGVTSGRLGVKGQSVVAESVQVARDILLAEYLGIPVHLAHISCRQSVELIAWAKQRGVRVTAETCPHYLLLDDLALEQYSTAAKVNPPLRTPDDVAAMRRAVADGTIDILVTDHAPHAAHEKDTPLDEAPNGISGLDTAVALTWRLVQEGLLTEADMVRLWCHAPGSLFRLPVNRFTAGDPADFFLFDPAHEWTVTPEAMHSKGKNTPFTGWKLTGKVTSHWMGGHRIA

SEQ ID NO: 8356 - protein, 429 aa, Buchnera aphidicola str. Bp (Baizongia pistaciae)
MQKNNLNFDKQHIWHPYASMIQPTPCILVKSAKGIILKLHNGKKLIDGMSSWWSTIHGYNHPRLNNALKNQINKMSHVMFGGITHYPAISLCKKLIEITPNSLTRIFLSDSGSVSIEIAIKMILQYWQSLGKNKVIFLTIKKSYHGDTFAAMSVCDPKNSFHQFYHNFLPINIFADNPKCSFDGLWNKKDIISFKKLIQKHKDVVAAVILEPIVQSVGGMKFYHPNYLKQVRFLCDLYKIPLILDEIATGFGRTGKFFAFEHSNIVPDVLCIGKAITGGTITLSATLTTDKIANVISNSASGCLMHGPTFMGNPLACAAAYENILILQENKWKIQVKNIETCLRTYLFPLKTHYEVYDVRVLGAIGVVECYHYINISMMQNYFVKNNVWIRPFRKLIYLVPAYIIDNASLKKLINVISNALNYENFFMK

SEQ ID NO: 8357 - protein, 280 aa, Listeria monocytogenes str. 4b F2365
MTLSFSDTYRLNNGIEMPRHGFGVYKLTDEARMRTALETAVDVGYRLFDTASFYHNEKELGDFFASSGLKRDEFFVTTKMWNTEQGYDETLRAFEKSQKKLQLDKIDLYLVHWPKQDTFFDTWRAVEKLYDEGLVRAIGVSNFEAHHLDRLRTSANVLPVVDQLETHPHFPNHLLHRYLEELHIVHQAWSPLGRGGVLQEQILIDLAEKYGKSPAQIVLRWHLQNNISIIPKSETPSRIRENAAIYDFELSEADMRQVERLNTGERVSHAPDVMYVRSEI

SEQ ID NO: 8358 - protein, 275 aa, Bacillus thuringiensis serovar konkukian str. 97-27
MHIPTTTLHNGVKMPLIGLGVYKAKEGDEVKQAVKTALEVGYRSIDTATVYENESGVGEAVRESGIPREDIFITTKVWNDDQGYEETLEAFEKSLKKLQMDYVDLYLIHWPIRGKYVDTYRALEKLYEEGKVRAIGVSNFHKHHLELLLPNCKIKPMVNQVELHPMLTQFELRNFCQGEQIQMEAWSPLMRGGEVFQHPIIQAIATKYEKTPAQVILRWDIQSGIVTIPKSVTPSRIQENFSIFDFSLTEEEMTEINTLNRNLHVGTNPDKYDTL

SEQ ID NO: 8359 - protein, 509 aa, Brassica rapa
MTSVNVKLLYHYVITNLFNLCFFPLTAIVAGKAYRFTIDDLHHLYYSYLQHNLITIASLFAFTVSGFGLYIARLPKPLYLVEYSCYLPPRHLKVSVSKIMDIFYQIKADTSSRNVACDDPSSLDFLRKIQERSGLGDETYSPEGLIHVPPRKSFAGSREETEKVIIGGIENLFENTKVKPKDIGILVVNSSKFNPTPSLSAMVVNTFKLRSNIKSFNLGGMGGSAGVIAIAIDLAKDLLHVHKNTYALVVSTEGITQGIYAEENRSMMFSNCLFRVGGAAILLSNKSGDRRRSKYELVHTVRTHTGADDKSFRCVQQGDDEDGKTGVCLSKDITNVAGTTLTKHIAICRPLILPLSEKFLFFATSVAMKLLKDKIKHYYVPDFKLAVDHFCIQPGGRAVIDELEKNLGLSPIDVEASRSTLHRFGNTSSSSIWYELAYIEPKERLKKGNKKGWQIALGLGFKGNSAVWVALNNVKASANSPWEHCIDRYPVKNDSDLSKSKHQVQNGRS

SEQ ID NO: 8360 - protein, 457 aa, Trichodesmium erythraeum IMS101
MIKLPGPKSPALTQILQWTAKPIKFMEKCAREYGDTFEVKLNYPIVFISHPKAIEEIFKANPKKFDCGSSNKLAQPLLGDYSLLLLDDIPHQRQRKLLMPPFHGKRMQAYGELICNVAQEVASKWEIGQVFSMREFTAEISLKVILQAVFGLYEGERYSKLEKLLGSLLESLSSPLKTSMLFFQFLQIDLGPWSPWGNFIKNREEIYELLCAEISERRQKLDPERSDILTMLLLARDEEGEGMSDIELRDELMTLLIAGHETTATSLSWAFYWIHHQPEIYQKLSRELETFGDDLNPMTVINLPYMNAVCSETLRIYPVVIIVSPRKTKLPITIMGQTYPAGTALTPCIYLTHHREDLYPEPKKFKPERFLERQYSSYEFLPFGGGNRRCIGAAFAMFEMKIVLATILRRYSLALAEKQEVKPLRRGLTLAPAGGVKMVMTGKLMQTEKKFPSVATV

SEQ ID NO: 8361 - protein, 503 aa, Gibberella zeae PH-1
MFSLLFLQFFEQHFIATAILLLLPIPLRAIETYLRRWRLAQAQGCQDAASKVPVKDPIVGFDFLYKVFFGKAPERYLDSTWQAFKEMGTTYIERRWSWQCVYTCDPHNLKHILASACEDFDLPEFRTSVIGHVFGQGIFVLSGHTWKHARAVLRQSFRKGNPTPFLETLERNFQAFSKHVPTDGSAFDLQPLFLAFAMDVSTEFLMGHSTNMLSDKADHTREQQFVDDYMICSEEIIQQMQLGPLHRLKFNFAANRAKKRVYEYLDIFIEESLNSPRQGSKVSFLTDMMAIAGDRKGLSDHILHILLASRDTTSSLLSNLFFFLSKNPRIYNKLRDQVLNVAGHEPPTASQLKELTYLKWCVNESLRLHPVIPTNARVAVRDTTIPRGGGADGTSPLFISKGTALFYNVYAMHRNKDVFGPEPEEFIPERWEDLRPGWGYLPFNGGARACIGQQYALLETHYVVARMAQTYTLLESRDDGDWMEFLDWFQWSIWTEDLMGANR

SEQ ID NO: 8362 - protein, 192 aa, Schizophyllum commune
MQTIKCVVVGDGAVGKTCLLISYTTNKFPSEYVPTVFDNYAVTVMIGEDPYTLGLFDTAGQEDYDRLRPLSYPQTDVFLVCFSVTSPASFENVKEKWFPEVRHHCPGVPCLIVGTQIDLRDDSQVIEKLARQKQRPVTSDQGERLARELGAVKYVECSALTQKGLKNVFDEAIVAALEPPVVKKKGPKCVIL

SEQ ID NO: 8363 - protein, 216 aa, Arabidopsis thaliana
MAYQIDQKMIHDQEPMAEIMPNVITAMSSLLQRVSETNDDLSRPFREHKRISAFNAVTKPSISIRSYMERIFKYADCSDSCYIVAYIYLDRFIQKQPLLPIDSSNVHRLIITSVLVSAKFMDDLCYNNAFYAKVGGITTEEMNLLELDFLFGIGFQLNVTISTYNDYCSSLQREMVMRTMYSPLLEPAFLVRSFHKNLLKNLYDEDHRNSQVTSAV

SEQ ID NO: 8364 - protein, 122 aa, Vibrio parahaemolyticus RIMD 2210633
MSITNEQILDAVAEMSVMQVVELIEAMEEKFGVSAAAAVVAGGAAAGAAVEEQTEFDVILESAGGNKVAVIKAVRGATGLGLKEAKALVDGAPAPLKEGVDKAEADALKAQLEEAGATVAVK

SEQ ID NO: 8365 - protein, 174 aa, Glycine max
MSDAPASPSHESGGEQSPRGSLSGAAREQDRYLPIANISRIMKKALPPNGKIAKDAKDTMQECVSEFISFITSEASEKCQKEKRKTINGDDLLWAMATLGFEDYIEPLKVYLARYREAEGDTKGSARSGDGSATPDQVGLAGQNSQLVHQGSLNYIGLQVQPQHLVMPSMQSHE

SEQ ID NO: 8366 - protein, 235 aa, uncultured bacterium
GISHGIDALVVIGGDGSLTGAHLFYQEYGIPAIGLPGTIDNDLSGTDSTIGFDTACNTAIEAIDKIRDTATSHDRLFFVEVMGRDAGFIAINAGIGSAAAAILIPENKTPIETLVEKLKTRTKAKKTSNIFIVAEGGKSGSAQEIADKVKKHLPYYDIKVTILGHLQRGGAPTSFDRLLSFQMGVAAIEGLMAGKYDVMAGMINNKIVYTPIVKAIVDDKTVDEEDLRVANILST

SEQ ID NO: 8367 - protein, 211 aa, Zea mays
MDPMDIVGKSKEDVSLPKSTMTKIIKEMLPPDVRVARDTQDLLVECCVEFINLLSSESNDVCSRDDKKTIAPEHVIRALQDLGFKEYVEEVYAAYEQHKLETLDSPKATKFTGIEMTEEEAVAEQQRMFAEARARMNNGAAKPKEPALEPQNQPQQPPQPQLQLHPTAQQPPQPQSQLHHPQSQQPLHPQLQPYTQAAPQQPLHPQLQPYT

SEQ ID NO: 8368 - protein, 298 aa, Clostridium tetani E88
MGYVICYNKLTSERKINMDINWFPGHMAKTRRELKENLKMVDAIIEIRDARIVKSSANPEIENICGNKPRIILLNKSDLGEEKVTNEWIKALSGENTKVIAINSLKDSGMKKIKNAIDDLLKEKTEKLKAKGLKNIVNRVMVVGIPNVGKSTFINRMAKSSIAKTGDRPGVTKSRQWIKTKIGVELMDTPGILWPKFEDEKVGLNLAFTGAIKDEIMDIETLALNLIERLSEDYGENLKERYKLDKLEEIPLDNMENIAKKRGAILGRGEIDYNRVAIMILDEFRGGKLGRISLEKPE

SEQ ID NO: 8369 - protein, 254 aa, Zea mays
  misc_feature (195)..(195): Xaa can be any naturally occurring amino acid
MSSLYDVSCFAAGLAGNVFALALFLSPVPTFKRVLKAKSTEQFDGLPYLLSLLNCCICLWYGLPWVSDGGRALVATVNCTGALFQLAYISLFIFYADSRTTRLKVAGLLVLVVFAFALIAHASIAFFDQPLRQLFVGSVSMASLVSMFASPLAVMGVVVRTECVEFMPFYLSLSTFLMSASFAVYGLLLRDFFIXSRMGSESSWEQCSWCCTRTTAGDGKAATRQHRCLPDHVAEFVSPIARAVLSVVLCSAIL

SEQ ID NO: 8370 - protein, 128 aa, Glycine max
  misc_feature (17)..(17): Xaa can be any naturally occurring amino acid
ASSMISSPPVTTINRAXAGMAATFTGLTSMAGSPTRNTNNDITYIASNSGRVHCMHVWPPDDKKNFETISYLPDLDDAQLAKEVKYLLRKGWIPCLEFELEHGFVFREHNKSPEYYDGHYCTMWKPPI

SEQ ID NO: 8371 - protein, 441 aa, Azoarcus sp. EbN1
MVHVNISPFKFWRDIERPMNGLHLIADLYRCGTTAAALTEREALETLCVTQCREAGLTPLGSYFYQFRDESGAAAGVTGTVVLAESHLAIHTWPESGGVTLDVYVCNFSRDNGDRARMVYRAVIDALRPAEIVGHEVVRGRLPEKGVAGPMPLPAVEGVIFEQLNDNAGYFTRGGKLIEKGRSRYQEYEVWETPQFGRLFRLDGCFMTSERDEFHYHENLIQVPCIAHPAPARALILGGGDGGSAEELLKQPAMAKIVIAELDEKVIEIAREHLQAVHRGALDDPRIELRIGDGFRYVMEEAPAAAERFDLIVLDLTDPVGPAEALYSEDFFRGCRALLAPGGAISLHIGSPAFQPERLRTLVARLRDVFAIVRPYFLYVPLYGTLWGFATASDTLDPAALSAAEVDRRLAERRIGALQHYNGAVHCAQFALPNHLRTLLG

SEQ ID NO: 8372 - protein, 449 aa, Glycine max
  misc_feature (128)..(128): Xaa can be any naturally occurring amino acid
MEHFNNDDLEYVVDEYYDVPDFAVEDTSSDIVPELTSDVDSDFEDEFPTSNAKTDTTASEARNGKDIQGIPWERLNYSRDKYRETRLKQYKNYQNFSRSRHDLRKECLEVQKGETFYDFFFNTRLVRXTLAGPNIMLRNLLWATSKHDVYFMQNYSVMHWSALLRRGKEVLNVAKPIIPTLKRPGFLAQPVSRVQISTMTVKENLMVAGGFQGELICKNLKHPGVLFCGKITTDDNAITNAVDVYSNPAGSLRVITANNDFQVRVFDAENFASLGCFKYDWSVNNTSVSPDGKLLAVLGDSTECLIADANTGKITGSLKGHLDYSFSSAWHPDGQILATGNQDKTCRLWDIRNLSQSMAVLKGRMGAIRALRFTSDGRFLAMAEPADFVHIFDSHSGYEQGQEIDLFGEIAGISFSPDTEALFVGIADRTYGSLLEFNRKRHYNYLDSF

SEQ ID NO: 8373 - protein, 180 aa, Zea mays
MASSMLSSAAVGTSPAQATMVAPFTGLKSSAAFPVTRKANNDITSITSNGGRVSCMQVWPPIGKKKFETLSYLPDLTDAELAKEVDYLLRNKWIPCVEFELEHGFVYREHGNSPGYCDGRYWTMWKLPLFGCTDSAQVLKEVEECKKEYPNAFIRIIGFDNTRQVQCISFVAYKPPSFTG

SEQ ID NO: 8374 - protein, 57 aa, Glycine max
MAGDGAATCIDILLAIILPPLGVFLKYGCQVEFWICLVLTLFGYIPGIIYAVYAITK

SEQ ID NO: 8375 - protein, 490 aa, Lotus corniculatus var. japonicus
VALMILRKNLKKPDSIPNIPPGPWKLPIIGSIPHLVGSPPHRKLRDLAKKYGPLMHLQLGEVIFIIVSSAEYAKEVMKTHDVTFASRPRSLFTDIVFYGSTDIGFSPYGDYWRQVRKICNVELLSMKRVQSLWPIREEEVKNLIQRIASEEGSVVNLSQAIDSLIFTITSRSAFGKRYMEQEEFISCVREVMKLAGGFNIADLFPSAKWLENLTRMRSKFEYLHQKMDRILETIIDDHKANSRTKEGQVEGGEEDLIDVLLKYENSSTDQDFHLTIRNIKAILFDIFIAGSETSATTINWTMAEMMKDPILLKKAQDEVREIFQRRGKVDETCIYELKYLKAFINEVLRLHPPGPLVFRECRQACEINGYHIPAKSTVLVNTFAIGTDSKYWAEPERFCPERFIDSSIDYKGTNFEHLPFGAGRRICPGINYGMANVELVLALLLYHFDWTLPKGIKNEDLDLTEEFGVTVSKKEDLCLIPSISHPLPST

SEQ ID NO: 8376 - protein, 502 aa, Zea mays
LQLGGDVSGGRLSVDASDIAEASRDFGGLSRAEPMAVFQPRAAGDVAGLVRAAFGSARGFRVSARGHGHSISGQAQAPGGVVVDMGHGAVARAPPVYSPALGRHYVDVWGGELWVDVLNWTLSHGGLAPRSWTDYLYLSVGGTLSNAGISGQAFHHGPQISNVYELDVVTGKGEVVTCSETENPDLFFGVLGGLGQFGIITRARIALERAPQRVRWIRALYSNFTEFTADQERLISLGSRRFDYVEGFVVAAEGLINNWRSSFFSPQNPVKLSSLKHHSGVLYCLEVTKNYDDATAGSVEQDVDALLGELNFIPGTVFTTDLPYVDFLDRVHKAELKLRAKGMWEVPHPWLNLFVPASRIADFDRGVFRGVLGGGTAGAGGPILIYPMNKHRWDPRSSVVTPDEDVFYLVAFLRSALPGAPESLEALARQNRRVLDFCAEAGIGAKQYLPNHKAPGEWAEHFGAARWERFARLKAQFDPRAILAAGQGIFRPPGSPPLVADS

SEQ ID NO: 8377 - protein, 442 aa, Coxiella burnetii RSA 493
MLENDMQRLDSQHVWHPCSQMKDYEQFKPLIIKKAYGSYIELSNGQKIIDAISSWWCKSLGHNHPKLKEALKQQLEKFEHVIFANTTNEIIVALSQQLAALLPGLNKVFYAGDGSCAVEIAMKMSLHSRIIQGNKKRKKFIALKNSYHGETVGALSVSDVGLYRAPYSTMLFEPYFIESIPYVLNTQAPEWNDCSAHWDTVERLFEPHAETATAILVEPIVQGASGMKIYSQDFLARLFQWAKNNHIHFIADEIMTGIGRTGKMLACEHAGIIPDFVCLSKGLTSGYLPFSAVLTSDEIYQLFYDDYQTGKAFLHSHTYSGNALAAAVALATLKVFSEEKICARAHKLGKFMLEKMTQVAQETGQLENVRGIGALVAADLIPQPGRLRLGYEVYQEAVKQGVLLRPIGNTLYWLPPLNIDFDLIEVLQKVTKNAIKILSLGF

SEQ ID NO: 8378 - protein, 499 aa, Glycyrrhiza echinata
MEILSLLSYSVFYLALFFIFNIVIRARKFKNLPPGPPSLPIIGNLHHLKRPLHRTFKGLSEKYGHVFSLWFGSRLVVVVSSASEFQQCFTKNDVVLANRPRFLSGKYIFYNYTTLGSTSYGEHWRNLRRITALDVLSNHRINSFSGIRRDETQRLITRLADDSSTNFAEMELSSRLYDMTFNNIMRMISGKRYYGEDCDTSDLQEASQFRDMVSELLQLSGANNKTDFMPLLRFLDFENLEKRLKDISGKTDAFLRGLIEEHRTKKERANTMIDHLLNLQDSQPEYYTDQIIKGLALAMLLAGTDSSAVTLEWSMSNLLNHPEVLKKVKDELDTHVGQDRLVDESDLPKLTYLKNVINETLRLYTPAPLLLPHSTSDECNIGGYKVPQDTIVLINAWAIHRDPELWTEATTFKPERFEKKGELEKLIAFGMGRRACPGEGLAIRAISMTLALLIQCFDWKLINGDKIDLAERDGFTLTKLVPLKAMCKSRPVINKVFKQ

SEQ ID NO: 8379 - protein, 272 aa, Shigella flexneri 2a str. 301
MKPENKLPVLDLISAEMKTVVNTLQPDLPSWPATGTIAEQRQYYTLERRFWNAGAPEMATRAYMVPTKYGQVETRLFCPQPDSPATLFYLHGGGFILGNLDTHDRIMRLLASYSQCTVIGINYTLSPEARFPQAIEEIVAACCYFHQQAEDYQINMSRIGFAGDSAGAMLALASALWLRDKQIDCGKIAGVLLWYGLYGLRDSVTRRLLGGVWDGLTQQDLQMYEEAYLSNDADRESPYYCLFNNDLTREVPPCFIAGAEFDPLLDDSRLLY

SEQ ID NO: 8380 - protein, 238 aa, Oryza sativa (japonica cultivar-group)
MGEEAPEEYELGGGEDERVMEWEAGLPGADELTPLSQPLVPAGLAAAFRIPPEPGRTLLDVHRASAATVSRLRRASSSSSSSFPAFASKGAGAGADEAESGGGANGGNGNTNNNSSKRARLVWTPQLHKRFVEVVAHLGMKNAVPKTIMQLMNVEGLTRENVASHLQKYRLYVKRMQGLSNEGPSPSDHIFASTPVPHASLHDQVPSPYHPHPHHHSYNNAAYAATVSSYHHYHHANH

SEQ ID NO: 8381 - protein, 497 aa, Pseudomonas aeruginosa UCBPP-PA14
MTTLTRADWEARAKDLKIEGRAFVNGEYSNAASGETFDCLSPVDGRFLAKVASCDLADAEQAVKVARNAFDSGAWSRLAPAKRKQAMIRFADLLLENAEELALLETLDMGKPISDSLHIDVASAANSLRWSAEAIDKIYDEVAATPHAELGLVTREPVGVVAAIVPWNFPLLMSCWKLGPALATGNSVILKPSEKSPLTAIRIAQLAVEAGIPKGVFNVLPGYGHTVGKALALHMDVDTLVFTGSTKIAKQLMVYAGESNMKRVWLEAGGKSPNIVFADAPDLKAAAEAAAGAIAFNQGEVCTAGSRLLVERSIKDKFLPLVIEALKGWKPGNPLDPETNVGALVDTQQMNTVLSYIEAGHNDGAKLVAGGKRTLEETGGTYVEPTIFDGVTNAMKIAREEIFGPVLSVIEFEDAEEAVRIANDTPYGLAAAVWTSNLSKAHLTAKALRAGSVWVNQYDGGDMTAPFGGFKQSGNGRDKSLHAFDKYTELKATWIKL

SEQ ID NO: 8382 - protein, 478 aa, Buchnera aphidicola str. Bp (Baizongia pistaciae)
MNVNLMWFRNDLRLSDNSALHFSCRNNASTVLALFIATPKQWERHCLAPKKKMLIYKNIVALKKKITELGIIFYYYESTDYLESTNYIIEFCKIHKVTSIFFNLEYEFYERQRDKIIKKKLKKNNIIINCFHDSVLITPGSIKNSYGKMYKKFSYFKYKCIKQLQLNIPSCFPKPQNKNLHDHYSLDFTIPIFHTYLEKFDANIFPIGEDIVYEKLKFFIKYAFNKYNFDQEIFELNSTSMLSAHLSIGVISPRQCVTLLFKEYPDIIHKLEECKWINELLWREFYQHLLYFYPNIGQNQSLYHWENRIKWDNNLYYLNLWKQGNTGYPIIDAGMRQLKQLGWISNRLRMITASFLVKNLLIDWRKGEEYFMSQLIDGDFASNNGNWQWIASVGTDSMPYFRIFNPMLQSKKFDINAKFIRKYIPELSNVSTYNIHNPCDNNKTNKIHSKYPQPIINYYHSKKKTLLVFKHAKCSNKL

SEQ ID NO: 8383 - protein, 400 aa, Aspergillus nidulans FGSC A4
MAPRTMKALNYVGPFNVKVQEVEMPCLEHPDDIIVKITSAAICGSDLHMYEGRTAAEAGITFGHENLGIVEELGDGVTLLKKGDRVVMPFNVADGRCRNCEDGKTAFCTGVNPGFAGGAYGYVAMGPYRGGQAQYLRVPYADFNALKLPPGTEHEADFILLADIFPTGWHGIEISGFQPGDSVAVFGAGPVGLMAAYSAQIRGASRVYVVDRVPERLRAAEKIGAVPIDFTAGDAVDQIIAANGGEMVDRSVDAVGYQAVSGTKDNATEVPNIVLENMIRVTRACGGLGIPGLYVPSDPGAGDTATAKGMISLSFGKLFEKGLTLGTGQCNVKAYNRQLRDLIIAGKARPSFVVSHEISLDEAEIAYDKFDKRIEGYTKVIIHPNGGFQDKRPPVVNSPL

SEQ ID NO: 8384 - protein, 487 aa, Eschscholzia californica
GTSTVALIAVIISSILYLLFGGSGHKNLPPGPKPWPIVGNLLQLGEKPHAQFAELAQTYGDIFTLKMGTETVVVASTSSAASEILKTHDRILSARYVFQSFRVKGHVENSIVWSDCTETWKNLRKVCRTELFTQKMIESQAHVREKKCEEMVEYLMKKQGEEVKIVEVIFGTLVNIFGNLIFSQNIFELGDPNSGSSEFKEYLWRMLELGNSTNPADYFPMLGKFDLFGQRKEVAECLKGIYAIWGAMLQERKLAKKVDGYKSKNDFVDVCLDSGLNDYQINALLMELFGAGTETSASTIEWAMTELTKNPKITAKIRSEIQTVVGERSVKESDFPNLPYLEATVKETLRLHPPTPLLLPRRALETCTILNYTIPKDCQIMVNAWGIGRDPKTWTDPLTFSPERFLNSSVDFRGNDFSLIPFGAGRRICPGLPIANQFIALLVATFVQNLDWCLPNGMSVDHLIVEEKFGLTLQKEPPLFIVPKSRV

SEQ ID NO: 8385 - protein, 364 aa, Zea mays
GRVGAEEAISLVEALAVQLTQREGELIYEKAEVKKLANFLKQATEDARKVAEEERALALAEIEKARAAIEKVEKAWHVHDFASSSREKAEIEELRKEVREARRIKMLHQPSKVMDMEFELQALRTLISEKTQLCNQLKKELAMIKRLEDDSSGLFELEGSNTLGSQLCIIPRVDGASNIANCPIQWYRVISGGTRELISGATKFMYAPEPFDVGRLLQAEIVLNADKIIVQTDGPVDNAAGLERYVDSLMKRTDIEFNVVVTQMNGKDYSSNSVHVFHIGKLRIKLRKGWSTKARESYSTTMKLCGSRGGGNAAARAVFWHPRKGSSYTLAFETDRDRNAAIMIARKFASNCNIALAGPGDQGT

SEQ ID NO: 8386 - protein, 411 aa, Chlamydomonas reinhardtii
MQIGFVSAESGQGRAKNVRNILLKNSVNIMLCAICWWAVGYAFAYGNSGGGFIGTSRFFSDGESFGSKPWFFTWTFCLSCVTIASGCLAERTHLFVYPVYTAVVSIAVHPVIAHWVWAPDSWLNSMTGSPCRFLDFAGGAVVHTVGGLTGLIGAMLCGPRLGRFEDGVGKDIPGHDVSSVSLGSLMLWFGWYGFNCGSTYIYMAQGGSEASAAVSRVALNMTLCASVAGMTSLVVSSIQTGTFDLAVCCNGLMAGLSASTSNVGFLTPWAACITGALAGLLYVGISRLLVRMGVDDPLDSSAIHCGSGILGVLVSGFLARPSYVMQMVGCNCGGVVYATNGGMQLGMQLLGLSCSMVWTAMWALLTFGILKKLQLLRVDQQTELAGIDNMEHGGPAYPEFLQRVQSTRPGY

SEQ ID NO: 8387 - protein, 170 aa, Triticum aestivum
MAAFLRSKCSSVGRTLMGSVGNNLYGGINSSAETVTRPSHCDAISQQIRTFIQMRTNLKVVDNSGAKRVMCIQSLRGKKGARLGDMIIGSVKEAQPRGKVKKGDVVYGVVVRAAMKKGRSDGSEVQFDDNAIVIVNNKGELIGTRVFGPVPHELRKKKHLKILALAEHIV

SEQ ID NO: 8388 - protein, 277 aa, Streptomyces coelicolor A3(2)
MSSKVPPIILNNGVEMPQLGFGVWQVPDDDAQTAVALALEAGYRSIDTAAIYGNEEGTGRAIAASGLAREDLFVTTKLWNSDQGYDSTLRAFDTSMAKLGLEYLDLYLIHWPMPAKERYVDTYKAFEKLLADGRVRAIGVSNFLPEHLERLTAETSVIPAVNQIELHPHLQQHAAREVHAEQGIATEAWSPLGSGKGILDIPAIVAIAQKHGRTPAQVVLRWHLQLGNVVIPKSVTPSRIKENIDVFGFSLDTEDLAAISALNEDRRLGSDPADVNS

SEQ ID NO: 8389 - protein, 159 aa, Triticum aestivum
MAGMVFGLENPMMTALQHLLDIPDGETGAPGGEKQGPTRAYVRDARAMAATPADVKELPGAYAFVVDMPGLGSGDIQVQVEDERVLVISGERRREEKEDTKYLRMERRMGKLMRKFVLPENADMEKISAVCRDGVLTVTVEKLPPPEPKKPKTIQVQVA

SEQ ID NO: 8390 - protein, 320 aa, Buchnera aphidicola str. Bp (Baizongia pistaciae)
MIKRIGVLTSGGDAPGMNAAIRGVVRTALSRNLEVFGIYDGYLGLYENRMILLDRYSVSDIINKGGTFLGSARFSNFFKKDIRSIAIKNMQQRNIDFLVVIGGDGSYVGAQKLTEMGFPCISIPGTIDNDVAGTDYTIGYFTALETVVEAIDRLRDTSSSHQRISIVEVMGRNCGDLTLSAAIAGGCEFIVLPEIEFTKEELVKEIKNGIKKGKKHAIVAITEYICNVEKLAKYIQRETCRETRATILGHIQRGGAPVVYDRILASRMGEYSVDILLQGFQGRCIGTINEKMVHHDISDALKNMKRPFKFDWLKTAKQLY

SEQ ID NO: 8391 - protein, 78 aa, Glycine max
  misc_feature (8)..(8): Xaa can be any naturally occurring amino acid
  misc_feature (42)..(42): Xaa can be any naturally occurring amino acid
  misc_feature (65)..(65): Xaa can be any naturally occurring amino acid
  misc_feature (74)..(74): Xaa can be any naturally occurring amino acid
FERFFPQXSARLSVPGGPSVACSTAKAVEWDAAWSNNLDPSXRAALGVHASAYGNQVKAVEPEKXIHTMEVSPXGVAI

SEQ ID NO: 8392 - protein, 340 aa, Methylococcus capsulatus str. Bath
MHKITLIPGDGIGPSIVDAAVKVIEATGVQVQWDTQSAGMAAVEKFGTPLPDATLDSIRANRICFKGPLTTPVGGGYRSVNVTLRQAFNLYANVRPAISFEGTDTAFSDVNLVTVRENTEGLYAGIEHFIKVDEEKIAAESIAVVTRKGSERIIRYAFDYARRARRKKVTLVHKANILKCTSGLFLEIGREIAKEYPDIEFDDRIVDACSMQMVMQPQRFDVLVTTNLFGDILSDLAAGLIGGLGLTAGANIGTDAALFEAVHGSAPDIADKGIANPTAMIMAGAMMLEHIGEPDAARRIERAVREVIEDGRSVTPDLAKDSPCGTAQMAEAIVERVRQA

SEQ ID NO: 8393 - protein, 284 aa, Gibberella zeae PH-1
MDTALTAASRLSLRNSTSIIPCIGFGSYKIRGETCAAAVLAALPAGYRHIDSAALYRNEVRVREAIEQSGVFREDLFLTTKVGSPRRKTEKTEAYEDVIEAVERIAGKDGYVDLLLMHVPGPSREHRHSLWEAMERAKREARARNIGVSNFRVRHLDEMKEYATEWPPSVNQIELHPWCQQKEVVKYCQDNEIIIEAYSPLATGARLEDPLVEGISTKHDKSHAQVLIRYSLQKGWVPLPKSSRPDRISENFNVFDFVLDEDDMETLDDLDKGSAGAIFKMNVG

SEQ ID NO: 8394 - protein, 654 aa, Zea mays
  misc_feature (165)..(165): Xaa can be any naturally occurring amino acid
  misc_feature (202)..(202): Xaa can be any naturally occurring amino acid
  misc_feature (307)..(307): Xaa can be any naturally occurring amino acid
  misc_feature (315)..(315): Xaa can be any naturally occurring amino acid
  misc_feature (329)..(329): Xaa can be any naturally occurring amino acid
  misc_feature (402)..(402): Xaa can be any naturally occurring amino acid
  misc_feature (525)..(525): Xaa can be any naturally occurring amino acid
  misc_feature (584)..(584): Xaa can be any naturally occurring amino acid
  misc_feature (635)..(635): Xaa can be any naturally occurring amino acid
MISARTAAASPASLWKRGGRSEGGGSCDGCRTYRNTLRRAAAAKVRALPSGAVEAVKMGSAAEVEQEEAEVAAAADGVVVEDHYGEDSATEELPIMPWAFSVASGYTLLRDPHHNKGLAFTEKERDAHHLRGLLPPAVVPQELQIKKIMHNLRQYQVPLQRYMAXMMDLQERNERLFYKLLIDNVEELLPVVYTPTVGEACXQKYGSIFRQPQGLYVSLRDKGKVLEVLRNWPHRNIQVICVTDGERILGLGDLGSQGMGIPVGKLALYTALGGVRPSACLPITIDVGTNNEKLLNDEFYIGLRQKXRATGEEYXMSLMEEFMAAVKQXIYGEKVLIQFEDFANHNAFNLLAKYSKSHLVFNDDIQGTASVVLCRFVSSTQRWLVGTLAEHTYLFLGAGEAXGTGIAELIALEISKQTSAPIEECRKKIWLVDSKGLIVDSRKNSVQSFKKPWAHEHEPLTTLYDAVQSIKPTVLIGTSGVGRTFTKEVVEAMASFNERPIIFSLSNPTSHSECTAEEAYNWTQXVVQYLASGSPFDPVEYDGKVFVPGQSNNAYIFPGFGLGLVISGAIRVHEDMLLAASEAXLAAQATQENFDKGSIFPPFTNIRKISARIAAAVAAKAYELGLATRLPPPRXDLVKYAQSCMYTPVYRNYR

SEQ ID NO: 8395 - protein, 189 aa, Triticum aestivum
  misc_feature (64)..(64): Xaa can be any naturally occurring amino acid
  misc_feature (72)..(72): Xaa can be any naturally occurring amino acid
  misc_feature (105)..(105): Xaa can be any naturally occurring amino acid
  misc_feature (144)..(144): Xaa can be any naturally occurring amino acid
  misc_feature (172)..(172): Xaa can be any naturally occurring amino acid
MAPTVMASSATSVAPFQGLKSTAGLPVSRRSNGASLGSVSNGGRIRCMQVWPIEGIKKFETLSXYLPPLSTXEALLKQVDYLIRSKWVPCLEFSKVGFIFREHNXSPGYYDGRYWTMWKLPMFGCTDATQVINEVEEVKKEYPXDAYVRIIGFDNMRQVQCVSFIAFKPPGXCEESGKALNSSLTTGHI

SEQ ID NO: 8396 - protein, 355 aa, Fusarium oxysporum f. sp. lycopersici
MSRSNPPNAAGSRKISFNVSEQYDIQDVVGEGAYGVVCSAIHKPSGQKVAIKKITPFDHSMFCLRTLREMKLLRYFNHENIISILDIQKPRNYESFNEVYLIQELMETDMHRVIRTQDLSDDHCQYFIYQTLRALKAMHSANVLHRDLKPSNLLLNANCDLKVCDFGLARSAASQEDNSGFMTEYVATRWYRAPEIMLTFKEYTKAIDVWSVGCILAEMLSGKPLFPGKDYHHQLTLILDVLGTPTMEDYYGIKSRRAREYIRSLPFKKKVPFRTLFPKTSDLALDLLEKLLAFNPVKRITVEEALKHPYLEPYHDPEDEPTAPPIPEEFFDFDKHKDNLSKEQLKQLIYQEIMR

SEQ ID NO: 8397 - protein, 214 aa, Bacillus subtilis subsp. subtilis str. 168
MQATVHESKQSIMQRILTVFVFTLLIATVGLFIGQFVPVALMLPLSILEVAMIILAFWMRRRKAVGYAFVYTFAFVSGITLFPIVSHYASIAGAYVVLEAFGSTFVIFAVLGTIGAKMKKDLSFLWSFLLVAVLALAVVGIFNIFSPLNSAAMMAYSVIGTIVFSLYILYDLNQIKHRHITEDLIPVMALSLYLDFINLFINLLRFFGILSSDD

SEQ ID NO: 8398 - protein, 165 aa, Leptospira interrogans serovar Copenhageni str. Fiocruz L1-130
MRFDMNDTLYDLTATLNNGKEQKLENYKGKVLLIVNTASECAFTPQYAGLQNLYSKYKTEGLEILGFPCDQFKHQEPGSDETIKNFCQKNYGVEFPIFKKIEVNGDNAHPVFRFLRNKASGFFGNSIKWNFTKFLVDKQGNVIKRYSPITTPENIEKEIQNLLKR

SEQ ID NO: 8399 - protein, 145 aa, Brassica napus
VFGALKGALDEGLDIPHSDKRFAGFNKENKQLDADIHRNYIYGGHVSNYMKMLNEDEPEKFQTHFSQYLKKGVDAETMEELYKKVHAAIRADPNPKKTEKPAPKAHKRYNLKKLTYEERKNKLIERVKALNGAAGGADDDEDDEE

SEQ ID NO: 8400 - protein, 252 aa, Zea mays
HASVYDAICQARRLIYIIGWSMFHTIHLVRDGHDDMALGDLLRRKSQEGVQVLLLVWDDPTSRRLLGIKMEGYMGTRDEETRRFFKHSSVQILLCPRSAGKRHSWVKQQETGTILTHHQKTVILDADAGNHRRKIVAFMGGLDLCGGRYDTPKHTLFRTLQTFHKEDYYNPNFAVEDARGPREPWHDLHSKIDGPEAYDVLKNFEERWLKASKRSAAKKLSKLSRSHNDSLLWINKIPDIIAIDDKIYSMTM

SEQ ID NO: 8401 - protein, 511 aa, Agrobacterium tumefaciens str. C58
MRREPIMHEPLTAAEYKAIASDLQFPANAFIDGAFRPAGSGKTFKTINPATGETLADISACDVSDVDYAVGKARAAFDDGRWRLLPPGERKAILLTFAKLLEQHRHELAVMESLDSGKPVSECQTVDIPDTIHTIRWHAELIDKLYDNTAPVGSNALALVVREPVGVVGCVLPWNFPLLMLAWKIGPALASGCSVIVKPAEETTLTTLRVAELAHEAGIPAGVFNVVPGGGKEVGEPIGMHMDVDMVAFTGSTPTGRRFLRYAADSNLKRIVLECGGKNPAVVLDDAEDLDLVAEQVVNGAFWNMGENCSASSRLIVHAKIKDELLQRIGAYMREWRMGDPLDPQNRVGALVSKAHFDKVHSFLEDVKAENLTIVHGGKTEKGIFIEPTVVDAVPPASRLFREEIFGPILSVTTFNTLAEAVALANDTNYGLAASVYTGSLRKAIKLSREIRAGVVTVNCFGEGDATTPFGGYKESGFGGRDKSIFAHDNYCELKTIWIDVSDRSVDETVR

SEQ ID NO: 8402 - protein, 1230 aa, Cryptococcus neoformans var. neoformans
MSSFTPAFRLHHTHSSSVSPTASNDVAPSSPTPNQPHQLAARSPLYATSPNCASKITKGSSLSSSTAHHGLKYVRPSTSPLLRSPKGESFSAYLGNWGSQELITFLNIHKCGQYLAIFQKNDINGKILLDLDMTALKSMGIGKISERVRLIGGIKDLRRCVADESIRAPFTQRSYPSERTLLPSLPSHSNVLLDKWDCSSSASRLGKRQITLRPPPLDLQGHMPPRLLSHASLGIATIDTHDIHTTNSKIEVYIQQNPPGQPQSMPTKRSDSLTLCAAPSRNVGRRSPSSRHFEGCKSQTDGLTTLNLTLDRQVPSSTMNNVTLREDCHLQREERLPLSHQVPHSRNAFASPHKTSLSGRCPLARGDTTSHQPSGPAIAEQDSPVNYRISNTVTNTKEISQGDLKQPFVMKSLESQSHLLAGVSDMSHDPVTDGFKPKGKASVPLTVMSSSDISAVNANPAALSLADLRRQLVKFINTEDDTIRTVNVMHVTSGVEILERALKKFGKFGTGIHGSPDVYGDEDGDGTLEIDGWEVYTESTPDESSKPLSEFNLLKTCTFHREGTAIQDKGLFLRKKQRMQKRKNIQDFFGETPPPSMSPTSPTLITGPHLSLVQGKSQPTSGSAFSSSSRLSTLTHKGRNRASMISVMSGLGVPIINTLPSPQGNGLRLTGSVHSHEKKSMYNFFGHRPPSELISNHLTDYFPSAKKSDVEKARHSLLRLSGGTVAYKKSGIYEGDSTPDHWSKPGDNQPPSLPPFEPSQDTLSDSLQAFASSTPVHLSRPKHTVALRRRRDSDSSSRSHTSMLMQTRRNRDHSDTTSLLTVDEITAEVENRRVSTIQRGDYIEETEDSSSIEGDTLPQDDESKGVLRAICSDSNKLVDSGKSYQGDSDIDQQHELEDEEEDKLDDDEEEEEEEEEEDNEQGKAFTSTGSKRIIKWIKGALIGAGSFGSVYLGMDAQSGLLMAVKQVELSAGSAKNEDRKRSMLSALEREIELLKELQHENIVQYLDSSVDANHLNIFLEYVPGGSVAALLNNYGAFEEALVRNFVRQILTGLNYLHMRGIVHRDIKGANILVDNKGGIKISDFGISKKVENSLITGLRTNRPSLQGSVFWMAPEVVKQTSYSPKADIWSVGCLVVEMLTGTHPWADLTQMQAIFRIGSLARPAPPSDISVQADEFLRKTFEIEHAKRPTAAQLLKHPFIGSPRVRTAASNFINGAIASETMEVQVVEES

SEQ ID NO: 8403 - protein, 488 aa, Eschscholzia californica
  misc_feature (192)..(192): Xaa can be any naturally occurring amino acid
MEVVTVALIAVIISSILYLLFGSSGHKNLPPGPKPWPIVGNLLQLGEKPHAQFAELAQTYGDIFTLKMGTETVVVASTSSAASEILKTHDRILSARYVFQSFRVKGHVENSIVWSDCTETWKNLRKVCRTELFTQKMIESQAHVREKKCEEMVEYLMKKQGEEVKIVEVIFGTLVNIFGNLIFSQNIFELGXPNSGSSEFKEYLWRMLELGNSTNPADYFPMLGKFDLFGQRKEVAECLKGIYAIWGAMLQERKLAKKVDGYQSKNDFVDVCLDSGLNDYQINALLMELFGAGTETSASTIEWAMTELTKNPKITAKLRSELQTVVGERSVKESDFPNLPYLEATVKETLRLHPPTPLLLPRRALETCTILNYTIPKDCQIMVNAWGIGRDPKTWIDPLTFSPERFLNSSVDFRGNDFSLIPFGAGRRICPGLPIANQFIALLVATFVQNLDWCLPNGMSVDHLIVEEKFGLTLQKEPPLFIVPKSRV

SEQ ID NO: 8404 - protein, 96 aa, Glycine max
MMMVHPRDQVGGETHKNLVEPNVAASKKARNCACMVSYSVLILALLTLSILLLPLVLPPLPPPPLLLLFVPVFILVVLFFLAFSPSTLPNMAVLTS

SEQ ID NO: 8405 - protein, 163 aa, Triticum aestivum
  misc_feature (54)..(54): Xaa can be any naturally occurring amino acid
  misc_feature (69)..(69): Xaa can be any naturally occurring amino acid
  misc_feature (94)..(94): Xaa can be any naturally occurring amino acid
  misc_feature (99)..(100): Xaa can be any naturally occurring amino acid
  misc_feature (102)..(102): Xaa can be any naturally occurring amino acid
  misc_feature (108)..(108): Xaa can be any naturally occurring amino acid
  misc_feature (113)..(113): Xaa can be any naturally occurring amino acid
  misc_feature (129)..(129): Xaa can be any naturally occurring amino acid
  misc_feature (131)..(132): Xaa can be any naturally occurring amino acid
  misc_feature (140)..(140): Xaa can be any naturally occurring amino acid
  misc_feature (142)..(142): Xaa can be any naturally occurring amino acid
  misc_feature (148)..(149): Xaa can be any naturally occurring amino acid
  misc_feature (151)..(151): Xaa can be any naturally occurring amino acid
  misc_feature (154)..(154): Xaa can be any naturally occurring amino acid
  misc_feature (157)..(157): Xaa can be any naturally occurring amino acid
MAPTVMASSATSVAPFQGLKSTAGLPVSRRSNGASLGSVSNGGRIRCMQVWPIXGIKKFETLSYLPPLXSTEALLKQVDYLIRSKWVPCLELTXLGYLXXEXNASPGXTKGRXGTMWKLPMFGCTDATXVXXEVEEVKKXYXPYVRIXXFXICXKVXCVSSSL

SEQ ID NO: 8406 - protein, 162 aa, Arabidopsis thaliana
MDPMDIVGKSKEDASLPKATMTKIIKEMLPADVRVARDAQDLLIECCVEFINLISSESNEVCNKEDKRTIAPEHVLKALQVLGFGEYVEEVYAAYEQHKYETMDSQRSVKMNSGAEMTEEEAAAEQQRMFAEARARMNGGVTVPQPEQLEEPQQQQQTSLQS

SEQ ID NO: 8407 - protein, 302 aa, Haloarcula marismortui ATCC 43049
MKRPQQSADMAPEQNGTTTVPTLGFGTYRTGGYKCYNAVKNALDCGYTHIDTAMAYENEAAVGRAIEQSSVDREDIFLTTKIKGYPEMVEYERLIEAAKGCLERLGTEYLDLLLVHWWNPLADMEETFNALNTLVDDGLVGQIGVSNFSIKELKQAMRLSDAPIATNQIEYHPYWGDEELVRFCQDNDVTVTAYSPLAEGRAVEDDVLRSIGDRYGKSAAQVSIRWLIQQENVVTIPKAATPKHIEANIDVFDFELTDRDMRRIRKLKPPFWYRENREGGSIYEARSVLGNFVPDSLYNRIA

SEQ ID NO: 8408 - protein, 512 aa, Sorghum bicolor
MDASLLLSVALAVVLIPLSLALLNRLRLGRLPPGPRPWPVLGNLRQIKPIRCRCFQEWAERYGPVISVWFGSGLTVVVSTSELAKEVLKENDQQLADRPRNRSTQRFSRNGQDLIWADYGPHYIKVRKLCNLELFTPKRLEALRPIREDEVTAMVESVYRAATAPGNEGKPMVVRNHLSMVAFNNITRLAFGKRFMNANGDIDEQGREFKTIVNNGIKIGASLSVAEFIWYLRWLCPLNEELYKTHNERRDRLTMKIIEEHAKSLKESGAKQHFVDALFTLKQQYDLSEDTVIGLLWDMITAGMDTTVISVEWAMAELVRNPRVQKKLQEELDRVVGRDRVMLETDFQNLPYLQAVVKESLRLHPPTPLMLPHKASTNVKIGGYDIPKGANVMVNVWAVARDPKVWSNPLEYRPERFLEENIDIKGSDFRVLPFGAGRRVCPGAQLGINLVASMIGHLLHHFEWSLPEGTRPEDVNMMESPGLVTFMGTPLQAVAKPRLEKEELYNRVPVEM

SEQ ID NO: 8409 - protein, 506 aa, Petroselinum crispum
MMDFVLLEKALLGLFIATIVAITISKLRGKKLKLPPGPIPVPVFGNWLQVGDDLNQRNLVDYAKKFGDLFMLRMGQRNLVVVSSPELAKDVLHTQGVEFGSRTRNVVFDIFTGKGQDMVFTVYSEHWRKMRRIMTVPFFTNKVVQQYRFGWEDEAARVVEDVKANPEAATNGIVLRNRLQLLMYNNMYRIMFDRRFESVDDPLFLKLKALNGERSRLAQSFEYHFGDFIPILRPFLRGYLKLCQEIKDKRLKLFKDYFVDERKKLESIKSVDNNSLKCAIDHIIEAQQKGEINEDNVLYIVENINVAAIETTLWSIEWGIAELVNNPEIQKKLRHELDTVLGAGVQICEPDVQKLPYLQAVIKETLRYRMAIPLLVPHMNLHDAKLAGYDIPAESKILVNAWWLANNPAHWNKPDEFRPERFLEEESKVEANGNDFKYIPFGVGRRSCPGIILALPILGIVIGRLVQNFELLPPPGQSKIDTAEKGGQFSLQILKHSTIVCKPRSL

SEQ ID NO: 8410 - protein, 210 aa, Triticum aestivum
MDEEEHEVYGQEIPVDGDMEGADVDMTAAGDDAAKELDEMKRRLKEMEEEAAALRDMQAKVAKEMQGGDANASTAEAKEQVDARSVYVGNVDYACTPEEVQQHFQACGTVNRVTILTDKFGQPKGFAYVEFLEQEAVQEALNLNESELHGRQIKVSPKRTNVPGMKQRPPRGFNPYHAYPYRSYGAPYFPPYGYGRVPRFRRPTRYRPYF

SEQ ID NO: 8411 - protein, 492 aa, Pseudomonas putida KT2440
MAVFASDSFGQLKVEKIMTAQWNHYINGEYVSPESEEYIHEFIPTTALPGDSIARGSAADVDKAVRAAAAAQPAWNARKPIERGRILLAIARLVRANAAAFCAKEAEETGKPLKMAAFEIEACAQYFEYYGGLATAIQGETINLGPSYHAYTTREPFGVVGVILPWNSPLNQAGRAIAPALVSGNTVVVKPSEFTSVTMLQFAELVVKEAGLPPGVLNVVTGTGKETGEPLVKHPLIRKVAFTGSVRAGREIGKLAADRIIPLSLELGGKSPNIVFEDADLDRAVAGSVFAFTVNTGQVCLAGTRCLVHESIFEKFSKKLAGAVEALQFSDGESFGLGPLTTKAQFEQVHRYNELAIQEGAHCLVGGEAPSDKTGWYVRPTVYTNVNNSMRIAREEIFGPVLVLIPFKDENEAVAIANDSDYGLAAGVWTTDLARAHRVSAQIEAGQVYVNEYPSGGVETPFGGFKQSGHGREKGIEALHHYTQTKTTIIRI

SEQ ID NO: 8412 - protein, 181 aa, Zea mays
  misc_feature (40)..(40): Xaa can be any naturally occurring amino acid
MASSMLSNAAVATTVVNRNAGAQASMVGLKSVAAFPLTKXKSTNDLSSLPTNGGRVQCMKVWPTQNMKRYETLSYLPPLTTDQLARQVDYLLNNKWVPCLEFETEHGFVYREHHNSPGYYDGRYWTMWKLPMFGCTDPAQVLNELEECKKEYPNAFIRIIGFDSNRQVQCVSFIAYKPEGY

SEQ ID NO: 8413 - protein, 505 aa, Populus kitakamiensis
MDLLLLEKTLLGSFVAVLVAILVSKLRGKRFKLPPGPLPVPVFGNWLQVGDDLNHRNLTDLAKKFGDIFLLRMGQRNLVVVSSPDLSKEVLHTQGVEFGSRTRNVVFDIFTGKGQDMVFTVYGEHWRKMRRIMTVPFFTNKVVQQYRYGWEEEAAQVVEDVKKNPEAATNGIVLRRRLQLMMYNNMYRIMFDRRFESEDDPLFNKLKALNGERSRLAQSFDYNYGDFIPILRPFLRGYLKICQEVKERRLQLFKDYFVDERKKLASTKNMSNEGLKCAIDHILDAQKKGEINEDNVLYIVENINVAAIETTLWSIEWGIAELVNHPEIQKKLRHELDTLLGPGHQITEPDTYKLPYLNAVVKETLRLRMAIPLLVPHMNLHDAKLGGFDIPAESKILVNAWWLANNPAHWKNPEEFRPERFLEEGAKVEANGNDFRYLPFGVGRRSCPGIILALPILGITLGRLVQNFELLPPPGQSKIDTSEKGGQFSLHILKHSTIVAKPRSF

SEQ ID NO: 8414 - protein, 189 aa, uncultured bacterium
MDIDFKKLAPWNWFKKEQEEQQSTASLPVQRNDLPVAGGPVSPILQLHREIDRLFDDAFRGFGFPTLAMPRWPSDWPGMLKPALDIQETDKQYKIALEVPGIEEKDIQITLDNDVLLVRGEKRQEQETKDGGFHRVERSYGSFQRALNLPADANQDTIKAAFKNGVLTITMDKREASTPKQGRSIPING

SEQ ID NO: 8415 - protein, 499 aa, Gibberella zeae PH-1
MANPFQRPFQLENESLFHCTSLINGDFVSAKEGKTFNVVDPGSGKTWASCPDCTASDVDSAVASSYETFKTYSKTTPRFRAQTLMKWHNLILAAREDLARILVHETGKTLVEARGEIDYALTFVWWFSGEADRAHGTSMSCAIPGRRAVTIKQPIGVAAALVPWNFPIALALRKAAAALAAGCTMVVKPSPETPLTCVSIAHLALEAGFPRGALNVVTTSLENTPTVAEALCLDARVKKVSFTGSTRVGKIIASFCAPNLKKTTFELGGNCPFIVFDDADVGQAVSQLMPLKWRHAGQACITSNRVFVHSSIYDTFVEKVVQETRGLKLGHGMEEGSTMGALTTPRGLDKAEELYQDAISKGAKTVLGTGKREEGQGYFMAPTILTEMEDDMLMTHEEIFAPVLGFYRFESEEEVVQRANDTPLGLASYIFTKNVDRLWRLFENLDAGMIGLNAGNSSSAEAPFGGIKDSGHGKESGKDVAIDEFLITKTATLTIDGHY

SEQ ID NO: 8416 - protein, 431 aa, Methylococcus capsulatus str. Bath
MSGPRVLIEGGRIVDPASGFDGTGVVCVADGVIVGVGSRPDGFEADHRIDAGGRIVCPGFIDLCARLREPGQEHKGTIVSEGAAAVAGGITTLCCPPDTTPVIDTPAVVKLVTERAEQAGKARVLPIGALTRSLNGKDLSEMHALKRAGCLALSNADRPLANLLVLRRALEYAASFDLVVVFRPEDPWLCSQGCVHEGAVGSRLGLPGIPETAETVAVAQALPLIEQTGVRAHFGQLSSGRAVEMVAEATARGVHVSADVAVHHLHLTESSVDGFDALCHSRPPFRTTADRDALLAAVADGRISAVCSDHQPHEPDAKLDVFPETEPGLSSLQTLLPLMYALVAEGRLPLSAAIARLTVGPAAILGLESGRLAPGAPADVCVFDPAAVWVPAEGGWVSAGRNTPFWERALTGRVTATLLGGRLVYPGETAS

SEQ ID NO: 8417 - protein, 241 aa, Glycine max
IRLEKKVSLELGGNAPCIVFDDADLDVAVKGTLAAKFRNSGQTCVCANRIIVQEGIYEKFANALRDTVQNMKVGDGFSEGVAQGPLINEAAVKKVESLIHDATSKGAKVILGGKRHSLGFTFYEPTVISDVNSDMRISREEAFGPVAPLLRFKTEEDAIRIANDTNAGLGSYIFTNSIQRSWRVAEALEYGLVGVNEGVISTEVAPFGGFKQSGLGREGSKYGMDEYLEIKYVCLGNMHKA

SEQ ID NO: 8418 - protein, 223 aa, Thermoplasma volcanium GSS1
MKIFLDTANISEIKEGIDLGLVDGVTTNPTLISKEAGGSKKYAEIIKEILKIVDGPVSVEVVSTKSDGMVEEARKIHALGDNAVVKIPMTDEGLKAIRKLSQENIETNCTLVFNPIQALLAAKSGATYVSPFVGRLDDIGQDGMQIIDEIKTIFNNYIIKTQILVASVRNPIHVLRAAIIGADVVTIPFSVLKLLIKHPKTDEGLTRFLEDWKKVSPDGKFII

SEQ ID NO: 8419 - protein, 285 aa, Xanthomonas campestris pv. campestris str. ATCC 33913
MSTNDNWYIEHFQPTGSAIGYRISGKLDEVQSPFQKIEIYQTTDWGKLMIIDGAVMLTSRDNFFYHEMISHPALFTHAAPKRVVIIGGGDCGTLREVLKHPGVESATQCDIDEQVTRMSEKYFPELCDSNDDARAELLFDDGVAYMANCPAGSVDIVIVDSTDPVGPAEGLFNKSFYESCFKALKDDGILVQQSESPLALLDLIKEMRTEMGKAGFQSFKTLPFPQPCYPTGWWSVTMASKQANADFAFRQADAQAKGFDTLYYTAHLHTGVLVAPPFVAKALGE

SEQ ID NO: 8420 - protein, 437 aa, Saccharomyces cerevisiae
MLEHQLTQEDLEFDKKHIWHPYTSITTPLKVYPITKAEGSYLYLDNGTKVVDGMASWWCVQQGYNNHRLNAAAISQINKMSHVMFGGITHKAGIDFCKKLLALLPDTLECALLADSGSISVDIAMKMALRYHHSLGNTTKKRFLTIKKGYHGDAFGAVSVCDPVNSRHNTYNGFLAENIFCKAPEVRFDCREKDVEKLVEELDVKPFAEIIDKHHSEISGVVMESIVQGAGGLRMYHPYFLKRVRALCNDFNILLILDEVAVGLGRTGMLFGFEHAGIVPDIVCLGKTLTAGYLTLSATVTTREIGDQISSGPEGCFMHGQTYMANPLACAVASENLSILMEGKWKSQVRQIEVQLKKELVPLLEHPIVADVRILGAIGVVEVTKRVNVEVLQEKFIKAGAWIRPFGNIIYILPPYIITSEELTVLTEAIRSVLDFI

SEQ ID NO: 8421 - protein, 437 aa, Saccharomyces cerevisiae
MCEHQLTQEDLEFDKKHIWHPYTSITTPLKVYPVTKAEGSYLYLDNGTKVVDGMASWWCVQQGYNNHRLNAAAISQINKMSHVMFGGITHKAGIDFCKKLLALLPDTLECALLADSGSISVDIAMKMALRYHHSLGNTTKKRFLTIKKGYHGDAFGAVSVCDPVNSRHNTYNGFLAENIFCKAPEVRFDCREKDVEKLVEELDVKPFAEIIDKHHSEISGVVMESIVQGAGGLRMYHPYFLKRVRALCNDFNILLILDEVAVGLGRTGMLFGFEHAGIVPDIVCLGKTLTAGYLTLSATVTTREIGDQISSGPEGCFMHGQTYMANPLACAVASENLSILMEGKWKSQVRQIEVQLKKELVPLLEHPIVADVRILGAIGVVEVTKRVNVEVLQEQFIKAGAWIRPFGNIIYILPPYIITSEELTVLTEAIRSVLDFI

SEQ ID NO: 8422 - protein, 391 aa, Corynebacterium crenatum
MSTLETWPQVIINTYGTPPVELVSGKGATVTDEQGNVYIDLLAGIAVNALGHAHPAIIEAVTNQIGQLGHVSNLFASRPVVEVAEELIKRFSLDDATLAAQTRVFFCNSGAEANEAAFKIARLTGRSRILAAVHGFHGRTMGSLALTGQPDKREAFLPMPSGVEFYPYGDTDYLRKMVETNPTDVAAIFLEPIQGETGVVPAPEGFLRAVRELCDEYGILMITDEVQTGVGRTGDFFAHQHDGVVPDVVTMAKGLGGGLPIGACLATGRAAELMTPGKHGTTFGGNPVACAAAKAVLSVVDDAFCAEVTRKGELFKELLAKVDGVVDVRGRGLMLGMVLERDVAKQAVLDGFKHGVILNAPADNIIRLTPPLVITDEEIADAVKAIAETIA

SEQ ID NO: 8423 - protein, 464 aa, Listeria innocua Clip11262
MLYSKENKESYLEPVFGSSAEDRDIPKYTLAKEPLEPRIAYRLVKDELLDEGSARQNLATFCQTYMEDEATKLMSETLEKNAIDKSEYPRTAELENRCVNIIADLWHAPKDQKFMGTSTIGSSEACMLGGMAMKFAWRKRAEKLGLDIYAQKPNLVISSGYQVCWEKFCVYWDIDMRVVPMDKDHMQLNTDQVLDYVDEYTIGVVGILGITYTGRYDDIYALNEKLEEYNSKTDYKVYIHVDAASGGFFTPFVEPDIIWDFRLKNVISINTSGHKYGLVYPGIGWVLWKDESYLPEELIFKVSYLGGEMPTMQINFSRSASHIIGQYYNFLRYGFEGYRTIHQKTSDVAQYLAHAVEQTGYFDIYNDGSHLPIVCYKLKDDANVKWTLYDLADRLQMRGWQVPAYPLPKNLENIIIQRYVCRADLGFNMAEEFIQDFQASIQELNNAHILFHDTQQSGVHGFTH

SEQ ID NO: 8424 - protein, 339 aa, Pseudomonas syringae pv. tomato str. DC3000
MKTFSKVMTGTLLALSIGSAFAAGDPAIEHNTQAFLDALNSGTGKPIEQLSPKDARAVLVGAQAGVKLTLPQADVSEKTITVDGKPISLNIVRPAGVKGTLPVFMFFHGGGWVLGDFQTHERLVRDLVAGSGAVAVFVNYTPSPEAHYPTAINQAYAATQWVAEHGKEINVDGKRLAVAGNSVGGNMATVVALMAKDKGTPALRYQVLLWPVTDASFDNGSYNQYAEGHFLTRNMMKWFWDNYTTDAAQRNEIYASPLRATTEQLKGLPPALIQTASADVLRDEGEAYARKLDQAGVPVTAVRYNGMIHDYGLLNVVSQVPAVRSAILQASQELKEHLK

SEQ ID NO: 8425 - protein, 492 aa, Agrobacterium tumefaciens str. C58
MNGGSRPMTSPLQHLQQSGRLKKFYIDGKWVLPSGSDKVAVINPATELEFAEIALGNDEDVALAVAAARGAFAGWARTGPADRSELLNRVHQLMQQRLELLAQALTMEMGAAINYARSVQVPLAAEHIKVARDNAASYSFLSQRGHTAILREPIGVCGLITPWNWPLYQITAKVGPALAAGCTVVLKPSELSPLSALLFAEIIEDAGFPPGVFNLVNGEGTIVGAGLSAHPDVDMISITGSTRAGILVAQAAAPTVKRVAQELGGKSPNIILADADMTRAVPLGVAAAFRNLGQSCSAPTRMIVPRSHQKHIEELAAAAALEIVVGDPLSEHTTHGPVANHAQFDRIQRMISIGMDEGAKLVVGGTGRPDGLDTGFYVRPTIFSDVDPKMQIAQQEIFGPVLSIISYDTLEEAIEIANDTVYGLGAHVQGTDLQTVRIVAEQIRSGQVHLNYPAWDPNAPFGGYKQSGNGREYGTEGMEEYLEIKSILGFYP

SEQ ID NO: 8426 - protein, 279 aa, Triticum aestivum
MATPTVEKPDGVEIREVWAENLEAEFAVIREIVDDYPYVAMDTEFPGVVCRPLGTFKSNADFNYATLKANVDMLKLIQLGLTFSDERGGLPALGPAGRPCVWQFNFRGFDPRTDVAAADSIDLLRRSGIDFARHAAEGADSRRFAELLMSSGVVLNAEIHWVTFHSGYDFGYLLKLLTGSNLPDTSSGFFDLIRIYFPVIYDIKHLMRFCNSLHGGLNKLAELLDVERVGICHQAGSDSLLTALSFNKLKESYFGGLTEKYAGVLYGLGTEGGETTSVH

SEQ ID NO: 8427 - protein, 244 aa, Zea mays
  misc_feature (13)..(13): Xaa can be any naturally occurring amino acid
  misc_feature (236)..(236): Xaa can be any naturally occurring amino acid
NGEPVAVKILDRXKVLRHKMAEQVMGSKTNVYIVLEYVTGGELFDTIANHGRMREGEARSYFQQLINAVDYCHSRGVYHRDLKPENLLLDSYGNLKVSDFGLSALSQQIKDDGLLHTTCGTPNYVAPEVLEDQGYDGAMADLWSCGVILFVLLAGYLPFEDSNLMTLYKKISNAEYTFPPWTSFPAKRLLTRILDPNPMTENSCDFRITIPEILEDEWVKKGYKRPEFVEEYDTPXDDVDAVFN

SEQ ID NO: 8428 - protein, 281 aa, Clostridium perfringens str. 13
MAINWFPGHMVKTKREIQNNLKLVDAVIEIRDARIPKSSKNPDIDTLCAGKPRVILLNKSDLTDPKVTKAWKDSLTNDETIVLEVNALKGEGLNAIKPALLKLLKEKHDRLKAKGLAKITTRAMVVGIPNVGKSTFINKMAKNNIAKTGDRPGVTKNKQWIKTKLGIELMDTPGVLWPKFEDEIVGLNLAFTGAIKDEIMDTEELALKLVERLQETNPEELMTRYKLTELHENPLDNLDAIARKRGAIMSGNQIDYNRIAGIILDEFRGGKIGKISLEKPE

SEQ ID NO: 8429 - protein, 326 aa, Coxiella burnetii RSA 493
MTEIKKLIVLTSGGDAPGMNAAIRAVVRTALHYQFEVYGATAGFAGLVNGQVVPLNSRAVANCIQRGGTILKTGRFENFRFKAVRDKAREFLKKLQIDAMIVLGGNGSFAGASKLYQEGGPQMIGIPCTIDNDIQGTDYCIGFDTACNTALQAIDKIRDTAFSHERNFLIEVMGRSSGFIAVNVGIAGGAEIIALPEFHVDIDTLTQKIKKQHGKKSASIIVAAEANQPGHSFEVAKQIKEKTGIEYRVCVLGHTQRGGTPTVKDRVLASLMGAQAIEALKKGLTEKMIAYQNGKIAVAPLPDPDNGTRYFADEALLRVNNIICAM

SEQ ID NO: 8430 - protein, 388 aa, Bdellovibrio bacteriovorus HD100
MAEYINPDYVPEPEKMNVKKGLDGVVMDTSSVSKVNPHTNSLIYRGYPVQDLAENCSFEEVAFLMYNGELPNAGQLAEFSKKERSYREISTTLLNVIKALPQKCHPMDSIRTAVSFLGAEDARIWDASPATNMDKAMMLLAKIPTMVAADYRFKKGLDFIPPKADLSIAENFFHMCFGKVPQKEVVKAFDVSLILYAEHSFNASTFTARVVTSTQSDIYSATVAGIGALKGPLHGGANEMVMHMMKEIADPAKAEQWMLDALAQKKKVMGFGHRVYRSGDSRVPTMKKYAQVMADVTGEQKWMQMYTALEKVMVDKKKIYPNLDFPAGPAYYMMGFEIDFFTPIFVMARTTGWSAHIMEQTADNRIIRPLSEYVGAEQRKVTPISERK

SEQ ID NO: 8431 - protein, 391 aa, Aspergillus nidulans FGSC A4
MGANAKAQSWLHKLEEQGMLCAFHEEGTGSLTNQTMPVNVDVDAMDPDFIKSLPITPHDMTSNQIHVHGQISEPKNRQLLLDVAREYKDRSWVDVYTRVAVLLCKKNINLISGRVLLQILPSYAYDRDKVLSHARLYAKEFESVEITKDRFCIKIPSTGPALSVCSTLEAEGIRTLGTAVFSLPQAIAASQAGCLYISPYFNEIRANFNLSLWPNVEDPATQHTMSARLMQMLEMYRKLYKETGKTQPLIKNANFISPKEALAQGEFGVDSATVSAEVLSQLANIPYDVSVRPSGIVDIPKPQYPEHQNSVSSTPKRLQHLATTDPLAAADWDGSIASTDVDYLKHNGAELEKAIKADPIASARISDALDVFLKVEGESRELIEGVMKELA

SEQ ID NO: 8432 - protein, 147 aa, Geobacter sulfurreducens PCA
MAIVKYSPFRDMMNMQEQMNRLLDLAWSKQGGEELREGAWQPPVDIFEDENAVIIKAELPGIDQKDIEVRIEDNTLTIRGERKHEEEVRKENYHRVERYYGSFQRSFSIPATIDQEKVRASSDKGVLTITLPKREEVKPKQITVEVT

SEQ ID NO: 8433 - protein, 505 aa, Populus tremuloides
MDLLLLEKTLLGSFVAILVAILVSKLRGKRFKLPPGPLPVPVFGNWLQVGDDLNHRNLTDLAKKFGDILLLRMGQRNLVVVSSPELSKEVLHTQGVEFGSRTRNVVFDIFTGKGQDMVFTVYGEHWRKMRRIMTVPFFTNKVVQQYRYGWEEEAAQVVEDVKKNPGAATHGIVLRRRLQLMMYNNMYRIMFDRRFESEEDPLFNKLKALNGERSRLAQSFDYNYGDFIPILRPFLRGYLKICQEVKERRLQLFKDYFVDERKKLASTKNMCNEGLKCAIDHILDAQKKGEINEDNVLYIVENINVAAIETTLWSIEWGIAELVNHPEIQKKLRHELDTLLGPGHQITEPDTYKLPYLNAVVKETLRLRMAIPLLVPHMNLHDAKLGGFDIPAESKILVNAWWLANNPAHWKNPEEFRPERFLEEEAKVEANGNDFRYLPFGVGRRSCPGIILALPILGITLGRLVQNFELLPPPGQSKIDTSEKGGQFSLHILKHSTIVAKPRSF

SEQ ID NO: 8434 - protein, 1563 aa, Aspergillus nidulans FGSC A4
MMDYGGHQYHQQQQPHPHPQSQQNAHLQQHHVQSPAIGAAAARQSANANANANANANAFASNSSLYRSQSQADMTGLSPSVRNMTTSSQSLLGLPAGTSYGSFSGQFQPTSTSNLLSRSSDSLGQLRSSYDSLQGVQRNMNPVTNYRHTSLNSQTLSPHAQGLSTSPQQSLDRMQQLQRQSPHTQSTSAPSNASPMLSHSQNQQYTQYQQSSPYQTQSAQYQQPVSQYQQPQKTQPTQYQQPQQYRQPQQAQYTPQTQSSPYLPQTQYPQYPSSQQPPYQQLQNYQQQQKSAQVPQSSQQSYPQQTQIPQTSQQNYQQASAQRAPQTSPVQQGYQQNSTSAQQAPQLSQQSYAPQAQKSAQGPQASPVKQSYQQPGQKPSHAGQQSYQHTAQSSAQQLPQSSQQSFLLSSAQVPQSSQQKGYQQASTQQVPQSSQPSYPQQVNKPAQLPQLSQQQSYLPGPTQVSQSSQQKSYQQAGQQGLQSSQQSYPQQAQTSAQAQSSPHVQQYQQHAQKSHHVLHPQAQQVQQNQKAARPSQPSQAQAKPSPLQSQQAQQVQVQANHTSASNAHPAQANPQPQRASQQVQAQQPAQSQKTSQQAQNQQTLPNQAYQQFYSQHAQQAQRSPYQTHMQNPQYPYTYQPQFAQQYMQSPQLRTSQATQQQYQSQQSQTSQSQSPQQSVMQKQPTTQLQQEQQPRSQAQAQPQKPPAQTNQLASKPPAKEPKKKKASKKEAKQKPAASQAVSQTASQPAPQARASQTAASQAPPQAKGSQVTAQSSASQPYASQTYGSQAPAYQFHAQASQPYAPQAHTQQNTFQTTTSQAHAAPTNSFQTNTSQSHGQAHSFQVPVSQPHASQMNTFQATPQANSLGAQGSQPTQIPSQPSTQPKVESLSQQSQPSQQVQPTTNGNGQASGTFITENPTQKKTKPGDPNHTPRKRGRPRKQPGEATKPRKPKRPRNPDGTVDLSAALPPNLAAIPGVGIPFSIAPNPPPAPPASTASSAPPAPVIGLDGNPIPQKRKRGRPRKSEADGTPRKPRPPRDPNRPKGTGRPRGRPRKVDVLARKKLEEEQAAAAAAAAHAADQNSQPGAGQPAATQAPPSQAQHGHMQAGHVQVKVNQTSQGQPSKGQGQIHQWQVNQANQSHVSQAQANQAPTNRAQVTHQTSQGQATQGQAQWQISQGKSGSGREQVGQGQFGQSVQAPSGQTNQYAQGTHPGHAHPSHGHPSQAPVQPQSQNQAARPQGQQQMQPQQHARHTHAQQAQPMQNQLRGSPMQSMQASPMQSMQASPLQNQIGQRQPVQRPPVQTSSQRPQSHLQAQVNAKPQMQVQPQKAQPQMQNHMQAKPVVHAQTTKTQGQTQQVQQAQQAQVQQAPAQGQPQKAQVQQLAQPLQMQRQAPSPMQTPAQRPHQPHLLGHGQSQLHHAQAQQGQIQGQAQTRSPTSQAQAQTHNLGKAHPHAQPTQQAHSSYPTHSTHSSHSTHSSHSAQSAQSASYPHSHPYQPQFQEQIPQLHMHSQLHHLNQQHPVYSQFSQRQQQPSMTLNPQTGQKRPSSVLDDDPRKRAYIMPHQL

SEQ ID NO: 8435 - protein, 432 aa, Ustilago maydis 521
MAIPETLQIASPSGKTLTVPTGLFINNKFVPSVDGETLETINPATGKSLGFVSAATASDVDIAVSSARTAFNTTWGRNSSPTQRASILFKLADLLEQHAVELSELESLDNGKPRWIAETMDIADTAGCFRYYAGLADKIEGKTIEQKEGEKLAFTKLEPLGVCGQIIPWNYPIGMLGWKVAPALAAGNCIVLKPAEQTPLSALRIAQLSVEAGLPEGVFNVVNGLGPIVGDAITGHMDVDKVAFTGSTAIGKRVMERAARSNLKKVTLELGGKSPVVVFDDADLDQAVNWAALGILFNQGQDCTAGSRLFVQEGIYDKFLPKLVAAFRAHTIGDPFSNSTFQGPQITQRHQQRILDYIESGKQQGATVEVGGGAWTDGQGEFANGFYVQPTIFSGCKKGMKIVDEEIFGPVLAVAKFKTEQEAQREYVHARR

SEQ ID NO: 8436 - protein, 306 aa, Aeropyrum pernix K1
MFLKWSWFLEWLTPDRATLKHIEDVIFQGRSRFQEIAVVRVSGEGKVLVLDGKTQSSESDEFMYHEALVHPAMILHGSPRKVLILGGGEGATLREVLKHRSVEKAVMVDIDETVVNVAREHLREWHRGAFDDPRAEVVIDDAWNYVASKAETGFDVVIADLVDPLEAGPATRLYSEEYYRMVKDVMNPGGVFVTQAVSISHLTEYHAIIRNTVARVFKHVESYGVYVPSFDSMWGFVVASDDKDPRILGDRGFFETRLSHQLQGAELRFLDYASMLHMLNIPKMYREAIAREKRYATLDNQVFLPA

SEQ ID NO: 8437 - protein, 317 aa, Pseudomonas putida KT2440
MQNWLELEISRREKATEAISVFELRHPNGEKLPAFTAGAHIDVKVRDGLVRQYSLSNDPVETDRYVIAVLNEPTSRGGSRAIHEQFLQGMKISVGEPRNHFPLLDADDHFVLVAGGIGVTPILAMARYLNRIGRSFEIHYCIRSRSTGAFLDVFQGPEFAGRVTLHVDDDPESTPLELARVLDKERARLYVCGPGGFMNWVLSTAEGCLSPERVHKESFSAEPIAAATDDGFEVEVASTGQVFFIPTERSITEVLEEAGVEVLVSCQQGICGSCITNVLEGEPDHRDSVLSESERKSGKVFTPCCSRSKSPRLVLDL

SEQ ID NO: 8438 - protein, 573 aa, Zea mays
PGLTGAPPRPPTCTGRPRSSPRTPSSRAPPTESRSHPQLRHRASPRPAWAHPCTGRAALLLLIPTDRKTPPLSSAASSQVSKLVKYIASAGSLQGGHSLSEPSARHYSSEPSLQATEENGFKGHSMLAPFTAGWQSTDVHPLVIERSEGSYVYDSNGKKYIDALAGLWCTALGGNEPRLVKAATEQLNKLPFYHSFWNRTTKPSLDLANDILSMFTAREMGKVFFTNSGSEANDSQVKLVWYYNNALGRPDKKKFIARSKSYHGSTLIAASLSGLPALHQKFDLPAPFVLHTDCPHYWRFRLPDETEEEFSTRLANNLENLVLKEGPETIAAFIAEPVMGAGGVILPPKTYFEKIQAVLKKYDILLIADEVITAFGRLGTMFGCDMYNIKPDLVSIAKALSSAYMPIGAILVSPEITDVIYSQSNKLGSFAHGFTYSGHPVSCAVAVETLKIYKERNIVEHVNKIAPRFQEGIKAFSGSPIVGEIRGLGLILGTEFVDNKSPNDPFPAEWGVGSIFGAECEKRGMLIRVAGDSIMLSPPLIMTPNEVEEIISKFGDALKATEERIVELKSRKN

SEQ ID NO: 8439 - protein, 136 aa, Pisum sativum
NTDITSNGERVKCMQVWPPIGKKKFETLSYLPPLTRDQLLKEVEYLLRKGWVPCLEFELLKGFVYGEHNKSPRYYDGRYWTMWKLPMFGTTDPAQVVKEVDEVVAAYPEAFVRVIGFNNVRQVQCISFIAHTPESY

SEQ ID NO: 8440 - protein, 323 aa, Aspergillus nidulans FGSC A4
MENYQKIEKIGEGTYGVVYKARELTHPNRIVALKKIRLEAEDEGVPSTAIREISLLKEMNDPNIVRLLNIVHADGHKLYLVFEFLDLDLKKYMEALPVSEGGRGRALPDGSTLSRNLGLGDAMVKKFMAQLIEGIRFCHSHRVLHRDLKPQNLLIDRDGNLKLADFGLARAFGVPLRTYTHEVVTLWYRSPEILLGGRQYSTGVDMWSCGAIFAEMCTRKPLFPGDSEIDEIFKIFRILGTPDETIWPGVTSFPDFKPTFPKWKREDIQNVVPGLEEDGLDLLEALLEYDPARRISAKQACMHPYFQHGSSYYSGRARRNGFH

SEQ ID NO: 8441 - protein, 58 aa, Zea mays
MSEGTANCVDILIAIILPTLGVFLMYRCGHQLWIWLLLSFLGYILGIIYAIYAIIKNS

SEQ ID NO: 8442 - protein, 495 aa, Zea mays
  misc_feature (218)..(218): Xaa can be any naturally occurring amino acid
MAPGSSSSRKAKALKASYRLVADNFLAVLAMVSVVAVLFAAWPISIEDLACRLHAVRPLHVLTAAILTAALAKLRRMSRPSDVYLVEYGCFWPKPCFRAPFATCLEHVRLLPYLVNEDDISWGWRLLQRSGIGEETCVPYAYHYLPPDRSFRASLDETELVIFSAVDDVFARTTAVTPADIGVVIVNCSIFTPTPVFTDMIVNRYKLRADVRSVNLSXGMGCSAALISIGLARNMLQVAPPGTHALIVSTEILSSQYYVGMDRSMLLPNCLFRMGAAAMILSNTAARGARFRLARVVRTVASARDAAYRCVFQVEDEESNTGIRLSKDLVPTAAQTLKSNIVAFGPLVLPASEKLLVALSILRRRLVQSSRGRVYRPDFRTAFEHFCIHAGGRGVIDEVQRGLGLSDEDVEASRMTLHRFGNTSSSSVVYELAYIEAKGSMRKGDRVWMISFGAGFDCSSVAWECIEPAADAAGPWADCIHRYPVQLPKLMEALD

SEQ ID NO: 8443 - protein, 244 aa, Triticum aestivum
  misc_feature (212)..(212): Xaa can be any naturally occurring amino acid
  misc_feature (221)..(221): Xaa can be any naturally occurring amino acid
MEGGGARNVSAAAAQTEGSGDDGSRKPLPPCCVKAQAAVAESEAKCHATVVSGWFTGTRSRSGKPSKAQYFNNPMWPGEAHSLKVEKILYQGKSPYQEVLVFESSTYGNVLVLDGIVQLTDKDECAYQEMVTHLALCSIPSPKNVLVVGGGDGGVLREIAKHDSVETIDICEIDQLVIDVCKDFFPRLYVGYKDPRVRLHVGDAVEFLRNSXEGKYDAIIXDSSDPIGPAQELVEKPFFQTIAR

SEQ ID NO: 8444 - protein, 143 aa, Brassica napus
MADTPSSPAGDGGESGGGSVREQDRYLPIANISRIMKKALPPNGKIGKDAKDTVQECVSEFISFITSEASDKCQKEKRKTVNGEDLLWAMATLGFEDYLEPLKVYLARYRELEGDNKGSGKSGDGSNRDAAAGGVPNEDMPSW

SEQ ID NO: 8445 - protein, 606 aa, Zea mays
  misc_feature (414)..(414): Xaa can be any naturally occurring amino acid
MATMKLGSKPEIFVLQDLTWRCTIELESDVVVEVGEMSFYLHKFPLLSRSGVLQRMISEYQAPADGGGMCTLQLDDIPGGAKAFELAAKFCYDVKIELNALNVVCLRCAAEYLRMTDDYAEGNLITQAECFLVDVLANWKDSIKALETCEGVLPTAEDLHLVSRCIRNGIRSGDTTSSAAAAAAAAGMDWWYEDVSFLSLPMFKRLIQAMEAKGMRDESIAGAIMFYAGRFLPGLKRNTSFSNALASYGADGSGGAGGGMSSRNITPRAASVSAPSEGDQRYFLEEIVALLPTKKGVASTKFLLGMLRTAMLLHASPLCRENLERRIGAQLEDASLDDLLVPNLGYHVETLYDIDCVQRILDYFMSSTDGIGTGYTSPALAEEGGGSLGIPQGATLRAPVDDGIYRAIDIYLKXAPVVPDYARPVDDGIYRAIDIYLKSHPWLSESERLPLRVVVQVLFFEQLRLRTSIAGWLIVWLPLRVVVQVLFFEQLRLRTSIAGWFFVSDNAAGGDGARPHAGGAIVPKGTAAIAGCPQADADSDVEGDAPDGKETITDVKARVSDLEKECKSMKQEIRRLGKPRRSWSLLTRKCGFGAKVQQAQTAMSGK

SEQ ID NO: 8446 - protein, 206 aa, Triticum aestivum
MGERVKGTVKWFNVTKGFGFISPEDGSEDLFVHQSAIKADGYRSLNENDVVEFEVITGDDGRTKAADVTAPGGGALAGGSRPGDGGGDRGGRGGGGYGGGGYGGGGGGGYGGGGGGYGSGGGSYGGGGGYGGGGGGGRYGGGGGGGRECYKCGEEGHISRDCPQGGGGGGGGYGGGGGRGGGGGGGGCFSCGESGHFSRECPNKTN

SEQ ID NO: 8447 - protein, 462 aa, Zea mays
MVSDGARGLLGAYELGRTLGEGNFGKVKQARHRGSGGQFAVKIMERARVLSQRADEQICREIATLKLLAHPNVVRLHEVAASKTKIYMVLELVNGGELLDRIAASEGKLPEQEARRLFQQLVDGVSYCHEKGVCHRDLKLENVLVDRKGNIKISDFGLSALPQHLGNDGLLHTTCGSPNYIAPEVLQNRGYDGSLSDIWSCGVILYVMLVGHLPFDDRNIVVLYQKIFKGDAQIPEWLSPGARNLLRRILEPDPAERIAMAEIKAHPWFQEHYVPVLPPYDDDDDHDSVKQIGAGSKTTHHINAFQLIGMASSLDLSGFFEEEDVSQRKIRFTSAQPPEDLFAEIERSATDMGFHVHRGHSKLRLTRNCDRSKNQKNPMSSSSSSFLVCTEVFELSPSLYVVELNKSHGDPALYRQLCQRICGDLGVLEMDQIFGTRPPVADDLAGLALALERRSATPLVAL

SEQ ID NO: 8448 - protein, 187 aa, Zea mays
  misc_feature (50)..(50): Xaa can be any naturally occurring amino acid
  misc_feature (121)..(121): Xaa can be any naturally occurring amino acid
MVEVVPIYTAGSKYPSSTCSPEDNSDLFYAALGGLGQFGIITRARIALEXDFESFTEDQEMLIMAENSFDYIEGFVIINRTGILNNWRASFKPQDPVQASHFQSDGRVLYCLELTKNFNSXTLEFLDRVHTSELKLRAQSLWEVPHPWLNLLIPRSSIRRFATEVFGRILVGFLSSAPSLSGHGGRV

SEQ ID NO: 8449 - protein, 329 aa, Deinococcus radiodurans
MAYPNPAGIKRVAVLTSGGDAPGMNAAIRAVVRTGAQQGIEVVGVRRGFSGLHRGEVQLLGPRDVANTIQRGGTILLTARSHTWRSPEGRAKGAAVLREWGVDGLVVIGGDGSFHGGYFLQEEHGIPVIGVPGTIDNDLYGTDHTIGYFTAVETALEAVDKLRDTGASHERIFVIEVMGRHAGHIALDVAVAGGAEEVFIPEDKKPIGDVVNIVKDSIAKGKRGSIIIVAEGYDGGAEAVAQAIHAGTGLETRVSILGHIQRGGTPVSSDRILASRLGEAAVYALMDGKKGVMVGRIGGGIAYTPLHETWEKRKDVSRDLYRCAKMLSI

SEQ ID NO: 8450 - protein, 413 aa, Listeria monocytogenes EGD-e
MEMDPNTDLSSVTRPRATPVLTTFQFDSGKVGHIWTTFSEDQIDLNFACPEVLYKMIDVLMFYLEEGAEYVRLDAVGFMWKVPGTSSIHLEETHEIVKLFRDLVDIAAPGTIIITETNVPHVDNISYFGNGEKEAHMVYQFPLPPLVLHAIHHGNAKFLRNWAKNLELPEGKRTFFNFLASHDGIGLNPVRGIIPEAEILALVNDLEEEGALVSYKQNPDGSKSPYEINVTYMDALSKQADTDDLRLARFLVAHAVLMSIPGVPAVYVQSILGSRNDYLGVEATSHNRSINRKKYDLAEITAELEQRGSLRKATYDALTKLISTRKAESLFHPEIPMEVLESTAELFVVKRSSDAESIILIHNLSEKEVSYSLDSGVYTNLYKGSTVTGSDSIKLSGYEFCWLKTKNYREEQK

SEQ ID NO: 8451 - protein, 140 aa, Listeria monocytogenes EGD-e
MTNLRKRLSRLYAEDVVDSLAARIEARVQQTQQRKLTRKDQWDEKDIVLITYGDQFKEESQKTLTTFKKMYDSYLKSAFEIVHFLPFYPYSSDDGFSVIDYKAVNPELGDWKDIKEMEKSARLMFDFVCNHMSAKSDWFK

SEQ ID NO: 8452 - protein, 170 aa, Triticum turgidum subsp. durum
MASSATSVAPFQGLKSTDGLPISRRSSSAGLSSVSNGGRIRCMQVWPIEGIKKFETLSYLPPLSTEALLKQVDYLIRSKWVPCLEFSKVGFVFREHNSSPGYYDGRYWTMWKLPMFGCTDATQVLNEVEEVKKEYPDAYVRVIGFDNLRQVQCVSFIAFRPPGCEESGKA

SEQ ID NO: 8453 - protein, 327 aa, Chlamydophila pneumoniae TW-183
MSNQFDQLKKLSTIVCDSGDPELVKASGSQDATTNPSLILKVAQEPKFQELLNEAVVWGIRQNGDDLQTLSFILDKIQVNFALEIIKNIPGRISLEIDARLSFNVEAMVQRAVFLSQLFEAMGGDKKRLLVKIPGTWEGIRAVEFLEAKGIACNVTLIFNLVQAIAAAKAKATLISPFVGRIYDWWIAAYGDEGYSIDADPGVASVSNIYAYYKKFGIPTQIMAASFRTKEQVLALAGCDLLTISPKLLDELKKSQHPVKKELDPAEAKKLDVQPIELTESFFRFLMNEDAMATEKLAEGIRIFAGDTQILETAITEFIKQIAAEGA

SEQ ID NO: 8454 - protein, 169 aa, Triticum aestivum
  misc_feature (9)..(9): Xaa can be any naturally occurring amino acid
MAPTVMASXDTSVAPFQGFKSTAGLPVSRRSNGASLGSVSNGGRIRCMQVWPIEGIKKFETLSYLPPLSTEALLKQVDYLIRSKWVPCLEFSKVGFIFREHNASPGYYDGRYWTMWKLPMFGCTDATQVINEVEEVKKEYPDAYVRIIGFDNMRQVQCVSFIAFKPPGC

SEQ ID NO: 8455 - protein, 439 aa, Escherichia coli O157:H7 EDL933
  misc_feature (92)..(92): Xaa can be any naturally occurring amino acid
MEHLHMKTRTQQIEELQKEWTQPRWEGITRPYSAEDVVKLRGSVNPECTLAQLGAAKMWRLLHGESKKGYINSLGALTGGQALQQAKAGIEXVYLSGWQVAADANLAASMYPDQSLYPANSVPAVVERINNTFRRADQIQWSAGIEPGDPRYVDYFLPIVADAEAGFGGVLNAFELMKAMIEAGAAAVHFEDQLASVKKCGHMGGKVLVPTQEAIQKLVAARLAADVTGVPTLLVARTDADAADLITSDCDPYDSEFITGERTSEGFFRTHAGIEQAISRGLAYAPYADLVWCETSTPDLELARRFAEAIHAKYPGKLLAYNCSPSFNWQKNLDDNTIASFQQQLSDMGYKFQFITLAGIHSMWFNMFDLANAYAQGEGMKHYVEKVQQPEFAAAKDGYTFVSHQQEVGTGYFDKVTTIIQGGTSSVTALTGSTEESQF

SEQ ID NO: 8456 - protein, 232 aa, Lilium longiflorum
MGRGKIEIKRIENTTNRQVTFCKRRNGLLKKAYELSVLCDAEVALIVFSSRGRVYEYSNNSIKQTIDRYKKACDSSNSNSLIQVNSQQYFQQESAKLRHQIQILTNANRHLVGEALSSLTVKELKQLENRLERGLTRIRSKKHELLFAEIEFSQKREVELQSDNMYLRAKIAENERTQAAIVQARAEFDALPTFDSRNFYQVNNMLEAPPHYHHQDQTALHLGYEAKDDSVP

SEQ ID NO: 8457 - protein, 265 aa, Glycine max
MVYVKAQKSKAYFKRYQVKFKRRREGKTDYRARIRLINQDKNKYNTPKYRFVVRFSNKDIVAQIISASIAGDIVLAAAYAHELPRYGLEVGLTNYAAAYCTGLLLARRVLKTLEMDEEYEGNVEATGEDYSVEPAESRRPFRALLDVGLIRTTTGNRVFGALKGALDGGLDIPHSDKRFAGFDKEKKELDAEVHRKYVFGGHVAAYMKILAEDEPEKYQSHFSEYIKRGIEADGIEALYKNVHAAIRADPTLKKSDKQTPKEHKR

SEQ ID NO: 8458 - protein, 282 aa, Staphylococcus aureus subsp. aureus COL
MNHIEISKDVKIPVLGFGVFQIPQEQTAEAVKEAIKAGYRHIDTAQSYLNETEVGQGIEASGIDRSELFITTKVWIENVNYEDTIKSIERSLQRLNLDYLDLVLIHQPYNDVYGSWRALEELKENGKIKAIGVSNFGVDRIVDLGIHNQIQPQVNQIEINPFHQQEEQVAALQQENVVVEAWAPFAEGKNQLFQNQLLQAIADKYNKSIAQVILRWLVERDIVVLAKSVNPERMAQNLDIFDFELTEEDKQQIATLEESNSQFFSHADPEMIKALTSRELDV

SEQ ID NO: 8459 - protein, 122 aa, Nymphaea alba
MIQPQTLLNVADNSGARKLMCIRIIGASNYRYAHIGDVIVAVIKEAVPNMPLERSEVIRAVIVRTCKELKRDNGMIIRYDDNAAVVIDQEGNPKGTRVFGSIARELRQLNFTKIVSLAPEVL

SEQ ID NO: 8460 - protein, 216 aa, Triticum aestivum
  misc_feature (114)..(114): Xaa can be any naturally occurring amino acid
  misc_feature (141)..(141): Xaa can be any naturally occurring amino acid
  misc_feature (146)..(146): Xaa can be any naturally occurring amino acid
MAPTVMASSATSVAPFQGLKSTAGLPVSRRSNGASLGSVSNGGRIRCMQVWPIEGIKKFETLSYLPPLSTEALLKQVDYLIRSKWVPCLEFSKVGFIFREHNASPGYYDGRYWXTMWKLPMFGCTDATQVINEVEESRRSXPDAYXRIIGFDNMRQVQCVSSMPQATGCKIRKAKQSSQGQLSAFNFATRHSLGSSNCFYCPRIVSHVMYTCLSNH

SEQ ID NO: 8461 - protein, 161 aa, Pseudomonas syringae pv. tomato str. DC3000
MSENLLNIPVTTIKGEQKTLADFAGKAVLVVNTASKCGFTPQYKGLEKLWQDYKDQGLVVLGFPCNQFGKQEPGDEGAISGFCELNYGVSFPLFKKVDVNGDQAHPLFVQLKEQAPGLLGTERIKWNFTKFLIGQDGKLVKRFAPLTKPEELTDEIEALLR

SEQ ID NO: 8462 - protein, 124 aa, Zea mays
  misc_feature (81)..(81): Xaa can be any naturally occurring amino acid
MAGCCVFLRWPSASPSRIGYRSLVDAAADDAAPPSTVTVVVGKERRAFAVDRLVLDSYPLRLLLETAARREERRAGGRRRXAIFVDVDAILFEHILWLACDARSVSQILHLDLKEIIDFYAQDA

SEQ ID NO: 8463 - protein, 450 aa, Arthrobacter nicotinovorans
MLATLASATSEDAVAALEAACAAQTSWARTAPRVRAEILRRAFDLVTARSEDFALLMTLEMGKPLAEARGEVAYGAEFLRWFSEETVRDYGRYLTTPEGKNKILVQHKPVGPCLLITPWNFPLAMATRKVAPAVAAGCTMVLKPAKLTPLTSQLFAQTMMEAGLPAGVLNVVSSSSASGISGPLLKDSRLRKVSFTGSTPVGKRLMSDASRHVLRTSMELGGNAPFVVFEDADLDKAVEGAMAAKMRNMGEACTAANRFLVQESVAQEFTRKFAAAMGALSTGRGTDPASQVGPLINNGARDDIHALVTAAVDAGAVAVTGGAPVDGPGYFYQPTVLADVPNNAAILGQEIFGPVAPVTTFTTEQDAIKLANASEYGLAAYLYSRDFNRLLRVAEQIEFGMVGFNAGIISNAAAPFGGVKQSGLGREGGSEGIAEYTTTQYIGIADPYEN

SEQ ID NO: 8464 - protein, 484 aa, Agrobacterium tumefaciens str. C58
MPNRSCPAMFGGRGGVSAVAFMGVRSVMNEVSKPMSNLAAIDAAHHLHPFSDMGKLNAAGTRIIERAEGVFIYDSTGKKYLDAFAGLWCVNIGYGRREIADVVQRQMNELPYYNAFFGTTTPPATLLAQKIASRAGPKMNHVFFTNSGSEATDTWFRMARVYWKALGHPTKTRVIARRNGYHGSTVAGASLGGMKWMHEQGNLPIEGIAHIGQPYWYAEGGDLSPAEFGLKVARELDAKIDELGEENVAAFVAEPIQGAGGVIVPPETYWPEIARICKARNILLVSDEVICGFGRLGSWFGYQHFGVEPDLAPVAKGLSSGYLPIGGVIVSDRVAEVMLSEVGDFNHGFTYSGHPVCAAAALENLRIIEDEGLVERVRDDIGPYFSEGWKSLADHELVGEAVNVGLMGGLQLTADKATRRRFAKPDDIGTAVRNHCLANGLVMRATGDRMLASPALTVSRSEVDEIIETLRQGLNHLRDTREHF

SEQ ID NO: 8465 - protein, 490 aa, Corynebacterium glutamicum ATCC 13032
MTINVSELLAKVPTGLLIGDSWVEASDGGTFDVENPATGETIATLASATSEDALAALDAACAVQAEWARMPARERSNILRRGFELVAERAEEFATLMTLEMGKPLAEARGEVTYGNEFLRWFSEEAVRLYGRYGTTPEGNLRMLTALKPVGPCLLITPWNFPLAMATRKVAPAIAAGCVMVLKPARLTPLTSQYFAQTMLDAGLPAGVLNVVSGASASAISNPIMEDDRLRKVSFTGSTPVGQQLLKKAADKVLRTSMELGGNAPFIVFEDADLDLAIEGAMGAKMRNIGEACTAANRFLVHESVADEFGRRFAARLEEQVLGNGLDEGVTVGPLVEEKARDSVASLVDAAVAEGATVLTGGKAGTGAGYFYEPTVLTGVSTDAAILNEEIFGPVAPIVTFQTEEEALRLANSTEYGLASYVFTQDTSRIFRVSDGLEFGLVGVNSGVISNAAAPFGGVKQSGMGREGGLEGIEEYTSVQYIGIRDPYAG

SEQ ID NO: 8466 - protein, 321 aa, Glycine max
  misc_feature (174)..(174): Xaa can be any naturally occurring amino acid
  misc_feature (221)..(221): Xaa can be any naturally occurring amino acid
  misc_feature (242)..(242): Xaa can be any naturally occurring amino acid
  misc_feature (260)..(260): Xaa can be any naturally occurring amino acid
  misc_feature (269)..(269): Xaa can be any naturally occurring amino acid
  misc_feature (273)..(273): Xaa can be any naturally occurring amino acid
  misc_feature (276)..(276): Xaa can be any naturally occurring amino acid
  misc_feature (291)..(292): Xaa can be any naturally occurring amino acid
  misc_feature (298)..(298): Xaa can be any naturally occurring amino acid
  misc_feature (300)..(300): Xaa can be any naturally occurring amino acid
  misc_feature (316)..(316): Xaa can be any naturally occurring amino acid
MARRSLPLLKHLLSRRIPARSVTYMHRPGDGSPRPVTLIPGDGIGPMVTGAVEQVMEAMHAPVYFEKFEVHGNMKAVPPEVLDSIRKNKVCLKGGLVTPMGGGVSSLNVQLRKELDLYASLVNCFNLPGLPTRHDNVDIVVIRENTEGEYSGLEHDVVPGVVESLKVITKFCSXRIAKYAFEYAYLNNRKKVTAVHKANIMKLADGLFLESYREVTTMYPXINYNEIIVDNYYIQLISKPKXFNIIITPNLYRNLITNTXTSITRSTRXIPKXNMXTNHAICKQSTSARNXXNDEVVXQXKSNPVALLLSCTMMLXHLPFP

SEQ ID NO: 8467 - protein, 266 aa, Aeropyrum pernix K1
MGDIHGDYTTFSTIVERSLQTLEGGGYMFLLGDYIDRGTPEGQVLTIYRLCRLTKEYPGRVVMLRGNHEPPEGLEPMPHDYPLALQTVYGSDGRRLYSLSRKLFDSLPHAILVEGALLMLHGGPPTINLETASRDPALYLGSDGDPEVIAEILWNDPAELDIIRAPNPRGVGSLWGPGVTVHMARSLNIKRIVRGHEPAMRGYKLNHGGSVVTLFSRLGAPYFNSQAAFLNCKLESIVTDDIKEFLNECIATVQPEHGEHTGFVAW

SEQ ID NO: 8468 - protein, 84 aa, Glycine max
MEYQRQRSHQSQGRSRWVPASYFSFESLLLLSCLTASLLILPLLLPPLPPPPFLLLLLPIAILLVLIISAFMPSNVRDITHTYM

SEQ ID NO: 8469 - protein, 1343 aa, Salmonella enterica subsp. enterica serovar Typhi Ty2
MSQEYTEDKDVTLTKLSSGRRLLEALLILIALFAVWLMAALLSFNPSDPSWSQTAWHEPIHNLGGAPGAWLADTLFFIFGVMAYTIPVIIVGGCWFAWRHQSTDDYIDYFAVSLRLIGVLALILTSCGLAAINADDIWYFASGGVIGSLLSTTLQPLLHSSGGTIMLLCIWAAGLTLFTGWSWVSIAEKLGGWLLNILTFASNRTRRDDTWVDDEEYDDEYDEETDGVQRESRRARILRGALARRKRLAEKFSNPRGRQTDAALFSGKRMDDDEDIQYSARGVAADPDDVLFSGNRATQSEYDEYDPLLNGHSVTEPVAAAAAATAVTQTWAASADPIMQTPPMPGAEPVVAQPTVEWQPVPGPQTGEPVIAPAPEGYQPHPQYAQPQEAQSAPWQQPVPVASAPQYAATPATAAEYDSLAPQETQPQWQAPDAEQHWQPEPIAAEPSHMPPPVIEQPVATEPEPGIEETRPARPPLYYFEEVEEKRAREREQLAAWYQPIPEPVKENVPVKPTVSVAPSIPPVEAVAAAASLDTGIKSGALAAGAAAAAPAFSLATGGAPRPQVKEGIGPQLPRPNRVRVPTRRELASYGIKLPSQRIAEEKAREAERNQYETGAQLTDEEIDAMHQDELARQFAQSQQHRYGETYQHDTQQAEDDDTAAEAELARQFAASQQQRYSGEQPAGAQPFSLDDLDFSPMKVLVDEGPHEPLFTPGVMPESTPVQQPVAPQPQYQQPVAPQPQYQQPQQPVASQPQYQQPQQPVAPQPQYQQPQQPVAPQPQYQQPQQPVAPQPQYQQPQQPVAPQPQYQQPQQPVAPQPQYQQPQQPTAPQDSLIHPLLMRNGDSRPLQRPTTPLPSLDLLTPPPSEVEPVDTFALEQMARLVEARLADFRIKADVVNYSPGPVITRFELNLAPGVKAARISNLSRDLARSLSTVAVRVVEVIPGKPYVGLELPNKKRQTVYLREVLDNAKFRENPSPLTVVLGKDIAGDPVVADLAKMPHLLVAGTTGSGKSVGVNAMILSMLYKAQPEDVRFIMIDPKMLELSVYEGIPHLLTEVVTDMKDAANALRWSVNEMERRYKLMSALGVRNLAGYNEKIAEAARMGRPIPDPYWKPGDSMDVQHPVLEKLPYIVVLVDEFADLMMTVGKKVEELIARLAQKARAAGIHLVLATQRPSVDVITGLIKANIPTRIAFTVSSKIDSRTILDQGGAESLLGMGDMLYSGPNSTMPVRVHGAFVRDQEVHAVVQDWKARGRPQYVDGITSDSESEGGGGGFDGGEELDALFDQAVNFVTQKRKASISGVQRQFRIGYNRAARIIEQMEAQGIVSAQGHNGNREVLAPPPFE

SEQ ID NO: 8470 - protein, 363 aa, Buchnera aphidicola
MKKNYRIAVLSGDGIGPEVMQEACKILNVLKKYFFLSLEIQKFNIGGIAIEREGVALPKTTLLGCENSDSILLGSVGGKKWDNLPVEQRPERAALLPLRKYFNLFSNLRPAKLYPELKCLSPLRSDIVKNGFDILCVRELTGGIYFGEPKGFVNKNNTKYAFDTEIYHEYEIIRIAHLAFKLARSKKKKVCSIDKSNVLRSSILWGKVVESVSKKYPDVHLSHLYIDNAAMQIIKDPNQFDVLLCSNLFGDIISDECATITGSIGMLPSASFNEKNFGLYEPAGGSAPDIEGKNIANPIAQILSLSMLVRYGMNLNQIADKIDKAVNNVLKKGYRTSDISHDNNFLKTDEMGDLIVDSLINGK

SEQ ID NO: 8471 - protein, 490 aa, Pseudomonas aeruginosa UCBPP-PA14
MARFEEQKLYIGGRYVEASSGATFETINPANGEVLAKVQRASREDVERAVQSAVEGQKVWAAMTAMQRSRILRRAVDILRERNDELAALETLDTGKPLAETRSVDIVTGADVLEYYAGLVPAIEGEQIPLRETSFVYTRREPLGVVAGIGAWNYPVQIALWKSAPALAAGNAMIFKPSEVTPLTTLKLAEIYTEAGVPDGVFNVLTGSGREVGQWLTEHPLIEKISFTGGTSTGKKVMASASSSSLKEVTMELGGKSPLIIFPDADLDRAADIAVMANFFSSGQVCTNGTRVFIHRSQQARFEAKVLERVQRIRLGDPQDENTNFGPLVSFPHMESVLGYIESGKAQKARLLCGGERVTDGAFGNGAYVAPTVFTDCSDDMTIVREEIFGPVMSILVYDDEDEAIRRANDTEYGLAAGVVTQDLARAHRAIHRLEAGICWINTWGESPAEMPVGGYKQSGVGRENGLTTLAHYTRIKSVQVELGDYASVF

SEQ ID NO: 8472 - protein, 329 aa, Methylococcus capsulatus str. Bath
MSKNLLDQLREVTVVVADTGDIEAIEKFKPRDATTNPSLITAAAQMPQYQDIVDDTLKGARQTLGPGASAAQVANRAFDRLAVSFGLKILQIIEGRVSTEVDARLSYDTEGTIEKAREIIKQYEAAGVSKERVLIKIAATWEGIEAAAVLEKEGIHCNLTLLFGLHQAIACAENGITLISPFVGRILDWYKKDTGRESYAPHEDPGVLSVTQIYNYYKKFGYKTEVMGASFRNIGEITELAGCDLLTIAPSLLAELQATEGELPRKLDPAKAKDYPIEKIHVNKYTFDKMHAENRMATEKLEEGIQGFTKALEQLEKLLADRLAHLEAA

SEQ ID NO: 8473 - protein, 506 aa, Exiguobacterium sp. 255-15
MIYEIPNTQGSKVQYKDRYENFINGKWTAPVGGEYFDNVTPITGKVLCQVARSGKEDVELALDAAHAAKDAWGKTSVAERSNILNKIANRMEENLEMLAYAETLENGKAVRETLNADLPLAIDHFRYFAGVIRAQEGSIGELDNDTVAYHFHEPLGVVGQIIPWNFPILMAVWKLAPALAAGNCVVLKPAEQTPASILLMTELIEDLLPPGVLNIVNGFGLEAGKPLASSKRIAKIAFTGETTTGRLIMQYASQNIIPVTLELGGKSPNIFFADIMDADDAFFDKAIEGLLMFALNQGEVCTCPSRALIEESIYEPFMERVLERVKAIKLGNPLDADVMMGAQASSEQMEKILSYLEIGKSEGAECLIGGERNHLDGDLADGYYIQPTIFKGNNKMRIFQEEIFGPVLSVTTFKTEEEALQIANDTLYGLGAGVWTRDMNRAYRFGRAIEAGRVWTNCYHQYPAHAAFGGYKMSGIGRENHKMMLNHYQRTKNLLVSYSPDKLGFF

SEQ ID NO: 8474 - protein, 80 aa, Triticum aestivum
MQITGVVKWFNETKGFGFITPDDGSKDVFVHFTAIQSHGFKTLAEGQRVEFEIQDGQKGPSAVNVKPLEVEEDKRISSKL

SEQ ID NO: 8475 - protein, 444 aa, Saccharomyces cerevisiae
MQSMNVQPRVLAVGGEQFFSQRQASEQHQQQNMGPQVYSPKVNRARMFPQGMPVNTINGSVNQEMNNAYLLKQKNEPLLTQQQQQQQQQQQQQQQQQQQQQQQQQQQPFNIGTPVSVASLPPGLNVLQQQQQQQQQQGVGLNRPLASQLPKHLTNQSMPPIFLPPPNYLFVRDVWKSNLYSEFAVIRQLVSQYNHVSISTEFVGTLARPIGTFRSKVDYHYQTMRANVDFLNPIQLGLSLSDANGNKPDNGPSTWQFNFEFDPKKEIMSTESLELLRKSGINFEKHENSGIDVFEFSQLLMDSGLMMDDSVTWITYHAAYDLGFLINILMNDSMPNNKEDFEWWVHQYMPNFYDLNLVYKIIQEFKNPQLQQSSQQQQQQQYSLTTLADELGLPRFSIFTTTGGQSLLMLLSFCQLSKLSMHKFPNGTDFAKYQGVIYGIDGDQ

SEQ ID NO: 8476 - protein, 433 aa, Saccharomyces cerevisiae
MQSMNVQPRVLAVGGEQFFSQRQASEQHQQQNMGPQVYSPKVNRARMFPQGMPVNTINGSVNQEMNNAYLLKQKNEPLLTQQQQQQQQQQQPFNIGTPVSVASLPPGLNVLQQQQQQQQQQQQQQQGVGLNRPLASQLPKHLTNQSMPPIFLPPPNYLFVRDVWKSNLYSEFAVIRQLVSQYNHVSISTEFVGTLARPIGTFRSKVDYHYQTMRANVDFLNPIQLGLSLSDANGNKPDNGPSTWQFNFEFDPKKEIMSTESLELLRKSGINFEKHENLGIDVFEFSQLLMDSGLMMDDSVTWITYHAAYDLGFLINILMNDSMPNNKEDFEWWVHQYMPNFYDLNLVYKIIQEFKNPQLQQSSQQQQQQQYSLTTLADELGLPRFSIFTTTGGQSLLMLLSFCQLSKLSMHMFPNGTDFAKYQGVIYGIDGDQ

SEQ ID NO: 8477 - protein, 506 aa, Azoarcus sp. EbN1
MLYELPGQPAAKVRFKSRYDNFIGGKWVAPVRGEYFDNVTPITGKPFCQVARSTEEDITLALDAAHAAADRWGRTSAADRANLLLKIADRLEGNLELLAYAETVDNGKAIRETLNADIPLTIDHFRYFAGCLRAQEGSISEIDEHTVAYHFHEPLGVVGQIIPWNFPILMAAWKLAPAIGAGNCVVLKPAESTPVSILVLVELIADLLPPGVLNVVNGFGREAGMPLATSKRIAKIAFTGSTATGRVIAQAAATNLIPATLELGGKSPNIFFSDIAAADDAFFDKAVEGMVLFAFNQGEVCTCPSRALIQESIYDRFMERVLARVRAIRQGSPLDTDCMMGAQASAEQMNKILSYMDVGREEGAQLLIGGERAHLGGELAEGFYVQPTLFRGHNKMRIFQEEIFGPVLAVTTFKDEAEALEIANDTPYGLGAGVWSRDGSVAYRMGRAIKAGRVWTNCYHAYPAHATFGGYKESGIGRETHKMMLDHYQQTKNLLVSYSPNALGFF

SEQ ID NO: 8478 - protein, 267 aa, Triticum aestivum
MASERNGDGGKERAGENGNGGGSGVSLEMPEIRYTKLFINGAFVDAVSGKTFETRDPRTGDVIASIAEGDKKDVDLAVKAAREAFDHGKWPRMPGSERGRIMMKYADLVEGHADELTLLESLDAGKPCTVTRAVDMATAVRSLRYFAGAADKIHGETLKMSRQFQGHTLREPMGVAGLIIPWNFPAIMFFSKVAPALAAGCTMVVKPAEQTPLSALYFAHLAKQAGVPDGVINVITGFGPTAGAAIASHMDVDMVSFTGSTAVGRLI

SEQ ID NO: 8479 - protein, 170 aa, Zea mays
MAPTVMMASSATAVAPFQGLKSAASLPVARRSTRSLGNVSNGGRIRCMQVWPAYGNKKFETLSYLPPLSTDDLLKQVDYLLRNGWIPCLEFSKLGFVYRENSTSPCYYDGRYWTMWKLPMFGCTDATQVYKELQEAIAAYPDAFHRVIGFDNVRQTQCVSFIAYKPPGSD

SEQ ID NO: 8480 - protein, 398 aa, Zea mays
  misc_feature (62)..(62): Xaa can be any naturally occurring amino acid
  misc_feature (181)..(181): Xaa can be any naturally occurring amino acid
  misc_feature (270)..(270): Xaa can be any naturally occurring amino acid
METGTIFTHHQKTMILDADAGNHRRKIVAFVGGHDLCGSRYDTPKHTLFRTLQTFHKEDYYXPNFAVEDARGPREPWHDLHSKIDGPEAYDVLKNFEERWLKASKRSAAKKLSKLSRSHNDSLLWINKIPDIISIDDEIYSNDDDPERWDMQIFRSIDSNSVKGFPKDPREATSKNLVCGXNVLIDMSVHTTYVNAIRGAQHFIYIENQYFLGSSFNWDSHRDVGANNLIPTEIALKIANKIYSNERFSAYIVVPMWPEGNPTGTLTQRXLYWQKMTMQIMYEIIYKAMKEVGLDGTYEPQDYLNFFCLGNREAEDTTCTSSGPFSTTWISNQDQARNNRRFMVYVHSKGMIVDDEYVIIGSANINQRSMEGTRDTEIAMAAYQPQHTLANMLSAPRG

SEQ ID NO: 8481 - protein, 294 aa, Glycine max
  misc_feature (160)..(161): Xaa can be any naturally occurring amino acid
MSEALEEVVPSMKGGCEEEGLNLEATELRLGLPGCESPEREGVFKSVVVSGAKRGFSDAIDGNWNGGGSEKDAAALFSPTSRGAVSVSVSAAKSLTLTATDCTNQPTALGASVLKETVPHSPKPLHENKPQISAPAAKAQVVGWPPIRSFRKNSMASQPXXNDAAADAKSKSGCLYVKVSMEGAPYLRKVDLNSFTTYKDLSLALEKMFSCFTLSQCGSYGVSSRENLSESRLMDLLHGSEYVLTYEDKDGDWMLVGDVPWEMFTESCKRLRIMKSSEAIGLAPRAMEKCKSRY

SEQ ID NO: 8482 - protein, 122 aa, Brassica napus
KLVDSYLAEAAIDGGLTLPELISLAEALPSHARTTEDGLYRAIDTYLKAHPQVMKQERKELCRLIDSRKLSPEAALHAAQNDRLPVRSIIRVLFTEQTKLSRHTDWSPSGSHYSEPGSGPQC

SEQ ID NO: 8483 - protein, 174 aa, Triticum aestivum
  misc_feature (39)..(39): Xaa can be any naturally occurring amino acid
  misc_feature (50)..(50): Xaa can be any naturally occurring amino acid
YTYIVHPWAPTVMASSATSVAPFQGLKSTAGLPVSRRSXGASLGSVSFCXRIRCMQVWGGEGIKKFETLSYLPPVSTEALLKQVDYLIRSKWVPCLEFSKVGFIFREHNASPGYYDGRYWTMWKLPMFGCTDATQVINEVEEVKKEYPDAFVRFIGFDNLRQVQGRRFLAFKPP

SEQ ID NO: 8484 - protein, 253 aa, Rumex acetosa
MEFSNELSRDMEDGSPQRKMGRGKIEIKRIENVTNRQVTFCKRRNGLLKKAYELSVLCDAEVALIVFSSRGRLYEYANHSVKATIERYKKTCSDSTGVTSVEEANAQQEAAKLRNQIRTLQNQTRNTSRNLMGEGLTSMNMKDLKNLETRLEKGISRVRAKKNELLFGEIEFMQKKEIELHNNNQFLRAKIAESERSQQSMNLMPGSSSGEQHYELMPQSQAGPFDSRNFFQVSDLQPDERYSCQNQTPLQLV

SEQ ID NO: 8485 - protein, 175 aa, Triticum aestivum
MAPTVMASSATSVAPFQGLKSTAGLPVSRRSNGASLGSVSNGGRIRCMQVWPIEGIKKFETLSYLPPLSTEALLKQVDYLIRSKWVPCLEFSKVGFIFREHNASPGYYDGRYWTMWKLPMFGCTDATQVINEVEEVKKEYPDAYVRIIGFDNMRQVQCVSFIAFKPPGCEESGHA

SEQ ID NO: 8486 - protein, 319 aa, Zea mays
  misc_feature (260)..(260): Xaa can be any naturally occurring amino acid
MRCPSLGPSSSAGRYLKPHQRPQGGIFAGPGFCSTRGRGVEAALPYQKADRGPRKEAGIRLCSATMSSLYDVSCFAAGLAGNVFALALFLSPVPTFKRVLKAKSTEQFDGLPYLLSLLNCCICLWYGLPWVSDGGRALVATVNCTGALFQLAYISLFIFYADSRTTRLKVAGLLVLVVFAFALIAHASIAFFDQPLRQLFVGSVSMASLVSMFASPLAVMGVVVRTECVEFMPFYLSLSTFLMSASFAVYGLLLRDFFIXSRMGSESSWEQCSWCCTRTTAGDGKAATRQHRCLPDHVAEFVSPIARAVLSVVLCSAIL

SEQ ID NO: 8487 - protein, 159 aa, Solanum tuberosum
MSDEEHQFESKADAGASKTYPQQAGTIRKSGYIVIKGRPCKVVEVSTSKTGKHGHAKCHFVAIDIFTGKKLEDIVPSSHNCDVPHVNRTDYQLIDISEDGFVSLLTDNGNTKDDLRLPTDDSLLSQIKDGFAEGKDLVVSVMSAMGEEQINALKDIGPK

SEQ ID NO: 8488 - protein, 321 aa, Pseudomonas aeruginosa UCBPP-PA14
MWRFVEHSRAFASDSPRLDAQRAAYARMCQAFAPPRPAGLRVLDSCLPAAPPVRVRRYRPDRPAPPGGWPALLYLHGGGWMLGGLDSHDFICADLAARLGLLVLAVDYRLAPEHPFPAALQDCLRAWQALSLGELDEALDGRRLLVAGDSAGGNLAAALCLALRDGGAPSPAAQILLYPLLSAAPSPSRIDCADAPLLGLGDVQACLDAYLPLAALHRQPLALPLEAADFTGLPPAFVAVAEFDPLRDDGERYGAALRAAGGEAGFYPGSGLVHGCLRGHGIDEVEALHEALRRAVQGFLAEDSGERQAGEESTAEHQPGE

SEQ ID NO: 8489 - protein, 159 aa, Solanum tuberosum
MSDEEHHFESKADAGASKTYPQQAGTIRKSGHIVIKNRPCKVVEVSTSKTGKHGHAKCHFVAIDIFTGKKLEDIVPSSHNCDVPHVNRTDYQLIDISEDGFVSLLTENGNTKDDLRLPTDDTLLAQVKDGFAEGKDLVLSVMSAMGEEQICGIKDIGPK

SEQ ID NO: 8490 - protein, 319 aa, Avena fatua
MASAKAMGQGEQDRFVLKSGHAIPAVGLGTWRAGSDTAHSVQTAITEAGYRHVDTAAQYGIEKEVDKGLKAAMEAGIDRKDLFVTSKIWRTNLAPERARPALENTLKDLQLDYIDLYLIHWPFRLKDGAHQPPEAGEVLEFDMEGVWKEMEKLVKDGLVKDIDVCNFTVTKLNRLLRSANIPPAVCQMEMHPGWKNDKIFEACKKHGIHVTAYSPLGSSEKNLVHDPVVEKVANKLNKTPGQVLIKWALQRGTSVIPKSSKDERIKENIQAFGWEIPEDDFQVLCSIKDEKRVLTGEELFVNKTHGPYKSASEVWDHEN

SEQ ID NO: 8491 - protein, 160 aa, Solanum tuberosum
MSDEEHHFESKADAGASKTYPQQAGTIRKSGYIVIKGRPCKVVEVSTSKTGKHGHAKCHFVAIDIFNGKKLEDIVPSSHNCDVPHVNRTDYQLIDISEDGFVSLLTENGNTKDDLRLPTDDALLNQVKGGFEEGKDLVLSVMSAMGEEQICAVKDIGTKS

SEQ ID NO: 8492 - protein, 282 aa, Mycobacterium bovis AF2122/97
MTGESGAAAAPSITLNDEHTMPVLGLGVAELSDDETERAVSAALEIGCRLIDTAYAYGNEAAVGRAIAASGVAREELFVTTKLATPDQGFTRSQEACRASLDRLGLDYVDLYLIHWPAPPVGKYVDAWGGMIQSRGEGHARSIGVSNFTAEHIENLIDLTFVTPAVNQIELHPLLNQDELRKANAQHTVVTQSYCPLALGRLLDNPTVTSIASEYVKTPAQVLLRWNLQLGNAVVVRSARPERIASNFDVFDFELAAEHMDALGGLNDGTRVREDPLTYAGT

SEQ ID NO: 8493 - protein, 459 aa, Mesorhizobium sp. BNC1
MHIDELRKAVRGAVTTRESAEYEAVRTGLLWNARKPDRFPEVVVKAMDAGDVQTAVKFAAANGMRVSARGGGHHFSTIALQDCVVIDLSAMNALEIDAVAGTARAQPAVTNGRLAAAAAEYGLAFPTGHCASVPLSGYLLGGGFGWNAGAWGIACHNVESVKVVLADGSLVTASEAENADIFWAARGAGPEFFGVVTEYRLRLHELPRAIRTSVWVYPIGEVDAVERWMSRTMRTVPRNVEFTAVLSSAPPPLAGKATKTVSAVATIFAYTEEEAQATLEKIAAGAPESALDIQLGMETPFEVLYLIMGQFFLEGRRYAADTNWSADPALQMAIMAEAIEAAPSAESFALGVVLPPPDGTMPDAAFSMVGPAFGCTYAIWQDDAQDQAALSWVRATSEKIAPISLGHYIGEADLDIAGRSHRSFSPEALERLRHLQRKYDQAGLFHRPEPDVEPLKRAG

SEQ ID NO: 8494 - protein, 429 aa, Xanthomonas campestris pv. campestris str. ATCC 33913
MSDLDQVTLNAGDTSVVLPVLKPTLGNDCVDISKLTKETGLFTYDSGFTATASCKSAITYIDGDNGVLLYRGYPIEQLAEKSSFLEVSYLLMNGELPTADEFKKFDHEVTHHTMMHESLKNFLGGFRHDAHPMAMLAGSVASLSAFYHDTLDLNDPEQRRQAAIRLIAKVPTLAAAAYRYSIGWPIRYPRNNLNYVDRFLHMMFEVPSEPLEINPVVAKALDLLFILHADHEQNASTSTVRLVGSTGANPYASVAAGITALWGPAHGGANEAVLKMLEEIGTADNVESAVAKAKDKNSSFRLMGFGHRVYKNFDPRAKIIREMTHKVLGELGVNDPLLEVALKLEEAALKDDYFVQRKLYPNVDFYSGLIYKALNIPVEMFTVMFAIARTAGWVSHWLEQQVDPEMKIGRPRQIYTGYDKRDYTDAGKR

SEQ ID NO: 8495 - protein, 482 aa, Acinetobacter sp. ADP1
MIQESLQYLLKHPDISFTAPTSGAVIEVNDAAKGTPLAWVKSHDRSGVEAAIQRSAQAQAKWKTQTALQRADVLWAWFHLINEHKENLAQILTAEQGKPLAEARGEIGYAASFIRWFAEQARRIDGEILPPTMAHQRLLVIKQAIGVTAAITPWNFPAAMITRKAAPAIAAGCSMLVKPAELTPLTAYALEVLALQAGLPQDILINISGDSVEVGKTLCESDVVRKLSFTGSTPVGRILMQQSAPSIKKLSLELGGNAPVLVFDDANLDQAVQGIMASKFRNSGQTCVCANRIYVQSGIYDALTTKLVDAVKALKVGDGREEGVTQGPLIDARAVAKVQSHIEDATSKGATLQTGGQLAAQGGTFFEPTVLSGVTQEMRVAKEETFGPLAALFRFETEEQAIAMANDTEFGLAAYLFTQSTARQWRVGEALEYGMVGVNTGAISNEVAPFGGVKQSGLGREGSQHGIEEYLEMKYLCVDLSE

SEQ ID NO: 8496 - protein, 332 aa, Gibberella zeae PH-1
MSFGRTVTLNSGWKIPQIGYGTWQAAPGEVGNGVYEALKAGYRHLDLAKIYQNQREVGEGIKKALSEVPGLKREDIFITGKLWNNKHRPEEVAGALDDTLEELGLEYIDLWLIHWPVAFKNGNQLFPLKEGDDGKTALDQEVTLSQTWEAVTKLPKEKVRSIGVSNFNKEMLEQIIKDTGVTPAMNQIERHPRLPQPELVKYLQEKGIFLTAYSAFGNNSWGEPLLINTPEVKAIAERLSKSKGKEVTPAQVILAWSTLDNHVVIPKSVTPARIRSNFEEVELDEEAVKELSKFGEKPQRFNIPKTYKPDWDINVFDDEKEKSATHQVVLKL

SEQ ID NO: 8497 - protein, 505 aa, Burkholderia cepacia R1808
MTRSDLPHEARPVVVWFRDDQRLADNPALTHALDTGHPVVCVYVHDAAPKHGRAMGGAQRWWLHESLSKLDDALAAHGGSLILLRGNEHEAITGFAAAIGAAMVVWNRRYAKAQTGTDASIKRDLIDRGIAVSTFNGHLLREPWTVTTREGLPFQVFSAYWRAARRDDFFPPVPLPAPSHIRFFPVPAHATPHVCTLRELELQPSAPDWAGGLRETWQCGEQAASDQLEAFLENSLSDYPTLRDFPAARATSRLSPYLRFGNISVRQVWYATLSAADAMRSARIVRGVDSKDGPLSKFLSEIGWREFSYHLLYHFAPLHQVNFRRQFDSMPWRDDAKSLRKWQTGRTGYPLVDAGMRELWHTGWMHNRVRMVAASFLSKHLLIDWRQGEAWFWDTLVDADEASNPASWQWVSGSGADAAPYFRIFNPVLQAQKFDPHGDYTRRWVPELAQLSADTVHAPWAASREQLQRASVTLGRSYPMPIVDHQCARARALESVKRLDSESHA

SEQ ID NO: 8498 - protein, 314 aa, Aspergillus parasiticus
METPFAAPWHQFVEDLGQTPCLPGKDLDSILAGWGQLAGTLATRYGFPPPDESVTTEDVQLDGLWLRCYTPPNATGQEPVGLYFHGGGWVMGGVKEEDGFCRVISRQCQMRLVSVEYRKAPQTRYPGALNDGVSAALWVLSRYENQPLVLMGTSAGGNLAFGTALRLIDQDMVDKVSGVVALAPITVHPDAVPEYLKEQYTAYEENAELTVNSRAAMQVFFDCYKAPVDDVYTSCLLHPRLLALPKVYIAELGLDTLRDDARLMKGALDTAKVPVMYDAYPGYPHCLFMFPFKSLGEHQRPFLGGVAKAVRWMS

SEQ ID NO: 8499 - protein, 193 aa, Brucella melitensis 16M
MADKSVSDDQFHSQHASEELGEFIEVSGHIKWFDVAKGYGFIVPDQPGLTDILLHVTSLRRDGFQTALEGARIVCEVRHGDRGLQCFRVLSMDASTAIHPAQMPPQCTHVTVTPSSGLERVIVKWFNRTKGFGFLTRGEGTEDIFIHMETLRRFGMMELRPGQVVLIRFGTGEKGLMAAEIHPDIGTAIPVSH

SEQ ID NO: 8500 - protein, 506 aa, Corynebacterium glutamicum ATCC 13032
MTVYANPGTEGSIVNYEKRYENYIGGKWVPPVEGQYLENISPVTGEVFCEVARGTAADVELALDAAHAAADAWGKTSVAERALILHRIADRMEEHLEEIAVAETWENGKAVRETLAADIPLAIDHFRYFAGAIRAQEDRSSQIDHNTVAYHFNEPIGVVGQIIPWNFPILMATWKLAPALAAGNAIVMKPAEQTPASILYLINIIGDLIPEGVLNIVNGLGGEAGAALSGSNRIGKIAFTGSTEVGKLINRAASDKIIPVTLELGGKSPSIFFSDVLSQDDAFAEKAVEGFAMFALNQGEVCTCPSRALVHESIADEFLELGVKRVQNIKLGNPLDTETMMGAQASQEQMDKISSYLKIGPEEGAQTLTGGKVNKVDGMENGYYIEPTVFRGTNDMRIFREEIFGPVLSVATFSDFDEAIRIANDTNYGLGAGVWSRDQNTIYRAGRAIQAGRVWVNQYHNYPAHSAFGGYKESGIGRENHLMMLNHYQQTKNLLVSYDPNPTGLF

SEQ ID NO: 8501 - protein, 1275 aa, Schizosaccharomyces pombe
MRGRGIDVNSSHYPHISRPRTSSDSQKMYTRAPVDYYYIQENPYFNNIDQDSISDKSLPSTNQSLHHSEEDTESDNDFSESIHPEFDIDVFYKVSNILYDESDLQDPEKRERLEWHSMLSSVLKGDVMQTEKRRLRLTEPDGHSGTYISEVWLGLQAWLHGRLNADQAEVIRKSREGVEPVLREVIDFQIQDEETTKPPLEQVTEILEKVEQCKQFYISSREMEENVPLSASKEFNYKLNALISWSNVMESIQVETLVLQKWVGNDEFDLTMRTPQFNYDGVENTSSFVERIFRQSGLQRTFEQRTLTTLNRIIHQAKQTISENAQAFEEMKLPTYEDKLLPLVRFPIKLLEEALRLRLAYAKKIKGPNFLIVDSMLDDFKIALSVAVRIKREYIKIASPSPGWSLPTNVDEDYDNVLLDSLKFYFKLLTLKLSSGNKNLYFKEIDFLENEWAFLNEHIYWINGGDIHMAGQFSYLSNSLLLNVHRYVESHLNGPTERTAASLTNWYSTLLKNTQIRFRKILRFSETLNSRFENASDFVISEGHLPDLVNRLSTTGHFLAYTANLERDGVFVIADHTLSENPEALKALLFSKDISNLETIQQNCSYVLILCPVHPIVWKGRIEKVDVPDFSVDLKTNRVRIIASNKREHLQAAKSVFQSISGDLVTLAVECRSSITRVYKEFIRLSKLCMRISSTVVDCVSAVREACSGVNCHDLIYHVFSFAAEFGQRILRFLSFDSYWQTKLKRKITSLAVEWISFICDECDLMDRKTFRWGVGALEFLMLMIRGNNILLIDDAMFLKIREKVGKSMAFLLTHFDVLGAKSKVAAKLQRESTEVSSSPRLTSFGDVEEEALSIQLLQKETMLRIDELEIERNNTLLERLAIGHVLDDSVFRNRDFIKLASSFSNITIRWQQGHFVRSGMFGDVYTGVNMETGDLLAVKEIKLQDSRTFRSTVDQIHNEMTVLERLNHPNVVTYYGVEVHREKVYIFMEFCQGGSLADLLAHGRIEDENVLKVYVVQLLEGLAYIHSQHILHRDIKPANILLDHRGMIKYSDFGSALYVSPPTDPEVRYEDIQPELQHLAGTPMYMAPEIILGTKKGDFGAMDIWSLGCVILEMMTGSTPWSEMDNEWAIMYHVAAMHTPSIPQNEKISSLARDFIEQCFERDPEQRPRAVDLLTHPWITDFRKKTIITMPPATITKKTSLSHTITEEKTAQLLAGRHVDSKAETDSLAASYKEESALPVASNVGLRQPNELRIDSINLPPAIVTPDTINYSVD

SEQ ID NO: 8502 - protein, 213 aa, Oryza sativa (japonica cultivar-group)
MARTAWRCALVILTGVLLCAAVETAVAAKRVSIPDDLRDVVDDEEDDDWRHWGAAAPPRDDGQPPDLAGMDPAALQAELLRRHAGPSFGFVKLRLGVRRSQEEVMGIATRWTNVLRTGSVAAKFVAVDFGTLMFTMDTGQDILESSDNWVTLFKVKEFILSQPEAYEFKIGNQAFRRPGDPPLDEVVEMLQKQKSTMLSQDPGSQQYKSKVEL

SEQ ID NO: 8503 - protein, 390 aa, Phlebia radiata
MAFNFAAILAFVSLAAVTSAAPSKTTCSNGVVVPDAVCCDFVPLASALQSEVLMGDCGEDAHELVRLIFHDAIAISQSMGPSAGGGADGSMLIFPTVEPAFFPNLGIADSVNNLIPFLSQFPTISAGDLVQFAGAVAISNCPGAPQLEFLAGRPNATAPAIDGLIPEPQDDVTKILARFKDAGNFSPAEVVALLASHSIARADHVDPTLDAAPFDSTPFDFDTQIFLEVLLKGVGFPGLANNTGEVSSPLPVTDGTDVGELRLQSDFALARDERTACAWQSFVNEQEAMATAFKNAVKKLAVLGHNRNDLVDCSAVVPVPKPATGTPATFPASTGPQDLELTCTTEPFPTLSTAPGAQQTLIPHCSDGTMTCNSVQFDGPATNFGGADDS

SEQ ID NO: 8504 - protein, 492 aa, Arabidopsis thaliana
MSDFSSSVKLKYVKLGYQYLINNFLTLLLIPVIATVAIELLRMGPEEILSVLNSLHFELLHILCSSFLIIFVSTVYFMSKPRTVYLVDYSCYKPPVTCRVPFSSFMEHSRLILKDNPKSVEFQMRILERSGLGEETCLPPAIHYIPPTPTMESARNEAQMVIFTAMEDLFKNTGLKPKDIDILIVNCSLFSPTPSLSAMIINKYKLRSNIKSYNLSGMGCSASLISVDVARDLLQVHPNSNAIIISTEIITPNYYKGNERAMLLPNCLFRMGGAAILLSNRRSDRWRAKYKLCHLVRTHRGADDKSYNCVMEQEDKNGNVGINLSKDLMTIAGEALKANITTIGPLVLPASEQLLSLSSLIGRKIFNPKWKPYIPDFKQAFEHFCIHAGGRAVIDELQKNLQLSGEHVEASRMTLHRFGNTSSSSLWYELSYIEAQGRMKRNDRVWQIAFGSGFKCNSAVWKCNRTIKTPTDGAWSDCIERYPVFIPEVVKL

SEQ ID NO: 8505 - protein, 211 aa, Nicotiana tabacum
MSYAYLFKYIIIGDTGVGKSCLLLQFTDKRFQPVHDLTIGVEFGARMITIDNKPIKLQIWDTAGQESFRSITRSYYRGAAGALLVYDITRRETFNHLASWLEDARQHANANMTIMLIGNKCDLAHRRAVSTEEGEQFAKENGLIFMEASAKTAQNVEEAFIRTASTIYKKIQDGVFDVSNESYGIKVGYGGIPGPSGGRDGAASQGGGCCS

SEQ ID NO: 8506 - protein, 181 aa, Helianthus annuus
MSLQQVPTTETTTRKNRNEGRKRFTDKQISFLEYMFETQSRPELRMKHQLAHKLGLHPRQVAIWFQNKRARSKSRQIEQEYNALKHNYETLASKSESLKKENQALLNQLEVLRNVAEKHQEKTSSSGSGEESDDRFTNSPDVMFGQEMNVPFCDGFAYFEEGNSLLEIEEQLPDPQKWWEF

SEQ ID NO: 8507 - protein, 403 aa, Cupriavidus necator
MLTQKTKDIVKATAPVLAEHGYDIIKCFYQRMFEAHPELKNVFNMAHQEQGQQQQALARAVYAYAENIEDPNSLMAVLKNIANKHASLGVKPEQYPIVGEHLLAAIKEVLGNAATDDIISAWAQAYGNLADVLMGMESELYERSAEQPGGWKGWRTFVIREKRPESDVITSFILEPADGGPVVNFEPGQYTSVAIDVPALGLQQIRQYSLSDMPNGRSYRISVKREGGGPQPPGYVSNLLHDHVNVGDQVKLAAPYGSFHIDVDAKTPIVLISGGVGLTPMVSMLKVALQAPPRQVVFVHGARNSAVHAMRDRLREAAKTYENLDLFVFYDQPLPEDVQGRDYDYPGLVDVKQIEKSILLPDADYYICGPIPFMRMQHDALKNLGIHEARIHYEVFGPDLFAE

SEQ ID NO: 8508 - protein, 442 aa, Candida albicans
MVNLLKKLHITKSHQSNHSNSDSNSLNSNTSMDNHQQQQQLQQYQQQFQQPQQQLYPGEQIVHPAAAQTGQNTTNVTAVSSSNITQSATSSLHSQQLQHVDVSKSAAEEAIRRSLLPERSTVSKGKYSLTDFSIMRTLGTGSFGRVHLVRSVHNGRYYAIKVLKKHQVVKMKQVEHTNDERRMLKLVEHPFLIRMWGTFQDSKNLFMVMDYIEGGELFSLLRKSQRFPNPVAKFYAAEVTLALEYLHSHDIIYRDLKPENILLDRNGHIKITDFGFAKEVSTVTWTLCGTPDYIAPEVITTKPYNKSVDWWSLGVLIFEMLAGYTPFYDSTPMKTYEKILAGKIHYPSFFQPDVIDLLTKLITADLTRRLGNLINGPADIRNHPWFSEVVWEKLLAKDIETPYEPPITAGVGDSSLFDHYPEEQLDYGSQGEDPYASYFLDF

SEQ ID NO: 8509 - protein, 1923 aa, Ustilago maydis 521
MADLPERQINSNFQGLVSTCVIFAVVGSISAITYESLRQLRRLPRTRFSKFWRKDADLRHSPGGVQDNPAHARHKHTCEDWEMGHFYLSRVFHASTPSPMLPRWPFAWVKLAISFTDEWYADHTGMDTVVYVRFLRACLFWVLLHCFTTAPILLSIHITFSRGTSTTDMQRASLSYLVNTPAPDCTEQDRSKCKLLPNEKGSSLLWVHLVLLWYISITWVLALWWIGKGSLTLRKAQIAKTRNNVIQAKTQARSAPPNSTLASATPLHHDPHTNLTAAHGITSDNSDGWRQRSLMVMNLPATMRDEASIRRYFEEFLRPDDDDTLSTYAHTDYAPQTASHNPDTQHTSVSDAHHPSSCDEHRAAPPTAYSTHSDGPDGPQPDLHPNRYLKSPIQTVVLVRKMNELASMLSRRQEVLTQLEAAHVKLAQEVLVTVGRRTLKMRKQERSKAKEASYPNDHRPSSSRSSFFFNRLLRSRRQSNHSVQAASASSSGTTTPSEALDPDLEKLGTAHSSAGKALEEELARRLARFSPTNRGLHAKQTQTIQGDDRSNQHEMGETVWEALNELPRELLDPFQPATRLSALFRGQTVPTIDYLLTKLNLLTALVTEMRSRPPTSYEPTSTAFVTFRDPRQARMVWRELKDQIVVKVRLAPEVKDLDWDRLMKTSFTVDVVRGFGVSIVTWGFTIFWVIIINAIVLGIFSVDKLKQIPGLGNFFDNNPKLTGFVTITLPPLLVSLASMSVPELIFQVSKRAQGFVTFSALYDMCLARYWKFVICNVVIFFSVGSTVIVTVLTKVGNTGSILSTVASAFPSAAPFFVSYLILQLALQSGFEHMGFMIALLQHLGARKATTPRTRAIKTLPRNFNRYYWLPLHINIMAIVFIFALLNPLVIPFALVYLALALVIFKKNFAYHYYRRFNEMEGVVYFTRLLRYSLDAIVVMQAVLLIFFSVLKKKPVYIGMSAVLIPLTVITKLIATRLWKSQCRALDDEEAEALCGIDSRPLWQKVQRNDMGPSTAEEGSDSRGPLDALASGRYPAIVPPPPTDSAFQRVWQRLHDSFNANGLDGQSYLATAHAKGKAPTGAVSLGAKGIARTPRYIVKETAKHAFHYRHAAKNSLGMKVLVESPRASRDRPSVDRRRPVSGLPPTSQLHVHVLRNSHEVAAATDPAAAADDDDDVDRADGEMPNHRSSNPQRSKSTSHGQKGDHVIHRRRGSSRSEDRPFLSGFDAISTHAPLPSEDDYDLSFEDGDAPFLEHDEQGHLLRQSSRRSKRTASRHHGTLRRKPSQLATVADEELPQSADSATSSTQPEGATSTDPLSQHAAVKTDQTWGKSSQRSHYEDYDDSLKGRELVRPHPPVRWDDTPNNTARYNNPFYNQEMDDFLWLPRNPLAPIDLFDTIEWYGPALVSSQGGGGIMGEWDDDQDDVNYDTEDEEKLVMHHDEIPFGGEAATLARSQDLMLAGDEEILLPDRLARHLEETQGVEQVVDPAASIPKSMMDDYKRALGRNRDRRGSTTSRSQHSVSRSSLFRRGSNLSSPSAQGFAGGASLLQVPSHGSFCSSDGSQAAASATQMRSSQRPGTGDSEPLASVDEGGVVVPRRSSSRDRRSRDARAGGGEEGGEAYEHVEQGGGGGGVAEQTTDLTPAKRREATLSGVKRNMSRRTYRRDASGALSRVSGISGETAQKTVTLQAALRAEALEEERRLTLKERLVASKIRKKRNVKRDGSGHLAGLEEMNADEEDDDEEEGATSRRAANRSKIMERYEAQHRRREAQASEFGQLTPRKEGGMRRDVSQGSQLGGEVSQSGLDRSASVASGFGARRLRSAALGVLSLTRSPRLGQDGPLTIVTSVPMQELRGGRPTTRGSSRMDAESQASASRQGVAAATASNEDQRPQMVEASSTEPVLRAEASRTSALEESVISGGQGGS

SEQ ID NO: 8510 - protein, 248 aa, Triticum aestivum
MKGGGDVEAGGDIEAGTAAPKGAPYAGTTESPELRWALIRKIYVVLCLQLLLTAAVAAVFVTVTAIPHFFVSSYAGLGLYIFILVFPFIVLCPLHIYRQKHPINLLLLGVFTVAISFSVGLTCAFTSGKVILQAGILTIVVVLSLTAYTFWAARRGKDFSFLGPFLFASLMILLVFAFIQIFFPLGKLSHMIYGTLAALIFSGYIVYDTGSIIKRYKYDEYVWAAVTLYLDIINLFLGLLTLFRACDN

SEQ ID NO: 8511 - protein, 98 aa, Triticum aestivum
RPIQVTILNKFVQKSRLVPAPEFPGYRRPTRPDISIISYVSLLTESGNTKDDLKLPTDDVLLGQIKTGFADGKDLILSVMSAMGEEQICAVKEIGGGK

SEQ ID NO: 8512 - protein, 220 aa, Zea mays
  misc_feature (122)..(122): Xaa can be any naturally occurring amino acid
  misc_feature (169)..(169): Xaa can be any naturally occurring amino acid
GRVGELRRTSSLLLCTSVSPADLARAMVAVDPDHPTGTEGRDPRGMSVLQQHVAFFDRDGDGVVYPWETFKGMRAIGCGFFTSLVLSFLINLVMSYPTQPGWLPSLLLSVHVKNIHKAKHGXSDSETYDTEGRFDPSKFDAIFSKYGRTHPDALTKDEMNSMLKANRNXYDFLGWIAAIGEWHLLYSVAKDKDGLLQREIVRGLFDASLFERLQDSKKSS

SEQ ID NO: 8513 - protein, 104 aa, Triticum aestivum
  misc_feature (9)..(9): Xaa can be any naturally occurring amino acid
  misc_feature (11)..(11): Xaa can be any naturally occurring amino acid
  misc_feature (14)..(14): Xaa can be any naturally occurring amino acid
  misc_feature (16)..(16): Xaa can be any naturally occurring amino acid
  misc_feature (23)..(25): Xaa can be any naturally occurring amino acid
  misc_feature (27)..(27): Xaa can be any naturally occurring amino acid
  misc_feature (30)..(30): Xaa can be any naturally occurring amino acid
  misc_feature (33)..(33): Xaa can be any naturally occurring amino acid
  misc_feature (37)..(37): Xaa can be any naturally occurring amino acid
  misc_feature (39)..(39): Xaa can be any naturally occurring amino acid
  misc_feature (63)..(63): Xaa can be any naturally occurring amino acid
  misc_feature (69)..(70): Xaa can be any naturally occurring amino acid
  misc_feature (88)..(88): Xaa can be any naturally occurring amino acid
  misc_feature (91)..(91): Xaa can be any naturally occurring amino acid
MAPTVMASXAXFVXPXQGLKSTXXXPXSRXSNXASLXSXSNGGRIRCMQVWPIEGIKKFETLXYLPPLXXRRPFLKHVDYLIRSKWPXCLXFIPGSFFPLPFLL

SEQ ID NO: 8514 - protein, 118 aa, Oryza sativa (japonica cultivar-group)
MAAVNCKVVVAVIVVAMVVAAPGASAAITCGQVGSAIAPCISYVTGRSGLTQGCCNGVKGLNNAARTTADRQAACRCLKSLAGSIKSLNLGTVAGVPGKCGVNVGFPISLSTDCNKVS

SEQ ID NO: 8515 - protein, 150 aa, Zea mays
  misc_feature (9)..(9): Xaa can be any naturally occurring amino acid
SGKDVDLAXYRGKVLLIVNVASQCGLTNSNYTHQAQLYEKYKNQGFEILAFPCNQFGGQEPGTNEEIAQFACTRFKADYPIFDKVDVNGNNAAPIYKFLKSSKGGLFGDSIKWNFSKFLVDKEGRVVDRYAPTTSPLSIEKDIKKLLGSS

SEQ ID NO: 8516 - protein, 480 aa, Lactobacillus acidophilus
MKLQNKAILITYPDSLGHNLKDLDHVMDRYFNKTIGGIHLLPFFPSNGDRGFSPTRYDVVEPKFGSWEDVEKLSQKYYLMFDFMINHLSKKSSYFEDFEAKHDKSKYSDLFLSWDKFWPKGRPTKEDIDLIYKRKDKAPYQNIKFEDGTHEKMWNTFGPDQMDLDVRTKTTQDFIKHNLQNLSKHGASLIRLDAFAYAIKKLDTNDFFVEPEIWNLLEKVNDYLKDTPTTILPEIHEHYTMPFKVAEHGYFIYDFALPMVLLYSLYSGNSTQLAAWLKKCPMKQFTTLDTHDGLGVVDAKDILTDDQISYTTNELYKIGANVKKKYSSAEYHNLDIYQINTTYYSALGNDDKKYFIARLLQIFAPGIPQIYYVGLLAGENDIQLLEKTKEGRDINRHYYDLDEIAEQVQRPVVKSLIKLLEFRNSVPAFDLEGSIKVETPSEHEIIVTRSNKAGTEVASTYVDFKNLDYQVKYNDQVFNF

SEQ ID NO: 8517 - protein, 156 aa, Brassica napus
  misc_feature (155)..(155): Xaa can be any naturally occurring amino acid
RFMIYVHTKMMIVDDEYIIIGSANINQRSMDGARDSEIAMGGYQPYHLSIRQPARGHIHGFRMSLWYEHLGMLDETFLDPSSQECVQKVNRIADKYWDLYSSESLEHDLPGHLLRYPIGIASQGDITELPGCECFPDTKARILGTKSDYLPPILXT

SEQ ID NO: 8518 - protein, 403 aa, Burkholderia cepacia R1808
MLTQKTKDIVKATAPVLAQHGYDIITCFYRKLSDAHPELRNAFNMAHQEQGQQQQALARAVYAYAENIEDPGSLAAVLKNIANKHASLGVRPEHYPIVGENLLAAIKETLGDAATDDIVSAWAQAYGNLADLLMGMESTLYERSSERLGGWTGWRTFVVREKRPESSVITSFVLEPADGEPVANFEPGQYVSVAMDVPELGLQQIRQYSLSDMPNGRTYRISVKRESGGDYPPGYVSCLLHDYVEVGQTLALAAPYGSFHIDVEAKTPIVLISGGVGLTPMISMLTRAIQDSHRQVVFVHGARNSGVHAMRDRLRETASTHANFKLVVFYDDPLPQDVEGVDYDLKGLVDVNAIKDALLLPDADYYICGPVPFMRLQHDALKQLGVPETRIHYEVFGPDLFAE

SEQ ID NO: 8519 - protein, 127 aa, Zea mays
EDLAEEVEPIRGPMGSDMEVTLACAGFSKPILTALEATRPGGKVSLVGMGPNEMPLPLTAAAAREVDLVGVFRYKATWPLCIDFLRRGKVEVNPFFPPRLGFSQREGEEPFEVSPRGRDAIKVMFTL

SEQ ID NO: 8520 - protein, 131 aa, Triticum aestivum
MSYYDRRGESSVLEAFTLSPLPYPVILILMMVTLLLGASWFFSYEEFMEEASEQFSWFLLGVPIALVLLIRWISSVDTFEGYFGFYPTESRWRGYPAAPSEGSSPWGVAMVVVLLLVLASFHSTFQDMWKA

SEQ ID NO: 8521 - protein, 347 aa, Coccidioides immitis
AEKIAKFPGTKGPDGKYTVTLIEGDGIGPEISQSVKDIFSAAKVPIKWEPVDVTPILKDGKTAIPDEAINSVKKNYVALKGPLATPVGKGHVSLNLTLRRTFNLFANVRPCRSIAGYKTPYDNVNAVLIRENTEGEYSGIEHVVVDGVVQSIKLITREASERVLRFAFQYAQEVGKPKVRAVHKATIMKMSDGLFLRTAKEISKEFPDIEFDAELLDNTCLRMVTDPAPYNDKVLVMPNLYGDILSDMCAGLIGGLGLTPSGNIGNECSIFEAVHGSAPDIAGRALANPTALLLSSIMMLRHMGLNDHAKKIETAIFETLAEGKTLTGDLGGKAKTHEYAGAIIKRL

SEQ ID NO: 8522 - protein, 467 aa, Zea mays
MSTTKVKRRVGKYELGRTIGEGTFAKVRFARDTVTGEAVAIKILDKEKVLKHKMVEQIKREISTMKLIKHPNVVRIYEVMGSKTKVYIVLEFATGGELFDTIVNHGRMREDEARRYFQQLINAVDYCHSRGVYHRDLKPENLLLDSYGNLKVSDFGLSALSQQIKDDGLLHTTCGTPNYVAPEVLEDQGYDGAMADLWSCGVILFVLLAGYLPFEESNLMTLYKKISNAEFTFPPWTSFPAKRLLTRILDPNPMTRITIPEILEDEWFKKGYKRPEFDEQYDTTLDDVDAVFNDSEEHHVTEKKEEEPVALNAFELISMSAGLNLGNLFDSEQEFKRETRFTSKCPPKEIVRKIEEAAKPLGFDVQKKNYKLRLEKVKAGRKGNINVATEILQVAPSLNTIFFCKAFCDTLLFILIQILQVAPSLHMVEVRKAKGDTLEFHKFYKNLSKTLKDVVWKSDDLQTQHAS

SEQ ID NO: 8523 - protein, 124 aa, Pinus resinosa
MAVSKKMVEAVFLVGLVVTMMNVWGGVSVEGAISCNQVVSAMTPCATYLLGNAATPAAACCPSIRGLDSQVKATPDRQAVCNCFKTQARSYGVKLGKAANLPGLCKVTDLNVPISPNVDCSKVH

SEQ ID NO: 8524 - protein, 472 aa, Wolbachia endosymbiont of Drosophila melanogaster
MSTLITVAYGDGIGPEIMEAVLSILREAEAEISIDIIEIGERVYSKEWSHGISPSGWESIERTKILLKSPTTTPQGKGNKSLNVALRKNLGLYANIRPCISYHHVIENKFDKFDIVVIRENEEDVYTGIEHRLTGDSYQCTKIITRSGSEKICRYAFEYAKKHNRKKVTCLTKDNIMKMTDGTFHAAFDRIAKEYPDIKAEHYIVDIGMARVATEPENFDVIVTENLYGDILSDIVAQTSGSVGLAGSSNIGNEYAMFEAVHGSAPDIAGKNIANPSGLLNAAVHMLIYIGQVGTAKLIYDAWLKTLEDGIHTADLYKEKRSKQKVGTKEFAEAVIDNLGKKPKTLSELIIGSDPNSKVDKIQDNYEQDYKIKKLVGSDITLAWSKPADFDQIVKLFETSNPQIIAIYSKGLAIWPGSSKSSSDQITCRFIANNEITNSDVNNLLIKFEEHNFDVVRMDKLYLYDGKEGFFS

SEQ ID NO: 8525 - protein, 321 aa, Agrobacterium tumefaciens str. C58
MTSKLEQLRAITTVVADTGDIEAVARLKPVDCTTNPTIVLKALGTPAFADAVKEAVAWGRKQGGQSDAVVAAVADRLAISVGAALAGLVPGRVSTEVDADLSFDTQASITKARHIIASYKERGIERERILIKLASTWEGIKAAEVLQSEGIDCNLTLLFSQAQAIACAEAKAFLISPFVGRILDWYKKSTGETYTAETDPGVVSVRSIYNYYKANGIGTVVMGASFRNVGEIEALAGCDRLTISPALLEELDKDNGKLERKLSPDNVKAEALQSLDEKAFRWAMNEDAMATEKLSEGIRLFAKDLVTLREMVRKELTAAAA

SEQ ID NO: 8526 - protein, 435 aa, Streptomyces clavuligerus
IYNRDELLSVLPAGPAPEGDAELVLRLLERYDLHAFRLVNGRFATVVRTGDRVLLATDHAGSVPLYTCVAPGEVRASTEAKALAAHRDPKGFPLADARRVAGLTGVYQVPAGAVMDIDLGSGTAVTHRTWTPGLSRRILPEGEAVAAVRAALEKAVAQRVTPGDTPLVVLSGGIDSSGVAACAHRAAGELDTVSMGTDTSNEFREARAVVDHLRTRHREITIPTTELLAQLPYAVWASESVDPDIIEYLLPLTALYRALDGPERRILTGYGADIPLGGMHREDRLPALDTVLAHDMATFDGLNEMSPVLSTLAGHWTTHPYWDREVLDLLVSLEAGLKRRHGRDKWVLRAAMADALPAETVNRPKLGVHEGSGTTSSFSRLLLDHGVAEDRVHEAKRQVVRELFDLTVGGGRHPSEVDTDDVVRSVADRTARGAA

SEQ ID NO: 8527 - protein, 175 aa, Triticum aestivum
MAPAVMASSATTVAPFQGLKSTAGLPVSRRSGSASLSSVSNGGRIRCMQVWPIEGIKKFETLSYLPPLSTEALLKQVDYLIRSKWVPCLEFSKVGFVFREHNSSPGYYDGRYWTMWKLPMFGCTDATQVLNEVEEVKKEYPDAYVRVIGFDNMRQVQCVSFIAFRPPGCEESGKA

SEQ ID NO: 8528 - protein, 168 aa, Zea mays
SLPSLYITQEEFQLALFKNQRKENLFANRIFDLFDVKKRGAIDFGDFVRALNVFHPNIPMDEKIDFSFKLYDMDSTGFIERKEVKQMLIALLGESEMRLSDDIIETILDKTFSDADANQDGKIDRTEWENFVTRNPSLMKIMTLPYLKDITTTFPSFVFNSEVDDLVT

SEQ ID NO: 8529 - protein, 369 aa, Candida albicans SC5314
MFRQVTKSAPVIRTTQRLFARSYIAGQFTGSKGSDGKYTVTLIEGDGIGPEISQAVKDIYAAADVPIHWEPVDVTPLLIDGKTTLPQPAVDSVNKNLVALKGPLATPVGKGHTSMNLTLRRTFNLFANVRPCKSIVGYETPYENVDTVLIRENTEGEYSGIEHTIVPGVVQSIKLITKPASEKVIRYAFEYAKSINKPHVLVVHKASIMKLSDGLFVNTAKEVAQEYPDVSLDFELLDNTSLRLTADPSQYKNVVMVMPNLYGDIMSDLSSGLIGGLGLTPSGNMGNKVSIFEAVHGSAPDIAGKGLANPTALLLSSCMMLRHMSLNSDADRIENAVLKTIASGPENRTGDLKGTATTTRFTEEVIKNL

SEQ ID NO: 8530 - protein, 482 aa, Pseudomonas fluorescens
MLDVPLLIGGQSCPARDGRTFERRNPVTGELVSRVAAATLEDADAAVAAAQQAFPAWAALAPNERRSRLLKAAEQLQARSGEFIEAAGETGAMANWYGFNVRLAANMLREAASMTTQVNGEVIPSDVPGSFAMALRQPCGVVLGIAPWNAPVILATRAIAMPLACGNTVVLKASELSPAVHRLIGQVLQDAGLGDGVVNVISNAPADAAQIVERLIANPAVRRVNFTGSTHVGRIVGELSARHLKPALLELGGKAPLLVLDDADLEAAVQAAAFGAYFNQGQICMSTERLIVDAKVADAFVAQLAAKVETLRAGDPADPESVLGSLVDASAGTRIKALIDDAVAKGARLVIGGQLEGSILQPTLLDGVDASMRLYREESFGPVAVVLRGEGEEALLQLANDSEFGLSAAIFSRDTGRALALAQRVESGICHINGPTVHDEAQMPFGGVKSSGYGSFGGKASIEHFTQLRWVTLQNGPRHYPI

SEQ ID NO: 8531 - protein, 415 aa, Pasteurella multocida subsp. multocida str. Pm70
MQSKVVIPQGEKIQLDAKGALIVPDHPIIPFIEGDGIGVDVTPAMRTVIDAAVEKAYGGKRKISWMEIYAGGKANEVYGENTWLPDETMTFIRDYHVAIKGPLMTPVGGGIRSLNVAMRQGLDLYNCLRPIRYYDGTPSPVKHPELVDMVIFRENSEDIYAGVEWVAGSAEANKVIAFLQQEMGVKKIRFTEDCGIGIKPVSKQGTQRLVRAALQYVIDNDRKSLTLVHKGNIMKFTEGAFKEWGYQVAQEFGAELLDGGPWMTLKNPKTGREIIIKDSIADAFLQEILLHPTEYDVIATLNLNGDYISDALAAQVGGIGISPGANIGAEAAIFEATHGTAPKIAGQDKGNPGSLILSGEMMLRHLGWLEAADLVVKAVSKTIADKTVTFDFAEMLEGAKLRSTSEFAQDIVANM

SEQ ID NO: 8532 - protein, 480 aa, Lactobacillus acidophilus
MPIENKVMLITYPDSLGKNLKELDEILSEDLKGAVGGIHLLPFFPSTGDRGFAPTGYTEVDPKFGDWSDIEKIGKKYYLMFDFMINHISRQSKFYKDFKQKKDKSKYADLFLSWDKFWPEGRPTRKDIDLIYKRKDRAPYQEITFTDGSKEKLWNTFGEEQIDMDVRKEVTQKFIKDTLRALIDHGADIIRLDAFAYAVKKLDTNDFFVEPEIWDLLKQVQDDISDKGAMILPEIHEHYSMPFKISKHGYYIYDFALPMVTLYSLYSGKSNRLADWLKKCPMKQFTTLDTHDGIGVVDARDILSPDEIKYTSNELYKVGANVKKKYSSAEYHNLDIYQINTTYYSALGNDDKKYFIARLIQMFAPGIPQVYYVGMLAGKNDIELLEKTKEGRNINRHYYGREEVAEETKRPLVAALLKLFNFRNNEAAFDLDGSIEITTPNENVIQITRMNKDKTRKARAVINLKNLTYQVTVNNEVINF

SEQ ID NO: 8533 - protein, 442 aa, Picrophilus torridus DSM 9790
MIDDESRTLEYNEKALKLSEFYKGKVGIVPKVPVRSLDDFSVWYTPGVAAVARKIAENRDLSFELTGRWNSVAILTDGTRVLGLGNIGPEAAMPVMEGKSLIFNYLGGVNAVPIPVRAASEDDFIRVAMALEPSFGGFNLEDIESPKCFSILEKLQKTLEIPAWHDDQLGTASITLAGVINALRVVNKKIDDVRVVFNGAGAANIAAAYLFNEAGFKMKNMVMIDSSGILEPERPDMDRLMLNNPLKYKLAIDTNEDRLKGNLMDAVNGADIIISASKSQPGIIRPEHIKLMNRDPIVFALANPLPEIWPRDAINAGARIVATGRSDFNNQINNSLVFPGVFRGILDARARKVNFKVMVSASYEIANAVKNPDENHIVPDMSNWELYPRVAAAVASKCSELGFARKAGDYNTFLKRATDIIEENRRLYDTLIEKNIIKIAMR

SEQ ID NO: 8534 - protein, 189 aa, Methylobacillus flagellatus KT
MDIDFKKLAPWNWFKKEQEEQQSTVSLPVQRNDLPVAGGPVSPILQLHREIDRLFDDAFRGFGFPTLAMPRWPSEWPGLLKPALDIQETDKQYKISLEVPGVEEKDIQITLDNDVLLVRGEKRQEQESKDGGFHRVERSYGSFQRALNLPADANQDTIKAAFKNGVLTITMEKREASTPKQGRSIPING

SEQ ID NO: 8535 - protein, 429 aa, Leptospira interrogans serovar Copenhageni str. Fiocruz L1-130
MAEVAILKIDGKEYELPIVIGTEKEKAIDISKLRQQTGYVTLDNGYLNTGACTSAVTFLDGELGILRYRGIPIEQLAENSTFTEVAYLLIYGKIPSDSELKKWNDELTMHTLIHEDLKRLYNGFPKDGHPMAIMSSMIGSLSTYYQDSYDPENAEHRHISMIRLLAKFPTIAAFAYKKSIGQPTIHPLNSLDYCANFMNMMFSVPSEDYKIDPEIVKALNLLLILHADHEQNCSTSTVRLVGSSLANLYGAISAGICALWGPRHGGANQEVLEMLQEIQASGLPVKKIVEKAKDKNDSFRLSGFGHRVYKNFDPRAKIIKKACDSVLKRLGVQDSLLDIAKELEETALHDPYFVERKLYPNVDFYSGIIYRALGIPVNMFTVMFAMGRLPGWIAQWKEMIESPDMKIGRPRQIYTGSTETSYKEAKKKA

SEQ ID NO: 8536 - protein, 295 aa, Triticum aestivum
  misc_feature (198)..(198): Xaa can be any naturally occurring amino acid
MAGLSMEHPWAFAFGLLGNIISFTSLLAPIPTFYRIFKSKSTEGFQSVPYVVALFSAMLWIFYALVKTGEGLLITINAAGCVIETIYIVMYLVYAPRKAKIFTAKIVLLLNIAGFGLIFLLTVFAFQGETRVISLGWICVGFSVCVFVAPLSIIGRVIKTKSVEYMPFSLSLTLTLSAIVWFLYGLLIKDKYVALPNXLGFTFGMIQMVLYMFYMNATPVVTSDVKEVKEAWKVPAEDQVVVINVGKADKSSCAEVRPVTEMASAVDVPRRCAAEAAAPRQQVMAVDFARSVEVV

SEQ ID NO: 8537 - protein, 216 aa, Triticum aestivum
MGCIQSTPKRRQHPAGYEDPVHLASQSPAFSVSEVEALFELFKSISGSVIDDGLINKEEFQLALFKNTRKENLFANRIFDLFDVKKRGVIDFGDFVRALNVFHPNFPVEEKIDFSFKLYDMDGTGFIERKEVKQMLIALLGESEMRLSDEIVETILDKTFSDADTNQDGKIDRTEWENFVSRNPSLLKIMTLSYLKDITTTFPSFVFHSEVDDIVT

SEQ ID NO: 8538 - protein, 134 aa, Brassica napus
MTMMINPDVDLIDRGGSVVVREVWAYNLVSEFHLISAVVEDFPYISMDTEFPGVIFKAEPAILRRGNPGYLYKLLKSNVDVLSLIQVGITLSDADGNLPDLGGGVDGSRFIWEFNFRDFDVDRDAHAEDSIELL

SEQ ID NO: 8539 - protein, 197 aa, Zea mays
MSASRFIKCVTVGDGAVGKTCLLISYTSNTFPTDYVPTVFDNFSANVVVNGATVNLGLWDTAGQEDYNRLRPLSYRGADVFILAFSLISKASYENVSKKWIPELKHYAPGVPIVLVGTKLDLRDDKQFFIDHPGAVPITTAQGEELKKLIEAPAYIECSSKSQENVKGVFDAAIRVVLQPPKQKKKKSKAQKACSIL

SEQ ID NO: 8540 - protein, 214 aa, Triticum aestivum
  misc_feature (125)..(125): Xaa can be any naturally occurring amino acid
  misc_feature (133)..(133): Xaa can be any naturally occurring amino acid
HQETCRKIKALHQYDCLRANKATSAWGLEVRVPFLDKEFINEAMSIDPEWKMIRPDLGRIEKWILRKAFDDEERPFLPKHILYRQKEQFSDGVGYSWIDGLKDHAASNVNEQFFYFKPPFMKKGXAVTRTFPXFFPQTISDLTGPGGPSVACSPAKAVEWDAQWSGNLDPSGRAALGVHLSAYEQEHLPATILTGTSKKPRMIEVAAPGVAIES

SEQ ID NO: 8541 - protein, 219 aa, Shewanella oneidensis MR-1
MTQQTLYSTSATTLEVNKLLKNTYLLLAMTLAFSALCAGLAMALNISPLMSLGLSIGGLVLLFVTLRKADSAAGIFWVFAFTGMEGASLGYMLNHYAGMTNGSELIMQAFGLTSVIFIALSAYAVTTKKDFSFMRGFLFAGLIVVIAAAIINIFVGNSVAFMAINAGLALLMTGFILFDTSRIVNGGETNYIRATISLYLDFLNLFIAILHLLGIGNDD

SEQ ID NO: 8542 - protein, 183 aa, Streptomyces avermitilis MA-4680
MTTTSRAQGATVWLAGLPSAGKTTIGRILAGRLRSQGHRVEVLDGDEIRRFLSAGLGFSRADRHTNAQRIGLVAEVLARNGVLAVVPVIAPYADSREAVRKRHEASGTPYLEVHVATPVEVCSERDVKGLYARQAAGRLKGLTGVDDPYEPPVDPALTLETQGQTPEESAGAVYAVLAARGLV

SEQ ID NO: 8543 - protein, 360 aa, Glycine max
MGESNVMTKTEDGACLSAMLLSTNLVYPAVLNAAIELNLFEIIAKATPAGSFMSSHEIASKLPTQHPDLPNRLDRMLRLLASYSVLTTSTRTTHHGATETVYGLSQVGQYFVPDGTRGYLASFTAFVCYPPLLQVWLNFKEAMVDADIDLFKKIHGVTMYQYMENDPKMNQIFNKSMANLCATEMSRILEIYTGFEGISTLVDVGGGNGQNLKMIISKYPLIKGINFDLPQVIENAPPLPGIEHVGGDMFARVPQGDAIILKAVYHNWSDEKCIEFLRNCHKALSPNGKVIVVEFILPEEPEPTEESQLVSTLDNLMFITVGGRERTQKQYETLCKLSGFSNFQVACRAFSSLGVMEFYK

SEQ ID NO: 8544 - protein, 162 aa, Cupriavidus necator
MRRRFGSLLSAVICGLALHAGAATLSDTELDARVHALSGQLRCLVCQNQTLADSNADLAVDLRRQIRERLRGGASDEAVKDYLVQRYGDFVLYKPPLRPLTWLLWFGPLLLVAGVTIAIIRARSRSVAAGLPLDAEAQRQLAALLDETSGQPASPPAEARQP

SEQ ID NO: 8545 - protein, 503 aa, Streptococcus pneumoniae
MFASKSERKVHYSIRKFSIGVASVAVASLVMGSVVHATENEGSTQAATSSNMANKSQTEQGEINIERDKAKTAVSEYKEKKVSEIYTKLERDRHKDTVDLVNKLQEIKNEYLNKIVESTSTIEIQGLITTSRSKLDEAVSKYKKAPSSSSSSGSSTKPETPQPETSKPEVKPEPETPKPEVKPEPETPKPEVKPEPETPKPEVKPELETPKPEVKPEPETPKPEVKPEPETPKPEVKPEPETPKPEVKPELETPKPEVKPELETPKPEVKPEPETPKPEVKPELETPKPEVKPEPETPKPEVKPELETPKPEVKPEPETPKPEVKPELETPKPEVKPEPETPKPEVKPEPETPKPEVKPEPETPKPEVKPEPETPKPEVKPEPETPKPEVKPEPETPKPEVKPEPETPKPEVKPEPETPKPEVKPDNSKPQADDKKPSTPNNLSKDKQSSNQASTNENKKQGPATNKPKKSLPSTGSISNLALEIAGLLTLAGATILAKKRMK

SEQ ID NO: 8546 - protein, 180 aa, Pisum sativum
MASMISSSAVTTVSRASTVQSAAVAPFGGLKSMTGFPVKKVNTDITSITSNGGRVKCMQVWPPIGKKKFETLSYLPPLTRDQLLKEVEYLLRKGWVPCLEFELEKGFVYREHNKSPGYYDGRYWTMWKLPMFGTTDASQVLKELDEVVAAYPQAFVRIIGFDNVRQVQCISFIAHTPESY

SEQ ID NO: 8547 - protein, 490 aa, Triticum aestivum
  misc_feature (423)..(423): Xaa can be any naturally occurring amino acid
MDPNSFKTGGLLLPTIERRCASPPSVIVIGGGISGIAAARVLSNSSFEVTVLESRDRIGGRVHTDYSFGCPIDMGASWLHGVSNENSLAPLISHLGLRLYHTSGDNSVLYDHDLESCSLFDKNGLAVPMETAAKVGVIFEKILKETVKLRDEQEHDMPLEQAISMVLERHPDLKLEGLDDRILQWCVCRLEAWFAADADEISLKNWDQEHVLTGGHGLMVDGYFPVIQALAQGLDIRLNQRVKKIARQQKGVTVTIEDGTQYSADACIITVPLGVLKANIIKFEPELPSWKSSAIADLGVGIENKVAMHFDKAFWPNVQVLGMVGPTPKTCGYFLNLHKATGHPVLVFMAAGRFAQDVEKLSDKEAVELVMCHLRKMIPDATEPTQYLVSRWGSDPNSLGSYSCDLVGKPSDVCQRFSAPVEXVLYFAREAASAEHSGAVHGAYSSGMDAAEECRRRLLMSKGVPDLIQVGAAACEEMADVVAPLQICRT

SEQ ID NO: 8548 - protein, 499 aa, Candida albicans SC5314
MFKKALPLVSKLTTPKGITYNQPLGLFINNEYVHPKQQKTFEVISPSTEEKITDVYEALEEDIDTAVEAAQAAYHNGWAQGPPEQRSKVLFKLADLIEENAELLAQIETWDNGKSLQNARGDVALTAAYFRSCGGWADKILGSQINTGNTHFNYTQRVPLVCGQIIPWNFPLLMASWKLGPVLATGSTTVLKTAESTPLSALYLSQLLVEAGMPKGVINIVSGFGATAGAAIAKHPKIEKVAFTGSTATGKIIMKLAAESNLKKVTLELGGKSPNIVFNDADLDKTIQNLIVSIFYNSGEVCCAGSRLLIQSGVYDQVVEKFKEAAESVKVGNPFDEDTFMGAQVSDVQLSKILKYVESGKSQGATVVTGGARADGKGYFVKPTIFADVKKDMDIVREEIFGPVVTLIKFDTVDEAVELANDSDYGLAAGIHSADVNKCIDVANRVKAGTVWVNTYNDFHPMVPFGGFSASGIGREMGEEVLHEYTQVRAVRMKINPPN

SEQ ID NO: 8549 - protein, 319 aa, Wigglesworthia glossinidia endosymbiont of Glossina brevipalpis
MNQLDYIKKFTNVVIDSGNIKYIKKYSPKDVTTNPSLILRESKSKHYYPLLMDAISYAKKKGGNLNSYIINANDKLLVNIGREILKIIDGRISIEIDVRLSFSYLDLIIRAKKIISLYNSYGIENNRILIKIAATWEGIQAAKFLEKSGINCNLTLIFSLVQAIACAESNVYLISPFVGRVNDWYIKNFKLNKNSKIDPGVKLVYKIFYFYQKYGYKTFVMGASFRNIDQIISIIGCDAITISPDFVNKLNNLKLKKIKNFIRVNLESKIKKNKLLEKEFRWKFNQNFMAVEKLSEGIRLFLRDQKKIDSFFLKKFKSG

SEQ ID NO: 8550 - protein, 356 aa, Gibberella zeae PH-1
MAETNPSCLLYGPGDARFEDRPFPQIEDPHDVIVKIAYTGVCGSDVHFWTEGGFARKVSQQQPLVMGHEASGIIYKVGPAVSQLKPGDRVAIEPGFPCKSCNYCKSGRYNLCRKMKFAADPPFTHGTLSRFFKIPEDFTYKVPHSISLEEAVLVEPLGVAVHGVRLADIRPGQNVIVQGAGTVGCLTAATAKAYGAKTVVITDINPEKLSFAKGVVECYTFQPRLYATPEQEAARLKQEAGFDLGADTVLECTGVEISAHTGILALAPGGVFVQIGLGKPIQSLPLHSMCEKEMTMKTCFRYGPGDFEIALELLESCKVSVSSFISSIVPFEKAPEAWVRTMKGEGIKNLIKGVED

SEQ ID NO: 8551 - protein, 126 aa, Corynebacterium diphtheriae NCTC 13129
MAKLTKDELIEAFKEMTLIELSEFVKEFEEVFEVTAAAPVAVAAAGAAPAAAEEEKTEFDVVLEDAGAKKIGVIKAVRELVSGLGLKEAKELVEGAPKAILEGANKDDAEAAKAKLEEAGAKVTLK

SEQ ID NO: 8552 - protein, 169 aa, Triticum aestivum
  misc_feature (9)..(9): Xaa can be any naturally occurring amino acid
MAPTVMASXATSVAPFQGLKSTAGLPVSRRSNGASLGSVSNGGRIRCMQVWPIEGIKKFETLSYLPPLSTEALLKQVDYLIRSKWVPCLEFSKVGFIFREHNASPGYYDGRYWTMCKLPMFGCTDATQVINEVEEVKKEYPDAYVRIIGFDNMRQVQCVSLIAYKPPGC

SEQ ID NO: 8553 - protein, 434 aa, Bradyrhizobium japonicum
MDAKASNKTATLTVGNKNYDLPIHSGSVGPDVIDIGKLYGQSGLFTYDPGFTSTASCQSKITYIDGDAGVLEYRGYPIEQLAENGDFLETCYLLLYGNLPTAAQKKDFDDRVIHHTMVHEQMARFFQGFRRDAHPMAVMVASVGALAAFYHDSTDINDPKQRMIASMRMIAKIPTLAAMAYKYTIGQPFVYPKNSLKFAENFLHMCFAVSCEEYKINPVLADALDKIFILHADHEQNASTSTVRIAGSSGANPFACIAAGIACLWGPAHGGANEAALAMLGEIGSVDKIPEFIAKVKDKNSEVRLMGFGHRVYKNYDPRAKIMQKMCHAVLKETGHGDDPMLKVALELEKIALSDQYFIDRKLYPNVDFYSGITLKAMGFPVSMFTVLFAVARTVGWISQWSEMIEDPQQKIGRPRQLYTGVTRRDYVAIKDRK

SEQ ID NO: 8554 - protein, 201 aa, Glycine max
  misc_feature (154)..(154): Xaa can be any naturally occurring amino acid
  misc_feature (194)..(194): Xaa can be any naturally occurring amino acid
MVLEATMICIDNSEWMRNGDYSPSRFQAQTDAVNLICGAKTQSNPENTVGVLTMAGKGVRVLVTPTSDLGKILACMHGLEIGGEMNLAAGIQVAQLALKHRQNKKQQQRIIVFAGGPVKHEKKMLEMIGRKLKKNSVALDVVNFGEEDEGKTEXLEALLSAVNNNDTSHIVHVPSGPNALSDVLISTPIFTGDXEGESGFA

SEQ ID NO: 8555 - protein, 136 aa, Triticum aestivum
  misc_feature (53)..(53): Xaa can be any naturally occurring amino acid
  misc_feature (86)..(86): Xaa can be any naturally occurring amino acid
  misc_feature (120)..(120): Xaa can be any naturally occurring amino acid
  misc_feature (123)..(123): Xaa can be any naturally occurring amino acid
MSDSEEHHFESKADAGASKTYPQQAGTVRKNGFIVIKNRPCKVVEVSTSKTGXKHGHAKCHFVAIDIFNGKKSEDIVPSSHNCDIXPHVNRYWITTDWIYQEDGLVTFLLQNGNTKDDLXLPXLDEPLVAKFKEGF

SEQ ID NO: 8556 - protein, 146 aa, Azotobacter vinelandii
MGRSAFGSLMEPFGRAGREMASMPAVDIVDQDKAILISAELPGMDEQNIELKVCNGNLMLKGEKREEREENSQGLYLSERSYGAFQRSFALPDSVDADNIEAHFDKGVLTITLPKRPEAQQSERAIEIRRGEAAAQQQDTTQATTH

SEQ ID NO: 8557 - protein, 407 aa, Zygosaccharomyces rouxii
MATHEEFIRTQVFGTVFEITNRYTDLNPVGMGAFGLVCSATDTLAGQPVAIKKIMKPFSTAVLAKRTYRELKLLKHLRHENLICLQDIFLSPLEDIYFVTELQGTDLHRLLQTRPLEKQFVQYFLYQILRGLKYVHSAGVIHRDLKPSNILINENCDLKICDFGLARIQDPQMTGYVSTRYYRAPEIMLTWQKYDVEVDIWSAGCIFSEMIEGKPLFPGKVHVHQFSIITDLLGSPPRDVIITICSEDTLKFVTSLPHRDPVPFQERFKAVEPDAVDLLGRMLVFDPKKRITAADALVHPYLAPYHDPTDEPIAEAQFDWDFNDADLPVDTWRVMMYSEILDFHKIGGSDGQIDTNAAFDDQVAAATAGPMLPLWLNSNININNSHPVNIQVQLLRHQQPRITVVYQ

SEQ ID NO: 8558 - protein, 317 aa, Triticum aestivum
LNKFVQKSRLVPVRNSRDIVDPRVREAGLPEGVLNIVSGFGPTAGAALASHMDVDKIAFTGSTDTGKVILELSARSNLKPVTLELGGKSPFIVMDDADIDQAVELAHFALFFNQGQCCCAGSRTFVHERVYDEFVEKSKARALKRVVGDPFRKGVEQGPQIDDEQFKKILRYIKSGVDSGATLVTGGDKLGDKGYYIQPTIFSDVQDGMKIAQEEIFGPVQSIFKFNDLNEVIKRANASQYGLAAGVFTNNLDTANTLTRALRAGTVWVNCFDIFDAAIPFGGYKMSGIGREKGIDSLKNYLQVKAVVTALKNPAWL

SEQ ID NO: 8559 - protein, 103 aa, Dechloromonas aromatica RCB
MDVKEEGDSYLVHAELPGVKKEDIHVVVDGNQVSISAETKQEKEVKEGDRVLRSERYFGKVSRSFLLEQDLDDTKATAKFNDGVLELTLPKRTASPNKKLNIE

SEQ ID NO: 8560 - protein, 312 aa, Triticum aestivum
  misc_feature (42)..(43): Xaa can be any naturally occurring amino acid
MERYKVIREIGDGTCGNVFRAYNIETNEIVAVKKMKRKFYHXXECISLREVKALQKLNHPNIVQLKEVTMENHELFFIFEHMDCNLYDVIRERSAPFSEEEIRTFMLQILQGLVYMHNNGYFHRDLKPENLLVTNGIVKIADFGLAREVCSSPPYTDYVSTRWYRAPEVLLQASAYTPSIDMWAIGAILAELFTLSPLFPGETETDQLYKICAVLGTPDHSLWPEGMNLPRSSSFQFFQIPPRNLWELIPNASLEALDLIKQLCSWDPRRRPTAEQALQHPFFNVRKWVPRPLQDASYPKMNEPRATPRLEL

SEQ ID NO: 8561 - protein, 457 aa, Ralstonia eutropha JMP134
MSETVATALKANFRGQLIQPGDAAYDQARTVYNGMIDKRPAIIARCVDVADVVAAVNAARDSGMLLAVRGGAHNGAGLGTCDGGLVIDLSPMKGVFVDGGRKTLRVGGGCTWGDVDHAASAYGLATPSGFISTTGVGGLTLGGGIGYLSRAYGLTIDNLLSAEVVLADGRIVTASNEENADLFWALRGGGGNFGVVTSFEFKAHPVATVYGGPMLWPMEQARELMAWWRDFILNAPQQINGWFGFVTVPPAPPFPEEVHLQKMCAVVWCYTGPLDEADTHFRTIREAMPPVVDFAGPIPWPVLQSLFDGLYPAGLQWYWKADFVSDLSDKAIDLHIKYAQQLPSMHSTMHLYPINGAAHRAGCDDTAFSYRDANFASVIVGVDPDPANNDRIVQWAKDYWLALHPYSAGGGYINMMMDEGNDNVKASYRDNYARLAQIKRKYDPANLFRVNQNIKPA

SEQ ID NO: 8562 - protein, 360 aa, Azotobacter vinelandii
MSKQILVLPGDGIGPEIMAEAVKVLQLANEKYQLGFVLGYDELGGAAVDKYGVPLADETLERARRRCHPARRRRRSEMGRHRPGHPPGARPAENPFATGPVRQPAPGVLYPQLAEASTLRPEVVAGLDILIVRELTGGIYFGAPRESRLLANGERMAYDTLPYSESEIRRIAKVGFDMARVRGKKLCSVDKANVLASSQLWRAVVEEVAKDYPDVVLSHMYVDNAAMQLVRAPKQFDVIVTDNMFGDILSDEASMLTGSIGMLPSASLDADNKGMYEPCHGSRRPDIAGKGIANPLATILSVSMMLRYSFGQVEAANAIEQAVSKVLDQGLRTGDIWSEGCRKVGTAEMGDAVVAALATL

SEQ ID NO: 8563 - protein, 157 aa, Coccidioides posadasii
FMHWPAAFAPGDDMFPKDSQGNSKTVDIDYVDTYKAMEKLVKSGKTKAIGISNFSKGEMERLLESCSIVPAVMQMELHPWLQQNDFVEWLKSKGIHVTQYSSLGNQNEVYSGRERYGRLIEDPALAAIGTKYGKTGAQVALAWGINKGHSVFVKSKT

SEQ ID NO: 8564 - protein, 186 aa, Emericella nidulans
MSSTSPSKEPEVEQEPHSGEEHEQMDKEQDNQTQGQGEFEVKEQDRWLPIANVARIMKLALPENAKIAKEAKECMQECVSEFISFITSEASEKCQQEKRKTVNGEDILFAMTSLGFENYAEALKIYLSKYRETQSARGEHQNRPPSSGYAGGDPSAELPAALQSCVPGVLQLEAPSPKPLIMQAAL

SEQ ID NO: 8565 - protein, 483 aa, Bacillus cereus ATCC 10987
MDKKATFVNVEKKAMYINGEWITLQEQIEVNNPATKEIFATVPKGGVTEAKQAVDAAHEAFKSWSKLTAADRAVKLKKWFTLIDENKEEIAAIMTREQGKPFAEALGEVNYANSFVEWYAEEGKRVYGEMIPASHPNKRILVMKQPVGVMAAITPWNFPAAMITRKVAPALAAGCTAVVKPASQTPLTALKLAELAHEADIPKGVINIVTGSAKAIADTWMEDGRVRKVSFTGSTEIGKELMASAAQTMKKVSLELGGHAPFIVMNDADLDKVVEAVIGSKFRNAGQTCICTNRVFVQEEVYEVFAEKFQKSVGQLKVGDGFGDGTTVGPLIDENAVSKVQEHIADAIQKGGTVLYGGQKVAELDGHFMQPTVIGLANDTMLCMNEETFGPVAPVAKFKTVEEVIERANNTPYGLAAYIFTKDISQAFQISEALEYGIIGLNDGLPSVAQAPFGGFKESGIGREGGHFGIEEYLEIKYISLGL

SEQ ID NO: 8566 - protein, 265 aa, Petunia x hybrida
MAQLRADDLSFIFGLLGNIVSFMVFLAPVPTFYKIYKRKSSEGYQAIPYMVALFSAGLLLYYAYLRKNAYLIVSINGFGCAIELTYISLFLFYAPRKSKIFTGWLMLLELGALGMVMPITYLLAEGSHRVMIVGWICAAINVAVFAAPLSIMRQVIKTKSVEFMPFTLSLFLTLCATMWFFYGFFKKDFYIAFPNILGFLFGIVQMLLYFVYKDSKRIDDEKSDPVREATKSKEGVEIIINIEDDNSDNALQSMEKDFSRLRTSK

SEQ ID NO: 8567 - protein, 258 aa, Triticum aestivum
SESRPRQPWRRPTPLVSAEYQEAVEKARQKLRARRAEKDCSPLMLRLAWHSAGTFDVSSKTGGPFGTMKKPAEQAHAANAGLDIAVRMLEPIKEEIPTISYADLYQLAGVVAVEVSGGPVIPFHPGREDKPQPPPEGRLPDATKGSDHLRQVFGKQMGLSDQDIVALSGGHTLGRCHKERSGFEGPWTRNPLKFDNSYFTELLSGDKEGLLQLPSDKTLLTDPVFRPLVEKYAADEKAFFEDYKEAHLRLSELGYAEA

SEQ ID NO: 8568 - protein, 140 aa, Bordetella bronchiseptica RB50
MRRAAVLLGLWLLLGAPAAADIAQRELRLAHSLRCLVCQNQTLAESNAPLAHDMRALIRQQLADGRSDEEVMQFFEDRYGDFVRYEPPFKPATWLLWLGPFALLLAGFVVLWRALARRPGAAPLTDAQRARAERFLDEES

SEQ ID NO: 8569 - protein, 418 aa, Allium porrum
MFGRAPKKSDNTKYYEVLGVSKNATPEDLKKAYRKAAIKNHPDKGGDPEKFKEIGQAYEVLNDPEKREIYDQYGEEGLKEGMGGGGGVHDPFDIFQSFFGGGGFGGGGSSRGRRQRRGEDVVHPLKVSLEDLYNGTSKKLSLSRNVLCTKCKGKGSKSGASMNCASCQGSGMKVSIRQLGPGMIQQMQHPCNECKGTGEMISDKDRCPQCKGEKVVQQKKVLEVHVEKGMQNGQKITFPGEADEAPDTVTGDIVFVLQQKEHPKFKRKGDDLFYEHSLSLTEALCGFQFVLTHLDNRQLLIKSNPGEVIKPDQFKGINDEGMPMYQRPFMRGKLYIHFSVDFPDSLTPDQCKALESVLPSRNASRLTDMEIDECEETTMHDVNIEEEMRRKQHQQAQEAYDEDDEGHGGAQRVQCAQQ

SEQ ID NO: 8570 - protein, 238 aa, Arabidopsis thaliana
MEGVGARLGRSSTRYGPATVFTGPVRKWKKKWVHVSPSSKKDNNNSSSGSAAAAASVVNGGSNSDGSNGSHLLLYKWAPLSQNGNGNEDGKSESNSPSEDTVATVAEDPPRRRFKYVPIAVLEEQKKEITEIEEDDKIEEDDKIDEDNKVEQEDKVDEDKTVEESSEKKAEVEVEEKPDINDVPMEDIQQVEEKIVQDDEEKVVRQDLNESTVDLGLNLNANDADAENDPKEDKPLEE

SEQ ID NO: 8571 - protein, 309 aa, Apium graveolens
MAITLNSGFKMPVLGLGVWRMDRNEIKNLLLSAINLGYRHFDCAADYKNELEVGEAFKEAFDTDLVKREDLFITTKLWNSDHGHVIEACKNSLKKLQLEYLDLYLIHFPMASKHSGIGTTRSILDDEGVWEVDATISLEATWHEMEKLVEMGLVRSIGISNYDVYLTRDILSYSKIKPAVNQIETHPYFQRDSLIKFCQKYGIAITAHTPLGGALANTERFGSVSCLDDPVLKKLSDKHNKSPAQIVLRWGVQRNTIVIPKSSKTKRLEENINIFDFELSKEDMELIKTMERNQRSNTPAKAWGIDVYA

SEQ ID NO: 8572 - protein, 326 aa, Glycine max
MEQSVLDDIINRLLEVRTRPGKQVQLSESEIRQLCVVSREIFLQQPNLLELEAPIKICGDVHGQYSDLLRLFEYGGLPPEANYLFLGDYVDRGKQSLETICLLLAYKIKYPENFFLLRGNHECASINRIYGFYDECKRRFNVRLWKTFTDCFNCLPVAARVDEKILCMHGGLSPDLNNLDQIRNLQRPTDVPDTGLLCDLLWSDPSRDVQGWGMNDRGVSFTFGADKVSEFLQKHDLDLICRAHQVVEDGYEFFANRQLVTIFSAPNYCGEFDNAGAMMSVDETLMCSFQILKPADKKAKLNFGSTTTAKPGNSPAGVKCFLGAKV

SEQ ID NO: 8573 - protein, 510 aa, Triticum aestivum
  misc_feature (156)..(156): Xaa can be any naturally occurring amino acid
MASFARQEHQFLAELGLAPRNPGSFACGAWGGSGPVVTTTNPSNNEVIAEVVEASMDDYEKGMSACFDAAKTWMAVPAPKRGEIVRQIGDALRAKLHHLGRLLSLEMGKILPEGIGEVQEIIDMCDYAVGLSRQLNGSIIPSERPNHMMMEVWNPXLGVVGVITAFNFPCAVLGWNACIALVCGNCVVWKGAPTTPLITIAMTKIVASVFEKNNLPSAIFTAFCGGAEIGQAIALDTRIPLVSFTGSTKVGQMVQQQVSARFGKCLLELSGNNAIIVMDDADIPLAVRSVLFAAVGTAGQRCTTCRRLLLHESIYQTFLDQLVEVYKQVRIGDPMEKGTLLGPLHTTASKESFLKGIQNIRSQGGKILLGGSAIESEGNFVQPTIVEISPAAPVVREELFGPVLYAMKFQTLKEAIEINNSVPQGLSSSIFTRKPDAIFKWIGPHGSDCGIVNVNIPTNGAEIGGAFGGEKATGGGREAGSDSWKQYMRRATCTINYGSELPLAQGINFG

SEQ ID NO: 8574 - protein, 589 aa, Zea mays
  misc_feature (559)..(559): Xaa can be any naturally occurring amino acid
  misc_feature (572)..(572): Xaa can be any naturally occurring amino acid
MCGILAVLGCSDCSQARRARILACSRRLKHRGPDWSGLYQHEGNFLAQQRLAIVSPLSGDQPLFNEDRTVVVVANGEIYNHKNVRKQFTGAHSFSTGSDCEVIIPLYEKYGENFVDMLDGVFAFVLYDTRDRTYVAARDAIGVNPLYIGWGSDGSVWMSSEMKALNEDCVRFEIFPPGHLYSSAGGGFRRWYTPHWFQEQVPRTPYQSLVLREAFEKAVIKRLMTDVPFGVLLSGGLDSSLVASVTKRHLVETDAAEKFGTELHSFVVGLEGSPDLKAAREVADYLGTTHHEFHFTVQDGIDAIEEVIYHDETYDVTTIRASTPMFLMARKIKSLGVKMVLSGEGSDELLGGYLYFHFAPNREELHRETCRKVKALHQYDCLRANKATSAWGLEVRVPFLDKEFVDVAMGMDPEWKMYDKNLGRIEKWVLRKAFDDEEHPYLPEHILYRQKEQFSDGVGYNWIDGLKSFTEQQVTDEMMNSAAQMFPYNTPVNKEAYYYRMIFERLFPQDSARETVPWGPSIACSTPAAIEWVEQWKASNDPSGRFISSHDSAATDRTXATSWRWPTAAGTXAANGTVNGNDVAVAIAV

SEQ ID NO: 8575 - protein, 467 aa, Listeria innocua Clip11262
MLYSENDKRKHESYRIPLFGSEEESTSIPKYVLKKEPMEPRIAYQLVKDQLMDEGNARQNLATFCQTYMEKEAEILMAETLEKNAIDKSEYPQTAELENRCVNILADLWNAPKEMSYLGTSTVGSSEACMLGGLAMKFRWRNNAEKRGLDIQAKRPNLIISSGYQVCWEKFCVYWDVDMRVVPMDKEHLSLDVEKVFELVDEYTIGIVGILGITYTGKFDDIALLDEKVEAYNEANEHQLVIHIDGASGAMFTPFVNPELPWDFRLKNVVSINTSGHKYGLVYPGVGWILWKDKEYLPKELIFEVSYLGGSMPTMAINFSRSASQIIGQYYNFLRYGFEGYREIHEKTKKTALYLSKTVEKSGYFEIINDGSNLPIVCYKLKDDLDVEWTLYDLADQLLMKGWQVPAYPLPADLSDTIIQRFVCRADLGYNVAEEFAADFADALHNLEHARVLYHDKERNDSYGFTH

SEQ ID NO: 8576 - protein, 431 aa, Exiguobacterium sp. 255-15
MKLEEMLVSVDTFYVLFATLLVFTMQIGFLLLETGMLRAKNAGHVAVKQLISFSVAALAFWAIGFGLTFGDGPGLIGTEGFFLHGGFSSLDWSNVTIDVKFLFQLSFVAVSLAIAWGGFAERAKLSVYLLFGTFFVAVIYPIIARSVWAGGFLGSLGMQDFAGSTVVHLQGGIAALVAALILKKRIGAEKTPLLGHNVIYSVVGAFILWLCWFGFNAGSTLTIADGFFSYVALTTLLATAAGALGALAISFWHRRVADIPSIINGVLAALVAITAACAFVEPWGAVVIGFLAGVITYATSILLARRVDDPLCAFSVHGVAGIWGTLATGFFASPRLVEITGIGQAGLFYGGGFTQLGVQALGVVFAVVVVSVLSYVFLKLLDVTIGLRITREDELRGLDVAEHGQASYDLPAPVSKESHPTYEEESTEKVN

SEQ ID NO: 8577 - protein, 430 aa, Lactobacillus plantarum WCFS1
MTTLIKNAQVWQAGQLQTTDILIAEGRIKAIGHQLHDQFGPADHVICADQHFVSPGFVDVHVHLRDPGQTAKETIATGTLAAAHGGFTTVGAMPNVDPVPDTPERVATMVARNQQEAHVHVAQYASITTGRTSEQLVDFAGIKAAGAFAVSNDGSGVQTAGTMFAAMQGAAKVGLPLAAHVEDDSLYHHGVMNAGPVADRLGLPGINNVSEAAQVARDVMLAEASGVHYHVCHVSTAESLRVIRNAKAAGINVTCEVSPHHLLLCDEDITMDNPMLKMNPPLRSAKDRAALVAGLLDGTIDMIATDHAPHTDAEKQGSMKTAAFGITGIETAFATLYTALVKTRLLTLGRLIELMSTRPAELFGLNTAGRLVVGAPADLTIIDLDHQYEIEAATMLSKGHNSPFIGWPVYGNVLMTLVDGKLAYGKETQA

SEQ ID NO: 8578 - protein, 121 aa, Oryza sativa (indica cultivar-group)
MAGARRTMALVALVAVVAAAVVAERASAAVSCGDVTSSIAPCLSYVMGRESSPSSSCCSGVRTLNGKASSSADRRTACSCLKNMASSFRNLNMGNAASIPSKCGVSVAFPISTSVDCSKIN

SEQ ID NO: 8579 - protein, 181 aa, Vibrio parahaemolyticus RIMD 2210633
MKGLLKLAAYLGFISMSSFVLASECPDILQGKQRMLNSTEEIELCEVFKGKTLLVVNTASQCGFTPQYEQLETLYQTYKDKNFAVIGFPSNDFRQDKGSEENTAKICYLDYGVTFPMMARSSVLGNDANPVFSEISTQAGVTPKWNFYKFLISKEGKVIATFPSSTSPTSTTLTNMIEQQL

SEQ ID NO: 8580 - protein, 348 aa, Pseudomonas putida
MLAIRKTKAGPGGLSVDDVAAPKEAHSTDVLVKVEAAGICGTDLLIYKWGEFAKRMKLPTILGHEVSGVIEQVGSDVKGLRPGMRVSLESHLPCGTCYTCRRGWAHVCPNTRYPGVDFDGGFASFVVVPESVCWPVPCGIPPLQAAMMEPFGLAVHASLEGSGVSGLNVLVSGCGPIGLMNIAAAKALGASKVIATDIHPLRLTAAAKMGADECINATEESVYKTVRSLLGERGVDVAIDYSGQAAALKELIQSITHGGELRLMGVPSHDILLNLEEWLFKGLIVRGLHGRRLFETWERSTSLLVTGRVDLSSLVSHRLPLSAAEDAFEMALNGQSLKILFEPNGTCI

SEQ ID NO: 8581 - protein, 120 aa, Oceanobacillus iheyensis HTE831
MTNEEMISAIKEMSVLELNDLVKAIEEEFGVTAAAPVAAAGAAGGAVEEEKTEFDVVLTSAGASKIKVVKAVREITGLGLKDAKDLVDNAPKPIKEGVSKEEAEEVQGKLEEAGASVEVK

SEQ ID NO: 8582 - protein, 426 aa, Novosphingobium aromaticivorans DSM 12444
MSDPQWYSTGRDHVWLPYTQMKTARPPLPVASAEGVKLRLADGRELVDGISSWWATVHGYRHPHIEEAIRRQLETLPHVMLGGLAHEQAYTLARRLAGMLPGDLDHVFFSDSGSVAVEVAMKMAAQFWLNQGHRRVKFLCFRGGYHGDTFATMSVCDPDEGMHSLFRGALLEQVVVDLPRDAEGEAALGALIEQHRGELAGIVVEPLVQGAGGMVFHDPFTLQALRRLADEHELLLIFDEIFVGLGRLGDAMFACQIAGVQPDIVTLSKALTGGNLPLAATIASGRIYDAFLSDDPMHALMHGPTYMGNALGCAAANASLDLFESEPRLEQAQAIGRGLEQALEVLRGLPGVRDVRVRGAIGVIQLDRTAPADRLSAACIDRGVWLRPFRDILYTTPPLVTGEEDLARITSAMVEAVTEWSRETHV

SEQ ID NO: 8583 - protein, 484 aa, Agrobacterium tumefaciens
MIKLKNAALLRDACLVNGRWLKAADGKTIAVENPANSMIIGHVPSLSADEVKAAVESAGKAFSEWSRRSAKDRAAILRRWFDLMVANADDLGALMTAEQGKPFAEAKGEALYAASFVEWFAEEAKRVYGDTIPSPTTDKRITILKQPIGVCAAITPWNFPAAMITRKAAPALAAGCAMIVKPAEQTPLTALALGVLAEEAGVPAGVFQVVTGAARDIGKVFTESDTVRKISFTGSTEVGRLLMAQSAPTIKKLSLELGGNAPFIVFDDADLDAAVEGAIVSKYRNAGQTCVCSNRIYVQDGVYDAFAEKLVKRVESLSVGEGTEPVVLIGPLIDQEAVPKVEDHVADALGKGAKIVIGGKRHALGGTFYEPTVLTGATQAMKVAREETFGPVAPLFRFGTEDEAVAMANDTEFGLAAYFYTENVRRTWRVAEALEYGMVGHNTGLISNEVAPFGGVKQSDLGREGSHYGIDEYLEIKYLCSAIG

SEQ ID NO: 8584 - protein, 455 aa, Arabidopsis thaliana
MSFTIPRLFLFTLFFCSVFFVCLLMAEDSNSSESIIVNVTGDDNKSALFGKYDLGKLLGSGAFAKVYQAEDLQNGGESVAIKVVQKKRLKDGLTAHVKREISVMRRLRHPHIVLLSEVLATKTKIYFVMELAKGGELFSRVTSNRFTESLSRKYFRQLISAVRYCHARGVFHRDLKPENLLLDENRDLKVSDFGLSAMKEQIHPDGMLHTLCGTPAYVAPELLLKKGYDGSKADIWSCGVVLFLLNAGYLPFRDPNIMGLYRKIHKAQYKLPDWTSSDLRKLLRRLLEPNPELRITVEEILKDPWFNHGVDPSEIIGIQADDYDLEENGKILNAFDLISSASSSNLSGLFGNFVTPDHCDQFVSDESTAVIMRKVEEVAKQLNLRIAKKKERAIKLEGPHGVANVVVKVRRLTNELVMVEMKNKQRDVGLVWADALRQKLRRLINQPVYKVPDKP

SEQ ID NO: 8585 - protein, 153 aa, Glycine max
MPLVLAKSDSIQIREVWNDNLEEEFALIREIVDDYPYIAMDTEFPGIVLRPVGNFKNSYDYHYQTLKDNVDMLKLIQLGLTFSDEHGNLPTCGDESGTCCIWQFNFREFNVNEDVFANDSIELLRQSGIDFKRNNENGIDAHRFGELLMSSGI

SEQ ID NO: 8586 - protein, 248 aa, Zea mays
KNYPTVSAEYSEAVEKARRKLRALIAEKSCAPLMLRLAWHSAGTFDVSSRTGGPFGTMKCPAELAHGANAGLDIAVRLLEPIKEEFPTLSYADFYQLAGVVAVEVTGGPEIPFHPGREDKPQPPPEGRLPDATKGSDHLRQVFGKQMGLSDQDIVALSGGHTLGRCHKERSGFEGAWTTNPLVFDNSYFKELLSGDKEGLLQLPSDKALLSDPVFRPLVEKYAADEKAFFDDYKEAHLKLSELGYADA

SEQ ID NO: 8587 - protein, 294 aa, Saccharomyces cerevisiae
TTPLVHVASVEKGRSYEDFQKVYNAIALKLREDDEYDNYIGYGPVLVRLAWHTSGTWDKHDNTGGSYGGTYRFKKEFNDPSNAGLQNGFKFLEPIHKEFPWISSGDLFSLGGVTAVQEMQGPKIPWRCGRVDTPEDTTPDNGRLPDADKDADYVRTFFQRLNMNDREVVALMGAHTLGKTHLKNSGYEGPWTANNNVFDNSFYLNLLNEDWKLEKNDANNEQWDSKSGYMMLPTDYSLIQDPKYLSIVKEYANDQDKFFKDFSKAFEKLLENGITFPKDAPSPFIFKTLEEQGL

SEQ ID NO: 8588 - protein, 503 aa, Streptococcus pneumoniae
MFASKSERKVHYSIRKFSIGVASVAVASLVMGSVVHATENEGSTQAATFSNMANKSQTEQGEINIERDKAKTAVSEYKEKKVSEIYTKLERDRHKDTVDLVNKLQEIKNEYLNKIVESTSKIEIQGLITTSRSKLDEAVSKYKKAPSSSSSSGSSTKPETPQPETSKPEVKPEPETPKPEVKPEPETPKPEVKPEPETPKPEVKPELETPKPEVKPEPETPKPEVKPEPETPKPEVKPEPETPKPEVKPELETPKPEVKPELETPKPEVKPEPETPKPEVKPELETPKPEVKPEPETPKPEVKPELETPKPEVKPEPETPKPEVKPELETPKPEVKPEPETPKPEVKPEPETPKPEVKPEPETPKPEVKPEPETPKPEVKPEPETPKPEVKPEPETPKPEVKPEPETPKPEVKPEPETPKPEVKPDNSKPQADDKKPSTPNNLSKDKQSSNQASTNENKKQGPATNKPKKSLPSTGSISNLALEIAGLLTLAGATILAKKRMK

SEQ ID NO: 8589 - protein, 500 aa, Streptococcus pneumoniae
MFASKSERKVHYSIRKFSIGVASVAVASLVMGSVVHATENEGSTQAATSSNMANKSQTEQGEINIERDKAKTAVSEYKEKKVSEIYTKLERDRHKDTVDLVNKLQEIKNEYLNKIVESTSTIEIQGLITTSRSKLDEAVSKYKKAPSSSSSSGSSTKPEPETSKPEVKPEPETPKPEVKPEPGTPKPEVKPEPETPKPEVKPELETPKPEVKPEPETPKPEVKPEPETPKPEVKPEPETPKPEVKPELETPKPEVKPELETPKPEVKPEPETPKPEVKPELETPKPEVKPEPETPKPEVKPELETPKPEVKPEPETPKPEVKPELETPKPEVKPEPETPKPEVKPEPETPKPEVKPEPETPKPEVKPEPETPKPEVKPEPETPKPEVKPEPETPKPEVKPEPETPKPEVKPEPETPKPEVKPDNSKPQADDKKPSTPNNLSKDKQSSNQASTNENKKQGPATNKPKKSLPSTGSISNLALEIAGLLTLAGATILAKKRMK

SEQ ID NO: 8590 - protein, 141 aa, Triticum aestivum
  misc_feature (71)..(71): Xaa can be any naturally occurring amino acid
  misc_feature (76)..(76): Xaa can be any naturally occurring amino acid
  misc_feature (79)..(79): Xaa can be any naturally occurring amino acid
  misc_feature (89)..(89): Xaa can be any naturally occurring amino acid
  misc_feature (94)..(95): Xaa can be any naturally occurring amino acid
  misc_feature (100)..(100): Xaa can be any naturally occurring amino acid
  misc_feature (109)..(109): Xaa can be any naturally occurring amino acid
  misc_feature (126)..(126): Xaa can be any naturally occurring amino acid
  misc_feature (131)..(131): Xaa can be any naturally occurring amino acid
  misc_feature (133)..(134): Xaa can be any naturally occurring amino acid
  misc_feature (136)..(136): Xaa can be any naturally occurring amino acid
MAPAVMASSATTVAPFQGLKSTAGLPVSRRSSGSLGSVSNGGRIRCMQVWPIEGIKNSKTLSYLPPLSTEXLLKQXDYXIRSKWVPCLXSTRLXXLPFSXNIPPGYYDXPYWTIWKLLCSGCTDAXTSVNXVXXVXKDYPE

SEQ ID NO: 8591 - protein, 506 aa, Candida tropicalis
MIEQVLHYWYYVLPAFIIHWIVSAIHTNSLRRKLGAKPFTHTQLDGFYGFKFGRDFLKAKRIGRQVDLINSRFPDDIDTFSSYTFGNHVIFTRDPENIKALLATQFNDFSLGGRIKFFKPLLGYGIFTLDGEGWKHSRAMLRPQFAREQLPMSPSLEPHFNVKAYPQEQRWVFDIQELFFRFTVDSATEFLFGESVNSLKSASIGCDEETELEERKKFAEAFNKAQEYISTRVALQQLYWFVNNSEFKECNEIVHKFTNYYVQKALDATPEELEKQSGYVFLYELVKQTRDPNVLRDHHSISLLAGRDTTAGLLSFAVFELARNPHIWAKLREDVESQFGLGEESRIEEITFESLKRCEYLKAVMNETLRLHPSVPRNARFALKDTTLPRGGGPDGKDPILVRKMSCSIFISGTQIDPKHYGKDAKLFRPERWFESSTRNLGWAYLPFNGGPRICLGQQFALTEAGYILVRLAQSFDTLELKPDTEYLTKISHLTMCLFGAFVKMD

SEQ ID NO: 8592 - protein, 358 aa, Campylobacter jejuni subsp. jejuni NCTC 11168
MKTYKVAVLAGDGIGPLVMKEALKILTFIAQKYNFSFEFNEAKIGGASIDAYGVALSDETLKLCEQSDAILFGSVGGPKWDNLPIDQRPERASLLPLRKHFNLFANLRPCKIYESLTHASPLKNEIIQKGVDILCVRELTGGIYFGKQDLGKESAYDTEIYTKKEIERIARIAFESARIRKKKVHLIDKANVLASSILWREVVANVAKDYQDINLEYMYVDNAAMQIVKNPSIFDVMLCSNLFGDILSDELAAINGSLGLLSSASLNDKGFGLYEPAGGSAPDIAHLNIANPIAQILSAALMLKYSFKEEQAAQDIENAISLALAQGKMTKDLNAKSYLNTDEMGDCILEILKENDNG

SEQ ID NO: 8593 - protein, 475 aa, Ralstonia eutropha JMP134
MYQDLALYIDGEFIKGGDRKEQDVLNPATQEVLGKLPHASRADLDRALAAAQRAFESWKKTSPLERSKILRRVGELARERAKDIGRNITLDQGKPLAEAVGEVLVCAEHADWHAEECRRIYGRVIPPRQPNVRQIVVREPIGVCAAFTPWNFPFNQAIRKIVSAVGAGCTLILKGPEDSPSAVVALAQLFHDAGLPPGVLNIVWGVPSEVSTYLIESPIVRKISFTGSVPVGKQLAALAGAHMKRVTMELGGHSPVLVFDDADIEPAAEMLARFKLRNAGQVCVSPTRFYVQEKAYDKFLARFTEVIGSIKVGNGLEDGTQMGPLAHERRVFSMEQFLDDANQRGGKVVAGGSRIGDKGYFFAPTVVTDLPDDAKLMVDEPFGPVAPVTRFKDTAEVLRRANSLPFGLASYVFTNSLKTATEVSNGLEAGMVNINHFGMALAETPFGGIKDSGIGSEGGQETFDGYLVTKFITQV

SEQ ID NO: 8594 - protein, 63 aa, Zea mays
  misc_feature (55)..(55): Xaa can be any naturally occurring amino acid
RKKKGGKKSLGRILEGVSKWVGILIAIILPPVGGFFKEGGGPEFWICFFFPFLGXIPGIIFPI

SEQ ID NO: 8595 - protein, 104 aa, Glycine max
  misc_feature (63)..(63): Xaa can be any naturally occurring amino acid
MGKGGMSIDEHGEGKEENMAAWLVGMNTLKIQPFKLPTLGPHDVRVRMKAVGICGSDVHYLKXKEPMVIGHECAGIIEEVGSQVKSLVPGDRVAIEPGISCWHC

SEQ ID NO: 8596 - protein, 69 aa, Zea mays
  misc_feature (38)..(38): Xaa can be any naturally occurring amino acid
KSKTSDGTCTCIDIVLAIMLPPVARMFKACCLVEFWIXLMLTLFGYLPGIIYARWAITKLSVGALALNA

SEQ ID NO: 8597 - protein, 507 aa, Glycine max
QNSDDGWFRGRLRFSKKKTMKQRYGLRRRVSSQCSNGSLDEVDNMPEPALSDRSFANPTFQAGTIEEAWFDSAAVFDSDCDDDYQSVNDDVISLNGTETNCGVSTDQMHKPGELSKRHSAHISESVRNSDAEFFDIDATNSQCKRSGRVNEANEPVFLDEFSSVDAGSKWDDGDLHNCGILPCNCLSCLSSTDQRSLCFSPPNSTRKKDLMKHSFKGSGNATLFSSKTILQRPLAGSQVPFCPIEKKMLDCWSRIDPRTFKVRGPNYLKAKKKEFASNHAAYYPFGVDVFLSPQKIDHIARFVELPVMSSSGKLPPILVVNVQIPIYPATLFQGETNGEGVSFVLYFKLSDSYSKDLPLNFQENIRRLMDDEVEKVKSFRGDTIVPFRERLKILGRVVNPQDLHLSAAERKLMQTYNEKPLLSRPQHEFYSGENYYEIDLDMHRFSYISRKGFDMFLDRLKICILDVGLTIQGNKAEELPEQVLCCIRLNSIDYMNYQQLGITEEPL

SEQ ID NO: 8598 - protein, 579 aa, Zea mays
  misc_feature (437)..(437): Xaa can be any naturally occurring amino acid
  misc_feature (481)..(481): Xaa can be any naturally occurring amino acid
GYLEAGRALVDLLKFKSQEGVRVCLLVWDDKTSHDKFFIKTGGVMATHDEETRKFFKHSSVICVLSPRYASNKLSIFKQQVVGTLFTHHQKCVLVDTQARGNKRKITAFIGGLDLCDGRYDTPEHRLFKDLDTVFQNDYHNPTFSAGAKGPRQPWHDLHCRIDGPAAYDVLTNFEQRWRKATKWRDRFRRVSHWKDDALIKLERISWILIPSPNVPNNHPSLWVSKEEDHENWHVQVFRSIDSGSLKGFPSDCKAASKLNLVCRKNLVIDKSIHTAYVRAIRSAQHFIYIENQYFLGSSYAWPSYVNSGADNLVPIELALKIASKIKAGERFAVYVVIPMWPEGVPTAASVQEILFFQAQTMEMMYKIIADELKATDNKDMHPEDYLNFFCLGNREEPPSNGSPESEKSTDKSAAALASKYRRFMIYVSRKRDDCGXMNMSFWVQQTSTRDPWLVLEILRSQWVHTSLIMHGLQRMDILTXQVYGYRTSLWAEHLGTVDDRFKDPSSLECVRFVNQIAVENWQRFTAEEMSTLQGHLLKYPVKVEADGKISPLSDQECFPDVGGKILGAPTSLPDSLTM

SEQ ID NO: 8599 - protein, 353 aa, Glycine max
MATYSWSTEIFSFLVLTLLSTSSHTMVAGARNLLESTLSKPEVPTLPKPHELPPLPEIPELPKFESPKIPALPKPELPKVPELSKPDMSKVPELPKVPERLKVPEISKILELSKPELPKGPELLKPELPSVPNIPKVPELPKPELPEVPKLPKPELPKVPELPKPELPKVPEIPELPNLELPKVTQLPKSKLPKVPEIPKVPEFPKPELPKVPELSKPELPKAPEIPKVPEFPKPELPKVPELSKPELPKAPEIPKVPEFPKPELPKVPELPKPELPKIPEIPKVPEFPKPELPKVPEVPKPELSKVPKLPKSELPKVPEIPELPKSELPKIPEIPKVPEFPKVPKAFSTTNP

SEQ ID NO: 8600 - protein, 291 aa, Spirulina platensis
MQDSESKTPGASPLVGADNAPLTGGEAEGGDAWTVEQAIAALNHQEPNRRYYAAWWLGRFRVCDAIAVDALIMALDDESDRTKDGGYPLRRNAARALGKLGDRRAVTPLVKCLDCQDFYVREAAAQALEGLGDSSCVSALRGLLVGGVEDTAPIAGKPHLKQPYDAVIEAIGTLGATEALTDIEPFINHPIARIQYAALRAMYQLTGDPVYGDRLIAALRGEDLQLRRSALMDLGAIGYLQAAEPIANTLAENSLKLIALQGILEHHLSQIGEKCLSEEAVKIMKLMDSLL

SEQ ID NO: 8601 - protein, 917 aa, Zea mays
MVRRKKSKQACSKGLNQRLKEDRISQFYESLLCQILNYLPTKDVVKTSVLSTRWRSLWLLVPSLELDSRDFSDFNTFVSFCDRYFDSNRVLCINKLKLTISENEEDGFYLKSWIDAAAKRKIQHLDVQFLPQFHKIHFNLYKCEALVSLRLFEVSLDKGRIFSFPCMKTMHLEDNVYPNEATFKELISCCPVLEDLTVIIYGMDRKVFQIEGRYDAKFVSFPCMKTMHLEDNMYPNESTFKKLISCCPVLEDLTVIIYGMDRKVFRVHSQSLKRFSLKRVSSFLHEVALSGVVIDAPLLCSLRINDNVSKSFIVNNLGSNDKLDLSILFGLWHFDETSVTSMRSSIDRFLPGILSVMEMTIHSPAFMLMYRYLALIPLPHLPKFSYMSRLSVTLGVSDLQFLPTFLESCPNLKSLIMESNSNSKRMLLNGNYHINFSSVPKCLLSSLEFVDIKSSILVYVARMKLVKYFLENSTTLKKLTLRLALRLQYCSAKDEIVKKLRKFPRISKTCQDLVTTRVLSTRWRSLWLWLPCLELNSLYFPDFNAFVSFGDKFFDSNRVSCINKFKLYIYGYDVGVDDPSYLTSWIDAAVKCKIQHLHVQCLPAKYIYEMPLSLYICETLVYLKLCRVMLDDAEFVSLPCLKTIHLEYVWFPNEANLERFVSCCPVLEELKIYGCGNENAITLRLLSRSLKKLSINILKSMCDFHSEVVIDAPLLSYLKINDNVSERYIVNNLESNAKLDISLPFGLLDFDEASVSSRTDSIHSFLRGILKVSDMTIWVDTFKLICKYSELESLPRFGYMSRLHVTLCIYDLKWLPTFLESCPNLKSLILVCVGDNDEMLSEEMIQFGSSLVPECLLSSLEFVDIRIPFRGHLEVMKLVRYFLENSAILKKLSLDHDIFKKLFTIPRRSTKCQVVFI

SEQ ID NO: 8602 - protein, 154 aa, Triticum aestivum
  misc_feature (58)..(58): Xaa can be any naturally occurring amino acid
  misc_feature (80)..(80): Xaa can be any naturally occurring amino acid
  misc_feature (108)..(108): Xaa can be any naturally occurring amino acid
  misc_feature (115)..(115): Xaa can be any naturally occurring amino acid
  misc_feature (121)..(122): Xaa can be any naturally occurring amino acid
  misc_feature (125)..(125): Xaa can be any naturally occurring amino acid
MAPTVMASSATSVAPFQGLKSTAGLPVSRRSNGASLGSVSNGGRIRCMQVWPIEGIKXFETLSYLPPLSTEASSSRSDYXIRSKWVPCLRFNKVGSSPVEHNHLLGYXNGRIGHXELPIFXXNDXQSDNEVEEVKKDTLPYFRSGTNASRHQTL

SEQ ID NO: 8603 - protein, 417 aa, Saccharomyces cerevisiae
MRALAYFGKGNIRFTNHLKEPHIVAPDELVIDIEWCGICGTDLHEYTDGPIFFPEDGHTHEISHNPLPQAMGHEMAGTVLEVGPGVKNLKVGDKVVVEPTGTCRDRYRWPLSPNVDKEWCAACKKGYYNICSYLGLCGAGVQSGGFAERVVMNESHCYKVPDFVPLDVAALIQPLAVCWHAIRVCEFKAGSTALIIGAGPIGLGTILALNAAGCKDIVVSEPAKVRRELAEKMGARVYDPTAHAAKESIDYLRSIADGGDGFDYTFDCSGLEVTLNAAIQCLTFRGTAVNLAMWGHHKIQFSPMDITLHERKYTGSMCYTHHDFEAVIEALEEGRIDIDRARHMITGRVNIEDGLDGAIMKLINEKESTIKIILTPNNHGELNREADNEKKEISELSSRKDQERLRESINEAKLRHT

SEQ ID NO: 8604 - protein, 316 aa, Pasteurella multocida subsp. multocida str. Pm70
MTQLDSLRSMTVVVADTGDIEAIKQYQPQDATTNPSLILSASALPQYAPLIDDAIAYAKTKSDCPRQQLVDAEDKLAVNIGLEILKIIPGRISTEVDARLSYDTQATIEKARKLIKLYNEAGIENHRILIKIASTWQGIRAAEVLEKEGINCNLTLLFSEAQARACAEAGVYLISPFVGRILDWHKANTGRQDYPAAEDPGVISVTQIYNYYKQHNYKTVVMGASFRNVDEIIELAGCDRLTISPTLLSHLQAREGELVRKLAFSGELKDRPQPLTESEFYWQHNSDPMAVAKLAEGICKFAEDQEKLEKMLLERL

SEQ ID NO: 8605 - protein, 465 aa, Rubrobacter xylanophilus DSM 9941
MDQRYTPGPDLRELDGSFRGELIRPGEAAYEDARRVFNGMIDRRPALIARCTGVADVVAAVIFARASGLEVAVRGGGHSVSGYGTCDGGLVIDLSPMKGVWVNPGERRARAQAGLTWGEFDRETQLFGLAVTGGRVSGTGISGLTLGGGSGWLERRLGFTVDNLLSVEMVTAEGGLVRATEEENEELFWGVRGGGGNFGIATSFEFALHPVGPLVLGGMLLYPAEQAPGLLRFYREFMRGAPDELGGGCAFLTAPPEPFIPEHVRGTKLIAVIVCYAGGVEEGEAAIQPLKKHLPPAMDMVRPMPYTELQTLLDAANPPGMQHYWKAGFLDELPDEAIDVLVEHAGRMASPLTVLALFPMGGAISRVGEDETPLGPRGAAYNYHALAQWAEPSEAGRHVGWAGELEAALRPWTGERTYLNFIGDEGEERVRTGYGPEKYRRLAGLKKRYDPDNLFHLNQNIRPGA

SEQ ID NO: 8606 - protein, 419 aa, Haloferax volcanii
MSYDQIEVPDDGEKITVDEETGELSVPDNPIIPIIHGDGIGTDVGPAAQKVLDAAAEATGRSVSWMRVYAGSSARDKYDENLPEDTVSAIRNHRVAIKGPLTTPVGAGFRSLNVALRKKLDLYANVRPTYHLDGVPSPVKNPSAMDMVTFRENTEDVYAGIEWEAGTDEVQKVKEFVEEEMGADGVIHDGPVGIGIKPITEFGTKRLVREAIEYALENDRPSVTLVHKGNIMKFTEGAFRDWGYELAEEEFGDVTITEDELWEEYDGKRPEDKVVVKDRIADNMLQQLLTRTANYDVIATMNLNGDYMSDAAGAQIGGLGIAPGANFGEGLCLAEPVHGSAPKYAGKDKVNPTAMILSGRLMFEYMGWKDAGKLIRDTVEKTISDGDVTYDLERQIEGGNKLATSEYADKVVENIKELA

SEQ ID NO: 8607 - protein, 254 aa, Gibberella zeae
PGVGFGTFANEGAKGETYKAVIAALKTGYRHLDCAWFYLNEGEVGQAVRDFLAEDNGVKREDLFICTKVWNHLHEPEEVKWSFENSLKNFGLDYIDLFLVHWPIAAEKGDDYQPKIGPDGKYVIKKDLTENPEPTWRAMEEIYASGKARAIGVSNWTIDGLKQLMAFAKVKPAVNQIEIHPFLPNEDLVKFCLENDILPAAYSPLGSQNQVPTTGETVRSNKTLNEVADRSGNTLAQVLIAWGLRRGTLFCPRA

SEQ ID NO: 8608 - protein, 493 aa, Picrophilus torridus DSM 9790
MKIYIDGEWRDSSSGETIKKYNPSTGEVLDTFPAATRNDVDAAIDSAEDAFKRWSDMTSMERSKILYKALELISKDKDQLTDLLIKENGKVKREAMDETEGVIDQLQYYTEFERKLTGDIVEGTSNKRKIFQYKVPYGIVIAITPWNFPAAMVIRKLAPALLTGNTVILKPSSDTPLTAEWLVKKFVDAGIPKGVLNLITGKGSEIGDYIVEHKKVSLITMTGSTSTGQRIMEKASKNMAKLILELGGKAPFMVWKDANIERALKSLVWAKYLNVGQSCIAAERLYIHEDIYDEFMKKFIEVSKRIKLGDPESSDMGPLINKSAVETTEKYVDIARSSGYKILLGGKKPELSGKYKNGYFYEPTIIENVPQDSPLFQEEIFGPVIGAESVSSVDELYEKANDSKYGLASYLFTEDPELIFEASEKIRFGELYVNMPGPEASQGYHTGFRLTGQAGEGSKYGISEYLKLKNVYVDYSRGNLSISTVNDDLFKNL

SEQ ID NO: 8609 - protein, 126 aa, Zea mays
  misc_feature (81)..(81): Xaa can be any naturally occurring amino acid
EALVAAGTALPARHSWARSVPVGLDAPTAPKDAHAPDVEIREVWASNLHEEFEVIRDIDDAYTYVGMDTEFPVYVEQPIAXYRFTCDRIYAGLHGNANVLKLIQLGLTFSNEACTLPPCGTLGQCC

SEQ ID NO: 8610 - protein, 123 aa, Astragalus membranaceus
RLVEADATKGSDHLRDVFGKGMGLSDQDIVALSGGHTIGAAHKERSGFGGPWTSNPLIFDNSYFKELLSGEKEGLLQLPSDKALLTDPVFRPLVEKYAADEDAFFADYAVAHQKLSELGFAEA

SEQ ID NO: 8611 - protein, 418 aa, Triticum aestivum
  misc_feature (291)..(291): Xaa can be any naturally occurring amino acid
MAMDESPQLFLCPISMELMEDPVTVSTGVTYDRRSIERWFFKYGKTTCPATMQRVASLDLTPNHTLKRVIASWQDRASTSSSPSSPAGAFKPMARERLPSVLAGIEGTPFKVTALKGLRLCMAGDQAARDDFVACDGIQVLGRVMAQALAESGAGGDFSAFRTCEEAAAVLATLPLSDEESVDLVLRPECMRPMVALVQRGSADARLHAMSILAKVSEASGARNWTEDVDVDDMVKSLLDLLSDGASSKLSSRALDVLIDVTARSRSRGGARRGKGVVEVGAVRVLVELLXEADRHVTERALLLLKRLCKCPEGRLAFAEHGLAVAAVVRTVLRVSGLATRLAVNVLWLVSCAARPTERVLDDMVASGGVAKLLALLQADSSPSTKEKVARMLRVHGAFWRQYPCIPADLKDYLKFLK

SEQ ID NO: 8612 - protein, 249 aa, Oryza sativa (japonica cultivar-group)
MDGEEDSEWMMMDVGGKGGKGGGGGGAADRKKRFSEEQIKSLESMFATQTKLEPRQKLQLARELGLQPRQVAIWFQNKRARWKSKQLEREYSALRDDYDALLCSYESLKKEKLALIKQLEKLAEMLQEPRGKYGDNAGDDARSGGVAGMKKEEFVGAGGAATLYSSAEGGGTTTTTTAKLMPHFGSDDVDAGLFLRPSSQHHPPPPHAGAGFTSSEPAADHQSFNFHSSWPSSTEQTCSSTPWWEFESE

SEQ ID NO: 8613 - protein, 314 aa, Zea mays
MSATGRAPCGLPRIGLGTAVQGPRPDPVRAAVLRAIQLGYRHFDTAAHYATEAPIGEAAAEAVRTGLVASREDLFVTSKVWCADAHRDRVLPALRRTLSNLQMEYVDLYMVHWPVTMKAGRFTAPFTPEDFEPFDMRAVWEAMEECHRLGLAKAIGVCNFSCKKLETLLSFATIPPVVNQVEINPVWQQRKLREFCRAKGIQLCAYSPLGAKGTHWGSDSVMDSGVLHEIAKSKGKTVAQVCLRWVYEQGDCLIVKSFDEGRMKENLDIVDWELSEEERQRISKIPQRKINQGRRYVSEHGPYKSFEELWDGEI

SEQ ID NO: 8614 - protein, 509 aa, Pisum sativum
MDGSAGPGGGNVNAFLRNYKMGKTLGIGSFGKVKIAEHVLTGHKVAIKILNRRKIKNMEMEEKVRREIQILRLFMHHHIIRLYEVVETPTDIYVVMEYVKSGELFDYIVEKGRLQEDEARSFFQQIISGVEYCHRNMVVHRDLKPENVLLDSKWSVKIADFGLSNIMRDGHFLKTSCGSPNYAAPEVISGKLYAGPEVDVWSCGVILYALLCGTLPFDDENIPNLFKKIKGGIYTLPSHLSPGARDLIPRLLVVDPMKRITIPEIRQHQWFQLRLPRYLAVPPPDTLQQAKKIDEEILQEVVNRGFDRDQLVESLSNRVQNEGTVTYYLLLDNRYRVSTGYLGAEFQETMDPGLNRINSGEVVSPAGGHHFLGYQGVGMRQQFPAERKWALGLQSRAQPREIMVEVLKALQGLNVCWKKIGHYNMKCRWVVGIPGHQGGMVNNSVLNNNFLGNVGIIESEAVPKSSVVKFELQLYKTQEKYLLDLQRVEGPQFLFLDLCAAFLAQLRVL

SEQ ID NO: 8615 - protein, 111 aa, Leptospira interrogans serovar Copenhageni str. Fiocruz L1-130
MCIKVLGGSKKRYASVGDEIIVAVKDAQPAFGLKDSTGKKVHNKAVQRAVVVRTTKEIRRPDGSYIRFDDNACAIIDDKGNPKGTRIFGPVARELRDKKYAKIISLAPEVL

SEQ ID NO: 8616 - protein, 230 aa, Enterococcus faecium
DTAAAYKNEEGVGKALKNASVNREELFITTKLWNDDHKRPREALLDSLKKLQLDYIDLYLMHWPVPAIDHYVEAWKGMIELQKEGLIKSIGVCNFQIHHLQRLIDETGVTPVINQIELHPLMQQRQLHAWNATHKIQTESWSPLAQGGKGVFDQKVIRDLADKYGKTPAQIVIRWHLDSGLVVIPKSVTPSRIAENFDVWDFRLDKDELGEIAKLDQGKRLGPDPDQFGG

SEQ ID NO: 8617 - protein, 161 aa, Arabidopsis thaliana
MADSDNDSGGHKDGGNASTREQDRFLPIANVSRIMKKALPANAKISKDAKETVQECVSEFISFITGEASDKCQREKRKTINGDDLLWAMTTLGFEDYVEPLKVYLQKYREVEGEKTTTAGRQGDKEGGGGGGGAGSGSGGAPMYGGGMVTTMGHQFSHHFS

SEQ ID NO: 8618 - protein, 106 aa, Glycine max
FGSRQSLHPSLLVCIISGSSEGKDRSMSTTATTTSEEVSSNEWKVIHMSEQEEDLIRRMYKLVGDKWNLIAGRIPGRKAEEIERFWIMRHGDAFSVKRNGSKTQDS

SEQ ID NO: 8619 - protein, 86 aa, Zea mays
PNPRKVLIIGGGDGGVLREVVKHPSVESVVQCEIDEDVIQVSKKFLPGMAIGYSSSKLTLHVGDGFEFMKQNQDAFDVIITDSSDP

SEQ ID NO: 8620 - protein, 162 aa, Triticum aestivum
  misc_feature (23)..(23): Xaa can be any naturally occurring amino acid
  misc_feature (80)..(80): Xaa can be any naturally occurring amino acid
  misc_feature (84)..(84): Xaa can be any naturally occurring amino acid
  misc_feature (88)..(88): Xaa can be any naturally occurring amino acid
  misc_feature (93)..(93): Xaa can be any naturally occurring amino acid
  misc_feature (96)..(96): Xaa can be any naturally occurring amino acid
  misc_feature (100)..(100): Xaa can be any naturally occurring amino acid
  misc_feature (103)..(105): Xaa can be any naturally occurring amino acid
  misc_feature (116)..(116): Xaa can be any naturally occurring amino acid
  misc_feature (126)..(126): Xaa can be any naturally occurring amino acid
  misc_feature (131)..(131): Xaa can be any naturally occurring amino acid
  misc_feature (134)..(134): Xaa can be any naturally occurring amino acid
  misc_feature (139)..(139): Xaa can be any naturally occurring amino acid
  misc_feature (146)..(146): Xaa can be any naturally occurring amino acid
  misc_feature (151)..(152): Xaa can be any naturally occurring amino acid
MAPAVMASSATTVAPFQGLKSTXAGLPVSRRSSGSLGSVSNGGRIRCMQVWPIEGIKKFETLSYLPPLSTEALLKQVDYXIRSXKWVXCLEFXKVXGFVXREXXXSPGLYNGRYWXQCWKLPIFGXPTPTXVLXNKVEXVKKGVPXPNVRXXGFKTPRGTTP

SEQ ID NO: 8621 - protein, 349 aa, Rickettsia honei
ISMVSAEADCFTYDPGFMSTASCQSTITYIDGDKGILRHRGYDIKDLAEKSDFLEVAYLLIYGELPSGEQYNNFTKQVAHHSLVNERLHYLFQTFCSSSHPMAIMLAAVGSLSAFYPDLLNFKEADYELTAIRMIAKIPTIAAMSYKYSIGQPFIYPDNALDFTENFLHMMFATPCTKYTVNPIIKNALNKIFILHADHEQNAFTSTVRIAGSSGANPFACISTGIASLWGPAHGGANESVISMLKEIGSSEYIPKYIAKAKDKNDPFRLMGFGHRVYKNYDPRAAVLKETCKEVLKELGQLDNNPLSQIAIELEAIALKDEYFIERELYPNVDFYSGIIYKAMGIPSQ

SEQ ID NO: 8622 - protein, 124 aa, Wolinella succinogenes
MAITKEELLDYIGGLSVLELSELVKAFEEKFGVSAAPTVVAGAGAGVAAAAVEEKTEFDVILLDGGEKKINVIKVVRELTGLGLKEAKDAVEKTPTTIKEGANKDDAAAMKAKLEEAGAKVEIK

SEQ ID NO: 8623 - protein, 478 aa, Vitreoscilla sp. C1
MYKKSTIRIFATTSHKMNIDKEINMTNTTLNATANHLHPFSDNQQLKEKGVRVITKADGIYIYDDAGNKIIDGMAGLWCVNIGYGRKELADIARDQMNELAYYNTFFKTSHPAVINLSAKLASIAPAGFNHVFYTGSGSESVDSMIRMVRHYWDSVGKPSKKTLIGRWNGYHGSTIGGVSMGGMKGMHKQGGFPIEGIVHIEQPWFYGLHEEGETAEQFGIRAANWLEEKILEIGADNVAAFVGEPIQGAGGVIIPPSTYWPRIQEICQKYDILLVADEVICGFGRTGEWFGHETFGFQPDIFTTAKGLSSGYLPIGAVFVGDKVVEGILKGGDFNHGFTYAGHPVAAAVALKNVEILDDEGIIKNVHDKTGPYMQAKWREMLSQFKYVDDVRGVGLIQGFTLVKNKATREMFPNEGETGTMLRDIFFSNNLIMRACGDHIVASPPLTITKEEIDLMLATAEKCLQEFETAMDSKLGA

SEQ ID NO: 8624 - protein, 403 aa, Photorhabdus luminescens subsp. laumondii TTO1
MTSKILARSINEFFEVQQLSDQTILKPNRKIKMKILDEGLMQTAICRSNIGRIDEKELKLEYRGHNVRDLANNYSFSDVVYLLITGKLNSEGSEEFLDMLHNNYLSALKHIEKLTPVIFDTTPTDFLTIAVLSSQGKWLSDCSVKTKDERLIITASILAAIAAAIAIYAQKYAISEPVFKTFFGTKHRFFASFLATCFGQQCDDVAEEMLNKFLILHAEHGLNCSTATVRAVASSGADPFNAVAAGICAFSGPLHGGASGAVGLMIDDIHDNSKNISTFIDELVERKQRLMGFGHRIYKQPDPRASYMSDILIKQKAKFDVISSYVNISQELASEVSKRPYFSQRGLYPNPDLFNGLLLRRAGFKSHMNTALLCFSRAAGWLAHYYDSIDSKAPILRPQELYL

SEQ ID NO: 8625 - protein, 468 aa, Zea mays
  misc_feature (66)..(66): Xaa can be any naturally occurring amino acid
  misc_feature (138)..(138): Xaa can be any naturally occurring amino acid
  misc_feature (171)..(171): Xaa can be any naturally occurring amino acid
  misc_feature (195)..(195): Xaa can be any naturally occurring amino acid
  misc_feature (254)..(254): Xaa can be any naturally occurring amino acid
  misc_feature (290)..(290): Xaa can be any naturally occurring amino acid
MARSGREADPGEEERKLVLGKYELGRLLGQGTFAKVYYARDLSAGAGTGHSCSVAIKVIDKARLRXRQGMVEQLRREISIMRMVRHPNVVGIREVLASRSRVFVVMEYARGGELFAKVARGRLDEDHARRYFQQLVAXPVGFCHRRGVAHRDLKPENLLLDEAGRLKVTDXFGLAALPEQLRHDGLLHTQCGTPXAYVAPEVLRKRGYDGARADLWSCGVVLYVLLCGFLPFQHDNYVKLYQKIFKADYQVPPXWVSGDARRLIARLLVVDPAKRASIAEIMCTPWFRKXFVPPVLSPPVTPKKQQLDEGAALFDNDDDDNSNSNHSGATSPRSCNAFQLISSMSSGFDLSGLFESEQKTATVFTARAPAATVVEKLESVARALGFEVTRGKGWKVRMEAKAEGTNGRLAATAEVLEVAVDVTVVEFVHDAGDALDFNKFCAVDVRPGLTEIVWAWQGDSPAAAVGTA

SEQ ID NO: 8626 - protein, 450 aa, Corynebacterium efficiens YS-314
MTVHDYPETGALAPAAPGTLLITDVRVYGEGEPTNVLIRDGVIDSLDAPTSGEYDHTIDGGGGVLLPGFVDMHVHLREPGREDTETIATGSAAAAKGGFTAVFTMANTTPVMDQPLIAEGVWFKGQNVGLCDVHPVGSITKGLEGRELTEFGMMARSEARVRMFSDDGKCVDDPQVMRRALEYAKGMDVLIAQHCEDHRMTEGASAHEGENAARLGLRGWPRVAEESIVVRDAILARDYGNRVHICHASTEGTIELLRWAKGQGIPITAEVTPHHLILTDERLKTYDGVNRVNPPLREERDTLALREALLDGTIDVVATDHAPHGSEDKCCEFENAKPGMLGLETSLSIIADTFVASGLADWRFVAKVMSERPAEITRLPGHGRPIAVGEPANLTIVDPGRTWTARGEEFASKASNTPYEGMEFGAKVSHTILRGHVTCENGNATIAYNA

SEQ ID NO: 8627 - protein, 255 aa, Glycine max
  misc_feature (149)..(149): Xaa can be any naturally occurring amino acid
MVFGDWVKRARVEAINWILKTRATLGFRFETAYLSVTYFDRFLSRRSIDSEKSWAIRLLSIACLSLAAKMEECNVPGLSEFKLDDYSFEGKVIQRVELLVLSTLEWEMGIITPFDFLSYFITKFCKESPPSPIFYKTMQLIFTTMKALXSPCAEVNLMDHKPSVIAVAATLVAMDQQLTRDAVELKMSSIPQHRLLESKDVFEYYNLIQRLYEENTKSDTHTPIEMTESSRVTSSAAMTKRRRLTFSDDEGSSHG

SEQ ID NO: 8628 - protein, 364 aa, Acinetobacter sp. ADP1
MAGNTALCTVGRSGNDLHYRGYDILDLAVGSQFEEVAHLLVHGKLPNQAELKAYKAKLKALRGLPAALKTALEQLPPSAHPMDVMRTGVSVLGCLTPEHEDHNEAGAKDIADKLMASLGSMLLYWYHFSNNGRRIEVETDDDSIAAHFLHLLHGEKPSEEWIQAMHTSLILYAEHEFNASTFTSRVVAGTGSDMYSAITGGIGALRGPKHGGANEVAFVIQQRYDNADEAEADIRSRVEKKEVVIGFGHPVYTVSDPRNEVIKKVAYDLAQSQQNTKMYLIAERLEAVMKEVKNMFPNLDWFSAVSYHLMGVPTAMFTPLFVIARTAGWSAHVIEQRQDGKIIRPSANYTGPENLEFKPLAERG

SEQ ID NO: 8629 - protein, 456 aa, Arabidopsis thaliana
MENKPSVLTERYEVGRLLGQGTFAKVYSGRSNHTNESVAIKMIDKDKVMRVGLSQQIKREISVMRIAKHPNVVELYEVMATKSRIYFVIEYCKGGELFNKVAKGKLKEDVAWKYFYQLISAVDFCHSRGVYHRDIKPENLLLDDNDNLKVSDFGLSALADCKRQDGLLHTTCGTPAYVAPEVINRKGYEGTKADIWSCGVVLFVLLAGYLPFHDTNLMEMYRKIGKADFKCPSWFAPEVKRLLCKMLDPNHETRITIAKIKESSWFRKGLHLKQKKMEKMEKQQVREATNPMEAGGSGQNENGENHEPPRLATLNAFDIIALSTGFGLAGLFGDVYDKRESRFASQKPASEIISKLVEVAKCLKLKIRKQGAGLFKLERVKEGKNGILTMDAEIFQVTPTFHLVEVKKCNGDTMEYQKLVEEDLRPALADIVWVWQGEKEKEEQLLQDEQGEQEPS

SEQ ID NO: 8630 - protein, 318 aa, Arachis hypogaea
VMHRDLKPESFLFANKKENSPLKAIDFGLSVFFKPGEKFSEIVGSPYYMAPEVLKRNYGPEIDIWSAGVILYILLCGVPPFWAESEQGGAQAILRGLIDFKREPWPSISESAKSLVKQMLEPDPKLRLTAKQVLEHPWIQMLRRAPNIPLGDAVKSRLKQFSMMNRFQKKALRVIADFLSNEEVEDIKDIFQKMDTDNDGIVSIEELKAEFQNFGSQLAESEIQMLLEAVNTNGKGTLDYGEFVAVSLHLKRMANDEHLRKAFSYFDKDGNGYIEPDELRNALMEDGTDDCADVANDIFQEVDTDKDGRISYEEFVAM

SEQ ID NO: 8631 - protein, 247 aa, Zea mays
  misc_feature (8)..(8): Xaa can be any naturally occurring amino acid
  misc_feature (168)..(168): Xaa can be any naturally occurring amino acid
  misc_feature (181)..(181): Xaa can be any naturally occurring amino acid
  misc_feature (224)..(224): Xaa can be any naturally occurring amino acid
RGLESLRXQVAGKYKDEIEESVSMVDILAVQLSKRENELLQQKTEVTRIATSLKLASEDARRIVDEERTNARTEIENARAAVLRVQKVLKEKENSSQRIGKQDVDELREKVQEARRVKMLHCPSKAMDIKSEIHVLRDQYAEISSSSTHLLKELELHQSFKENGVPSXELEGLESLGSMAXVVVKNDVALSNSSVQWFRIQPEGPKKEIISGATKLVYAPETHXVGRYLQAEVNLGGQTSVAKTAGP

SEQ ID NO: 8632 - protein, 137 aa, Triticum aestivum
QVEQFSKGVLSASPRSLLCTNLSPSFNWDAAGLNDNDMGSYIANLGKLGFVWQFITLGGLHANALASATFAKSFKESGMYGYVSQVQRKEREHGVDVLQHQKWSGANYVDELMKMVTGGVSSTAAMGKGVTEDQFKH

SEQ ID NO: 8633 - protein, 509 aa, Bradyrhizobium japonicum USDA 110
MNIPSKPASIDVETHGNFIDGREVEAGNGAMLDVRNPATGDVIARIPNSTAEDIDRAMKSARAAFEGKAWGGMDTRARARLVNKLADAFEANLDSLYRLETLNNGRPVNETRAQLSRLPDFFRYFAGVALARRDSVIPVEGAYLNYTLRTPIGIVANCTPFNHPLMILCKSLAVVLATGCVTVVKPSEYTPLTTLKLAQIFTEAGLPPGVFNIVLGHGQSAGKMLAEHGDIDKLVLTGGTEAGRIAGSAAARVFAHQTMELGGKTPVMVFDDFDVDRAVNYAAFGAFIGAGQTCVCASRHIVQASIYDEFVEKLQAKTRTIRVGDPFDASTQMGPVISARQRDRVLTYAGYGHEDGARLVTGGVAAKVPGHDNGYFVEPTVFADVTSDMRIFQEEVFGPFTSVTPFKDEADALRLANDSPFGLAAAIRTRDVARAHRVAASVKAGIVWINDHHRLDPASPWGGVDDSGIGRECGTESFNDHFNTKSVMVATHEQPFDWYRDTANQKRLN

SEQ ID NO: 8634 - protein, 187 aa, Capsicum annuum
MASSVMSTATVATGANAAQASMIASFNGLKSAASFPVTRKQDLDITSIASNGGRVECMLVWPPINKKKYETLSYLPDLSDEQLLKEIEYLLQKGWVPCLEFETEHGFVYREHHRSPGYYDGRYWTMWKLPMFGCTDATQVLNEVQEAKKAYPQAWIRIIGFDNVRQVQCISFIAYKPEATKFSMFNV

SEQ ID NO: 8635 - protein, 456 aa, Bilophila wadsworthia
MTYDKAELVALDKKYVWHHLTQHKNFEPAIYVKGEGMRITDIDGKTYLDAVSGGVWTVNVGYGRKEIVDAVAKQMMEMCYFANGIGNVPTIKFSEKLISKMPGMSRVYLSNSGSEANEKAFKIVRQIGQLKHGGKKTGILYRARDYHGTTIGTLSACGQFERKVQYGPFAPGFYEFPDCDVYRSKFGDCADLGVKMAKQLEEVILTVGPDELGAVIVEPMTAGGGILVPPAGYYETIREICDKYELLLIIDEVVCGLGRTGKWFGYQHFNVQPDIVTMAKGVASGYAPISCTVTTEKVFQDFVNDPADTDAYFRDISTFGGCTSGPAAALANIEIIERENLLENCTKMGDRLLEGLKGLMAKHPIIGDVRGKGLFAGIEIVKDRATKEPIAEAVANAMVGAAKQAGVLIGKTSRSFREFNNTLTLCPALIATEADIDEIVAGIDKAFTTVEQKFGL

SEQ ID NO: 8636 - protein, 286 aa, Glycine max
  misc_feature (149)..(149): Xaa can be any naturally occurring amino acid
MASLSCSANDLAPLFNDTAAANYLCAQFDSISRKLAETTYAVDNTYLLFSAYLVFAMQLGFAMLCAGSVRAKNTMNIMLTNVLDAAAGGLSYYLFGFAFAFGGPSNGFIGRHFFGLRDYPMGSSPSGDYSFFLYQWAFAIAAAGITSGXSIAERTQFVAYLIYSSFLTGFVYPIVSHWFWSSDGWASATRSHGNVLFGSGVIDFAGSGVVHMVGGIAVLWGALIEGPRIGRFDRSGRSVALRGHSASLVVLGSFLLWFGWYGFNPGSFLTIAKGYGSGGYYGQWSA

SEQ ID NO: 8637 - protein, 506 aa, Azotobacter vinelandii
MRYAHPGSEGAIVSYKVRYGNYIGGQFVPPVKGQYFTNSSPVTGEEFAEFPRSTAEDIEKALDAAHAAAGAWGRTSVQERAAVLLKIADRIEQNLEVLAVTETWDNGKPVRETLNADVPLSADHFRYYAGCIRAQEGSAGEINENTVAYHFHEPLGVVGQIIPWNFPLLMAAWKLAPALAAGNCIVLKPAEQTPLSITVLVELIGDLLPPGVLNIVQGFGREAGEALATSKRIAKIAFTGSTPVGAHILKCAAENIIPSTVELGGKSPNIFFEDIMQAEPAFIEKAAEGLVLAFFNQGEVCTCPSRALIQESIYDDFMKVVMKKVGQIKRGHPLDTDTMVGAQASSQQFEKILSYLEIARSEGAEVLTGGAAERLEGSLASGYYIQPTLLKGHNKMRVFQEEIFGPVVGVTTFKDEAEALAIANDTEFGLGAGLWTRDINRAYRMGRGIQAGRVWTNCYHLYPAHAAFGGYKKSGVGRETHKMMLDHYQQTKNLLVSYDINPLGFF

SEQ ID NO: 8638 - protein, 433 aa, Oryza sativa (indica cultivar-group)
KMLEEFVSHGLLEYSKHGMKVEGATTSLLSPYLHFGEVSVRKVYQLVRMQQIKWENEGTSEAEESIHFFMRSIGLREYSRYLCFNFPFTHEKSLLGNLKHYPWKVDEERFKSWRQGMTGYPLVDAGMRELWATGWTHNRIRVIISSFAVKFLLIPWTWGMKYFWDVLLDADLESDILGWQYISGSLPDGHELSRLDNPEVQGQKYDPDGVYVRTWIPELARMPTEWIHHPWDAPSCILEVAGVELGFNYPKPIVDLHIARECLDDSISTMWQLDTAEKLAELDGEVVEDNLSNIKTFDIPKVVLRETSPCALPIDQRVPHASSKDHNLKSKVLKASNRSSICVDMIRSSKMEATSSVANSPVSRKRSFCETAFHVPSYSSSAEVHSHIQDHGGSLVGPSRYLLQEAGRNCVDEVEDSSTADSGSSISRQRKAA

SEQ ID NO: 8639 - protein, 415 aa, Streptomyces coelicolor A3(2)
MRRIVYLGGLTPRGVPERTLSPHLRSRAEVGPILVRDVLHYLAGAATMPDDIDRAFDVGGPDVPTYREMMRRHATVSGLRRRIIVPAPVLTPGLSSHWVGLVTPVPASIARPLTESLRHEVVCQEHDIARYVPDAPGRPLPFDVALTLALRRVREAQVATRWSSASVPGAPSDPLPTDPDWAGGSLYEDERHLPVDASPEALWKVVEGIGGDNGWYSFPPAWAVRGWLDRFVGGVGLRRGRRDAQRLHPARPVAWRGGRRRGHRRLAGRTGYPVVDAAMRQLRHQGWMHNRARLLVASFLTKTLYVDWRIGARHFLDLLVDGDVVNNQLNWQWAAGTGTDTRPHRVLNPLVQARRFDPDGVYVRRWVPELRSVEGGKVHEPWRLAAAERGELDYPDPLVELADGLARFKHARGRD

SEQ ID NO: 8640 - protein, 281 aa, Zea mays
MPMYSKSELIHVPPPPCSRPRYVMAPPLVFTSIGASMNAAVRDVWASNFDEELSNLSAVLPRYPCVCLDTEFPGAVHDSDMPRYMRGPRESYELVGIALSGPAGRFPIAWQFNIRGFDPALHPHAPASIAMLREQGMDFAMLNEFGIDPEDFAAGFRRSGLACGRLTWTAFSGSYDFGYLAKALTGGQPLPDTLDGFLALVRRLFGHSVFDVKHLARCCAMRGGLEQVATALGVKRAAGRAHCAGSDSLLTTDVLLLMMHRFFRNVEDSRCRNHRRPYLVS

SEQ ID NO: 8641 - protein, 219 aa, Brassica napus
  misc_feature (54)..(54): Xaa can be any naturally occurring amino acid
  misc_feature (132)..(132): Xaa can be any naturally occurring amino acid
  misc_feature (137)..(137): Xaa can be any naturally occurring amino acid
  misc_feature (188)..(188): Xaa can be any naturally occurring amino acid
  misc_feature (192)..(193): Xaa can be any naturally occurring amino acid
  misc_feature (199)..(199): Xaa can be any naturally occurring amino acid
  misc_feature (205)..(205): Xaa can be any naturally occurring amino acid
QGTEAELDGQYEPQDYLNFFCLGTREASDETVSKYSSRNQPKKIAKPNAAQVQXLKSRRFMIYVHSKGMVVDDEFVLIGSANINKRSLEGTRDTEIAMGGYQLHYSWAKKGSRPRGQIYGYRMSLWAEHLGXLEQGXEEPENMECVRRVRHLSELNWRQYAAEEVTVMTSHLLKYPVQVDRTGKVSSXPGPXXLPDVGXKIIGHXLWAGTKPRHLEVTL

SEQ ID NO: 8642 - protein, 460 aa, Glycine max
MEQKGSVLMQRYELGRLLGQGTFAKVYHARNIITGMSVAIKIIDKEKILKVGMIDQIKREISVMRLIRHPHVVELYEVMASKTKIYFVMEHAKGGELFNKVVKGRLKVDVARKYFQQLISAVDYCHSRGVCHRDLKPENLLLDENENLKVSDFGLSALAESKCQDGLLHTTCGTPAYVAPEVINRKGYDGIKADIWSCGVILYVLLAGHLPFQDTNLMEMYRKIGRGEFKFPKWFAPDVRRFLSRILDPNPKARISMAKIMESSWFKKGLEKPAITVTENEELAPLDADGIFEACENDGPIAEPKQEQAKPCNLNAFDIISYSTGFDLSGLFEDTNLKKETRFMSKKPASIIVLKLEEICKRLCLKVKKKDGGLLKLEGSKEGRKGTLGVDAEIFEITPHFHMVELKKSNGDTMEYQKLFKQDIRPALKDIVWTWQGEKPQQEQEQHEVVQEEHQPSHTA

SEQ ID NO: 8643 - protein, 465 aa, Methanococcus maripaludis S2
MFIDGKWIIREDIDVFDPYTLENIEKITALDREETKNAIEVTEKHKEIMKNLSPSKRYKILMKVAEHLSSKKDFFAKTISIDVGKPIKQSKIEVDRTLTALKLSAFYAKELRGETINSENGLIFTKKEPLGVIGAITPFNFPLNLATHKIGPAIATGNSVVLHPSSKAPIVAIYLTKIIEHVLKQMDIPRGVFNLATGNGEIVGDEISKNDNVNMVSFTGSVEVGESISKNAKMKKVTLELGGNNPMIVLKDSDIKLAAKSAVKSKFLNAGQVCISVGQVLVEEEVVETFTKYVIEETKKLILGNPLDKNTDIGPLISPESALRIENLIKQSVSEGGELLIGGNRQNSLISPAVINIDEENILSKIETFGPILPILTVKDSEEAVNIANNSKYGLQAGLFTNNINNAMKIADELEYGGIMINSSPTFRKDNMPFGGVKKSGLGREGIKYTVEEMSETKTVVIHNI

SEQ ID NO: 8644 - protein, 1748 aa, Schizosaccharomyces pombe
MSYPNQMNGSMYGYGANNGVQPGFDSYGMPINQGGMNYQQQTYPYQQPYQPDGYAGNTMLPFQQSQPATQFNNGFGYASQPTGSVADYGQQQQQMYGYNGMMPQTMNNTGFMQPQQTGAIPGFAPQPTGFVQPQPTGFMSQQPASFMQPQRTGGAGFIQPQRTGAMPAYQPQMNNFMQPQKTGGFAPQATGFMQTQPFGAAPSFAPQPTGFVQPQQTGVVMPPQPTGYLQAQPTGPFASFVQPQQTASFMPAAQPLKPQKTGQIHNSKAMDTRLSFVSAADQAKFEQLFKSAVGREEAMSSEIGKAILVRSKLPTVQLSKIWRLSDTTRSGRLLFPQFVLAMYLCNLGLTGKPIPDKVPDGILNEVNAMVDAISFSLDENYAKPTQPIPQAAAQQMAAQMFGGFQQAAGIPSQITGFQPQAMMPQRTGMQPQMTGFQQPMIPQRTGMQPQMTGFQQPMMPQRTGLQPQMTGFQQPMVPQRTGMQPQMTGFQQPMMPQRTGLQPQMTGFQQPMVPQRTGMQPMMPGLQQPMAPQRTGMQPMMPQRTGMQPQMTGFQQPMAPQRTGMQPMMPQRTGMQPQMPGMQQPMAPQRTGMQPMMPQRTGMQQPMAPQRTGMQPMMPQRTGMQPQMPGMQQPMAPQRTGMQPMMPQRTGMQPQMPGMQQPMAPQRTGMQPMAPQRTGMQPMMPQRTGMQPQMPGMQQPMAPQRTGMQPMMPQRTGMQPQMPGMQQPMAPQRTGMQPMAPQRTGMQPQMTGGPMLPQRTGGMAPQPTGMPGQWGFINTPLSNLPGIEALGQQMMPNAPSGGLNNTFQQKKDIPWAISKEEKRIYDQIFDAWDKERKGTLGGNAVLEIFGQSKLTRTELEHIWNLCDHGDKGSLDRDEFAVALHLIYRKLNGNEVPAVLPPELIPPSTRNFTESLNQVKNLIKNDTSNRKPFGAENQSKLKKNSFYDNPSETTEKDATLYRHNDSDASAYVSSARRRDFKEEKIESAPPIINDIDSEIASLKKRIHEKSLVVNALEDKKLAATPANDVQNDSLIYRIKSVQDEINRLSTSNKSPEVASMNVRLEELSTRVSKMLSDINEVDHTIASLSLKLFQAEDTKNSYDQTSPEATQERNRTISSKLAEMEKQKNESKAALEQMKNYVTNIENNIRAKLLPSAANDDAWLSQNVVDESVTRVVKELPVPAPAAPQTLNPPSVSTVQQSKPIESNTHTPEVKATSESPSASSNLEDRAARIKAEAQRRMNERLAALGIKPRQKGTPSPAPVNSATSTPVAAPTAQQIQPGKQASAVSSNVPAVSASISTPPAVVPTVQHPQPTKQIPTAAVKDPSTTSTSFNTAPIPQQAPLENQFSKMSLEPPVRPAVPTSPKPQIPDSSNVHAPPPPVQPMNAMPSHNAVNARPSAPERRDSFGSVSSGSNVSSIEDETSTMPLKASQPTNPGAPSNHAPQVVPPAPMHAVAPVQPKAPGMVTNAPAPSSAPAPPAPVSQLPPAVPNVPVPSMIPSVAQQPPSSVAPATAPSSTLPPSQSSFAHVPSPAPPAPQHPSAAALSSAPADNSMPHRSSPYAPQEPVQKPQAINNIAPATNLGTSQSFSPRMGPVNNSGSPLAMNAAGQPSLAVPAVPSAPSNHFNPFAKMQPPAPSPLQPSGHDSDNWSQHGDEEEEDSEDDIRSSKDAAALAAKLFGGMAPAHPVSTPPVRPQSAAPPQMSAPTPPPPPMSVPPPPSAPPMPAGPPSAPPPPLPASSAPSVPNPGD

SEQ ID NO: 8645 - protein, 157 aa, Triticum aestivum
  misc_feature (40)..(40): Xaa can be any naturally occurring amino acid
  misc_feature (123)..(123): Xaa can be any naturally occurring amino acid
  misc_feature (130)..(130): Xaa can be any naturally occurring amino acid
  misc_feature (135)..(135): Xaa can be any naturally occurring amino acid
  misc_feature (139)..(139): Xaa can be any naturally occurring amino acid
  misc_feature (142)..(142): Xaa can be any naturally occurring amino acid
  misc_feature (144)..(144): Xaa can be any naturally occurring amino acid
  misc_feature (151)..(151): Xaa can be any naturally occurring amino acid
MAPTVMASSATSVAPFQGLKSTAGLPVSRRSNGASSAASXNGGRIRCMQVWPIEGIKKFETLSYLPPLSTEALLKQVDYLIRSKWVPCLEFSKVGFIFREHNASPGYYDGRYLTMWKLPMFRXTDAKKVXNEVEXVKKXYPXAXVRIIRFXKWARMR

SEQ ID NO: 8646 - protein, 511 aa, Alcaligenes faecalis
MGEEMKTESKKPDSARSELAMKYFQAEYGHFINGEWVGGSSSEKIAMINPANLEVLSYIQSGNAEDVNRAVEAATQAFPKWSRSTPSERQAALYEMARRLRARANDYAAMLSLDNGKPIMEALHIDIPATIGQFELFAGAAFGLHGQTIDATQGVAIIHREPLGVVAQIIPWNVPLVMMATKIAPALAAGNTIVLKPAESVCLAVMEFIREMADLLPPGVLNVITGYGPNVGEALVTHPNVRKVAFTGSRPTAQKLMQYASVNVIPQTLELGGKSANIICADADMDAAAESAAMSIVVNKGEICFAATRHFVHESVMDAFVEKVQNILRKIRVGDPMIPSTQMGPQASRMQFDKVLGYLDIGRNEGATTAMGGKRATVSGFEQGYFIEPTLFTDVRNKMRIAQEEIFGPVGVVIPWKDEAQVIREANDTEFGLAAGLWTKNITQAHRMAREIEAGTVWVNRYFNMIPNVPFGGYKQSGFGREFSLDVLSHYTQLKSVIVSLQEGPIGLFDH

SEQ ID NO: 8647 - protein, 75 aa, Zea mays
MTTAAAGRRQARRHQADGHGSAKVPLWKDPLSPSKWKEEHFVLASLSMWGVIFYGGYKLFSGKKEAKTEAASPQA

SEQ ID NO: 8648 - protein, 310 aa, Bacillus megaterium
MPLDPHIQIFLNQYNEMPRPSLEDVTPPQLREMEKMSLTPSKEAVKKVYNEEIELNERTLTLRVYEPEGTGPFPALVYYHGGGWVLGSLDTHDSICRSYANETNCIVVSVDYRLAPESKFPAAVNDAYDALDWISAHASQLNIDSNKIAVGGDSAGGNLAAVVSILAKQRQGPSIVHQLLIYPSVGFKNQHPASMKENAEGYLLSKDLMDWFRLQYLNNKEEEQHPYNAPVLLEDLSSLPSATIITAQYDPLRDSGKDYADALKNHGVPVTYENYETMIHGFLGFHEFVPLAQQAINKSAAQLRQVFDSI

SEQ ID NO: 8649 - protein, 372 aa, Hemerocallis hybrid cultivar
STEIFSPVRIRSLAAVRQEEVKLMITGILASTSTDNSVKVNMKVVFSELMFNVIMKIIAGKRYFGVNTDSEVEEGQKFRVVFDEMFSTLEVASPQDFLPFLKWFGFKRMENRLTKLAKELDQLFQKLIEERRSERGKVQSTVIDVLLSLQETDREQYSDKLIKGMILSLIAAGTHTTAGTMEWAMSLLLNHPEALLKVRDEIDKKVGQDRLIDHSDLQNLSYLNNAIKESLRLFPTAPLLLAHESSAECTVGGFTIPSNTILFANAYALHRDPKVWTDPVSFKPERFENNGQQGSRIYVPFGLGRRSCPGEGLATQVVGLALGTLIQCFEWDRNGEEKVDMTDGSGLAMHMEKPLEAMCKPRQSIVDVINRL

SEQ ID NO: 8650 - protein, 363 aa, Escherichia coli O157:H7
MSKNYHIAVLPGDGIGPEVMTQALKVLDAVRNRFAMRITTSHYDVGGAAIDNHGQPLPPATVEGCEQADAVLFGSVGGPKWEHLPPDQQPERGALLPLRKHFKLFSNLRPAKLYQGLEAFCPLRADIAANGFDILCVRELTGGIYFGQPKGREGSGQYEKAFDTEVYHRFEIERIARIAFESARKRRHKVTSIDKANVLQSSILWREIVNEIATEYPDIELAHMYIDNATMQLIKDPSQFDVLLCSNLFGDILSDECAMITGSMGMLPSASLNEQGFGLYEPAGGSAPDIAGKNIANPIAQILSLALLLRYSLDADDAASAIERAINRALEEGIRTGDLARGAAAVSTDEMGDIIARYVAEGV

SEQ ID NO: 8651 - protein, 301 aa, Acinetobacter sp. ADP1
MYIMWKQYLTEAVLKTTIRAPSRFSLPPATLRVALNQMCRVFPLNKEVSIRPIRLAGIRAEEIKPQSSSTQLIFHIHGGAFFLGSLNTHRALMTELAARTQMQVLHVDYPLAPEAGFPDALDALYDIYQTLLDQGVLPKDIILSGDSCGANLALALALRLKDDPEQLPSGLILMSPFLDLTLSSESLRLNKKHDALLCIEALEAGIDYYLGDSMPKDDPRVSPIFDNLRGLPPTMIQVGSKEILLDDAKRFRDKAKEADVKVEFKLYTGMWHNFQMFSAWFDEAKQAISDLAVFAHQLDRD

SEQ ID NO: 8652 - protein, 369 aa, Burkholderia cepacia R1808
MALSGVTAGNTALCTVGRTGNDLHYRGYDILDVAESCDFEEIAHLLVHGTLPNLTELAAYKTKLRALRGLPNALKAALEQIPASAHPMDVMRTGVSVLGTVLPEKDDHNLPGARDIADRLMASLGSMLLYWYHFSHNGKRIETETDDDSIGGHFLHLLHGKAPSKSWVEAMHTSLILYAEHEFNASTFTGRVIAGTGSDIYSAITGAIGALRGPKHGGANEVAYDIQSRYDSPDEAELDIRRRVENKEVVIGFGHPVYTISDPRNKVIKGVAHKLSKEAGDLKLYNIAERLESVMWDAKKMFPNLDWFSAVSYHLMGVPTAMFTPLFVISRTSGWSAHIIEQRIDNKIIRPSANYTGPEDLQFVPIDKR

SEQ ID NO: 8653 - protein, 348 aa, Tropheryma whipplei TW08/27
MEDLYGILGVDHDASVDEIRRAYRRLARELHPDINPDSADRFKAVTHAYNILSDPEQRQRYDRHVSGGFSSDFNLSDLFQSFFDTSAEFQRGSDLLVNIDIDLKTAIYGGSQVVKIDSLVVCDVCNGTRSEPGYKAEVCFDCNGSGVVRGEVRTTLGNLITQNTCSKCRGNGERIDHPCRRCYGNGSRSAPRDITINIPPGVETGMRIKIPNMGNAGGAMPGDLYVDCKVKEHPYFLRDGQDLYCRLDISLVDALLGTKVKIDSLDGELAVVIPALSQNRDVIRIANKGAVTLRGGKGDLCIVLNVLLMQKLDPEHRALLKKIMPNPPKPKLAKRTSGFFSWLKNKFT

SEQ ID NO: 8654 - protein, 489 aa, Bacillus cereus G9241
MPQDRKEEVQNDTYEEKEIMPDNPQYLPRRVQMELPPEFSINPLFARKGESVVPRFNMPDEGMLPETAYQIVHDEITLDGNARLNLAMFVSTWMEPTAERLYAKSFDKNMIDKDEYPQTAEIEERCVRILANLWHSPSPLTTMGVSTTGSSEACMLGGLALKRRWQNARKREGKSVDRPNIVFSSAVQVVWEKFANYWEVEPRYVKVSPEHSLLDPQGVIAAVDENTIGVVPILGETYTGRYEPVAAIAKALDDLQERTGLDIPMHVDAASGGFIAPFLQPDLVWDFQLPRVKSINVSGHKYGLVYPGLGWIIWREADDLPEDLIFRVSYLGGNMPTFALNFSRPGAQVLLQYYNYLRLGKRGYYDVQRASQKVALFLSKAIQKMEPFELLSNGSDIPVFAWRLKNGHTSNWNLYDLSRQLRVFGWQVPAYPLPPDLEAVTIMRVVVRNGFSVDLAHLFLRNLKQAVAFLDSLDGPMPHDTKCDNGFHH

SEQ ID NO: 8655 - protein, 594 aa, Triticum aestivum
  misc_feature (530)..(530): Xaa can be any naturally occurring amino acid
MESTMKEIRGGGAPCVLDMDDAATVGGGVEDTYGEDRATEEQLVTPWTVSVASGYNLLRDPRYNKGLAFTEKERETHYLRGLLPPTVISQELQERKIMHNIRQYQLPLQRYMAMMDLQEGNERLFYKLLIDNVEELLPIVYTPTVGEACQKYGSIFSRPQGLYISLKEKGKILEVLKNWPERSIQVIVVTDGERILGLGDLGCQGMGIPVGKLSLYTALGGVRPSACLPITLDVGTNNEELLNDEFYIGLRQRRAIGQEYADFLHEFMAAVKQNYGEKVLIQFEDFANHNAFDLLARYGTTHLVFNDDIQGTASVVLAGLVAALKLVGGTLAEHTYLFLGAGEAGTGIAELIALEMSRQTKTPIDECRKKIWLVDSKGLIVSARKESLQHFKKPWAHEHEHVGNLLDAVNAIKPTVLIGTSGKGQTFTQEVVEAISSFNEMPIILALSNPTSQAECTAEQAYTWSKGRAVFATGSPFDPVQYNGKIYVPGQANNAYIFPGFGLGVVMSGAIRVHDDMLLAASEALAQQVXTQENFDKGLIYPPFSNIRKICAHIAANVAAKAYELGLASRRPRPKDLVKYAESCMYSPIYRNYR

SEQ ID NO: 8656 - protein, 272 aa, Zea mays
  misc_feature (216)..(216): Xaa can be any naturally occurring amino acid
VDPRVREHQPNGPVTPVDMVVDFYKFDYEFGEPPRVTSLHNTVPVATFNDFCDDVYFVADQRGYEAVVYYLAGQYLKTDDKSGKIVDPRLQLNKVVREIKYSPGGVTVKTESDLIQFKPKLPTWKVRAIYQFDMAVYTKILLKFPRKFWPEGKGREFFLYASSRRSYYGVWQEFEKQYPDANVLLVTVTDEESRRIEQQSDEQTKAEIMQLLRMLXQLRATVRTVYTFGEHTSEHYNGYVHGAYLSGIDSAEILINCAQKKMCKYHVQGKYD

SEQ ID NO: 8657 - protein, 170 aa, Triticum aestivum
  misc_feature (69)..(69): Xaa can be any naturally occurring amino acid
  misc_feature (78)..(78): Xaa can be any naturally occurring amino acid
  misc_feature (90)..(90): Xaa can be any naturally occurring amino acid
  misc_feature (101)..(101): Xaa can be any naturally occurring amino acid
  misc_feature (122)..(122): Xaa can be any naturally occurring amino acid
  misc_feature (128)..(128): Xaa can be any naturally occurring amino acid
MAPTVMASSATSVAPFQGLKSTAGLPVSRRSNGASLGSVSNGGRIRCMQVWPIEGIKKFETLSYLPPLXTEALLKQVXYLIRSKWVPCLXEFKQVGFIFRXEHNAPPGYYDGRYWDMWKLPXFGCTDXTQVINEVEESRRIPDAYSASSVRHIASACVAHASTTGSRSEG

SEQ ID NO: 8658 - protein, 83 aa, Triticum aestivum
  misc_feature (42)..(42): Xaa can be any naturally occurring amino acid
MAPTGMGVSATFVAPFQGLKSTVGLPVSRRSNGASLGSVSNXGGRIRCMQVWPIEGIKKFETLSYLPPLSTEGFLKQVDYLIR

SEQ ID NO: 8659 - protein, 368 aa, Malus x domestica
MGKGGQSCNGVVRDAKPVEQENMAAWLVDVNTIKILPFKLPAIGPNDVRIRIKAVGICGSDIHYLKTMKCGDFQVKDPMVIGHECAGIVDKVGSEVKHLVPGDRVAVEPGISCAHCQQCKGGRYNLCPDMKFFATPPVHGSLANQIVHPADLCFKLPENVSLEEGAMCEPLSVGVHACRRANVGPETTVLIVGAGPIGLVSVLAARAFGAPRIVIVDMDDRRLAMAKSLGADGTVKVSTKMEDLDDEVAKIKEAMGSEVDVTFDCVGFNKTMSTGLNATRPGGKVCLVGMGHGVMTVPLTPAAAREVDVVGVFRYKNTWPLCLEFLRSGKIDVKPLITHRFGFTEKEVEEAFATSARGGNAIKVMFTL

SEQ ID NO: 8660 - protein, 217 aa, Sinorhizobium meliloti
MKFFVDTADVKDIRELNDLGLLDGVTTNPSLILKAGRDIVEVTKEICSIVEGPVSAEVTATEYSAMMKEAAALSKIADNICIKLPLTLDGLKACKALTSDGHQTNVTLCFSANQALLAAKAGATFVSPFIGRLDDIAVDGMDLIREIRQIFDNYGYETEILAASVRTVNHVKEAALIGADVVTAPPATLKALVKHPLTDKGLEMFLADWAKTGQKIA

SEQ ID NO: 8661 - protein, 470 aa, Leuconostoc mesenteroides subsp. mesenteroides ATCC 8293
MVSVMWFRRDLRLEDNIALFNALRHSNEILCVFHINPEQVTEKSTVNQSAFFASVLYFKNKLKKQGINLNIMYGDINDCFASLKQKLPDWHDIFFNFDERGFGRNRDQKSVAFFEDKLKVKAHPYIDYNLHGATEVKKDSGAGYKVFTPYFKRWIRQEKPAPVSYVIDKRIKSARLLFPENEQLLETFIDDRFSFIKKDLGSETAKKVLNRFINESLDQYDEERDFPANDSTSHLSRYLRTGEISIRTVWRAIDQSPDSDGKSTFMKELCWRDFYNMIYVMYPNQNVESVNKDFRHVDWINNEQQFEAWRTGQTGFPIVDAAMRQLNATGWMHNRLRMIVASFLTKDLLIDWRWGEAYFHNKLLDYDAASNIGGWQWAASTGTDSVPYFRIFNPTLQSKKFDSNGLFIKKYVPELKNVDNKMIHEPGKLSESEQTRFNVRIGQNYPFPIVDHSYARKRAISIYESSKDVN

SEQ ID NO: 8662 - protein, 277 aa, Thermoanaerobacter tengcongensis MB4
MIQWYPGHMAKAKKEIISNLKLVDVVYEIVDARIPRSSRNPDFDEITKRKKKIMLLNKEDLADERITDLWIKHFKEKGIEAVKVNAITGKGFKELEEKTKEVCKDILEAKVKKGLTPRLRGMILGIPNVGKSTFINTLIGRKKAKTGDKPGVTKSLHWIRTPYLDLLDTPGVLWPKFEDKTTGFMLAITGAIKDEILEMEEVALFLVSILKNRYPDYLINRYKLDKIWEEEIKIIEDIGKKRGCLVSGGEVDFVKASTVLLEDFRKGNLGRISLEEP

SEQ ID NO: 8663 - protein, 277 aa, Staphylococcus aureus subsp. aureus Mu50
MEVKTFYNGNTMPQIGLGTFRVENDENCMESVKYAIEQGYRSIDTAKVYGNEEQVGAGIRAGLESTGIAREDLFITSKLYFEDFGRENVAAAYEASLSRLGLKYLDLYLVHWPGTNEAVMVDTWKGMEDLYKNNKAKNIGVSNFEPEHLEALLAQVSIKPVINQVEYHPYLTQHKLKLYLAAQHIVMESWSPLMNAQILNDETIKDIAQELGKSPAQVVLRWNVQHGVVIIPKSVTPNRISENFQIFDFELSDEQMTRIDGLNQDKRIGPDPKTFEG

SEQ ID NO: 8664 - protein, 327 aa, Triticum aestivum
MASTTAAVPEVALRSGGARPMPAIGMGTATFPVVPETTVKAVLEAVEVGYRHFDTAAMYATERPLGEALAEAVRRGLLASREEVFVTSKLWCTQCHPHLVLPSLRESLQNLQMEYVDLYLIHWPISLKPGPTVFPVKREDAVPFDFEGVWRAMEECHRLGLAKAIGVSNFTTSHLDKLLAAATVPPAVNQVEMNPVWQQRKLREYCAEKGIHVAAYSPLGGQNWSGDGNAVLDSEVLAEIAKARGKTVAQVALRWIYEQGVTPIVKSFSKERLKENLGIFDWGLTDDDLRKIGQIPQKKIVRAETVLFSAEGEFTSADLADMEIVEE

SEQ ID NO: 8665 - protein, 118 aa, Brassica napus
MEFVRFPIVSILDDMREVPEEHNEKSRISPSRAYMRDAKAMAATPADVIEHPSSYVFVVDMPGIRGEDIRVQVENENVLVVSGERQRENKENEGVKYVRMERRMGKFMRKFQLPENAD

SEQ ID NO: 8666 - protein, 181 aa, Zea mays
MASSMLSSAAVVTSPAQATMVAPFTGLKSSASFPVTRKANNDITSITSNGGRVSCMKVWPPIGKKKFETLSYLPDLTDVELAKEVDYLLRNKWIPCVEFELEHGFVYREHGNTPGYYDGRYWTMWKLPLFGCTDSAQVLKEVEECKKEYPGAFIRIIGFDNTRQVQCISFIAYKPPSFTDA

SEQ ID NO: 8667 - protein, 461 aa, Mycobacterium bovis AF2122/97
MTATLTKTLGSLDDFRGTLCVPGDPDYPRVRAIWNGQVAREPALIATCHDACDVRTVLRRPVDAGMVTAVRGGGHNVAGTALCDGGVVIDLSAMRAVSLDPATGRVRVQGGATLADLDHATVPFARVAPAGIVTTTGVGGLTLGGGVGWTTRRFGLSCDNLVAVRLVTAAGDYLSVDDERDPELMWGLRGGGGNFGIVTEFEFATHPFGPVAVAGFVVYRLDDGPAVLRGYRQFAAAAPEEVTTIVVLRHAPPAPWIPVDQRGKPVVMIGAVHTGSIQTGIEALRPVKSLARPVADTVWPTPFLAHQAVLDASNPAGHRYYWKSDYLAELNDEAIDLLVEQTAQLSSPDSLIGIFQLGGAAARGGERSCFPSRHARFMVNYATHWTEAREDDLHRQWTRDAIEALAPYGLGTAYVNFTADDAPMHVETLYSTTEFSRLVTLKNRLDPDNVFRNNHNIRPSA

SEQ ID NO: 8668 - protein, 341 aa, Rubrobacter xylanophilus DSM 9941
MKAFVKTGSRPGEAGVAELPAPRPGPGEVLLRVAACGVCGSDVHAFRSDPGFEWISTPVTLGHEFAGTVEALGPGVERVAPGDRVVAVAIQGCGRCELCLAGLTQLCPDRVAVGLSRDGGMAEYAVMPEGHLVSVPEGLDLTLAALCEPLSVAVRAVDARAGIAPEGKVVVSGPGPIGILCAMVARLRGADVLLTGIGQDAEVRLPAAERAGIRAANLSEASLEEHLRDAFGRPPDVWIESSGSVRALESALESVRAGGTVVVVGIYAERLNLFPTDAVRRELSLLFSYSCNLADYRTALELLASGDLDLGPLISTHRLEEAPDALEAVAAGRTVKAVLVP

SEQ ID NO: 8669 - protein, 380 aa, Exiguobacterium sp. 255-15
MSALLPTYLRHDIELVAGNGSFVQDKAGKNYLDFVMGIAVCNTGHRHPHVEQALQEQLQKLWHTSNLFMSSKQERVAAMLTENSHLSHVFFCNSGTEANEGAFKLIRKWTQKKEILTFSQSFHGRTFAMMGATGQDKIKAGFGEMVPDFKHLTFNDFDSLEMITNQTAAVWLEVIQGEGGVIVAENAWLEALMEKARQYDVKVVIDEVQTGIGRTGSRFAFEQTPLKPDIITVAKGLGSGFPVGAIITTPEATAVFTPGTHGSTFGGNPLAMAAAEATLDVLLNEQQMKQVQQKGLYLMQQLKQLPETMVVDVRGRGLMIGIEFHEPVSSLITALQQAGMLVVSAGPNVIRLLPSLCVTEQELDLAVGKIKTVCQQEVMM

SEQ ID NO: 8670 - protein, 335 aa, Nicotiana tabacum
MVHEKQVIEEVSGWLRVFEDGSVDRTWTGPPEVKFMAEPVPPHDYFIDGVAVKDVVADEKSGSRLRIYLPERNDNSANKLPVILHFHGGGFCVSHADWFMYYTVYTRLARAAKAIIVSVFLPLAPEHRLPAACDAGFAALLWLRDLSRQQGHEPWLNDYADFNRVFLIGDSSGGNIVHQVAVKAGEENLSPMRLAGAIPIHPGFVRSYRSKSELEQEQTPFLTLDMVDKFLGLALPVGSNKDHQITCPMGEAAPAVEELKLPPYLYCVAEKDLIKDTEMEFYEAMKKGEKDVELFINNGVGHSFYLNKIAVRMDPVTGSETEKLCEAVAEFINKH

SEQ ID NO: 8671 - protein, 137 aa, Brassica napus
PSPVMFQEDHDVWNVQLFRSIDGGAAAGFPESPEVAAEAGLVSGKDNVIDRSIQDAYIHAIRRAKDFIYIENQYFLGSSFAWAADGITPEDINALHLIPKELSLKIVDKIEKGERFRVYVVVPMWPEGIPESASVQA

SEQ ID NO: 8672 - protein, 279 aa, Streptococcus pyogenes MGAS8232
MVTTVKMTSGYEIPVLGFGTYQAADGEEAYQSTLAAIKAGYRHIDTAAIYKNEESVGRAIKDSGVLREDLFITTKLWNDAHSYEGAKDALAASLDHLGLDYVDLYLIHWPNPKALRNTWKEANAQAWQYMEEAVEAGLIKSIGVSNFMVHHLEALQETAKITPAINQIRLAPGCYQKEVVDYCKANEILLEAWSPLGQGEIFDNETMQQLANKYDKTVAQVALAWSLAEGFIPLPKSVHDERIKENMAIFDVSLTQEDKKTIRYLSGMSAIPNPDTTSF

SEQ ID NO: 8673 - protein, 169 aa, Stigmatella aurantiaca
MADLSVRRGTGSTPQRTREWDPFQQMQELMNWDPFELANHPWFANRQGPPAFVPAFEVRETKEAYIFKADLPGVDEKDIEVTLTGDRVSVSGKREREKREESERFYAYERSFGSFSRAFTLPEGVDGDNVRADLKNGVLTLTLPKRPEVQPKRIQVASSGTEQKEHIKA

SEQ ID NO: 8674 - protein, 117 aa, Prunus persica
MAYSAMTKLALVVALCMVVSVPIAQAITCGQVSSSLAPCIPYVRGGGAVPPACCNGIRNVNNLARTTPDRQAACNCLKQLSASVPGVNPNNAAALPGKCGVSIPYKISASTNCATVK

SEQ ID NO: 8675 - protein, 342 aa, Triticum aestivum
  misc_feature (294)..(294): Xaa can be any naturally occurring amino acid
MKTLLILTILAMAITISTANMQVDPSGQVQWPQQQLVPQPQQPLSQQPQQAFPQPQQTFPHQPQQQVPQPQQPQQPFLQPQQAFPQQPQQPFPQTQQPQQPFPQQPQQPFPQQPQQPFPQTQQPQQPFPQQPQQPFPQTQQPQQPFPQFQQPHQPFHQPQQQFPQPQQPQQSFPQQQRPFIQPYPQQRLNPCKNILLQQCKPASLVSSLWSIIWPQSDCQVMQQQCCQELAQIPQQLQCAAIHSVVHSIIVQQQQQQQQQQQQQQQQGMHILLPLSQQQQLGQGTLVQGQGIIXQPQQLAQLEAIRSLVLQTLPTMCNVYVPPECSIIRAPFASIVAGIGGQ

SEQ ID NO: 8676 - protein, 175 aa, Glycine max
  misc_feature (101)..(101): Xaa can be any naturally occurring amino acid
  misc_feature (114)..(114): Xaa can be any naturally occurring amino acid
ASSMISSPDATTVNRAGAGMVAPFTGLKSMAGFPTKKTNNDITSIASSGGRVQCMQVWPPDGKKRLETLSYLPHLDDAQLAQEVQYLLRKGCIPCLEFESXHGFAYREHNTSPXYYDGRYWTMCKLPMFGCTDASHVWNELQEANTAYANGFIRIIGFDNARQVHSISCIGYKPP

SEQ ID NO: 8677 - protein, 350 aa, Schizosaccharomyces pombe
MDESLAKDAVFVASSKPSDLTTEVVGPDFNKYDERKKAGGPGITVEELVESYGKIGFQATNLHDAVTIINEMRNWRDPNPPEEKSDRATIFLGYTSNLISSGVREVLRYLVQHKCVDVIVTTAGGVEEDIIKCLGPTYVGDFHLDGKNLRAKGLNRIGNLIVPNDNYCRFEEWIFPILNKMVEEQETLGTHWTPSSFIRRLGKEINDESSVLYWAYKNNIPIYSPALTDGSIGDMLYFHTYKATPRPLVLDIVADIRNMNTHAVRANKSGIIILGGGVVKHHICNANLMRNGAEWSVYINSANEFDGSDAGARPDEAVSWGKIRGDAKKVKVYGEVSLLFPLIVAATFAK

SEQ ID NO: 8678 - protein, 500 aa, Psychrobacter sp. 273-4
MTDSTDLKHMDNAEQTQTAYINGSYLAVDKALSTFDSINPVTGEVLSTIQQTTTEQINDAVIAAQKGQKVWAAMTAIERSRILLNAVAILRERNDELAVLETKDTGKAISETKYVDIVTGADVIEYYAGLAPMIEGRQIPLRDTSFVYTRQEPLGVIAGIGAWNYPIQIAMWKAAPALAAGNAMIFKPSEVTPLSALKLAEIFTEAGLPEGVFNVVQGNYEVGEALTQHPDIAKVSFTGGVPTGKKVMSSAATSSLKDVTLELGGKSPLIIFDDADIDTAADIAMMANFYSTGQVCTNGTRVFIPKALQAKFEQAIQTRVKRIKLGDPMDDSITMGPLVSFPHMDRVLGYIEQGKASGARLLCGGARVTTGSLADGAYVAATVFTDCTDDMSIVREEIFGPVMSILTYETEEEVIRRANDTEYGLAAGVVTADLNRAHRVIAQIEAGICWLNTWGESAAQMPVGGYKHSGIGRENGIQTLEHYTQTKSIQVELGAFESVF

SEQ ID NO: 8679 - protein, 487 aa, Zea mays
  misc_feature (448)..(448): Xaa can be any naturally occurring amino acid
  misc_feature (476)..(476): Xaa can be any naturally occurring amino acid
LKDKYSLGRRLGQGQFGTTHLCVERATGKELACKSILKRKLGSDDDVEDVRREIQIMHHLAGHPSVVGIRGAYEDAVAVHLVMELCGGGELFDRIVRRGHYTERKAAELARVIVGVVEACHSMGVMHRDLKPENFLFADHSEEAALKTIDFGLSIFFRPGQIFTDVVGSPYYVAPEVLKKRYGPEADVWSAGVIIYILLCGVPPFWAENEQGIFEEVLHGRLDFESEPWPSISDGAKDLVRRMLVRDPRKRLTAHEVLRHPWVQVGGVAPDRPLDSAVLSRMKQFSAMNKLKKMALRVIAENLSEDEIAGLREMFKMIDADNSGQITFEELKVGLEKVGANLQESEIYALMQAADVDNNGTIDYGEFIAATLHLNKVEREDHLFAAFQYFDKDGSGYITADELQVACEEFGLGDVQLEDLIGEVDQDNDGRIDYNEFVAMMQKPTVGXSRRRPTCRTASVSGSGRRSGWPRPLCLXLPCCLRVGVDD

SEQ ID NO: 8680 - protein, 130 aa, Triticum aestivum
MDRADPARGRLAVLSSHLLAGVLAVVDSRTGKRYEVKVSEDGTVRATDFKKITTGKDDKGLKTYDPGYLNTAPVRSSICYIDGDEGILRYRGYPIEEVAESSSFVEVAYLLMYGNLPTQSQLAGWESAIS

SEQ ID NO: 8681 - protein, 252 aa, Triticum aestivum
  misc_feature (78)..(78): Xaa can be any naturally occurring amino acid
MMGYQKGVDIEAGTSGGGTGTAAPTRGLYPGMTESPELRWALIRKIYVILSLQLLLTAVVAAVVVKVRAIPHFFVSSXPGLGLYIFLIIFPFIVLCPLYFYRQKHPVNLLLLGVFTVAISFAVGMTCAFTSGKVILEAAILTTVVVFSLTAYTFWAAKRGQDFSFLGPFLFASLIMLLVFGFIQILFPMGKLSHMIYGALAALIFSGYIVYDTDNIIKRYTYDEYVWAAVSLYLDVINLFLALLTLFRAGDS

SEQ ID NO: 8682 - protein, 255 aa, Triticum aestivum
VGREGAMEQGEEDGDWMMEPAAGKKGGAMIDRKKRFSEEQIKSLESMFATQTKLEPRQKLQLARELGLQPRQVAIWFQNKRARWKSKQLERQYAALRDDYDALLSSYDQLKKDKQALLNQLEKLAEMLREPGGAKCGDNAGAAARDDERLAVAGMSMKDEFVDAGGASKLYSASEGCGGSGKLSLFGEEDDDAGLFLRPSLQLPTAHDGGFTASGPAEYQQQSPSSFPFHSSWPSSAAEQTCSSSQWWEFESPSE

SEQ ID NO: 8683 - protein, 250 aa, Zea mays
MVKAYPTVNEDYLKAVDKAKRKLRGLIAEKNCAPLMLRLAWHSAGTFDVATKTWGPFGTMKNPAEQAHGANAGLEIAIRLLEPIKEQFPILSYADFYQLAGVVAVEVTGGPDVPFHPGRQDKPEAPPEGRLPDATQGSDHLRQVFSTQMGLSDQDIVALSGGHTLGRCHKDRSGFEGAWTSNPLIFDNSYFKELLSGEKEGLLQLPSDKALLSDPSFRPLVDKYAADEDAFFADYAEAHLKLSELGFAEA

SEQ ID NO: 8684 - protein, 477 aa, Rubrobacter xylanophilus DSM 9941
MRKTFVLAAASALLTLALPALGLAQEEAPPGNRELSLALDTVWVLVAAVLVLFMQAGFAMLEVGFSRMKNVGSVVAKILANLAIAAVLFWAVGFAVAFGTGNALFGTQGWFLAVPEGAVDEVYAGLAWTQVPLSAKFLFQVAFCAVSLAIVWGTMLERTKFAVYLVFAVVFAGIIYPMVGHWVWGGGWLTELGMQDFAGSTVVHLSGAMAALAGTLLLGPRLGKYDDEGRPVTIPGHNMPLAVLGVLILWIGWYGFNPGSTMAATPQIADIALTTTLAAACGVLGAMAMSYLYRRHVDVGMAGNGAIAALVAITAPCAFVAPWASAIIGFVAGVIMYATLLFVDRIGVDDPLGAIAAHGMGGVWGTLSAGLFTTPELAAVGRPGLLYGGGLYQLGVQALGILAAGGFVFLASLLVFAALKATIGLRVKPEQELNGLDVSEHGVYGYAGFPEHLIATDHPVNGNGGGAPRNAPAEGAA

SEQ ID NO: 8685 - protein, 208 aa, Triticum aestivum
LSLSPQPQPFPSQQPYLQLQPFPQPQLPYPQPQLPYPQPQLPYPQPQPFRPQQLYPQSQPQYSQPQQPISQQQQQQQQQQQKQQQQIPQQQQIPQQPQQIPQQQQIPQQPQQFPQQQFPQQQFPQQQFPQQEFPQQQQFPQQQITQQPQQLPQQQQMPQQPQQFPQQQQFPQQQSPQQQQLSQQQFPQQQQLPQKQFPQPQLIPQQQQ

SEQ ID NO: 8686 - protein, 212 aa, Triticum aestivum
  misc_feature (134)..(134): Xaa can be any naturally occurring amino acid
  misc_feature (148)..(148): Xaa can be any naturally occurring amino acid
  misc_feature (158)..(158): Xaa can be any naturally occurring amino acid
MAPTVMASSATSVAPFQGLKSTAGLPVSRRSNGASLGSVSNGGRIRCMQVWPIEGIKKFETLSYLPPLSTEALLKQVDYLIRSKWVPCLEFSKVGFIFREHNASPGYYDGRYWDNVESLPMFRVEPTPHKVINXVEEVKKEYPDAYVXRIIGFDNMRXVQCVSFIAFKPPGCEGVRQRAKTATHDRPYIKCHLQVLQLLTLLLGFSFLHLIS

SEQ ID NO: 8687 - protein, 416 aa, Escherichia coli
MESKVVVPAQGKKITLQNGKLNVPENPIIPYIEGDGIGVDVTPAMLKVVDAAVEKAYKGERKISWMEIYTGEKSTQVYGQDVWLPAETLDLIREYRVAIKGPLTTPVGGGIRSLNVALRQELDLYICLRPVRYYQGTPSPVKHPELTDMVIFRENSEDIYAGIEWKADSADAEKVIKFLREEMGVKKIRFPEHCGIGIKPCSEEGTKRLVRAAIEYAIANDRDSVTLVHMGNIMKFTEGAFKDWGYQLAREEFGGELIDGGPWLKVKNPNTGKEIVIKDVIADAFLQQILLRPAEYDVIACMNLNGDYISDALAAQVGGIGIAPGANIGDECALFEATHGTAPKYAGQDKVNPGSIILSAEMMLRHMGWTEAADLIVKGMEGAINAKTVTYDFERLMDGAKLLKCSEFGDAIIENM

SEQ ID NO: 8688 - protein, 131 aa, Triticum aestivum
  misc_feature (61)..(61): Xaa can be any naturally occurring amino acid
MAPAVMASSATTVAPFQGLKSTTGLPISRPSGSAGLSNVSNGGRIRCMQVWPIEGIKKFEXTLSYLPPLSKEALLKQVDYLIRSKWVPALSSAKVWASVFRGATTSPRVLTNGRITNVGNFPKVRGTGRQP

SEQ ID NO: 8689 - protein, 243 aa, Lactobacillus gasseri
MKEGELMNNFSQEPERRTIVDVTGLNRFLSRMYGMMTIAVLVSALSAYLTMTVFRTQVMTLFASNPAMTWILLLVPLALTFGISFRATRNPVASFVMLMIMAIVYGVEFSLIAGAYTGRSIASAFVASSTVFITMAVIGTTTKKNLNNLGSYASAALIGLIVAMLINMFLRNPMVSYIFSFIAVIIFTILTAWDAQRMKQIYENYGGQVSVDGLAVAGALALYLDFVNLFLQFLQIFGFSDRN

SEQ ID NO: 8690 - protein, 485 aa, Achromobacter xylosoxidans
MKEIKHFINGAFVGSASGKLFDNVSPANGQVIGRVHEAGRAEVDAAVKAARAALKGPWGKMTVAERAEILHRVADGITARFDEFLEAECLDTGKPKSLASHIDIPRGAANFKVFADLLKNVANETFEMATPDGAGALNYGVRRPKGVIGVISPWNLPLLLMTWKVGPALACGNCVVVKPSEETPLTATLLGEVMQAAGVPAGVYNVVHGFGGDSAGAFLTEHPDVDAYTFTGETGTGETIMRAAAKGVRQVSLELGGKNAGIVFADCDMDKAIEGTLRSAFANCGQVCLGTERVYVERPIFDAFVARLKAGAEALKIGEPNDPEANFGPLISHKHREKVLSYYQQAVDDGATVVTGGGVPEMPAHLAGGAWVQPTIWTGLADDSAVVTEEIFGPCCHIRPFDSEEEAIELANSLPYGLASAIWTENASRAHRVAGQIEAGIVWVNSWFLRDLRTAFGGSKQSGIGREGGVHSLEFYTELKNICVK

SEQ ID NO: 8691 - protein, 263 aa, Triticum aestivum
AAARAGTHAGANAIHDECRKRKLKVSVVAVPKTIDNDIPLMDKTFGFDTAVEEAQRAINSAYIEARSAYHGIGLVKLMGRSSGFIAMHASLSSGQVDVCLIPEVSFALDGEYGVLQHLEQLIKNKGFCVVCVAEAAGQELLQNSGATDASGNTILSDIGVHMQQKIKTHFKGIGVHADIKYIDPTYMVRACRANASDAILCTVLGQNAVHGAFAGFSGITSCICNTHYVYLPVTQVITAPKRVNHKGRMWHRCLTSTGQPDFR

SEQ ID NO: 8692 - protein, 371 aa, Ralstonia metallidurans CH34
MSMTFQMNAGAVRRFAKAMRFGAWLQSITERMTPAPFRLVQIGSAYWQSKALYVAAKLDLATVLGTATLTASALASRVGANEDALGRLMRLLAAMGIFEETAPMVFRNNKLSRCLVSDDPQSVRAMILMHNSETMSRPWFEQLEAGIRSGTPPFQLSHGEDLFDYLDHHADFDQLFSEAMNSVEALAGDGFATDLDWARFDRIIDVGGSRGTKSLAILRRHPRLTALIVDRPQVIEEAQRYWAEHHADGLERLQFQAADLFESLPAAGPKDVYLYSAVLHGFDDPTCVQALLRLREAIGNSGARAAILEIVVPEKGADISSASFDMQMFVGSRGRERTLTEWKAIIQAGGLTLEEVVRLRSLGSILVLRAG

SEQ ID NO: 8693 - protein, 444 aa, Arabidopsis thaliana
MAAETSIRKLPSLSGLRHRRNPLEDNPYFHPSNGFYITPSDVILAQVAYDHSAHSQSRVAYHRAGPRREIMYEPSAVKAAIVTCGGLCPGMNTVIRELVVGLWELYGVREIYGIPAGYRGFYSMKAVKLDPKAVHDWHKKGGTVLATSRGGFHLQKIVDAIHLNGYNQVYIIGGDGTMRGAVEIFKEISLRKLEVGITVIPKTVDNDVGIIDRSFGFQTAVEMAQEAISAAHVEAESAVNGIGLVKLMGRSTGHIALHATLSSRDVDCCLIPEMDFYLEGKGGLFEFLEKRLKERGHAVLVVAEGAGQEMIPRNESQKQERDESGNAVFLDVGVWFKSVLKAWWEREHPDELFTVKYIDPTYMIRAVPANATDNLYCTLLAHSAIHGVMAGYTGFVPGPINGNYAYIPLEEVAQTKNQVNTRDHKWAWVRSVTNQPDFETNVKG

SEQ ID NO: 8694 - protein, 389 aa, Escherichia coli K12
MSDTTILQNSTHVIKPKKSVALSGVPAGNTALCTVGKSGNDLHYRGYDILDLAKHCEFEEVAHLLIHGKLPTRDELAAYKTKLKALRGLPANVRTVLEALPAASHPMDVMRTGVSALGCTLPEKEGHTVSGARDIADKLLASLSSILLYWYHYSHNGERIQPETDDDSIGGHFLHLLHGEKPSQSWEKAMHISLVLYAEHEFNASTFTSRVIAGTGSDMYSAIIGAIGALRGPKHGGANEVSLEIQQRYETPDEAEADIRKRVENKEVVIGFGHPVYTIADPRHQVIKRVAKQLSQEGGSLKMYNIADRLETVMWESKKMFPNLDWFSAVSYNMMGVPTEMFTPLFVIARVTGWAAHIIEQRQDNKIIRPSANYVGPEDRPFVALDKRQ

SEQ ID NO: 8695 - protein, 168 aa, Brassica rapa
FRCVQQGDDENGKTGVSLSKDITDVAGRTVKKHIATLGPLILPLSEKLLFFVTFMGKKLFKDKIKHYYVPDFKLAIDHFCIHAGGRAVIDVLEKNLALAPIDVEASRSTLHRFGNTSSSSIWYELAYIEAKGRMKKGNKVWQIALGSGFKCNSAVWVALNNVKASTNS

SEQ ID NO: 8696 - protein, 339 aa, Populus balsamifera subsp. trichocarpa x Populus deltoides
MPTKEQVGALSKELRDRALVHDYVFKAIDALPVTAHPMTQFATGVMALQVQSEFQKAYEKGIHKSKYWEPTYEDSLSLIARVPIVASYIYRRIYKDGKVIPMNDSLVIGGNFSHMLGFDSPEMQELMRLYVTNHSDHEGGNVSAHTGHLVASALSDPYLSFAAALNGLAGPLHGLANQEVLLWIKSVVEECGENITTEQLKDYVWKTLNSGKVVPGFGHGVLRKTVPRYTCQREFALKHLPDDPLFQLVSKLYEVVPPVLTQLGKVKNPWPNVDAHSGVLLNYYGLTEARYYTVLFGVSRSIGICSQLIWDRALGLPLERPKSVTMELLENHCKKAPAN

SEQ ID NO: 8697 - protein, 168 aa, Brassica oleracea
FRCVQQGDDENGKTGVSLSKDITDVAGRTVKKHIATLGPLILPLSEKLLFSVTFMGKKLFKDKIKHYYVPDFKLAIDHFCIHAGGKAVIDVLEKNLGLAPIDVEASRSTLHRFGNTSSSSIWYELAYIEAKGRMKKGNKVWQIALGSGFKCNSAVWVALNNVKASTNS

SEQ ID NO: 8698 - protein, 442 aa, Sinorhizobium meliloti
MSNRLNTTPNDLSAFWMPFTANRQFKKEPRLFVGAKDMYYTTHDGRTVLDGTAGLWCVNAGHCRPKITEAIREQAGELDYAPAFQLGHPKAFELANRLVDIAPEGMNHVLYTNSGSESVDTALKVALAYHRAKGNGSRFRLIGRERGYHGVNFGGISVGGIVANRKMFGTLLTGVDHLPHTHLPAKNAFSRGEPEHGADLAAELERIVTLHDASTVAAVIVEPVAGSTGVLIPPKGYLQKLREICTKHGILLIFDEVITGYGRLGTPFAAQYFDVKPDIITTAKGLTNGVIPMGAVFVTSEIHDAFMTGPEHLIEFFHGYTYSGNPIASAAALGTLDTYREEGLLTRAAELAPYWEEALHSLKDCPHVIDIRNIGLIGAVELEPIAGEPTKRAFSAFLKAYEKGLLIRTTGDIIALSPPLIIEKRQIDELFDKLRDVLKNNI

SEQ ID NO: 8699 - protein, 160 aa, Thermobifida fusca
MKIYQSELRTLEGEPFRLPQTQLLLIVNVASKCGLTPQYSGLERLQEAYAYRGFSVIGVPCNQFGGQEPGDAQEIRLFCATTYGISFPILEKMEVNGPNRHPLYVELTKARDSQGLAGDVQWNFEKFLVAPGGRVLYRFRPQVEPEDPEIIRAIEENLPN

SEQ ID NO: 8700 - protein, 152 aa, Zea mays
MCRGLPTPAPAPALQFQSQDCSRQQRGTTQAPPGRASESVRACMAAERKAASRPAACGRMRGAEGAKPRGRQAKAARAPPGQGYFTAGLAALFLCLTTLLVFLPLVLPPLPPPPLLLLLVPVGLMAVLLALALVPSDGRAAAAAVASSSCVC

SEQ ID NO: 8701 - protein, 112 aa, Glycine max
MLKILMALLLLSLSFQAYGQFEEWCIADEQTPDDELQRAMEWACGKGGADCSKIQVNQPCYLPNTLKDHASYAFNNYYQRFKNKGGSCYFNSAAITTDLDPSHGSCKYEFVP

SEQ ID NO: 8702 - protein, 286 aa, Populus tomentosa
MALPVVDTEYLKEIEKARRDLRALIAYKNCAPIMLRLAWHDAGTYDKNTKTGGANGSIRNEEECSHGSNNGLKIAIDFCEEVKVKHPKITYADLYQLAGVVAVEVTGGPTIDFVPGRRDSNTCPKEGRLPNAKLGSPHLRDIFYRMGLSDKDIVALSGGHTLGRAHPERSGFDGPWTQEPLKFDNSYFVELLKGQTEGLLKLPTDNALLDDPDFRPYVELYGKDEEAFFRDYAASHKKLSELGFTPRSSVVKVKDSTVLAQSAVGVAVAAAVVILGYLYEVRKKMN

SEQ ID NO: 8703 - protein, 233 aa, Zea mays
SDSDHCHSARYYLKDAVLDGGIPFNKAYGMTAFEYHGTDSRFNRVFNEGMKNHSVIITKKLLDFYTGFEGVSTLVDVGGGVGATLHAITSRHPHISGVNFDLPHVISEAPPFPGVRHVGGDMFASVPAGDAILMKWILHDWSDAHCATLLKNCYDALPENGKVIVVECVLPVNTEATPKAQGVFHVDMIMLAHNPGGKERYEREFRELAKGAGFSGFKATYIYANAWAIEFIK

SEQ ID NO: 8704 - protein, 467 aa, Methanococcus maripaludis S2
MKSENYSKNDLEKWDKEYVWHPFTQMKEYREGKPLLIESGEGIYLIDVDGKKYMDAVSSIWCNFFGHSEKRIADAISKQALNIGHSTQLGCGNVPSAILAKRYVDFSPEQFKKVFFSEDGAEAIEIAVKMAFEYCKLKGFTNKTKFVSVKEGYHGDTVGAMSVGGSELFHGCFEPLLFEGYHASAPYCYRCKYCNFKNTDERNKQGCEMKCLKEMEDLIRTNKDEIFCVILEAGVMGSAGMIPYPKGYIEGVAKICKKLNIILILDEIATFGRLGRAFYSDMDELKELEKPDILCLGKGITGGYLPLALTLATDEIYNAFLGSFDECKQLFHGHTYAGNQIICASAIETLNILEETNICEEIRPNIKLLHENLDKLKEFPCVGDIRKSGYMIGIELVKDKETKEPYEYSYKAGYKVAGRLLEKGIYIRPIGNTLIFVLPLIIKPEEIKLLTEKIYESISELLDEKVL

SEQ ID NO: 8705 - protein, 465 aa, Arabidopsis thaliana
MSFLWDIMPIDKHLSTVPETEGCQQRIETRICALPDDLLLQILPHVPTKEAVATSILSKQWRYVWLMLPKLEFKDEGSESVGWFIKKSLQLHKAPKLDCLIVELGPHCPIDVDVRKWVENAVNRDVKDLDFTLLWSAAPTSFPKSLYTCDTLVCLTLSNQILVDVSSPASLPSLLDLSLHYVVYKDDGSLVRLLSSSPVLKRLSVHSHEDDNLKTFTVKVSSLESLNYDENWLKDEVEDNEVDEVVDNEVEVDDLNGSLVIDSPALKELHLSEVWDYCLIENMSFLDEAFISNVPYPDEKFLRSLSSVKHLFLLFSKSMVACCNAIKFSWLIEFYFFPISLVDWLMPLMFLLQNSPKLKTPTIDNDFECLSLSWNQPSSIPGCLLSHLETFRWRGYGGREDAKKLLMTYILANSKCLKTVEISLLATCNLEETQKELKSMPRISQSSQLLISTKKLWRINERTYL

SEQ ID NO: 8706 - protein, 162 aa, Oryza sativa (japonica cultivar-group)
MVKANVNELHPIQVGLAIRTDDGGGELVVFEFNLCGFDINNPANLRDPASIAHLRGRGVDFGRLPHARIELHRLRSLLLGSGLLQTRPSWATFTGAYHIGYLMKILTGAEVPSGLDAFTAMATATLGEGVYDVKRLAAEVNTASRFSLREIATWLGVVPAVA

SEQ ID NO: 8707 - protein, 490 aa, Glycine max; identical to SEQ ID NO: 233

SEQ ID NO: 8708 - protein, 513 aa, Glycine max
  misc_feature (432)..(432): Xaa can be any naturally occurring amino acid
MIAYLEHFVHGNDTESMPNDDVSALDGAFHFGATAAAGKDFGGMKSVKPRAVIRPALAGDVERAVKEAARTTYLTVAARGNGHSINGQAMAEKGLVLDMRAMEDHFTLLSLDDGSLYVDVSGGALWEDVLKRCVSEFRLAPRSWTDYLGLTVGGTLSNAGVSGQAFRYGPQTANVTELEVVSGKGETLVCSESQNSELFFATLGGLGQFGIITRARVPVQQAPDMVRWIRVVYTEFGDFTRDAEWLVTLREGDGFDYVEGFVFVNSDDPCNGWTTVPVGPNQYFDPVRIPSTAGPVLYCLELALHYRNQDHPSAVDMEVDRLLGRLRFVEGLKFSVDVTYMEFLLRVKRVEEDAKANGIWDAPHPWLNMFVSKSNIAEFDREVFKKILKHGVGGPILVYPLLRSKWDSRHSVVVPDSNIFYIIALLRFIPPXPKGPPTELLVEQNHEIIQLCYNRGFDFKLYLPPYQSKENWMRHYGDKWSRFVERKANFDPLAILAPGQKIFSRIPQPLSIT

SEQ ID NO: 8709 - protein, 475 aa, Oryza sativa (japonica cultivar-group)
MNAAAAAPAPTMNFAAIHSVWHDNFDAESAQLLAVAPRAVHVAVSVQYPGCAVAQAGTSGRKKYGSLTAEKRYDMVKANIDELHPIQVGLAIRANDDDGDSGELVVFEFNLRGFDINNPADLRDPASIAHLRGRGVDFGRLPCAGVEPHRLRLLLLGSGLLQAWPSWATFTGAYHVGYLMKILTGAELPSGLDAFTTMATGTLGEGVYDVKRLAAEVNTACGFSLREIAACIGVVPVAAQHGMVASAGAVSTLQCFKALRERLGQLQGRVRHPTLRRAARPPRRAYINVQYPGCPVPGGEPRPFEQLTAEQRYGVLKANVDALRAIQVGLAIRTGDGGGEAFVFESNLNGFDVGNLDLPRQRDARSIAHLRCEPAASTSPEAAARRRRLATFAVGYHVAYAVKLLTGRDRAPGQLDGFTRLVASIFVRRVYDVKRIAREHEPVHVGALTSLAERLGVFIVYLYDIYIRLGMGCHA

SEQ ID NO: 8710 - protein, 157 aa, Schizosaccharomyces pombe
MAEEEHVDFEGGEAGASLTFPMQCSALRKNGHVVIKGRPCKIVDMSTSKTGKHGHAKVHIVALDIFNGRKYEDMSPSTHNMDVPVVKRDEYQLVNIDDGYLNLMTTDGTTKDDVRLPEGELGNEIEEGFEEGKDLIITVVSAMGEEIALACRDAPSA

SEQ ID NO: 8711 - protein, 262 aa, Bacillus anthracis str. A2012
LVRLGVFKVEEGPELVEAVKSAIKAGYRSIDTAAIYGNEKAVGEGIRAGIEATGISREDLFITSKVWNADQGYEETIAAYEESLKKLELDYLDLYLVHWPVEGKYKDTWRALETLYKEKRVRAIGVSNFQVHHLQDVMKDAEIKPMINQVEYHPRLTQKEVQAFCKEQGIQMEAWSPLMQGQLLDNETLQEIAEKHGKTTAQVILRWDLQNGVITIPKSTKEHRIIANADVFNFELTKEDMEKIDALNQNHRVGPDPDNFDF

SEQ ID NO: 8712 - protein, 375 aa, Pseudomonas syringae pv. syringae B728a
MAEAKVLSGAGLRGQVAGQTALSTVGMAGAGLTYRGYDVRDLAAEARFEEVAYLLLYGELPNQAELSAYMDKLKRLRDLPQALKEVLERIPADTHPMDVMRTGASMLGTLEPERSFDQQRDSTGRLLAAFPAIMCYWYRFSHDGRRIDCTSAEDSIGGHFLHLLLDKAPSELHRKVMDVSLILYAEHEFNASTFTARVCASTLSDLYSCVTAAIGTLRGPLHGGANEAAMEMIQRFASAEEATKGTLGMLERKEKIMGFGHAIYKESDPRNEVIKGWSKKLADEVGDTVLFPVSEAIDKVMWEQKKLFPNADFYHASAYHFMGIPTKLFTPIFVCSRLTGWAAHVFEQRANNRIIRPSAEYIGVEQRAFVPLEQR

SEQ ID NO: 8713 - protein, 1372 aa, Cercospora zeae-maydis
MPTSNGGRTSPASLRSHHVRYASDSNIALRSTIMEQPEGPPELETYDSSGTNSSGNDGDEYAGTQESHSDSDGISSRHFVPGSGQAYAQDEVTPLTNVSTYGWSQPGSSNVSRTTTRGSVGSALPGTPAYEGTGTAMTNGTRRPANTRKESSNIYAPNRGPGSSMRYALNTGTRPRNGFTHMRRRNPNDEYRAQEKAYVQRIRQDGPDNDFQTEPRTPSLDYSFGSEDDEESPTNANYADHDPAEVDTLLYYGQEDLEPSVEELNIPANRERLEWHAMLANVLTGDVVKQEKKRLIGGPEQQGENTLKTEVWIGVRAKTCGRSIAAQKRLVEDGRSKVKQTIESIVAFEIKGEAEVGQSPMQQVQDVVKKIEKIEGLYPPRQAFRAAHPPAASSAYEHTCDAVIAWNNTTELIGTELGILQSWVGNMELDFTTARVRPEGEQHNELFDDSSFIDRILKEDGLKSLQGDKNLLNGVNTVIHKAKATLIANAEAFSDRHLPPYIEELLTLINFPSRLIQEIIRMRLSYAKKMKDAAQQGVMTAEQMILQFQILLQLAVKIKEQYLLIGQPEPGWDLPPCIDDNFDSVVLDALKFYFKMLNWKLMANKNTFKEAEILEQEWDFSNELGRHLDGGDVEVAEQFSSLTSKSMGRLAAPFEKELQRPADEVAGTAEMDKRYKSILDSVRVRQRKIFRFSRILSQRFENATEYNINIDNELYEDFLLALRLSGHFLVETNAESSVPTPGENEKAGGKVYILASPVLKERPKDIQSMLGTCYHAEDSPEDPSNPYVLILRPELPLVWEGDRMDASHSGKETLKVPQTLDLKTGRLRLVADGSLQRLQNANMAFTTATGNFDLTILVEQRANLCRESTKNWQRFAKLHTSSPTHSWTRSPLFALRSKPREGKAKAKNSTHPELLCFCYGIWSAFCHSHGRTTAGGQSHKLTKLALDWVSFICDDCVASDRKTFRWAVVALEFAMVMTRGQNILSISDEEYALLRSKVAGCRSLLISHFDIMGARGTVAAQAEKQRMDAMVGKLRLDIGKLKDDDESSRIVRAQWLDELEKLDQARKDREAERQALGRVLEDSNDADRALTHLSASAGNVHLRWQQGQFVGGGTFGSVYAAINLDSGHLMAVKEIRLQDPKMIPTVVSQIRDEMGVLQVLDHPNVVQYYGIEPHRDKVYIFMEYCSGGSLAGLLEHGRIEDETVVQVYALQLLEGLGYLHEASVVHRDIKPDNILLDHNGVIKFVDFGAAKVIAKQGKTMVADGPTGNGRQRSVQGTPMYMSPEVIKGGKHTGRLGAADIWSLGCVISEMATGSRPWANMDNDFAIMYNIANGNSPQMPTRDQMSDVGLDFLQAMLRTRPCEACVRCGASAT

SEQ ID NO: 8714 - protein, 207 aa, Neurospora crassa
MPCGLGGSKTVQRKLVLLGDGACGKTSLLNVFTRGYFPTVYEPTVFENYVHDIFVDNVHIELSLWDTAGQEEFDRLRSLSYDDTDLIMLCYSVDSKDSLENVESKWQGEIAENCPGVKIVLVALKCDLREATEDEEDGGANEDGAQREKKPMISYDQGLEVARRIKALRYLECSAMRNRGVNEAFTEAARVALSVKKDREESKCVVM

SEQ ID NO: 8715 - protein, 363 aa, Geobacter metallireducens GS-15
MKRKIGILTGGGDCPGLNAVIRGVVKSAIIGRGWEVVGIEDGFDGLLYDRTPRPLGLEDVRGILPRGGTILGTSNRGNPFSYPIEVNGKTVLTDVSDRVVERVKDLGIDAIVAVGGDGSLKIALELMKRGVPVVGVPKTIDNDLMETDVTFGYNTALETATDALDKLHSTAESHHRIMIMEVMGRYAGWIALESGISGGADVILIPEIPFELKAVCNAIEGRRRRGSKFSIVVAAEGAFPRGGTRVVQKKADETMAIERLGGIGNFVAHELTSCLDMDIRVTVLGHLQRGGSPSTFDRCLGSRFGIGAVELIEREQYGEMICLKGRAIRSVPIEKAVRKLKLVDPRGQMVTAAKELGINVGRE

SEQ ID NO: 8716 - protein, 281 aa, Corynebacterium glutamicum ATCC 13032
MNIHLCCCSRLCGRMVATSQFIDDSEAAQAVRAAIVAGYRNIDTALAYGNERGVGEGIRTAGVPREELFISTKLAAEIKDYDGAVAAIDESLAKIGLDYVDLMLIHSPQPWSDFRGGDYSEGNREAWRALEDAYKAGKIRSIGVSNFLEADLENILDSATVAPHVNQLLVHVGNTPSELISFCDSKGILVEAYSPIAHGEMLKNQQVKAIADKYNVSIPQLCIRYTIQLGTVSLPKTANPDHMSSNAQIDFEISEEDMAALQEVTARDYGEHSGFPVYSGK

SEQ ID NO: 8717 - protein, 115 aa, Hordeum vulgare subsp. vulgare
MARAAATQLVLVAMVAAMLLVATDAAISCGQVSSALSPCISYARGNGAKPPVACCSGVKRLAGAAQSTADKQAACKCIKSAAGGLNAGKAAGIPSMCGVSVPYAISASVDCSKIR

SEQ ID NO: 8718 - protein, 344 aa, Zea mays
  misc_feature (298)..(298): Xaa can be any naturally occurring amino acid
MVLESTMICIDNSEWMRNGDYSPSRFQAQADAVNLICGAKTQSNPENTVGVMTMAGKGVRVLVTPTSDLGKILACMHGLEVGAEANLAAAIQVAQLALKHRQNKRQQQRIIVFIGSPVTYDKKVLETIGKKLKKNNVALDVVDFGETDDEKPEKLEALIAAVNSSDSSHIVHVPPGDHALSDVLISTPIFTGEEGGSGFAASAAAAAATGATGYDFGVDPNVDPELALALRLSMEEERARQEAIAKKAAEDNKDQPSSSTDAIMAEAELTLNAPADVDADLLKDDDDAQLLQQALAMXMDEGASGAAAVADAAMAEAAADDQDLALALQMSGQDAEAAGQSDMS

SEQ ID NO: 8719 - protein, 170 aa, Oryza sativa
MAAFLRSKCSSVGRTLMGGLGNNLFGAVNSSVETVSRPSHCDPIFQQIRTFIQMRTNLKVVDNSGAKRVMCIQSLRGKKGARLGDTIIGSVKEAQPRGKVKKGDVVYGVVVRAAMKRGRNDGSEIQFDDNAIVLVNNKGELIGTRVFGPVPHELRKKKHLKILALAEHIV

SEQ ID NO: 8720 - protein, 196 aa, Arabidopsis thaliana
MATALASKLSKGRSLLGGLCNAFSGLMNSSSNGMMNGSILSQQQHRTFIQMGTILKCVDNSCAKEVMCIQSLRGKKGARLGDIIVGSVKEANPIVQKKVKKDAVPKGKVKKGMVVYGVVVRAAMPKGRADGSQVKFDDNAIVVVGIKEKKGQNNSHGSKRKMEYNQPTGTRVFGPVPHEMRLRKQLKILSLAQHIV

SEQ ID NO: 8721 - protein, 309 aa, Candida albicans SC5314
MTSHTHPVKLSRTFKTKSGDELSIGTGTGTKWKKDSKLDEINQELVDQILLAIKLGYRHIDTAEVYNTQAEVGEAIKQSGIPREQLWITTKYNPGWNDIKASSASPQESIDKALKQLGTDYIDLYLIHQPFFTEENTHGYSLIDTWKVLIEAKKQGKIREIGVSNFAIKHLEALKEVSEPEFYPVVNQIESHPFLQDQSKNITKYSQENNILVEAFSPLTPASRLDANPLTEYLEELSKKYNKSLGQLLLRYTLQRGILPITTSAKENRIKESLDVFDFELTKEEFDKITEIGNANPHRVFFHEAFKDL

SEQ ID NO: 8722 - protein, 172 aa, Butyrivibrio fibrisolvens
MESLTTRIKLNNGTAIPMFGYGTYKIKDQNEAYNSVRLALKNGYRHIDTAAFYENEKFVANAIKDFMEESQTKREDIFVTSKAWKTELGYDKTLAAFEKTMNEMQMDYLDLYLVHWPASYAFDDDWENTNRQTWKAMTEIYKSGRVKAIGVSNFLTHHLDTIIDMEVTPAVD

SEQ ID NO: 8723 - protein, 404 aa, Zea mays
MVLEATMICIDNSEWMRNGDYAPSRFQAQADAVNLICGAKTQWVQSNPENTVGVMTMAGKGVRVLVTPTSDLGKILACMHGLEVGAEANLAAAIQVAQLALKHRQNKRQQQRIIAFIGSPVKYDKKILETIGKKLKKNNVALDIVDFGESDDEKPEKLEALIAAVNSSDSSHIVHVPPGENALSDVLLSTPIFTGEEGGSGFAASAAAAVATGASGFEFGVDPNVDPELALALRLSMEEERARQEAIAKKAAEDTSNTENINASSSNSDSVMAEAELASNAAAGDKQEQPKDDDDLLQQALAMSMEGGASGSAAVTDSAMAEAGAVDPDLALALQMSVQDANMSSDADMSKVFEDRTFVSSILNSLPGVDPNDPSVKDLLASLHSQGEQEKKEDKSDKTEDEKN

SEQ ID NO: 8724 - protein, 494 aa, Bacillus cereus G9241
MSQLAVNLHEKVEKFLQGTKKLYVNGFFIESASGKTFNTPNPATGETLAVVSEAGREDIHKAVVAARMAFDEGPWSRMSTAERSRLMYKLADLMEEHKEELAQLETLDNGKPIRETMAADIPLAIEHMRYYAGWATKIVGQTIPVSGDYFNYTRHEAVGVVGQIIPWNFPLLMAMWKMGAALATGCTIVLKPAEQTPLSALYLAELIEEAGFPKGVINIVPGFGESAGQALVNHPLVDKIAFTGSTPVGKQIMRQASETLKRVTLELGGKSPNIILPDADLSRAIPGALSGVMFNQGQVCSAGSRLFVPKKMYDNVMADLVLYSKKLNQGAGLSPETTIGPLVSEEQQKRVMGYIEKGIEEGAEVLCGGSNPFDQGYFVSPTVFADVNDEMTIAKEEIFGPVISAIPFNDIDEVIERANKSQFGLAAGVWTENVKTAHYVASKVRAGTVWVNCYNVFDAASPFGGFKQSGLGREMGSYALNNYTEVKSVWLNLN

SEQ ID NO: 8725 - protein, 192 aa, Zea mays
  misc_feature (92)..(92): Xaa can be any naturally occurring amino acid
HEPTTNPMPPHRAGGAAGGGDTSAFFAATLVLWAVSVGFEIGVRGRRELAPVAAGFAFFQAANTAVRGSVSRDPLFVNTAVSLLHSSLTSVXLHSIFLHVRKVRRMVGFRDFDRTVVKLEWVLNWTTFVTARVICHILITYKLVADAHKFGKGIELPLALLGMAGMNLLNIFLGLDLLKAFTRERNQQNHQD

SEQ ID NO: 8726 - protein, 89 aa, Glycine max
  misc_feature (4)..(4): Xaa can be any naturally occurring amino acid
  misc_feature (14)..(14): Xaa can be any naturally occurring amino acid
  misc_feature (21)..(21): Xaa can be any naturally occurring amino acid
  misc_feature (26)..(26): Xaa can be any naturally occurring amino acid
  misc_feature (28)..(29): Xaa can be any naturally occurring amino acid
  misc_feature (33)..(33): Xaa can be any naturally occurring amino acid
  misc_feature (41)..(41): Xaa can be any naturally occurring amino acid
  misc_feature (46)..(46): Xaa can be any naturally occurring amino acid
  misc_feature (57)..(58): Xaa can be any naturally occurring amino acid
  misc_feature (63)..(63): Xaa can be any naturally occurring amino acid
  misc_feature (66)..(67): Xaa can be any naturally occurring amino acid
  misc_feature (71)..(71): Xaa can be any naturally occurring amino acid
  misc_feature (78)..(78): Xaa can be any naturally occurring amino acid
  misc_feature (80)..(80): Xaa can be any naturally occurring amino acid
ASSXISSPTVTTVXNRADAGXVATIXGXXSMAXFPTRKTNXDITSXASNGGRLQCMXXWPPVXGKXXFETXSYLPDLXDXQLAKEVEYL

SEQ ID NO: 8727 - protein, 341 aa, Mesorhizobium loti MAFF303099
MKAARLYGPGDLRVEDVAPPGIPDPGWVKLRVDAAGICGSDLHNFRTGQWISRSPSTAGHELTGTVTALGEGVDTVAVGDRVVADSRFWCEECVQCRAGRRHLCASLGFVGEVCDGGFAEQVVLPARLLHVVDAALDERVAAMAEPLAVALHAVRRLPKTAGSVLVVGCGPIGGLAALLLSRSFAGTVLVADRNQARCARVARVTGATIVDLDRDAIAAATGYAPLLAAVEATGSIAAFNQLLGVLDSGSAVAMVGIFHGRLDIDPNLLVEREIALLGCHAFADELPDAVRMLGELSEPLLALIDREIGLDDIPAAYERLLAGQSDGLKTIIRMRQPVEPA

SEQ ID NO: 8728 - protein, 174 aa, Zea mays
  misc_feature (127)..(127): Xaa can be any naturally occurring amino acid
MAEAPASPGGGGGSHESGSPRGGGGGGSVREQDRFLPIANISRIMKKAIPANGKIAKDAKETVQECVSEFISFITSEASDKCQREKRKTINGDDLLWAMATLGFEDYIEPLKVYLQKYREMEGDSKXTAKSSDGSIKKDALGHVGASSSAAQGGAYNQGMGYMQPQYHNGDISN

SEQ ID NO: 8729 - protein, 440 aa, Triticum aestivum
  misc_feature (134)..(134): Xaa can be any naturally occurring amino acid
MSTTKVKRRVGKYELGRTIGEGTFAKVRFARNTETGDPVAIKILDKEKLLKHKMVEQIKREIATMKLIKHPNVVRIHEVMGSKTKIYIVLEYVTGGELFDTIVNHGRMREDEARRYFQQLINAVDYCHSRGGVXTRDLKPENLLLDSCGNLKVSDFGLSALSQQLKDDGLLHTTCGTPNYVAPEVLEDQGYDGAMADLWSCGVILFVLLAGYLPFEDSNLMALYKKISDAEFTFPPWTSFPAKRLLTRILDPNPMTRITVQEMLEDEWFKKGYKRAEFDEKYDTTLDDVDAVFNDSEEHHVTEKKEEEPVALNAFELISMSAGLNLGNLFDSEQEFKRETRFTSKSSPKEILRKIEEAAKPLGFDIQKKNYKLRLEKVKAGRKGNLNVATEILRVGPSLHMVEVRKAKGDTLEFHKFYKNLSNTLKDVVWKSDDLQIQPS

SEQ ID NO: 8730 - protein, 371 aa, Methylobacillus flagellatus KT
MLSAHPELKNLFNMGNQANGIQQQSLAAAVFAYAANIDNPAALAPVVKRIVHKHAAVGIKPEHYPIVGQYLIGAIKQVLGEAATDELLAAWGEAYWSLANLLIEEEKSLYASTASTAGALMTLKVARKVFESEHIVSFYLQHPDGRKPGDFLPGQYISVEMQFEQNKRRQLRQYSLSDSSTAPWWRISVKREQEAEKPEGLLSNWLHDEVKVGDLIHATPAFGDFVLDPVISDQPLLLISAGIGITPMLSMLNSVRDLAPQRPVFFAHAARSPAWQSHSLDLQEARYRMTNLQTALFYESLEGAHGSIGGVYQGRMDITDLWPAVLHHADIYLCGPLGFMQAQREQLLQAGVAASHIKREVFGPDLLDHLL

SEQ ID NO: 8731 - protein, 450 aa, Zea mays
  misc_feature (22)..(22): Xaa can be any naturally occurring amino acid
MVGGGGGGPLRRVGKYEVGRTXEGTFAKVKFAQNTETGESVAMKVLDRSSILKNKMAEQIKREISIMKLVRHPNVVRLHEVLASRKKIFIILEFITGGELFDKIIRHGRLSEADARRYFQQLIDGVDFCHKKGVYHRDLKPENLLLDSQGNLKISDFGLSAWPAQGSFLLRTTCGTPNYVAPEVLSHKGYNGALADTWSCGVILYVLLAGYLPFDEVDLTTLYGKIESAEYSFPAWFSGGAKSLIRRILDPNPETRIRIEEIRSDEWFQKNYEPIKEIENEEVNLDDVNAAFDDPEDDNEDAFEDETGPLTLNAFDLIILSQGLNLAALFDRRQDCDKLQNRFLSRNPAKVILSSMEVVAQSMGFKTHIRNYKMRVEGLNADKTSHLSVMVEVFEVAPSIFMVELQRAAGDTSEYNTFVNNYCGKLDDIIWKFPTEKGKSRIPRLSKSHS

SEQ ID NO: 8732 - protein, 570 aa, Zea mays
  misc_feature (120)..(120): Xaa can be any naturally occurring amino acid
  misc_feature (137)..(137): Xaa can be any naturally occurring amino acid
  misc_feature (201)..(201): Xaa can be any naturally occurring amino acid
  misc_feature (238)..(238): Xaa can be any naturally occurring amino acid
  misc_feature (326)..(326): Xaa can be any naturally occurring amino acid
  misc_feature (333)..(333): Xaa can be any naturally occurring amino acid
  misc_feature (343)..(343): Xaa can be any naturally occurring amino acid
  misc_feature (365)..(365): Xaa can be any naturally occurring amino acid
  misc_feature (394)..(394): Xaa can be any naturally occurring amino acid
  misc_feature (492)..(492): Xaa can be any naturally occurring amino acid
  misc_feature (507)..(507): Xaa can be any naturally occurring amino acid
  misc_feature (534)..(534): Xaa can be any naturally occurring amino acid
SRPAGKQKKNEQIHRIARRQSVQATTSALHPVWASASRLVSLHLRGCCSRLPPTNSIPRHGSRRPRSGFSLPCSPPTSVVQGPRRRRGWRGRRYPRRRPGPAPARLAVVDGRTEKRHEVXCSEDGTVRATDFKKITXTGKDDKGLKIYDPGYLNTAPVRSSICYIDGDEGILRYRGYPIEELAESSSFVEVAYLLMYGNLXPTQSQLAGWEFAISQHSAVPQGLLDIIQSMPHDAHPXMGVLASAMSTLSVFHPDANPALQGQDLYKSKQVRDKQIVRVLGKAPTIAAAAYLRLAGRPPVLPLNTLSYSENFLYMLDSLGGGILFXLNPRLAXRTLDILFITXHLKHEMNCSTAAVRHLASSGVXDVFTALSGGVGALYGPLHGGANEAVLKMXNEIGSMENIPDSMVGVKTRKRKISGLGHRVYKNYDPRAKVIRKLADEVFSIVGRDPLIEVAIALEKAALSDEYFIKRKLYPNVDFYSGLIYRAMGIPXNFFPVLFAIPRMGGXLAHWKESLDDPDTKIIRPQQVYTGFWXRHYTPVRERVLSSQSEELGQVATSNATRRRRAGSAL

SEQ ID NO: 8733 - protein, 239 aa, Triticum aestivum
MASLGLPGPSSYHDLCCYGAGIAGNIFAFVLFISPLPTFRRIVRNGSTEQFSATPYIYSLLNCLVCMWYALPFVSYGVVLVATVNTIGAAFQLAYTAVFIAYADAKKRLKVSVLLAGVFCVFGLIVYVSMALFDHKPRRTFVGYLSVASLIFMFASPLSIINLVIRTKSVEYMPFYLSLSMSLMSMSFFAYGALLDDFFIYVPNGIGTVLGVMQLLLYAYYSRKGSRDEARRPLLVTHT

SEQ ID NO: 8734 - protein, 469 aa, Bacillus cereus G9241
MYINGEWITLQEQIEVNNPATKEIFATVPKGGVTEAKQAVDAAHEAFKSWSKLTAADRAVKLKKWFTLIDENKEEIAAIMTREQGKPFAEALGEVNYANSFVEWYAEEGKRVYGEMIPASHPNKRILVMKQPVGVMAAITPWNFPAAMITRKVAPALAAGCTAVVKPASQTPLTALKLAELAHEADIPKGVINIVTGSAKAIADKWMEDGRVRKVSFTGSTEIGKELMASAAQTMKKVSLELGGHAPFIVMNDADLDKAVEAVIGSKFRNAGQTCICTNRVFVQEEVYEAFVEKFQKAVGQLKVGDGFGDGTTVGPLIDENAVSKVQEHIEDAIQKGGTVLYGGQKVAELDGHFIQPTVIGLANDTMLCMNEETFGPVAPVAKFKTVDEVIERANHTPYGLAAYIFTKDISQAFQISEALEYGIIGLNDGLPSVAQAPFGGFKESGIGREGGHFGIEEYLEIKYISLGL

SEQ ID NO: 8735 - protein, 112 aa, Glycine max
  misc_feature (95)..(95): Xaa can be any naturally occurring amino acid
MDVADIASPSGQQEQGHRTVSSEPPKRPAGRTKFHETRHPLYRGVRRRGRVGQWVCEVRVPGIKGSRLWLGTFNTAEMAARAHDAAVLALSGRAXCLNFADSAWRMLPVLAA

SEQ ID NO: 8736 - protein, 343 aa, Triticum aestivum
  misc_feature (134)..(134): Xaa can be any naturally occurring amino acid
  misc_feature (252)..(252): Xaa can be any naturally occurring amino acid
YAAAVVAAVGRVCDRKGVQHPVICSESGRALVSHHSVLIFEAFSATAPASNMMDPATAYLLDELTDDCRSDYRNLMASAVRGDFDTCGLYADQLKRRCAEQFKEGVLGLEHLAAVDGLCEIVARGMGAAEGPRXVHINLSVFTSLPDMWAIEQLFPIIPIQRLQERPAVDGVLSDLTCDSDGKVDQFIGGRSSLPLHELPAHGTRGYYLGMFLGGAYQEALGGLHNLFGGPSVVRVSQSDGPHCFAVTRAAXGPSCADVLRAMQHEPEVMFEVLKQRTADDGATTAALARAFGSMPYLSFDAEEASAMSGAESSGMSSDSEGSAAGAAEDDDEEWEFMRGLTV

SEQ ID NO: 8737 - protein, 216 aa, Schedonorus arundinaceus
MDAAVAASLSLQSGEQEYRTVWSEPPKPRSGRTKFQETRHPVYRGVRRRGRAGQWVCEMRVHGTKGSRLWLGTFDTAEMAARAHDAAALALSGRDACLNFADSAWRMQPVLPAGAGSVCFGGAQEVKDAVAAAVEAFQEEEHHVESTAETAKDEESALSMSSDLSEHDDERWIDGMDAGSYYASLAQGMLVEPPDAGAWREDGEHGGVETSLWSYL

SEQ ID NO: 8738 - protein, 288 aa, Lactobacillus plantarum WCFS1
MTKTPTITLNDGRAIPAIGFGTFQIPDDGSTYQAVKEALVIGYRHIDTAVAYFNEDEVGQAIKDSGIPRDQIWVTSKLWLQDYGFDAASRAIDRSLTKLRLDYIDLYLIHQPYGDVPGAWQAMEAAQKAGKLKSIGVSNMTPTLWQKFVPQFETIPAVNQVEFNPYFQQQPLRQLLAAQDVKLEAWAPLGQGNQALFKEPIIQQLAIKYHKDAGQIILRFEHQEGVIVFPKSVHSARIKSNRDIFDFELTSTEMAQLRALDTGKGHHDPDAPGVSEQLLHAFDVHADD

SEQ ID NO: 8739 - protein, 137 aa, Zea mays
  misc_feature (93)..(93): Xaa can be any naturally occurring amino acid
MTMESPTTAAGGELESYFSLGLTVSHSQKDNAEFPKVLLLLSAYLDKTVQQNEELLDSSKIKESTTIFHGQRVPELSIKLYAERIFKYAKCSXSCFVLALIYMERYLQQPNIYMTSFSVHRLLITSVVVAAKFIDDA

SEQ ID NO: 8740 - protein, 288 aa, Lactobacillus plantarum WCFS1
MMVPTTKLNNGVVMPQLGFGVFQVPDLNECEAAVTAALKAGYRLIDTATAYQNETAVGRAIQKSGLRRDELFVTSKLWVSEFTYERAKQGIDASLQRLGVDYLDLYLLHQPYGDVMGAWRALEEAYHAGKIRAIGVSNFYADQLKNLELTMSVQPAVNQIEVNPWYQQADEVRFNQDEHVRVEAWAPFAEGKHAIFSNPSIQTIAQAHGKTTGQVILRWLLQRGITVIPKSVHPERMAENIAVFDFELTAAEMSAMAELDQGVSQFFDHRDPVTIEQIFGASLRQLHE

SEQ ID NO: 8741 - protein, 166 aa, Zea mays
  misc_feature (44)..(44): Xaa can be any naturally occurring amino acid
  misc_feature (69)..(69): Xaa can be any naturally occurring amino acid
  misc_feature (73)..(73): Xaa can be any naturally occurring amino acid
  misc_feature (81)..(83): Xaa can be any naturally occurring amino acid
  misc_feature (100)..(100): Xaa can be any naturally occurring amino acid
  misc_feature (119)..(119): Xaa can be any naturally occurring amino acid
  misc_feature (136)..(136): Xaa can be any naturally occurring amino acid
  misc_feature (154)..(154): Xaa can be any naturally occurring amino acid
MDRADPARGRLAVLSSHLRGAGAEEATDLERSSISAPAPGPRAXALGVVNGRTVKRHDVKVSEDGTVRXTDFXDDTSWKDXXXLKNYDAGYLSTGPGRSXICYIDGDEGILRYRGYPIXEWLKAGRFGWVDYLLRXGTLPTQNQWEGLGICISXHAAGPQRNGGNK

SEQ ID NO: 8742 - protein, 298 aa, Dechloromonas aromatica RCB
MTQARKKAGETLAVADVVVEVLDARLPQASSNPMIHELRVFRQRPCLKLLNKADLADPEATKAWLAFFDAQPNVKAVAISCKKASDVARIPGLAQKLAPHRNDAVKPLRLMIMGIPNVGKSTLMNALVKKKVAAVGDQPAVTKSQQRIDISNRLTLYDTPGMLWPKIDHPIDGLMLAASHAVGVNAYIDEEVGTWLAEFLLEHYSALLKARYGFATEGMDAVGVIEAIGKKRGCVIKGRGGEIDMERAAAILILDYRSGALGRISLETPELRASRQAELKAAGRLKENPDLATDEGND

SEQ ID NO: 8743 - protein, 173 aa, Arabidopsis thaliana
MAAAFASRLTRGGRSLLGGLNNGGSMNSSNGMMNESILSQQQQRRTFIQMGTVLKVVDNSGAKKVMCIQALKGKKGARLGDTIVASVKEAMPNGKVKKGAVVYGVVVRAAMQRGRVDGSEVRFDDNAVVLVDSKDKNTKTDRQPIGTRVFGPVPHELRKKKHLKILALAQHVA

SEQ ID NO: 8744 - protein, 444 aa, Bacillus subtilis subsp. subtilis str. 168
MSSYLIKPELSSAYPVVSYAKGSYVYDQTGKKYLDGSSGAVTCNIGHGVRDVTEKLKEQLDQVSFAYRSQFTSEPAEQLAALLAQELPGDVNWSFFVNSGSEAIETAMKIAIQYWQEKKQTQKSIFLSRWSSYHGITLGALSLSGFYERRYRFTHLIERYPAISAPHIYRLNHETEEDFVQTAADELDTMIKRIGSQFIAGFVAEPIIGAAGAAITPPPGYYERLSEVCRTHDVLFIADEVMTGLGRTGRMLATEHWDTVPDIAVLGKGLGAGYAPIAAAVVSDSIIETIKQGSGVIMSGHTYSAHPYSAKAALEVLRYVLKHGLIKQSEKKGAVLKKKLDEAASQSGIIGEVRGKGLLLGIEFVADQKTKKVFPPEQAITQLIVSEAKKRGLIVYPSKAGIDSGEGDAVIIAPPFTISDGEMEELISIFSETVAAVEKNLKKD

SEQ ID NO: 8745 - protein, 160 aa, Triticum aestivum
MSDSEEHQFESKADAGASKTYPQQAGTIRKNGYIVIKNRPCKVVEVSTSKTGKHGHAKCHFVAIDIFTGKKLEDIVPSSHNCDVPHVNRTEYQLIDISEDGFVSLLTDNGNTKDDLKLPTDETLLGQIKDGFAEGKDLVVSVMSAMGEEQINALKDIGPK

SEQ ID NO: 8746 - protein, 339 aa, Methanococcus maripaludis S2
MRNTPKICVINGDGIGNEVVPETVRVLNELGDFEFIHAHAGYECFKRCGDAIPENTIEIAKESDCILFGSVTTPKPTELKNKSYRSPILTLRKELDLYANIRPTYNFDNLDFVIIRENTEGLYVKKEYYDEKNEVAIAERIISKFGSSRIVKFAFDYAVQNNRKKVSCIHKANVLRVTDGLFLEVFEEMSKHYEKLGIKSDDYLIDATAMYLIRNPQMFDVLVTTNLFGDILSDEAAGLIGGLGMSPSANIGDKNGLFEPVHGSAPDIAGKGISNPIATILSAAMMLDHLKMNKEAEYIRKAVKKTVECKYLTPDLGGNLKTFEVTEKIIESIRSQMIQ

SEQ ID NO: 8747 - protein, 373 aa, Candida maltosa
MSVKTKTITILPGDHVGTEIVNEAIKVLEAIEAATPYQKIHFDFKHHLIGGAAIDATGVPLPDDALESAKKSDAVLLGAVGGPKWGTGAVRPEQGLLKIRKELNLYANIRPCNFASDSLLELSPLRPEVVKGTNLIIVRELVGGIYFGDREEQEESEDKQTAWDTEKYTVDEVTRITRMAAFMALQHNPPLPIWSLDKANVLASSRLWRRTVDKVISEEFPTLSVQHQLIDSAAMILIQNPTKLNGIIITSNMFGDIISDEASVIPGSLGLLPSASLASLPDTNTAFGLYEPCHGSAPDLPANKVNPIATILSAASMLRLSLDCVKEAEALEEAVKQVLDKGIRTADLRGTSSATEVGDAIVEAVTKILKEKA

SEQ ID NO: 8748 - protein, 143 aa, Brassica napus
TPFRSSEELKLGSPPMDTEGKLPGNFPKGGQGLKKNIFLPLEWSTVPQGPKSLAWVVEALNPPDLRGPFVPGTVWLVVTIPPALKGLPEGFFGTNNQVVVFREGITDHKIPEWLGLLMLSNGHGFQLKLFVLNDKPNLGHTGT

SEQ ID NO: 8749 - protein, 220 aa, Retama raetam
MGKSYPTVSGDYQKAVEKAKKKLRGFIAEKSCAPLILRLAWHSAGTFDVKTKTGGPFGTIKNPAELAHGANNGLDIAVRLLEPIKEQFPILSYADFYQLGGVVAVEITGGPEVPFHPGREDKPEPPPEGRLPDATKGSDHLRDVFGKAMGLSDQDIVALSGGHTIGAAHKERSGFEGPWTSNPLIFDNSYFTELLSGEKEGLLKLPSDTALLSDPVFALC

SEQ ID NO: 8750 - protein, 330 aa, Triticum aestivum
  misc_feature (208)..(208): Xaa can be any naturally occurring amino acid
  misc_feature (241)..(241): Xaa can be any naturally occurring amino acid
  misc_feature (292)..(292): Xaa can be any naturally occurring amino acid
  misc_feature (305)..(305): Xaa can be any naturally occurring amino acid
MGSLDAGAAMEKIRAAGLLRTRGLIGGQWVDAYDGKTIEVQNPATGEVLANVACMGNRETADAITSANTTFYTWSKLTASERSKALRKWHDLLMSHKEELALLMTLEQGKPMKEALGEVNYGASFIEFFAEEAKRVYGDIIPPTLADRRLLVLKQPIGVVGAITPWNFPLAMITRKVGPALACGCTVVVKPSEFTPLTALAAADLALXAGIPAGALNVVMGNAPEIGDELMQSTQVRKIAXTGSTAVGKKLMAGSANTVKKVSLELGGNAPCIVFDDADIDVARKGSLAAQXRTGEQTFVCSTRXLVQKGILQKIRKVFWQSVVQNLKFG

SEQ ID NO: 8751 - protein, 157 aa, Glycine max
MEPMDIVGKSKEDASLPKATMTKIIKEMLPPDVRVARDAQDLLIECCVEFINLVSSESNEVCNREDKRTIAPEHVLKALQVLGFGEYVEEVYAAYEQHKLETMQDSLRGGGKWSNGAEMTEEEALAEQQRMFAEARARMNGGAIASKQPDADQSLDS

SEQ ID NO: 8752 - protein, 92 aa, Glycine max
  misc_feature (38)..(38): Xaa can be any naturally occurring amino acid
MSLSSIARRLCCSRQSSTSRLSVVLARLHSTEAAKDTXAKRYKYPEVYDPYGPMPPASEKVVGLADRIAALPPEEIKQIAPALLLRLNQPAP

SEQ ID NO: 8753 - protein, 319 aa, Ralstonia solanacearum
MTQLDQLKQFTTVVADTGDFQAMRAYAPHDATTNPSLILKAVQKAEYRPLLEQAVRDARSDSVEDIIDAVLVAFGCEILSIIPGRVSTEVDARLSFDTAATVAKARHLIALYEARGVPRERVLIKIASTWEGIRAADQLRAEGIRCNMTLLFSLIQAVACAEAGVQLISPFVGRIYDWYKKDAGAAWDPIAQGGANDPGVQSVVRIYNYYKRFGYTTEVMGASFRNTSQIIELAGCDLLTISPELLAQLQQSDAPVERKLSPEHAHATNLVRLPADEAAFRWHMNADAMATEKLAEGIRLFAADAVKLEGLIGPLRAAA

SEQ ID NO: 8754 - protein, 294 aa, Saccharomyces cerevisiae
TTPLVHVASVEKGRSYEDFQKVYNAIALKLREDDEYDNYIGYGPVLVRLAWHTSGTWDKHDNTGGSYGGTYRFKKEFNDPSNAGLQNGFKFLEPIHKEFPWISSGDLFSLGGVTAVQEMQGPKIPWRCGRVDTPEDTTPDNGRLPDADKDADYVRTFFQRLNMNDREVVALMGAHALGKTHLKNSGYEGPWGAANNVFTNEFYLNLLNEDWKLEKNDANNEQWDSKSGYMMLPTDYSLIQDPKYLSIVKEYANDQDKFFKDFSKAFEKLLEDGITFPKDAPSPFIFKTLEEQGL

SEQ ID NO: 8755 - protein, 105 aa, Zea mays
AVDKAQPNPRLCFLLRAALHLHWLLLVTSKNNKALQMSVQDANMSSDTDMSKVFEDRTFVSSILNSLPGVDPNDPSVKDLLASLHSQGEQEKKEDTSDKTEDEKN

SEQ ID NO: 8756 - protein, 121 aa, Glycine max
  misc_feature (6)..(6): Xaa can be any naturally occurring amino acid
  misc_feature (75)..(75): Xaa can be any naturally occurring amino acid
  misc_feature (106)..(106): Xaa can be any naturally occurring amino acid
  misc_feature (117)..(117): Xaa can be any naturally occurring amino acid
KPIDIXGKAKEDASLPKATITKIIKEILPPNIHITRDTQDLLIKYYIKFINLISSESNKVYNKEEKRTITPKHIXRTVKILKFSEYIREGDTAYEQHKVKTMQHSXKDAEKNNRPEXTEEE

SEQ ID NO: 8757 - protein, 323 aa, Aspergillus nidulans FGSC A4
MADQDVDLDSIIDRLLEVRGSRPGKQVQLLESEIRYLCTKAREIFISQPILLELEAPIKICGDIHGQYYDLLRLFEYGGFPPEANYLFLGDYVDRGKQSLETICLLLAYKIKYPENFFVLRGNHECASINRIYGFYDECKRRYNIKLWKTFTDCFNCLPIAAIIDEKIFTMHGGLSPDLNSMEQIRRVMRPTDIPDCGLLCDLLWSDPDKDITGWSENDRGVSFTFGPDVVSRFLQKHDMDLICRAHQVVEDGYEFFSKRQLVTLFSAPNYCGEFDNAGAMMSVDESLLCSFQILKPAEKKQKYVYGAMSSGRPITPPRKQKK

SEQ ID NO: 8758 - protein, 216 aa, Daucus carota
MAAPPARPRADYDYLIKLLLIGDSGVGKSCLLLRFSDGSFTTSFITTIGIDFKIRTIEMDGKRIKLQIWDTAGQERFRTITTAYYRGAMGILLVYDVTDESSFNNIRNWIRNIEQHASDNVNKILVGNKADMDESKRAVPTSKGQALADEYGIKFFEASAKTNMNVEEVFFSIAKDIKQRLAETDSKTEPQTIKINQQEQGAGTSAASQKSACCGS

SEQ ID NO: 8759 - protein, 168 aa, Avena clauda
VMASSATSVAPFQGLKSTAGLPVSRRSASSLGSVSNGGRIRCMQVWPTEGIKKFETLSYLPPLSEEALLKQIDFLIRSKWVPCLEFSKVGFIFREHGSTPGYYDGRYWTMWKLPMFGCTDASQVIKEVEEVKKEYPDAYVRIIGFDNIRQVQCVSFIAFKPPGCEESG

SEQ ID NO: 8760 - protein, 459 aa, Mesorhizobium loti MAFF303099
MLNQSNELNAWDRDHFFHPSTHMGTHARGESPTRIMAGGEGVTVWDNNGRKSIDAFAGLYCVNVGYGRQKIADAIATQAKNLAYYHAYVGHGTEASITLAKMIIDRAPKGMSRVYFGLSGSDANETNIKLIWYYNNVLGRPEKKKIISRWRGYHGSGVMTGSLTGLDLFHNAFDLPRAPVLHTEAPYYFRRTDRSMSEEQFSQHCADKLEEMILAEGPETIAAFIGEPILGTGGIVPPPAGYWEKIQAVLKKYDVLLVADEVVTGFGRLGTMFGSDHYGIKPDLITIAKGLTSAYAPLSGVIVADRVWQVLVQGSDKLGSLGHGWTYSAHPICVAAGVANLELIDEMDLVTNAGETGAYFRAELAKAVGGHKNVGEVRGDGMLAAVEFVADKDDRVFFDASQKIGPQVATALAASGVIGRAMPQGDILGFAPPLCLTREQADIVVSKTADAVKSVFANL

SEQ ID NO: 8761 - protein, 362 aa, Zygosaccharomyces bailii
MSKNIVVLPGDHVGQEIAQEAIKVLEAISEVSPKAKFNFQHHLIGGSAIDATGSPLPDEALAAAKKADAVLLGAVGGPKWGTGAVRPEQGLLKIRKELQLYANLRPCNFASESLLELSPLKPQHARGTDFIVVRELVGGIYFGQRKEDDGDGVAWDSERYTKPEVQRITRMAAFLALQHNPPLPIWSLDKANVLASSRLWRKTVEETIKNEFPQLTVKHQLIDSAAMILIKNPTQLNGIIITSNMFEDIISDEASVIPGSLGLLPSASLASLPDTNEAFGLYEPCHGSAPDLPKGKVNPVAMILSAAMMLKLSLNMAKEGEALETAVKQVLDSGVRTGDLGGSNSTSEVGDAIAKAVKQILA

SEQ ID NO: 8762 - protein, 168 aa, Avena clauda
VMASSATSVAPFQGLKSTAGLPVSRRSASSLGSVSNGGRIRCMQVWPIEGIKKFETLSYLPPLSEEALLKQIDFLIRSKWVPCLEFSKVGFIFREHGSTPGYYDGRYWTMWKLPMFGCTDASQVIKEVEEVKKEYPDAYVRIIGFDNIRQVQCVSFIAFKPPGCEESG

SEQ ID NO: 8763 - protein, 497 aa, Mesorhizobium loti MAFF303099
MSAHFARSHRHEALDRLADRRLLRELAYVDGHWTASEAAESFEVTDPATGSTVAFVAALDARQTTQAIDAAALAFPAWRSLLPQERSRILRKWFELIITAKDDLALLMTLEQGKPLQESLGEIDYAASFVEWYAEEAKRLNAESVTSHLANAEMMVRREPLGVVGIVTPWNFPSAMLTRKAAAALAAGCTIVAHPSSETPLSALALAELGERAGLPAGVFNIVTGKAATIVGRMCEDTRVRAMSFTGSTEIGRLIAAQSAPTMKRLVMELGGHAPLIVFADADLDKAVSIAIDAKFATSGQDCLAANRIYVQRPIHDRFCAAFAKRIEALRTGNGLDDMTDIGPLLHERAVQKVEEQVADALAHGARCLAGGKRHQAGPLFYQPTLLADVSDAALIMREETFGPVAAVTPFDSEDEVIARANATEYGLVAYVVTDNGARQQRMGRALDYGMVAINRVKITGAPIPFGGVKQSGIGREGSRHGLEAFTDLKYLCLDVA

SEQ ID NO: 8764 - protein, 121 aa, Prunus persica
VEACKNSLKKLQLDYLDLYLVHYPLATKHSGVGTTASLLDENKVLDIDVTVSLETTWHDMEKTVSLGLVRSIGLSNYELFLTRDCLSYAKIKPQVSQFETHPYFQRESLVRFCKKHGVVPM

SEQ ID NO: 8765 - protein, 44 aa, Triticum aestivum
MDTAVSTLTALAIFASTVEHAAYRSVHGYRVVGRKRGGWVRWER

SEQ ID NO: 8766 - protein, 243 aa, Aegilops tauschii
MKTLLILTILAMAITIGTANMQVDPSSQVQWPQQQPVPQPHQPFSQQPQQTFPQPQQTFPHQPQQQFPQPQQPQQQFLQPQQPFPQQPQQPYPQQPQQPFPQTQQPQQLFPQSQQPQQQFSQPQQQFPQPQQPQQSFPQQQPPFIQPSLQQQVNPCKNFLLQQCKPVSLVSSLWSMIWPQSDCQVMRQQCCQQLAQIPQQLQCAAIHTVIHSIIMQQEQQEQQQGMHILLPLYQQQQVGQGTL

SEQ ID NO: 8767 - protein, 168 aa, Avena maroccana
VMASSATSVAPFQGLKSTAGLPVSRRSNAGLGSVSNGGRIRCMQVWPIEGIKKFETLSYLPPLSEEALLKQIDFLIRSKWVPCLEFSKVGFIFREHGSTPGYYDGRYWTMWKLPMFGCTDASQVIKEVEEVKKEYPDAYVRIIGFDNIRQVQCVSFIAFKPPGCEESG

SEQ ID NO: 8768 - protein, 243 aa, Aegilops tauschii
MKTLLILTILAMAITIGTANMQVDPSGQVQWPQQQPVPQPHQPFSQQPQQTFPQPQQTFPHQPQQQFPQPQQPQQQFLQPQQPFPQQQQQPYPQQPQQPFPQTQQPQQLFPQSQQPQQQFPQPQQQFPQAQQPQQSFPQQQPPFIQPSLQQQVNPCKNFLLQQCKPVSLVSSLWSMIWPQSDCQVMRQQCCQQLAQIPQQLQCAAIHTVIHSIIMQQEQQEQQQGMPILLPLYQQQQVGQGTL

SEQ ID NO: 8769 - protein, 207 aa, Daucus carota
MERADQQARGFQGYRKIHQQQQLPASGTASTGTDNNPAAGDQDCLVREQDRFMPIANVIRLMRKSIPSHAKISDDAKELVQESVSEFISFVTSEANYRCQKEQRKTITAEDVLWAMSSLGFDDYVEPLTFYLDRFREADGGERSALRGEPLVRRSGEHGAPGIPPTFAPGYYMGPHNALLGAVTMGSFVNDVHNAGPSGAGVNTLDP

SEQ ID NO: 8770 - protein, 199 aa, Aegilops tauschii
PQPHQPFSQQPQQTFPQPQQTFPHQPQQQFPQPQQPQQQFLQPQQPQQPYPQEPQQPFPQTQQPQQLFPQSQQPQQQFPQPQQQFPQPQQPQQSFPQQQPPFIQPSLQQQVNPCKNFLLQQCKPVSLVSSLWSMIWPQSDCQVMRQQCCQQLAQIPQQLQCAAIHTVIHSIIMQQEQQQGMHILLPLYQQQQVGQGTLV

SEQ ID NO: 8771 - protein, 200 aa, Triticum aestivum
DIMEQEVGVLLSRLRYIQSTLFHTHVTYLEFLDRVHSSELKLRAQGLWEVPHPWLNLLIPRSTIHRFATEVFGNILKDSNNGPILLYPVNRSKWDNRTSVVIPEEEIFYLVGFLSSAPSASGHGSVDHAVSLNDKILDFCDKAGVGMKQYLAPYTTQQQWKAHFGARWETFERRKHMYDPLAILAPGQRIFAKASLPMSS

SEQ ID NO: 8772 - protein, 304 aa, Glycine max
  misc_feature (211)..(211): Xaa can be any naturally occurring amino acid
MALNYNIALAFSTVLTLLLLPLPTLGELVQEQPLVLKYHNGQLLKGRITVNLIWYGTFTPIQRSIIVDFINSLSSAPNAPLPSTATWWKTTEKYKGGGSSALVVGKQFLHSAYSLGKNLKGKDVLALASKFNELKSITVVLTAKDVAVEGFCMSRCGTHGSTRNVKNAARTAYIWVGNSETQCPGQCAWPFHQPIYGPQTPPLVAPNGDVXGVDGMVINLATLLAGTVTNPFNNGYFQGPPTAPLEAVSACTGVFGSGSYPGYPGRVLVDKATGASYNAHGANGRRYLVPAMWDPQTSTCKTLV

SEQ ID NO: 8773 - protein, 222 aa, Zea mays
  misc_feature (103)..(103): Xaa can be any naturally occurring amino acid
MDWAYYGSGYSTPASGGGGGDEDAYMTVSSAPPKRRAGRTKFKETRHPVYKGVRSRNPGRWVCEVREPHGRQRIWLGTFETAEMAARAHDVAALALRGRAACXNFADWARKLRVRAQGAGHDEIRRAAVEAAELFRPQPGERNVGGSEAAAEAAAAAPCAMGSGDLGGGEFPYYPVDDGLEFEMRGYLDMAQGMLIDPPQPAAGQSAWIEDEYECEVSLWSY

SEQ ID NO: 8774 - protein, 476 aa, Lycopersicon esculentum
FYNFSKKLQGMAKTNGFMGHDMLAPFTAAWMIDMGPLVIDKAEGSYVYDVNGKKYLDSLSGLWCSVLGGSEPRLIEAANKQLNKLAFYHSFWNRTTKPSLDLAKELINMFTANKMGKVFFTSSGSEANDTQVKLVWYYNNAIGRPNKKKIISRKNAYHGSTYMTAGLSGLPSLHLKFDLPPPYILHTDCPHYWNYHLPGETEEEYSTRLANNLENLILKEGPETVAAFIAEPVMGGAGVIIPPATYFEKIQAVLKKYDILFIADEVICGFGRLGTMFGCDKYNIKPDLVSIAKALSGGYIPIGAVLVSEEISKVIMSQSNQLGVFCHGFTYSGHPVACAVALEALKIYKEKNITEVVNKLSPKFQEGLKAFIDSPIIGEIRGTGLVLSTEFVDNKSPNDPFPPEWGVGTYFGSQCQKHGMLVSFSGDHVNMAPPFTLSLEELDEMISIYGKALKDTEKKKKKKKKKKKKKKKKKKK

SEQ ID NO: 8775 - protein, 166 aa, Burkholderia cepacia R1808
MWLTGVSGAGKSTLASLLKLQLDALGHRTYLLDGDTLREGLNRDLGFSDADRRENIRRTAEVARLMTDAGFIVIAALISPFADARAQARARFAPGTFVEVFVDVALEVAEARDPKGLYVLARRGTIQQFTGIGSPYEQPESPEVHVRTAEASPDACVAEIMRQLPL

SEQ ID NO: 8776 - protein, 401 aa, Triticum aestivum
MVLESTMICIDNSEWMRNGDYSPSRFQAQADAVNLICGAKTQSNPENTVGVMTMAGKGVRVLVTPTSDLGKILACMHGLEVGAEANLAAAIQVAQLALKHRQNKRQQQRIIVFIGSPVTYDKKVLETIGKKLKKNNVALDVVDFGETDDEKPEKLEALIAAVNSSDSSHIVHVPPGDHALSDVLISTPIFTGEEGGSGFAASAAAAAATGATGYDFGVDPNVDPELALALRLSMEEERARQEAIAKKAAEDNKDQASSSTDAIMAEAELTLNAPADVDADLLKDDDDAQLLQQALAMSMDEGASGAAAVADAAMAEAAADDQDLALALQMSVQDAEVAGQSDMSKVFEDRSFVTSILNSLPGVDPNDPSVKDLLASLHGQGEQEEKKDKEDKPDKPEDGKN

SEQ ID NO: 8777 - protein, 378 aa, Sulfolobus tokodaii str. 7
MSVEVSRGLENVIIKTTGLTYIDGINGILRYRGYDINDLVNYASYEELIHLMLYGELPNRQQLNQIKGIINESFEVPEQVISTIFSMPRNCDAIGMMETAFGILASIYDPKWNRATNKELAVQIIAKTATITANIYRAKEGLKPKIPEPSESYAESFLAATFGKKPTQEEIKAMDASLILYTDHEVPASTTAALVASSTLSDMYSCIVAALAALKGPLHGGAAEEAFKQFVEIGSVENADKWFEEKIIKGKSRLMGFGHRVYKTYDPRAKIFKTLAKSFAEKNENVKKYYEIAERIEKLGVDTFGSKHIYPNTDFYSGIVFYALGFPIYMFTSLFALSRVLGWLAHIIEYVEEQHRLIRPRALYIGPEKREFKPIELR

SEQ ID NO: 8778 - protein, 140 aa, Zea mays
  misc_feature (37)..(37): Xaa can be any naturally occurring amino acid
  misc_feature (64)..(64): Xaa can be any naturally occurring amino acid
  misc_feature (80)..(80): Xaa can be any naturally occurring amino acid
SLPKESDASARRTRRGSGTSLSGRPPRTCGSDFSYRXLVESRHQRVAECRSRLARLILEQALHXVAGGLLLLLTMTNVAXENLLVELSMDAGFLAMELIQLRRMRTMSELLRFYTSLTSIAVCIHHVTCIMRSRVVTCRI

SEQ ID NO: 8779 - protein, 286 aa, Leuconostoc mesenteroides subsp. mesenteroides ATCC 8293
MSLVDTYKLTNGIEIPIIGFGTWQSANGTEAYQSVRWALEAGYRHIDTAAVYGNEDSVGRAIKDSGIPRDELFVTTKLWNDAHTYERAIQALDTSLSKLGLDYVDLYLIHWPNPAALQKQGKDAWIDANADTWRALEDEYKIGKTTAIGVSNFQIEHLEALAKTQTIAPMVNQNFLNPSDNQQELVDYDKDHGMLNEAYSPLGTGKLVDLPQVVSLSEKYNKSVPQILIRWSLDKGFLPLPKSTHETYIKANADVFDFALTSAEIESLDSLTGVGGFHTDASSADF

SEQ ID NO: 8780 - protein, 196 aa, Triticum aestivum
MEGGDARNGLTGTSQTTGSGVESPAKPLPPCCVKARAAAPESEAKCHATVVSGWFTETRSRCGKASKLQYYNNPMWPGETHSLKVDKILYQGKSPYQEVLIFESLTYGKVLVLDGIVQLTDKDECAYQEMITHLPLCSIPSPKKVLVIGGGDGGVLREIARHGSVESIDICEIDQLVIDVCKDFFPDLSVGFEDPR

SEQ ID NO: 8781 - protein, 130 aa, Glycine max
MAYGRSRASSVLDGFTLNPLPYPVLLILSLIFIFLGVSWYFSYEEVVETAEQQLGWLLFCTPVVLILIVRWLSSMENPYWFFSASLPGERRGRTHQGLSEGSSPWGVAALILVLLIMVQYQSNFLDSWFV

SEQ ID NO: 8782 - protein, 497 aa, Geobacillus thermoleovorans
MTMISAQTTEADLWIDGEWRPAASGERFDVIDPATGEVTARVANAGEDDVDAAVAIAEEAFSVRRWLAISPLERGRILRRIAELIRQHHCELAQLMTRENGMPINLALFIEIPLADCFDFFASLVVKPQGEVLPFSVAGSAPDYMAWTMKEPIGVAGLITPWNFPLLMPTWKIAPALAAGCTMVVKPAPETPLTALKLAEICHEAGVPEGVINVLPGLDEAGKALVRHPRVPKIAFTGETETGRHILQAAAPHIKRVTLELGGKSPNIIFADADLEQAAKSALFGVFYNSGQVCQAGSRILVERTVYEPFVERLAERAKKLKVGPGTNPRSDLGPVISREQYEKVLRYIEIGKQEGARLAAGGRALDGGGGGYFIEPTVFADVSPSMRIACEEIFGPVAAVIPFADEEEAVRIANGTMYGLAAAVWTNDIKRALRLARRVKSGTVWLNTYQVLSPTVPFGGYKQSGLGRELGMQALDAYLETKTVICDLNDRPMTLF

SEQ ID NO: 8783 - protein, 48 aa, Zea mays
IAIILAIILPPLGVFLKFGCGVGFWICLILTFLGYFPGLIYAAWAITK

SEQ ID NO: 8784 - protein, 129 aa, Brassica napus
EVGLDNGKVYKHGKCWEDICYAVSEAHHMIYIVGWSVFHKVRLVREPTRKLPRGGDLTLGELLKYKSEEGVRVLLLVWDDKTSHDKFGISTPGVMGTHDEETRKFFKHSSVICVLSPRYASSKLGLFKT

SEQ ID NO: 8785 - protein, 142 aa, Thermotoga maritima
MLLGRREDIFRPFRELQREIDRLFDDFFRTEVRPAPDMDVFETDDEVVIEVEIPGIDRKDVQITVEENILKISGEKKLEREQKGKNYYYVERSAGKFERAIRLPDYVDVEKIKAEYKNGVLTIRVPKKEERKKKVIEVEVQE

SEQ ID NO: 8786 - protein, 141 aa, Brassica napus
MGEAVEIMFGNGFPEIHKDTSPIQTLLSNQQDCHWYEETIDDDLKWSFALNSVLHTGTSEYQEIALLDTKHFGKVLVIDGKMQSAERDEFIYHECLIHPALLFHPNPKTVFIMGGGEGSAAREILKHKTIEKVVMCDIDQE

SEQ ID NO: 8787 - protein, 159 aa, Zea mays
MADLFQEVFNPTNMDGAMKSMTSTGAGNYGRIMQMEKYWHVEFFSIAESTVIQVVLLVAVGDLKGTTVQIMSRSLEGKLTVCSCMFQEKGNDATISNASADGTMDESRTRRTIIFSPKICNNVDLLVGNIIHIFPPWKEVKIQEEHVIICTYFSHHHRT

SEQ ID NO: 8788 - protein, 203 aa, Glycine max
  misc_feature (146)..(146): Xaa can be any naturally occurring amino acid
  misc_feature (154)..(154): Xaa can be any naturally occurring amino acid
  misc_feature (172)..(172): Xaa can be any naturally occurring amino acid
MLTAGEYSNHSRPLQPETSLAELNLPRVLCVLSSMLEKLVARNEKLVDILSQQLDGLNCGSVRLGNSLNTFHGVRAPSISIPKYLERIYKYTNCSPSCFVVGYVYIDRLTHRHPDSLVTSLNVHRLLVTSVMVASKMLDDEHYNNXIYARVGGXVSNAELNKLELELLFPVXIFRVMVSSRVFESYCFHLEKEVGCQWHGHED

SEQ ID NO: 8789 - protein, 484 aa, Erwinia carotovora subsp. atroseptica SCRI1043
MSGNHLQDHELFKTGYFVAGKWQQGAATFEVVNPATGESIARVAKAGKKETQAAIDAAHAAFPAWKRKTAKERSEILYRWYELILENKRYLAELMTAEQGKPVQEAEGEVVYAANFIQWFAEQGKRVNGEIIPPAKPGSKIYATREPVGVVVAITPWNFPLAMLTRKLGPALAAGCTGVIKPANNTPLSAFALLALAQQAGVPDGVLNGVAGDTQAISDTVMASDKVRKISFTGSTAVGKTLVRNAADTMKKVSMELGGNAPYIVFDDADIQAAVKGAIANRFRNAGQVCVSANRFYIQDGVYDEFVSLLAEEVKKLKVGNGMDDGVVLGPLIDEAAVEKVEKHVNDAVEKGGKALVGGKRHKLGHSFFEPTVIVDANEAMLLAQEETFGPVAPCFRFKTEEEVIQRANNTPFGLAAYFYSQNLQRVFRVAEALESGMIGINECAVSTELAPFGGVKESGLGREGSVLGLDEFLEVKTWHVGGL

SEQ ID NO: 8790 - protein, 281 aa, Zea mays
  misc_feature (103)..(103): Xaa can be any naturally occurring amino acid
  misc_feature (128)..(128): Xaa can be any naturally occurring amino acid
MEAMPRPSVAPSLQLQARPCPRWPRRKHCPPSSVASRRVACSASAADADVVDLFDAAKLTVDKFVTSGMVVGLGSGPASALAIQYLATRLRRGSLAGITAVTXPRSVLSASEADKAGIRANSYQEGTXIDFAFTDAEAIEEGTLAAVIGRRKTESGEPSFMAEKAMAKSAHKLAFITGNDKYVTTGVEGSIPVLIKKVWRRPSFGTAGPLGGDHPLVTKEGHHVLDVIFTTPIQDLGQVAEKLDKVDGVVDHGIICSNQPYAVIASKGEVQVLDEKSSVIQ

SEQ ID NO: 8791 - protein, 290 aa, Triticum aestivum
NKFVQKSRLVPVRNSRDIVDPRVRTGSTKVGQMVQQQVSARFGKCLLELSGNNAIIVMDDADIPLAVRSVLFAAVGTAGQRCTTCRRLLLHESIYQTFLDQLVEVYKQVRIGDPMEKGTLLGPLHTTASKESFLKGIQNIRSQGGKILLGGSAIESEGNFVQPTIVEISPAAPVVREELFGPVLYAMKFQTLKEAIEINNSVPQGLSSSIFTRKPDAIFKWIGPHGSDCGIVNVNIPTNGAEIGGAFGGEKATGGGREAGSDSWKQYMRRATCTINYGSELPLAQGINFG

SEQ ID NO: 8792 - protein, 166 aa, Triticum aestivum
RIMKKALPANAKISKDAKETVQECVSEFISFITGEASDKCPHENRPRVRPRVLLWAMTTLGFEDYVDPLKHYLHKFREIEGERAAATSTSTSTTPDMPRNNNNNATGYADAPGGMMMMGQPMYGSPPPPQQQQQHQHQIAMGGRAGFPYLGGGGGSSSSSGFGRKE

SEQ ID NO: 8793 - protein, 163 aa, Triticum aestivum
VPDCWGIQQLFPMMPVSRLHERPTNMATLIDLTCDSDGKVEKFIRGAQTLPLHPLDPKLGGYYVGVLLSGAYQEALSSKHNLFGGPSIVRVDESGGIVTADLGATTEELISTMRYDVNQDILDVIHERAEEHGVWKMVGEIVKAGLTTMPYLIEYQVPLPGTA

SEQ ID NO: 8794 - protein, 474 aa, Shigella flexneri 2a str. 301
MQHKLLINGERVSGEGEKQPVYNPATGDVLLEIAEVSAEQVDAAVRAADAAFAEWGQTTPKARAECLLKLADVIEENGQVFAELESRNCGKPLHSAFNDEIPAIVDVFRFFAGAARCLNGLAAGEYLEGHTSMIRRDPLGVVASIAPWNYPLMMAAWKLAPALAAGNCVVLKPSEITPLTALKLAELAKDIFPAGVINILFGRGKTVGDPLTGHPKVRMVSLTGSIATGEHIISHTASSIKRTHMELGGKAPVIVFDDADIEAVVEGVRTFGYYNAGQDCTAACRIYAQKGIYDTLVEKLGAAVATLKSGAPDDESTELGPLSSLAHLERVSKAVEEAKATGHIKVITGGEKRKGNGYYYAPTLLAGALQDDAIVQKEVFGPVVSVTPFDNEEQVVNWANDSQYGLASSVWTKDVGRAHRVSARLQYGCTWVNTHFMLVSEMPHGGQKLSGYGKDMSLYGLEDYTVVRHVMVKH

SEQ ID NO: 8795 - protein, 126 aa, Nostoc punctiforme PCC 73102
MYEIMFQNHPEVKEQFSMAAQADGSQPARLATAVYSYANQIDNLPALKSMVEKIAHRHVQTHVTPEQYPIVGESLLQAMKDVLGEAATEEVMAAWTEAYQALSEVFIHREHDIYVGEDKKAQLLHS

SEQ ID NO: 8796 - protein, 319 aa, Aspergillus nidulans FGSC A4
MSPPTVKLNSGYDMPLVGFGLWKVNNDTCADQVYEAIKAGYRLFDGACDYGNEVEAGQGVARAIKEGIVKRSDLFIVSKLWNSFHDGERVEPIARKQLSDWGIDYFDLYIVHFPVSLKYVDPEVRYPPGWENAEGKVELGKATIQETWTAMESLVDKGLARSIGISNFSAQLLLDLLRYARIRPATLQIEHHPYLTQERLVTFAQREGIAVTAYSSFGPLSFLELSVKQAEGAPPLFEHPVIKDIAEKHGKTPAQVLLRWATQRGIAVIPKSNNPARLLQNLDVVGFDLEDGELKAISDLDKGLRFNDPPNYGLPITIF

SEQ ID NO: 8797 - protein, 490 aa, Oryza sativa (japonica cultivar-group)
MEKLLEEFPIDFPGRMKMIQDNATNEEDKTYMVATSKADYVLRIALQMVNSKSKRNSNPLLPQDSSTPVNLQRQHRVAGHNNGLVIMQPHHKQASDGMVMTKDGHMLDQGSSINTRNGSIDRISNLPNELLYAIMSTLPALELVYTGMLSTRWRHLWTSSAYLNIDVNQFGRHRGQKFCNFVNRMLRQRGSSLLDALRLHSADTRDAGSWITYAIKRSSKVVEFSEDIDCEPFKLDYGVVDFTSICLKFLVLNNVCIDANVFYPINSSCPALENLELRDCSLEVPEISSGSLLHLDIDNCCLFEDLLISSSSLMSLCIKNPQHRAPMIMTLPCLEVAIVILDEFFHSTDDLADMDEGEEQDGEEINHGIVSGLTKARSIELIAPLREDKFEMEIWTSPMFDNLISLTLGEWCMSNEFSPLLHFLWYSPLLEDLTLKLNMEVCEYCLQEPPTAPPLVKEFTADYLKKITIYFWLGDERGAKNYKVMKRMEH

SEQ ID NO: 8798 - protein, 204 aa, Aegilops tauschii
PQPHQPFSQQPQQTFPQPQQTFPHQPQQQFPQPQQPQQQFLQPQQPFPQQPQQPYPQEPQQPFPQTQQPQQLFPQSQQPQQQFPQPQQQFPQPQQPQQSFPQQQPPFIQPSLQQQVNPCKNFLLQQCKPVSLVSSLWSMIWPQSDCQVMRQQCCQQLAQIPQQLQCAAIHTVIHSIIMQQEQQQGMHILLPLYQQQQVGQGTLV

SEQ ID NO: 8799 - protein, 121 aa, Pediococcus pentosaceus ATCC 25745
MALDKDQFIEDLKGASITDLNDLVKAIEDEFGVSAAAPVAAAGAAGGAAEAKTSFNVELTSGGSAKIKVIKAVREITGAGLKDAKDMVDNAPSVIKEDVSEDEANELKAKLEEAGATVEVK

SEQ ID NO: 8800 - protein, 116 aa, Brassica napus
MEQCLRKRDVVREDRISSLPEPLILQILSLLPTKLVIATSVLSKRWRSVWKKVPILQFESKGNIQKFSENVSMSLLSHKSPVLETLHLKVNDRCEDVYIGIWAGIAVTRHVRELEL

SEQ ID NO: 8801 - protein, 448 aa, Burkholderia cepacia R18194
MSTPATDDWVARSLRAVWHPCTQMKHHERLPLIPVARGAGLWLYDRDGRRYFDAISSWWVNLFGHANPDINAALKDQLDTLEHAMLAGCTHEPAIELAERLHTLTARTLGHAFFASDGASAVEIALKMSFHAWRNRGRANKQEFVCVANSYHGETIGALGVTDVALFKDAYDPLIRHAHVVASPDARGALAGETAADVAGRALADVRRLFVERGDRIAALIVEPLVQCAAGMAMHDPSYVRGLRALCDEFGVHLIADEIAVGCGRTGTFFACEQAGVWPDFMCLSKGISGGYLPLSLVLTRDDVFNAFYDDDTTRGFLHSHSYTGNPLACRAAVATLDLFERDDVIAANARKSATLRAALAPLDAHPQVRHLRERGTLFAFDVALDGDGARGFSRRFFERALERELLLRPIGTTVYLMPPYVMSDDDIAWLAQSTRDTLDATLEDITR

SEQ ID NO: 8802 - protein, 206 aa, Aegilops tauschii
PQPHQPFSQQPQQTFPQPQQAFPHQPQQQFPQPQQPQQQFLQPQQPFPQQPQQPYPQQPQQPFPQTQQPQQLFPQSQQPQQQFPQPQQQFLQAQQPQQSFPQQQPPFIQPSLQQQVNPCKNFLLQQCKPVSLVSSLWSMIWPQSDCQVMRQQCCQQLAQIPQQLQCAAIHTVIHSIIMQQEQQEQQQGMPILLPLYQQQQVGQGTL

SEQ ID NO: 8803 - protein, 106 aa, Triticum aestivum
MSGVWVFKNGVVRLVENPGSERTSTVRRKALLHTPSGQVVSSYATLEAKLTALGWERYYEDPALYQFHKRGCLALISLPRDFNHFSSVHMYDVVIKNRESFRVVDA

SEQ ID NO: 8804 - protein, 268 aa, Burkholderia cepacia R1808
MSKIPAFGLGTFRLQGQVVIDSVRNGLELGYRAIDTAQIYGNEAEVGAAIAASGVRREDLFVTTKIWVDNYAPDKLAASLEDSLRKLRTDYVDLTLIHWPAPDNGVSVDAFMTALADAKSKGLTREIGVSNFNIALTKEAIAAVGSDAIATNQIELSPYLQNRKLVEFLQSERIHVTSYMTLAYGKVLGDPVLDAIARRHRATPAQVALAWALQLGYSVIPSSTKREHLASNLLAQTLRLTDEDLAQIATLERNGREVDPAGLAPQWD

SEQ ID NO: 8805 - protein, 203 aa, Aegilops tauschii
PQPHQPFSQQPQQTFPQPQQTFPHQPQQQFPQPQQPQQQFLQPQQPFPQQPQQPYPQEPQQPFPQTQQPQQLFPQSQQPQQQFPQPQQQFPQPQQPQQSFPQQQPPFIQPSLQQQVNPCKNFLLQQCKPVSLVSSLWSMIWPQSDCQVMRQQCCQQLAQIPQQLQCAAIHTVIHSIIMQQEQQQGMHILLPLYQQQQVGQGTL

SEQ ID NO: 8806 - protein, 230 aa, Zea mays
  misc_feature (205)..(205): Xaa can be any naturally occurring amino acid
MLRSSFRLLYMTRTNLLVRASPSSLSRLPSKFTSAKPLVSSHHQIPLSTTGAKLSRSEHSMAASSEPKSIYDFTVKDAKGNDVDLSTYKGKVLLIVNVASQCGLTNSNYTELAQLYQKYKDHGFEILAFPCNQFGNQEPGSNEEIVQFACTRFKAEYPIFDKVDVNGDSAAPIYKFLKSSKGGLFGDGIKWNFAKFLVDKDGNVXDRYAPTTSPLSIEKDLKKLFGSYCR

SEQ ID NO: 8807 - protein, 508 aa, Phleum pratense
SSCEVALSYYPTPLAKEDFLRCLVKEIPPRLLYAKSSPAYPSVLGQTIRNSRWSSPDNVKPIYIVTPTNASHIQSAVVCGRRHGVRIRVRSGGHDYEGLSYRSLQPEEFAVVDLSKMRAVWVDGKARTAWVDSGAQLGELYYAIHKASPVLAFPAGVCPTIGVGGNFAGGGFGMLLRKYGIAAENVIDVKLVDANGTLHDKKSMGDDHFWAVRGGGGESFGIVVAWKVRLLPVPPTVTVFKIPKKASEGAVDIINRWQVVAPQLPDDLMIRVIAQGPTATFEAMYLGTCQTLTPMMSSKFPELGMNASHCNEMSWIQSIPFVHLGHRDNIEDDLLNRNNTFKPFAEYKSDYVYEPFPKEVWEQIFSTWLLKPGAGIMIFDPYGATISATPEWATPFPHRKGVLFNIQYVNYWFAPGAGAAPLSWSKEIYNYMEPYVSKNPRQAYANYRDIDLGRNEVVNDVSTFSSGLVWGQKYFKGNFQRLAITKGKVDPTDYFRNEQSIPPLIQKY

SEQ ID NO: 8808 - protein, 389 aa, Salmonella typhimurium
MTDTTILQNNTHVIKPKKSVALSGVPAGNTALCTVGKSGNDLHYRGYDILDLAEHCEFEEVAHLLIHGKLPTRDELNAYKSKLKALRGLPANVRTVLEALPAASHPMDVMRTGVSALGCTLPEKEGHTVSGARDIADKLLASLNSILLYWYHYSHNGERIQPETDDDSIGGHFLHLLHGEKPTQSWEKAMHISLVLYAEHEFNASTFTSRVIAGTGSDVYSAIIGAIGALRGPKHGGANEVSLEIQQRYETPDEAEADIRKRVENKEVVIGFGHPVYTIADPRHQVIKRVAKQLSEEGGSLKMYHIADRLETVMWETKKMFPNLDWFSAVSYNMMGVPTEMFTPLFVIARVTGWAAHIIEQRQDNKIIRPSANYTGPEDRPFVSIDDRC

SEQ ID NO: 8809 - protein, 508 aa, Phleum pratense
SSCQVAFSYFPPPAAKEDFLGCLVKEIPPRLLYAKSSPAYPSVLGQTIRNSRWSSPDNVKPLYIITPTNVSHIQSAVVCGRRHSVRIRVRSGGHDYEGLSYRSLQPETFAVVDLNKMRAVWVDGKARTAWVDSGAQLGELYYAIYKASPTLAFPAGVCPTIGVGGNFAGGGFGMLLRKYGIAAENVIDVKLVDANGKLHDKKSMGDDHFWAVRGGGGESFGIVVAWQVKLLPVPPTVTIFKISKTVSEGAVDIINKWQVVAPQLPADLMIRIIAQGPKATFEAMYLGTCKTLTPLMSSKFPELGMNPSHCNEMSWIQSIPFVHLGHRDALEDDLLNRNNSFKPFAEYKSDYVYQPFPKTVWEQILNTWLVKPGAGIMIFDPYGATISATPESATPFPHRKGVLFNIQYVNYWFAPGAAAAPLSWSKDIYNYMEPYVSKNPRQAYANYRDIDLGRNEVVNDVSTYASGKVWGQKYFKGNFERLAITKGKVDPTDYFRNEQSIPPLIKKY

SEQ ID NO: 8810 - protein, 201 aa, Aegilops tauschii
PHQPFSQQPQQTFPQPQQTFPHQPQQQFPQPQQPQQQFLQPQQPFPQQPQQPYPQQPQQPFPQTQQPQQLFPQSQQPQQQFSQPQQQFPQPQQPQQSFPQQQPPFIQPSLQQQVNPCKNFLLQQCKPVSLVSSLWSMIWPQSDCQVMRQQCCQQLAQIPQQLQCAAIHTVIHSIIMQQEQQEQQQGMHILLPLYQQQQVGQ

SEQ ID NO: 8811 - protein, 455 aa, Arabidopsis thaliana
MKNSERFSAAKPLMEQGGKSSRKPGFMSEDRISELPEVLLLQILSSLPTKLVISTSVLSKRWLSLWKMVQRLEFESSRNIYDFAENVTRSLLSHKAPVLESLHLKVGDQFDGVYVGVWATIAFTRHVREFVLDLSSYHGPRVRFPTSLFCFDTLETLKLDYVYIYVPCPVSMKSLRTLHLLSVVYKGDESGHNLFASCPNLEHLVLRRGFFFDAVVNFIIDAPSLKTLLLSDPFSARESSRGYVIKAPSLKYLGIESVEGFEYFLIENVTELVEANIRNVSKIVNENILGSLKSAKRLSLDLSPLKITYPTEVMYHQLVYLEMHTHKVEWWNLLTHMLDSSPKLQVLKLIDRETRHENLEFDKKYKDQGKWNQPKYVPECLETFMWRNCNWGREEEKEVATYILRNARQLKKATFSTDPIEAKRLCKLAKRRKMREELDGVVMTSNSCHLVFEFE

SEQ ID NO: 8812 - protein, 348 aa, Agrobacterium tumefaciens str. C58
MQTRVARLYSREDIRVETQDVAPPGPGEVLLAMAAGGICGSDLHYYQDGGFGPVRVREPIICGHEASGHIAALGAGVSGLAIGQLVAVNPSQPCGHCQFCLKGQPIHCLDMRFMGSAMRLPHEQGMFRDRLVVPAKQCATFSDATSPAEAACTEPLAVCLHAVAQAGDLAGAKVLVTGAGPIGLLTIAAARQAGAGIIVATDLTDAALERAPAMGADRTINVAKDADALLPYQDNKGYFDVIFDCSAAGPALRSAFACVRPRGTIVQVGVTGDVTIPLNALVGKEIVWRGSQRFHDEFAIAAGLISSRKIDVRPIISHSFPLGDAKAAFEQAGDRSAACKVQLTFSAD

SEQ ID NO: 8813 - protein, 129 aa, Triticum aestivum
  misc_feature (22)..(22): Xaa can be any naturally occurring amino acid
  misc_feature (92)..(92): Xaa can be any naturally occurring amino acid
  misc_feature (115)..(115): Xaa can be any naturally occurring amino acid
MAPTVMAFTATTISLLGGLKAXAGLPFSLLSNGSLFRVSNGGRIRCMQVWPIEGIKKFETLSYLPPLSTEALLKQVDYLIRSKWVPCLEFRXVSFIFREHNNSPGYYYGRYWTMXNLPMFGCTYSIQVL

SEQ ID NO: 8814 - protein, 75 aa, Brassica napus
MPSKCEILCEILIAILLPPLGVCLTRGCCTVEFLACLILTILGYVPGIIYALYVIVFQNQEEYFDEARRPLYYSA

SEQ ID NO: 8815 - protein, 503 aa, Erwinia sp. Ejp 556
MLIFFIIHFKRITRKAMIGAMLSHGATDAGFPLILVFDKAVMMKNVSSAVAVSRNPATGEVFARYPFATIAEVDSALALTNGAFQYWRHSAMSDRVQLLRNVAGALRQQARELAEMMTSEMGKPVDQGLAEVEKSARLCEWYAEQGPAFLQREPTLVEGNKAFVDYLPLGPVLSVMPWNFPVWQVLRGAVPILLAGNSYLLKPAPNVMGCALLLQQILSRVGVPEGLFAVVNADNDGVAQAINDRRIAAVTVTGSVRAGAAIAALSGAAIKKCVLELGGSDAFIVLADADIDAAVKGAIAGRFMNNGQLCISAKRIIVEAPVFDAFRDKFVSAVKEMKIGDPRESGTWIGPMARYDLRDELDSQVQATLKEGATLLLGGHVLPGEGNYYAPTVLSDVKPGMTSFAQELFGPVASLIQADNAEHAVVMANDSEFGLGGSLWSRDLAVAQKLASRIETGGVFINSPSFSDPRVPIGGVKKSGFGRELSHFGLREFTNTQTVWMEE

SEQ ID NO: 8816 - protein, 431 aa, Thermoanaerobacter tengcongensis MB4
MRIVIKNGIVIDGFGGEEKADILINYGIIKGIDKNIDVSDAIVIDAEGKYVLPGFVDMHTHLRQPGFEEKETIRTGTESAAAGGFTTVACMPNTNPPIDSEVVVEYVKAVAQREGVVKVLPIGAMTKGMKGEEITEMAKLKKAGVVALSDDGFPIMSAGIMKRVMTYGKMYDLLMITHCEDKTLSGEGVMNSGIIATMLGLKGIPREAEEVMLARNIILAKATGAKLHIAHVSTKGSVELIRRAKEEGVSITAEVTPHHLTRTDEAVYNYDTNTKVFPPLRTREDVEALIEGLKDGTIDAIATDHAPHTKDDKKVPYDMAPFGISGLETAFSVINTFLIQTGIITMKALVNYMSMNPARILGISNGIRVGATADIVIVNPHEEYTVDKEKFKSKGKNTPYHGMKLKGVVEYTIVEGQIRYQKNKKFEKVEI

SEQ ID NO: 8817 - protein, 482 aa, Salmonella typhimurium LT2
MQLNDSTLFRQQAFIDGDWRDARGGDVIPVSNPANGKPLGNVPKMGAEETRDAINAANRALPAWRALTAKERANILRRWFNLMMEHQDDLARLMTLEQGKPLAEAKGEISYAASFIEWFAEEGKRIYGDTIPGHQADKRLLVIKQPIGVTAAITPWNFPSAMITRKAGPALAAGCTMVLKPASQTPFSALALAELAQRAGIPAGVFNVVTGSAGDIGGELTSNPLVRKLSFTGSTEIGRQLMEQCAKDIKKVSLELGGNAPFIVFDDADLDKAVEGALASKFRNAGQTCVCANRLYVQDGVYDRFAEKLNQAVNKLAVGDGLQADVAIGPLIDEKAVAKVQEHIADALEKGARVITGGEAHKLGGNFFQPTILADVPDNAKVAKEETFGPLAPLFRFSDEADVIRQANDTEFGLAAYFYARDLSRVFRVGEALEYGIVGINTGIISNEVAPFGGIKASGLGREGSKYGIEDYLEIKYMCIGL

SEQ ID NO: 8818 - protein, 172 aa, Arabidopsis thaliana
MAAAFASRLTRGGRSLLGGLNNGGSMNSSNGMMNESILSQQQRRTFIQMGTVLKVVDNSGAKKVMCIQALKGKKGARLGDTIVASVKEAMPNGKVKKGAVVYGVVVRAAMQRGRVDGSEVRFDDNAVVLVDSKDKNTKTDRQPIGTRVFGPVPHELRKKKHLKILALAQHVA

SEQ ID NO: 8819 - protein, 48 aa, Triticum aestivum
  misc_feature (17)..(17): Xaa can be any naturally occurring amino acid
  misc_feature (36)..(36): Xaa can be any naturally occurring amino acid
  misc_feature (40)..(40): Xaa can be any naturally occurring amino acid
DDLKLPTDDVLLGQIKXGFADGKDLILSVMSAMGEXQICXVKEIGGGK

SEQ ID NO: 8820 - protein, 428 aa, Chloroflexus aurantiacus
MTRNTLTVTDNRTGKTYEIPIENNTIRATDLRQIKVSEDDFGLMSYDPAYLNTASCKSSITYIDGDKGILEYRGYPIEQLAEQSSYLEVAYLLLYGELPSKERLAWWEYRISRHLFLHNSLVELIQAFRYDAHPMGILISSVAAMSTLYPEAKNIHDPAVREKQIWRIIGQIPTIAAFAYRHRIGRPFNLPDSSLSYTANLLYMMDYMNQREYEVNPVLAKALDVLFILHADHEQNCSTSVMRSVGSSHADPYNALAAAAAALYGPLHGGANEAVLRMLQQIGHPKNVPAFIERVKKGEMRLMGFGHRVYKNYDPRAKIIRKIAHEVFAATAANPLLDVAMELERTALEDEYFISRKLYPNVDFYSGLIYQALRFPIEYFPFLFAIPRASGWLAQWIEMLEDPEQKITRPRQVYVGPQRRDYVPIDQR

SEQ ID NO: 8821 - protein, 341 aa, Sporothrix schenckii
MDNYQKLEKVGEGTYGVVYKARDLTAGGRIVALKKIRLEAEDEGVPSTAIREISLLKEMRDPNIVRLYNIVHAEGHKLYLVFEFLDLDLKKYMDSLPVSDGGRGKALPEGTGTRLHTLGLGDDIIKKFMSQLCAGIRYCHSHRILHRDLKPQNLLINKEGNLKLADFGLARAFGVPLRTYTHEVVTLWYRAPEILLGGHQYSTGVDMWSVGCIFAEMAMRKPLFPGDSEIDEIFKIFRLLGTPTEDVWPGVTTYPDFKASFPRWVQDTETPICPTLDPMGQELLELMLVYDPASRLSAKQACNHPYFDDLEKALPGTAAAAARQHTTTAAAGGAYNGSGYH

SEQ ID NO: 8822 - protein, 278 aa, Oryza sativa (japonica cultivar-group)
MPPPPHRGGGGGRDTSAFFAATLVLWAVSVGFEIGARGRRELAPVAAGFAFFQAASAAVRAAVSRDPLFVNTAVSLLHSSLTSASVIFVLVNRWHNKDLKNMFEHEELFGGSWVGAYSALCFSCGYFAYDQLDMLRYRLYSGRIPGILMHHLILLICFTLALYRNVTINYLILTLVCELHSVFLHIRKLRRMAGFRDYNRKIVKLEWVLNWTTFVSARVACHILITYKLIIDAHKFDSGIELPLALFGMAGMNLLNIFLGLDLLKAYTLERNQQTHQD

SEQ ID NO: 8823 - protein, 207 aa, Aegilops tauschii
PQPHQPFSQQPQQTFPQPQQAFPHQPQQQFPQPQQPQQQFLQPQQPFPQQPQQPYPQQPQQPFPQTQQPQQLFPQSQQPQQQFPQPQQQFLQAQQPQQSFPQQQPPFIQPSLQQQVNPCKNFLLQQCKPVSLVSSLWSMIWPQSDCQVMRQQCCQQLAQIPQQLQCAAIHTVIHSIIMQQEQQEQQQGMPILLPLYQQQQVGQGTLV

SEQ ID NO: 8824 - protein, 380 aa, Caulobacter crescentus CB15
MSSRLSPRLSPGTRRDDTDLECVRTTKKQGKTMASDAAQKTILKLILSLPSPILRAMSGGGVVYKGGRTLDPRFQFFANAAKKLPPMTSLSPAEAVAGSAKGLAAVQGPLETGVRTESLSVEGPNGSIPCRAYRPPQTDAKAPLIVYAHMGGGVIGDLETCHAFCSILSRICSTTVISVDYRLAPDHKFPAGLEDVLAAYRWARDNTARFGAAPVPPAIGGDSMGGNFSAIIAQEMKRTGEPQPTLQILIYPAVDVASETASMTTYADAYPLTRATMDWFMGHYIGADADPADPRLSPDKTADLTGLAPAVVATAGFDPLVDQGEGYAKRLQAAGVPVSYRCYDSLAHGFTAFTGAIPAADDACREIAWLVREAFEKRTL

SEQ ID NO: 8825 - protein, 425 aa, Bacillus cereus ATCC 14579
MKNERIEKLQESWELDERWEGITRPYSAEDVIRLRGSIDIEHTLARRGAEKLWTSLHTEDYINALGALTGNQAMQQVKAGLKAIYLSGWQVAADANLSGHMYPDQSLYPANSVPAVVKRINQTLQRADQIQHMEGSDDTDYFVPIVADAEAGFGGQLNVFELMKGMIEAGASGVHFEDQLSSEKKCGHLGGKVLLPTQTAVRNLISARLAADVMGVPTIIVARTDADAADLITSDIDPVDKAFITGERTPEGFYRTNAGLDQAIARGLAYAPYADLVWCETSEPNLEDAKRFADAIHKEHPGKLLAYNCSPSFNWKQKLDEKAIASFQKEIASYGYKFQFVTLAGFHSLNYGMFELARGYKERGMAAYSELQQAEFAAEKHGYSATRHQREVGTGYFDEVAQVITGGTSSTTALKGSTEEAQFTK

SEQ ID NO: 8826 - protein, 207 aa, Aegilops tauschii
PQPHQPFSQQPQQTFPQPQQTFPHQPQQQFPQPQQPQQQFLQPQQPFPQQPQQPYPQQPQQPFPQTQQPQQLFPQSQQPQQQFSQPQQQFPQPQQPQQSFPQQQPPFIQPSLQQQVNPCKNFLLQQCKPVSLVSSLWSMIWPQSDCQVMRQQCCQQLAQIPQQLQCAAIHTVIHSIIMQQEQQEQQQGMHILLPLYQQQQVGQGTLV

SEQ ID NO: 8827 - protein, 485 aa, Bacillus halodurans C-125
MEAIYTRQFLAGEWIEGASTQTITNYNPYTGEKIHEIKGASLDDLDQAYRAAKNAQKEWEQTLPAQKQEVLEKAAALLAERKDEVIERLVNEAGSSIIKASIEWGATLQTIKVAATFPLRMEGKILPSNIPGKENRIYRSAKGVIGVISPFNFPLVLAMRSVAPALATGNAVVLKCSSDAPITSGLLIAELFEEAGLPKGVLNVVVGKAAEIGDAFVTHPIPKLISFTGSTEVGRHIAQLAARELKETALELGGNNVMIVLDDADIEKAAEKAAVGKFLHQGQICMALNRIIVDASIYDSFVEVFKEKVSQLQTGNPAEPATLIGPLINYKQIGRIQQLVKESVAQGAVKVLEGHVQGNLMSPTILSEVTNDMPVAKEEIFGPIAPIIKAKDEAEAIAIANDSPYGLSGSIFTGSLHRGVQVAKQIDTGMIHVNDQPVNEEAHISFGGEKDSGIGRFGGEWVLDKFTTVKWISIQEKERVYPFWG

SEQ ID NO: 8828 - protein, 156 aa, Triticum aestivum
  misc_feature (76)..(76): Xaa can be any naturally occurring amino acid
  misc_feature (113)..(113): Xaa can be any naturally occurring amino acid
  misc_feature (122)..(122): Xaa can be any naturally occurring amino acid
  misc_feature (126)..(126): Xaa can be any naturally occurring amino acid
  misc_feature (128)..(128): Xaa can be any naturally occurring amino acid
  misc_feature (134)..(134): Xaa can be any naturally occurring amino acid
  misc_feature (136)..(138): Xaa can be any naturally occurring amino acid
TSVAPFQGLKSTAGLPVSRRSNGASLGSVSNGGRIRCMQVWPIEGIKKFETLSYLPPLSTEALLKQVDYLIRSKWXCLASSQQVGFIFREHNASPGYYDGRYWTMWKLPMFGXTDATQVINXVEEXKXEYPDAXVXXXGKFREMVKILHGVARSGG

SEQ ID NO: 8829 - protein, 1046 aa, Oryza sativa (japonica cultivar-group)
MEGGNHGGGGYPYPPPQQYPYPYGQYPYQYPPPQQQPPPPSAYLSPSRSFHGYPSAPPPQPQPQPYAHHSAPLQPYPPPPQHHAYPPPQPHPPSPYVYDPYHAPAAAYPSYPSPNPSPSISPSSSFHHHPEPPSPSPSAPSYPSIADGLANMHVSDRHDYPPPPSPAAVPAASSPSVLPPSASFPGGGSSHGGGGMQMVPYGPPAGGSQHGGMQMVAYGSPAGGSQHGSVRPSLKVVLLHGTLDVWVYDARNLPNKDLFSKRVGDLLGPRLIGAVGSKMSSANMTSDPYVTIQVSYATVARTYVVPNNENPVWTQNFLVPVGHDAAEVEFVVKDNDVFGAQLIGTVSIPAEKLLFGERINGIYDVLESNGKPCAQGAVLRLSIQYIPVAQLKMYHHGVIAGPDSLGVPNTYFPMRRGNRVTLYQDAHVPDGCLPDFCLDHGMRYQHGQCWRDIYDAICQARRLIYIVGWSVFHTIHLIREGVEKMPSLGELLKMKSQEGVRVLLLVWDDPTSRSILGIKTDGFMGTRDEETRRFFKHSSVQVLLCPRSAGKRHSWVKQQETGTIFTHHQKTVILDADAGNHKRKIIAFVGGLDLCGGRYDTPSHPLFRSLQTVHKEDYYNPNFATVDARGPREPWHDLHSKIDGPAAYDVLQNFQERWLKASKRHGIKKLGKSYDDALLSIERIPDFISINDAIYFSDNDPETWHVQVFRSIDSNSAKGFPKDPREATRKNLVCGKNVLIDMSIHTAYVNAIRGAQHFIYIENQYFIGSSFNWDSNKDIGANNLIPIEIALKIANKIKAKERFSAYIVIPMWPEGNPTGAPTQRILYWQHKTMQMMYETIYRALKEEGLDDLYEPQDYLNFFCLGNREVADSPSTSNSTSTPQEQARKHRRFMVYVHSKGMIVDDEYVIIGSANINQRSMEGIRDTEIAMGAYQPQYTWASKVSAPRGQIYGYRMSLWAEHIGVVEEGFNYPETMECMRRVRQIGEQNWERFVDNEVTEMRGHLMKYPVSVDRKGKVKPLPGCTSFPDMGGNICGSFRAIQENLTI

SEQ ID NO: 8830 - protein, 325 aa, Triticum aestivum
  misc_feature (135)..(135): Xaa can be any naturally occurring amino acid
MEAETAAKRARESEGAAAADGAGEQAGISAVIPGWFSEISPMWPGEAHSLKVEKVLFQGKSDYQNVLVFQSSTYGKVLVLDGVIQVTERDECAYQEMITHLPLCSIKDPKKVLVIGGGDGGVLREVSRHSSVEQXIDICEIDKMVVDVSKQFFPRLALGFEDPRVSLHIGDGVAFLKNAPEGTYDAVIVDSSDPVGPAQELFEKPFFESVSRALRPGGVVCTQAESIWLHMHIIEDIVTNCRQVFKGSVNYAWTTVPTYPSGVIGFMLCSTEGPSVDFQHPVFSIEEDEYSTKSKGPLKFYNSEFHTASFCLPSFARRVIEAKAN

SEQ ID NO: 8831 - protein, 140 aa, Triticum aestivum
  misc_feature (125)..(125): Xaa can be any naturally occurring amino acid
MAPTVMASSATSVAPFQGLKSTAGLPVSRRSNGASLGSVSNGGRIRCMQVWPIEGIKKFETLSYLPPLSTEALLKQVDYLIRSKWVPCLEFSKVGFIFREHNASPGYYDGRYWTMWKLPMFGCNXPTQVINEVEESRRIT

SEQ ID NO: 8832 - protein, 495 aa, Oryza sativa (japonica cultivar-group)
MATAGALALVAICSYLAVTSNKQKRRRRPPVVGTVFHQLYNVRRIHDYHTALSREHTTFRMLVPAGGDQIYTCDPAVVEHILKTNFANYGKGPFNHGNAKDLFGDGIFAIDGEKWKQQRKIASYDFSTRALRDFSCAVFKRNAAKLAGIVSNHAASNQSMDFQGLMLRATMDSIFTIAFGTDLNTLDGSGEGSRFAAAFDDASEFTMLRYISPLWKLARLLNVGVEAMLKERIKVVDEFVYRLIRARSDELSNSHDSGSRQDILSRFLQATTSDSVVDYKYLRDIILNIVIAGKDTTAGALAWFLYMVCKHPEVQEKICHEAMVATSAGDTASVDEFLQSLTDQALNNMHYLHAALTETLRLYPSVPMENKQCFSDDVLPNGFNVSKGDIVFFIPYAMGRMESLWGKDAEYFRPERWLDENGVFQQESPFKFTAFQAGPRICLGKEFAYRQMKIFAAVLLRFFVLKLRDEKEIVSYRTTLTLAIDQGLHLTATAR

SEQ ID NO: 8833 - protein, 231 aa, Aegilops searsii
SLPQQPFSQQPQQTFPQPLQTFPHQPQQQFPQPQQPQQQFLQPQQPFHQQPQQPYPQQPQQPFPQTQQPQQLFPQSQQPQQPYPQQPQQPFPQTQQPQQQFPQSQQPQQPFPQPQQPQQSFPQQQPPFIQPSLQQQLNPCKNLLLQQCRPVSLVSSLWSMIWPQSDCQVMRQQCCQQLAQIPQQLQCAAIHSVVHSIIMQQEQQQQQQQQQQQQGLRIPLPLYQQQQVGQG

SEQ ID NO: 8834 - protein, 206 aa, Zea mays
MAGDEEDHLADAPRVVGALSALLERVVERNDAVADELAAGTESAAPPSAFRATARPGISVRSYMARIARFAGCSPACYVVAYVYLDRLLRRARSAPAVDSYSVHRLLITAVLAAVKFMDDICYNNAYFAKVGGISLVEMNYLEVDFLFGVGFDLNVAPETFGDYCAVLRSELLCAEAAPAPLRLQHCCLSEDDAGAGCSAQQQLAA

SEQ ID NO: 8835 - protein, 215 aa, Heliobacillus mobilis
MRFFLDSANIDEIREANALGVISGVTTNPSLIAKEGRNFRQVVEEIVAIVDGPISAEVISTDAEGMVAEARELAQIHKNIVIKIPMCAEGLKATSRLSREKIRTNVTLIFSANQGLLAANAGATFVSPFVGRLDDVGHDGLDVIREMVEIFDIHGLATEIIAASVRHPLHVTAAARAGAPIATIPYKVLMQMVKHPLTDKGIEQFLKDWETVKNK

SEQ ID NO: 8836 - protein, 314 aa, Arabidopsis thaliana; identical to SEQ ID NO: 243

SEQ ID NO: 8837 - protein, 88 aa, Zea mays
MRRRPTAGPSLQRAPLARLISRRGLAGAADGHGSAKAPLRKDPLSPIKWEEEHFGLASLSMWGVICYGGYKLFSGKKEAKTDAGSPQA

SEQ ID NO: 8838 - protein, 231 aa, Zea mays
SDHCHSARYYLKDAVLDGGIPFNKAYGMTAFEYHGTDARFNRVFNEGMKNHSVIITKKLLDFYTGFEGVSTLVDVGGGVGATLHAITSRHPHISGVNFDLPHVISEAPPFPGVRHVGGDMFASVPAGDAILMKWILHDWSDAHCATLLKNCYDALPENGKVIVVECVLPVNTEATPKAQGVFHVDMIMLAHNPGGKERYEREFRELAKGAGFSGFKATYIYANAWAIEFIK

SEQ ID NO: 8839 - protein, 382 aa, Aspergillus oryzae
MATATVLEKANIGVYTNTNHDLWVAESKPTLEEVKSGESLKPGEVTVQVRSTGICGSDVHFWHAGCIGPMIVTGDHILGHESAGEVIAVASDVTHLKPGDRVAVEPNIPCHACEPCLTGRYNGCEKVLFLSTPPVDGLLRRYVNHPAVWCHKIGDMSYEDGALLEPLSVSLAAIERSGLRLGDPVLVTGAGPIGLITLLSARAAGATPIVITDIDEGRLAFAKSLVPDVITYKVQTNLSAEDNAAGIIDAFNDGQGSAPDALKPKLALECTGVESSVASAIWSVKFGGKVFVIGVGKNEMKIPFMRLSTQEIDLQYQYRYCNTWPRAIRLVRNGVISLKKLVTHRFLLEDALKAFETAADPKTGAIKVQIMSNEEDVKGASA

SEQ ID NO: 8840 - protein, 379 aa, Arabidopsis thaliana
MDNINGLPDDLLVKILSFVPTYVAVSTCVLSKRWEFLWMWLPNLEFVSPWDSRPGIVDFINKKLPIHRAPVIERLCIHINSNPHIKPEYIKRWIEIAVSHYVRELQIDYHSKTKITLQLEAESYFIDGKYLQQLISGCPVLEDLSLRFCCNDNLREFTVIIPSLQSLSLFLFGNSNLNRYKIDTPSLKYLKLEDWNDPEHYSWTNMPKLREAYVDVESSNHLKTLIGSITSVKHLTICCLEDYLYGDGFIFNHLEHLKLCMCPFDSSNLLGQLLKGSPNLQVLDIFEMKRNDIVCWNQPSSVLECLLSSLKILNWSAYFGRPQDRDIAVYILKNACHLKTATFLTDKRINDVRRLKMIKELRLSPRASSTCQLVFGEDF

SEQ ID NO: 8841 - protein, 91 aa, Brassica napus
MRVHNHRLRFEVTPKPTMSLPGISFITARSVAVILFLCLFLLILPPFLPPLPPPPSTLLLLPLLLMILLIFLAFSPSNDPSLTVEVEPLDP

SEQ ID NO: 8842 - protein, 126 aa, Cyanophora paradoxa
MSSKTDEILEQLKGLTLIEAADLVKAIEEAFGVDASAPVGGGMVMMAPAAGGGADAAEEKSAFDLVLEEVPADKKIAVLKVVRSLTNLGLKEAKDLVEATPKVVKEGASKDELKQLKKNLKQLEQK

SEQ ID NO: 8843 - protein, 139 aa, Saccharomyces cerevisiae
MSEITLGKYLFERLKQVNVNTVFGLPGDFNLSLLDKIYEVEGMRWAGNANELNAAYAADGYARIKGMSCIITTFGVGELSALNGIAGSYAEHVGVLHVVGVPSISAQAKQLLLHHTLGNGDFTVFHRMSANISETTAMI

SEQ ID NO: 8844 - protein, 256 aa, Glycine max
  misc_feature (208)..(208): Xaa can be any naturally occurring amino acid
  misc_feature (230)..(230): Xaa can be any naturally occurring amino acid
  misc_feature (235)..(235): Xaa can be any naturally occurring amino acid
  misc_feature (237)..(238): Xaa can be any naturally occurring amino acid
  misc_feature (250)..(250): Xaa can be any naturally occurring amino acid
FLRYACVVREKVRVVKTMASQLLRRTFGSRILANPRAFSFSSAASTPIRATLFPGDGIGPEIAESVKQIFQAADVPIEWEEHYVGTEIDPRTQSFLTWESLESVRQNGVGLKGPMATPIGKGHRSLNLTLRKELNLYANVRPCYSLPGYKTRYDNVNLITIRENTEGEYSGLEHQVVRGVVESLKIITRQASLRVAEYAFLYAKAHGXREKVSGIHKANIMQKTDGFFLXWCREXAXXYPEKPYEEVSLXQCCMML

SEQ ID NO: 8845 - protein, 344 aa, Triticum aestivum
  misc_feature (222)..(222): Xaa can be any naturally occurring amino acid
  misc_feature (232)..(232): Xaa can be any naturally occurring amino acid
  misc_feature (266)..(266): Xaa can be any naturally occurring amino acid
  misc_feature (273)..(273): Xaa can be any naturally occurring amino acid
  misc_feature (276)..(276): Xaa can be any naturally occurring amino acid
  misc_feature (281)..(281): Xaa can be any naturally occurring amino acid
  misc_feature (285)..(285): Xaa can be any naturally occurring amino acid
  misc_feature (292)..(292): Xaa can be any naturally occurring amino acid
  misc_feature (301)..(301): Xaa can be any naturally occurring amino acid
  misc_feature (316)..(316): Xaa can be any naturally occurring amino acid
  misc_feature (318)..(318): Xaa can be any naturally occurring amino acid
  misc_feature (321)..(321): Xaa can be any naturally occurring amino acid
  misc_feature (325)..(325): Xaa can be any naturally occurring amino acid
  misc_feature (328)..(329): Xaa can be any naturally occurring amino acid
MGKGGKGEAAAAVAGEGENMAAWLVAKNTLKIMPFKLPPLGPYDVRVRMKAVGICGSDVHYLKEMRIAHFVVKEPMVIGHECAGIIEEVGDGVKHLAVGDRVALEPGISCWRCRHCKGGRYNLCDDMKFFATPPYHGSLADQIVHPGDLCFKLPDNVSLEEGAMCEPLSVGVHACRRADVGAEKSVLIMGAGPIGLVTMLSARAFGAPRIVIADVDDHRLSXAKSLGADAVXKVSGNTEDLAGEIERIQAAMGGDIDVSLDCAGFXKTISTAXEAXRPGGXVCLXGMGHNEXTVPLTSAAXRKFDVVGIFRYKDTXPXCLXSLRXGKXXVKRLSKGPFGVRLSR

SEQ ID NO: 8846 - protein, 1347 aa, Escherichia coli CFT073
MSQEYTEDKEVTLTKLSSGRRLLEALLILIVLFAVWLMAALLSFNPSDPSWSQTAWHEPIHNLGGMPGAWLADTLFFIFGVMAYTIPVIIVGGCWFAWRHQSSDEYIDYFAVSLRIIGVLALILTSCGLAAINADDIWYFASGGVIGSLLSTTLQPLLHSSGGTIALLCVWAAGLTLFTGWSWVTIAEKLGGWILNILTFASNRTRRDDTWVDEDEYEDDEEYEDENHGKQHESRRARILRGALARRKRLAEKFINPMGRQTDAALFSGKRMDDEEEITYTARGVAADPDDVLFSGNRATQPEYDEYDPLLNGAPITEPVAVAAAATTATQSWAAPVEPVTQTPPVASVDVPPTQPTVAWQPVPGPQTGEPVIAPAPEGYPHQSQYAQPAVQYNEPLQQPVQPQQPYYAPAAEQPVQQPYYAPAAEQPVQQPYYAPAPEQPVAGNAWQAEEQQSTFAPQSTYQTEQTYQQPAAQEPLYQQPQPVEQQPVVEPEPVVEETKPTRPPLYYFEEVEEKRAREREQLAAWYQPIPEPVKEPEPIKSSLKAPSVAAVPPVEAAAAVSPLASGVKKATLATGAAATVAAPVFSLANSGGPRPQVKEGIGPQLPRPKRIRVPTRRELASYGIKLPSQRAAEEKAREAQRNQYDSGDQYNDDEIDAMQQDELARQFAQTQQQRYGEQYQHDVPVNTEDADAAAEAELARQFAQTQQQRYSGEQPAGANPFSLDDFEFSPMKALLDDGPHEPLFTPIVEPVQQPQQPVAPQQQYQQPQQPVAPQPQYQQPQQPVAPQPQYQQPQYQQPQQPVAPQQQYQQPQQPVTQQPQYQQPQQPVVPQPQDTLLHPLLMRNGDSRPLHKPTTPLPSLDLLTPPPSEVEPVDTFALEQMARLVEARLADFRIKADVVNYSPGPVITRFELNLAPGVKAARISNLSRDLARSLSTVAVRVVEVIPGKPYVGLELPNKKRQTVYLREVLDNAKFRDNPSPLTVVLGKDIAGEPVVADLAKMPHLLVAGTTGSGKSVGVNAMILSMLYKAQPEDVRFIMIDPKMLELSVYEGIPHLLTEVVTDMKDAANALRWCVNEMERRYKLMSALGVRNLAGYNEKIAEADRMMRPIPDPYWKPGDSMDAQHPVLKKEPYIVVLVDEFADLMMTVGKKVEELIARLAQKARAAGIHLVLATQRPSVDVITGLIKANIPTRIAFTVSSKIDSRTILDQAGAESLLGMGDMLYSGPNSTLPVRVHGAFVRDQEVHAVVQDWKARGRPQYVDGITSDSESEGGVGGFDGAEELDPLFDQAVQFVTEKRKASISGVQRQFRIGYNRAARIIEQMEAQGIVSEQGHNGNREVLAPPPFD

SEQ ID NO: 8847 - protein, 479 aa, Shigella flexneri 2a str. 301
MSVPVQHPMYIDGQFVTWRGDAWIDVVNPATEAVISRIPDGQAEDARKAIDAAERAQPEWEALPAIERASWLCKISAGIRERASEISALIVEEGGKIQQLAEVEVAFTADYIDYMAEWARRYEGEIIQSDRPGENILLFKRALGVTTGILPWNFPFFLIARKMAPALLTGNTIVIKPSEFTPNNAIAFAKIVDEIGLPRGVFNLVLGRGETVGQELAGNPKVAMVSMTGSVSAGEKIMATAAKNITKVCLELGGKAPAIVMDDADLELAVKAIVDSRVINSGQVCNCAERVYVQKGIYDQFVNLLGEALQAVQFGNPAERNDIAMGPLINAAALERVEQKVARAVEEGARVALGGKAVEGKGYYYPPTLLLDVRQEMSIMHEETFGPVLPVVAFDTLEDAISMANDSDYGLTSSIYTQNLNVAMKAIKGLKFGETYINRENFEAMQGFHAGWRKSGIGGADGKHGLHEYLQTQVVYLQS

SEQ ID NO: 8848 - protein, 426 aa, Escherichia coli
ADTKAKLTLNGDTAVELDVLKGTLGQDVIDIRTLGSKGVFTFDPGFTSTASCESKITFIDGDEGILLHRGFPIDQLATDSNYLEVCYILLNGEKPTQEQYDEFKTTVTRHTMIHEQITRLFHAFRRDSHPMAVMCGITGALAAFYHDSLDVNNPRHREIAAFRLLSKMPTMAAMCYKYSIGQPFVYPRNDLSYAGNFLNMMFSTPCEPYEVNPILERAMDRILILHADHEQNASTSTVRTAGSSGANPFACIAAGIASLWGPAHGGANEAALKMLEEISSVKHIPEFFRRAKDKNDSFRLMGFGHRVYKNYDPRATVMRETCHEVLKELGTKDDLLEVAMELENIALNDPYFIEKKLYPNVDFYSGIILKAMGIPSSMFTVIFAMARTVGWIAHWSEMHSDGMKIARPRQLYTGYEKRDFKSDIKR

SEQ ID NO: 8849 - protein, 363 aa, Buchnera aphidicola
MKKKFRIAVLPGDGIGPEIMREAYKILNILEKNFSLPLEIREFSVGGIAIDREGIALPEETLRGCENSDAILFGSVGGKKWDYLPIESRPERASLLPLRKHFNLFSNLRPAKLYSDLKNLSPLRSNIVRNGFDILCVRELTGGIYFGKPKGRSKNENGEYSFDTEIYYDFEIKRIAHLAFELASSRRCKVCSIDKSNVLASSILWREIVEEVSKNYPNIILSHLYIDNACMQIIKNPSQFDVLLCSNIFGDIISDECAMITGSIGMLPSASLNSKKFGLYEPAGGSAPDIEGKNIANPIAQILSLSMLIRHSMNLNEIADKIDSSVYRALKAGYRTLDISDGKNYIKTNEMGDIIAKFLINGK

SEQ ID NO: 8850 - protein, 367 aa, Aspergillus nidulans FGSC A4
MAADIPKTMKALLYDKPEVHKIAEIPVPTLRENDVLVGVKSRRSQYAWLTQLVIQIKVKACGVCGTDLHIHEGEFIAQFPLVPGHETVGVVAAVGPKVKGFEIGDRVVADNSELCGECFYCRRGDELFCENFQAHGVTMNGGFAEYCAYPAGRVFKIQNLSDVDATLLEPASCAAHGLDKIAPKMGSRVLLFGAGPTGLILAQLLRLNGGCHVVVCAPEGLKMELAKSLGAGDEYIGLSRQDPSAQFNKLKADNPYGFDIVVEATGNVKILEDSINYVRRGGKLVVYGVYANKDRVSWPPSKIFGDEIQIIGSFSEVYKFPAAIDYLDSGKVKVSGIVNKVYKIEQWEECLQSMRNKSAIKAAIVFE

SEQ ID NO: 8851 - protein, 252 aa, Listeria monocytogenes str. 4b H7858
MNAATRAVVRKAIYEGLEVYGINYGFLGLVNGDIRKLELGSVGDLLHRGGTFLYSARYPEFATEEGQLKGIEQLKKHQIDGLVVIGGDGSYHGAEALTKRGFPTIGIPGTIDNDISGTDFTIGFDTALNTVLDALDKIRDTATSHERTFIIEVMGRDAGDIALWSGLAGGAEAIIVPEESFNMDDVVDRLNKGRERGKKHSIIVVAEGVMSGNEFAKQLAEYGDYHARVTVLGHVQRGGSPTAFDRVLASRL

SEQ ID NO: 8852 - protein, 88 aa, Glycine max
MRIEDDAVKKAMIVDAGTRHISHNVRSTEIESQHIEDCQAVMRILLRKFMGDEVQSGKCAKGICKKPAVEFGELVLCRSNFDIHTAAL

SEQ ID NO: 8853 - protein, 255 aa, Phanerochaete chrysosporium
MAQSREDSVYLAKLAEQAERYEEMVENMKRVASSDQELTVEERNLLSAAYKNVIGARRASWRIVSSIEQKEESKGNEAQVAMIKGYREKIESELAKICEDILDVLEKHLIPSAASGESKVFYHKMMGDYHRYLAEFATGDKRKESADKSLEAYKAASDVAVTELPPTHPIRLGLALNFSVFYYEILNSPDRACHLAKQAFDDAIAELDTLSEESYKDSTLIMQLPRDNLTLWTSDMQDSDKPADEKPSDEADNES

SEQ ID NO: 8854 - protein, 356 aa, Saccharomyces cerevisiae
MTDLTTQEAIVLERPGKITLTNVSIPKISDPNEVIIQIKATGICGSDIHYYTHGRIANYVVESPMVLGHESSGIVALIGENVKTLKVGDRVALEPGIPDRFSPEMKEGRYNLDPNLKFAATPPFDGTLTKYYKTMKDFVYKLPDDVSFEEGALIEPLSVAIHANKLAKIKFGARCVVFGAGPIGLLAGKVASVFGAADVVFVDLLENKLETARQFGATHIVNSGDLPHGVTVDSVIKKAIGKKGADVVFECSGAEPCVRAGIEVCKAGGTIVQVGMGQEEIQFPISIIPTKELTFQGCFRYCQGDYSDSIELVSSRKLSLKPFITHRYSFKDAVEAFEETSHHPLNNIKTIIEGPE

SEQ ID NO: 8855 - protein, 140 aa, Brassica napus
  misc_feature (133)..(133): Xaa can be any naturally occurring amino acid
MTMINSLRRMARSSQVTLQSRYAASSSSGSRIFTTEASPQKQTIVGSKGHDMLAPFTAGWQSADLHPLIIAKSEGSYVYDDHGKKYLDSLAGLWCTALGGNEPRLVSAAVEQLKTLPFYHSFWNRTTKPSLDXAKDLLDM

SEQ ID NO: 8856 - protein, 420 aa, Chloroflexus aurantiacus
MTHPTIRIGVLTSGGDAPGMNAAVRAVVRTGISRGCEVFAIYEGYQGLIEGGKLIRRMDWSSVGGIIQRGGTIIGTARSAAFRTREGRRRAAANLLAHGIDRLVVIGGDGSLTGADLFRREWPELLAELVAAGEFSSEQAAAHPNLLIAGIVGSIDNDFCGTDMTIGADTALHRITEAIDAISSTAASHQRTFVIEVMGRNCGYLALMGAIAGGADWAFIPEMPPQMDDWEQHMCDVLRIGREQGRRDSIVVVAEGACDRDGKPITASYVKKILEERLGEDTRVTILGHVQRGGAPSAFDRWMSSLLGATAVEELLEADPNAEPKLIGLRENRVVRLPLMTCVRDTHQVAEAIAQRDYERALAMRGNSLVEAYRTLGTLIQSQHSDPRPITARASLRKSCNSGGPAPENEYAVRAAGGSA

SEQ ID NO: 8857 - protein, 487 aa, Burkholderia cepacia R1808
MSTENLALKDPSLLRQQAYINGEWQSAANGESFEVRNPATGGLLGTVPAMGAAETRQAIDAANAAWPAWRKKTAKERAAILRKWHDLMMENADDLALILTTEQGKSLAEAKGEIGYAASFLEWFAEEGKRVYGDTIPTPASDKRIVVTKEAIGVCAAITPWNFPAAMITRKVGPALAAGCPIVVKPAEATPFSALAMAVLAERAGVPAGVFSVVTGDPKAIGGELTSNPIVRKLSFTGSTPVGRLLMSQCAATVKKVSLELGGNAPFIVFDDADLDAAVQGAIASKYRNSGQTCVCTNRFYVHEAVYDAFAQKLAAAVGQLKVGRGTEPGVTQGPLINEAAVLKVEAHIEDALAKGATVVTGGKRHALGHGFFEPTVLTGVTPAMKVAKEETFGPLAPLFKFGSDDEVIRLANDTEFGLAAYFYSRDIGRVWKVAEALEYGMVGVNTGLISNEVAPFGGVKQSGLGREGSHYGIDDYVVIKYLCLAV

SEQ ID NO: 8858 - protein, 229 aa, Aegilops searsii
SLPQQPFSQQPQQTFPQPLQTFPHQPQQQFPQPQQPQQQFLQPQQPFHQQPQQPYPQQPQQPFPQTQQPQQLFPQSQQPQQPYPQQPQQPFPQTQQPQQQFPQSQQPQQPFPQPQQPQQSFPQQQPPFIQPSLQQQLNPCKNLLLQQCRPVSLVSSLWSMIWPQSDCQVMRQQCCQQLAQIPQQLQCAAIHSVVHSIIMQQEQQQQQQQQQQGLRIPLPLYQQQQVGQG

SEQ ID NO: 8859 - protein, 314 aa, Vibrio parahaemolyticus RIMD 2210633
MVNNSIQWFPGHMHKARKEIEEAIPQVDVIIEVLDARIPFSSENPMISKIRGEKPVVKVLNKRDLADPELTQLWIDHLEKEQNVKAMAITTSEPQEVHKIMELCRKLAPHREEVGKNIRTMIMGIPNVGKSTIINTLAGRTIAVTGNQPAVTRRQQRINLQNGIVLSDTPGILWPKVENPHSGFRLAATGAVKDTAMEYDEVAFYTVEYLAAHYPERLKERYQIEELPESDIEIMEEIGRRRGALRAGGRVDLHKVSEILLHELRQGTLGQITLELPEMITQELIEVEIETARKEEEKAKRKEERRKRYLRNKR

SEQ ID NO: 8860 - protein, 234 aa, Aegilops sharonensis
LPQQPFSQQPQQTFPQPQQTFPHQPQQQFPQPQQPQQQFLQPQQPFPQQPQQPYPQQPQQPFPQTQQPQQLFPQSQQPQQPYPQQPQQPFPQTQQPQQQFPQSQQPQQPFPQPQQPQQSFPRQQPPFIQPSLQQQLNPCKNLLLQQCRPVSLVSSLWSMIWPQSDCQVMRQQCCQQLAQIPQQLQCAAIHSVVHSIIMQQEQQQQQQQQQQQQQQQRQQQGLRIPLPLYQQQQV

SEQ ID NO: 8861 - protein, 411 aa, Rickettsia sp. A-167
DSEFAELKIRGKIFKLPILKASIGEDVIDISRVSAEADCFTYDPGFMSTASCQSTITYIDGDKGILRHRGYDIKDLAEKSDFLEVAYLLIYGELPSGEQYNNFTKQVAHHSLVNERLHYLFQTFCSSSHPMAIMLAAVGSLSAFYPDLLNFKEADYELTAIRMIAKIPTIAAMSYKYSIGQPFIYPDNPLDFTENFLHMMFATPCTKYTVNPIIKNALNKIFILHADHEQNASTSTVRIAGSSGANPFACISTGIASLWGPAHGGANEAVINMLKEIGSSEYIPKYIAKAKDKNDPFRLMGFGHRVYKNYDPRAAVLKETCKEVLKALGQLDNNPLLQIAIELEAIALKDEYFIERKLYPNVDFYSGIIYKAMGIPSQMFTVLFAIARTVGWMAQWKEMHEDPEQKISRPR

SEQ ID NO: 8862 - protein, 474 aa, Pseudomonas aeruginosa
MQTKLLINGALVAGEGESHAVYNPSQGNVLVRITEASGAQVHAAVQSADAAFDAWSQTPPKDRAALLLKLAERIDAQAHVFARLEADNCGKPFNAVLLDELPAVSDVFRFFAGAVRCLQGSAAGEYVAGHTSMIRRDAVGVVASIAPWNYPLLMAAWKLGPALAGGNTVVLKPSEHTPLSTLKLGELLAEIFPAGVVNIVHGRGASVGEPLTSHAQVRMVSLTGSVRTGSRIIEGTAESVKRMHMELGGKAPVLIFDDADIDAAVEGIRAFGFYNAGQDCTAACRLYVQKGVYQEFVRKLGEAVSSIRCGLPDDPATEMGPLITKEHLERVEGFVNRARELPHIEVVTGGKRAEGAGFFFEPTVLAGATQEDEVMRREIFGPVVTVSSFEDEAQALAWANDSDYGLASSVWTADVGRAHRLAARLQYGCTWVNTHFMLVSEMPHGGVKLSGYGKDLSMYGLEDYTVVRHVMFKH

SEQ ID NO: 8863 - protein, 431 aa, Glycine max
MEASPPPSPSPSPRTTILAKYQLTRFLGRGNFAKVYQARSLLDGATVAVKAIDKSKTVDAAMEPRIVREIDAMRRLHHHPNILKIHEVLATKTKIYLIVDFAGGGELFSKLTRRGRLPEPLARRYFAQLVSALRFCHRHGVAHRDLKPQNLLLDAAGNLKVSDFGLSALPEHLHDGLLHTACGTPAFTAPEILRRVGYDGSKADAWSCGVILYNLLAGHLPFDDSNIPAMCRRISRRDYQFPAWISKSARSLIYQLLDPNPITRISLEKVCDNNKWFKNNSMVEVKESVWESDLYNKCCDGGYKSGMNAFDIISMSSGLDLRGLFETTSEKGRRREKRFTSDKKVETVEAKVKEVGEKLGFRIEIGKNGAIGLGKGKVGVVVEVFEIVADLLLVAVKVVDGGLEFEELHWDDWRIGLQDLVLSWHDVGLEL

SEQ ID NO: 8864 - protein, 427 aa, Bacillus halodurans C-125
MSGWQETAEKLEMSWSNDVRWQGVERPYSGEEVVKLRGSLKIEYTLAKTGAEKLWKLLHEEDYVNALGAMTGGQAIQQVKAGLKAIYLSGWQVAADANLAGHMYPDQSLYPANSVPSVVKRINQALQRADQIQHLEGEGEVDYFAPIVADAEAGFGGQLNVFELMKAMIEAGASGVHFEDQLASEKKCGHLGGKVLIPTQTAIRNLVSARLAADVMGVPTILVARTDADAADLITSDIDPADQRFITGERTPEGFYRTNAGIEQAIARGLAYAPYADLIWCETSKPSLEEAKQFADAIHEKFPGKLLAYNCSPSFNWEANLDRATIETFQQELGKMGYKFQFVTLAGFHALNHSMFELAYGYKQRGMGAYSELQQAEFASEVKGYTATRHQREVGTGYFDQVAQTITGGTSSTTALTGSTEEAQFQK

SEQ ID NO: 8865 - protein, 411 aa, Israeli tick typhus rickettsia
DSEFAELKIRGKIFKLPILKASIGEDVIDISRVSAEADCFTYDPGFMSTASCQSTITYIDGDKGILRYRGYDIKDLAEKSDFLEVAYLLIYGELPSGEQYNNFTKQVAHHSLVNERLHYLFQTFCSSSHPMAIMLAAVGSLSAFYPDLLNFKEADYELTAIRMIAKIPTIAAMSYKYSIGQPFIYPDNSLDFTENFLHMMFATPCTKYTVNPIIKNALNKIFILHADHEQNASTSTVRIAGSSGANPFACISTGIASLWGPAHGGANEAVINMLKEIGSSEYIPKYIAKAKDKNDPFRLMGFGHRVYKNYDPRAAVLKETCKEVLKALGQLDNNPLLQIAIELEAIALKDEYFIERKLYPNVDFYSGIIYKAMGIPSQMFTVLFVIARIVGWMAQWKEMHEDPEQKISRPR

SEQ ID NO: 8866 - protein, 294 aa, Staphylococcus aureus subsp. aureus MSSA476
MVIQWYPGHMAKAKREVSEQLKKVDVVFELVDARIPYSSRNPMIDEVINQKPRVVILNKKDMSNLNEMSKWEQFFIDKGYYPVSVDAKHGKNLKKVEAAAIKATAEKFEREKAKGLKPRAIRAMIVGIPNVGKSTLINKLAKRSIAQTGNKPGVTKQQQWIKVGNALQLLDTPGILWPKFEDEEVGKKLSLTGAIKDSIVHLDEVAIYGLNFLIQHDLARLKSHYNIEVPEDAEIIAWFDAIGKKRGLIRRGNEIDYEAVIELIIYDIRNAKIGNYCFDIFKDMTEELANDANN

SEQ ID NO: 8867 - protein, 411 aa, Rickettsia akari
DSEFAELKIRGKIFQLPILKASIGEDVIDISRVSAEVNCFTYDPGFMSTASCKSTITYIDGDKGILRHRGYNIKDLAEKSDFLEVAYLLIYGELPSIEQYNNFTKQVAHHSLVNERLHYLFQTFCSSSHPMAIMLAAIGSLSAFYPDLLNFKEADYELTAIRMIAKIPTIAAMSYKYSIGQPFVYPDNSLDFTENFLHMMFATPCTKYKVNPIIKNALNKIFILHADHEQNASTSTVRIAGSSGANAFACISTGIASLWGPAHGGANEAVINMLKEIGSSENIPKYIAKAKDKSDPFRLMGFGHRVYKNYDPRASVLKETCKEVLKELGQLENNPLLQIAIELEAIALKDEYFIERKLYPNVDFYSGIIYKAMGIPSQMFTVLFAIARTVGWMAQWKEMHEDPGQKISRPR

SEQ ID NO: 8868 - protein, 411 aa, Rickettsia australis
DSEFAELKIRGKIFKLPILKASIGEDVIDISRVSAEADCFTYDPGFMSTASCQSTITYIDGDKGILRHRGYNIKDLAEKSDFLEVAYLLIYGELPTIEQYNNFTTQVAHHSLVNERLHYLFQAFCSSSHPMAIMLAAVGSLSAFYPDLLNFKEADYELTAIRMIAKIPTIAAMSYKYSIGQPFIYPDNSLDFTENFLHMMFATPCTKYKVNPIIKNALNKIFILHADHEQNASTSTVRIAGSSGANAFACISTGIASLWGPAHGGANEAVINMLKEIGSSENIPKFIAKAKDKNDPFRLMGFGHRVYKNYDPRAAVLKETCKAVLKELGQLENNPLLQIAIELEAIALKDEYFIERKLYPNVDFYSGIIYKAMGIPSQMFTVLFAIARTVGWMAQWKEMHEDPEQKISRPR

SEQ ID NO: 8869 - protein, 176 aa, Hevea brasiliensis
MASQSEPKSVYDFTVKDARGNDVDLSTYKGKVLLIVNVASQCGLTNSNYTELTQLYQKYKDQGLEILAFPCNQFGSQEPGTNEQIVEFACTRFKAEYPIFDKVDVNGNNAAPLYKFLKSSKGGIFGDNIKWNFSKFLVDKDGNVVDRYAPTTVPSQHREGCEETAGDCMSAQGRPN

SEQ ID NO: 8870 - protein, 423 aa, Bacillus subtilis
  misc_feature (118)..(118): Xaa can be any naturally occurring amino acid
MAQGEKITVSNGVLNVPNNPIIPFIEGDGTGPDIWNAASKVLEAAVEKAYKGEKKITWKEVYAGEKAYNKTGEWLPAETLDVIREYFIAIKGPLTTPVGGGIRSLNVALRQELDLFVXLRPVRYFTGVPSPVKRPEDTDMVIFRENTEDIYAGIEYAKGSEEVQKLISFLQNELNVNKIRFPETSGIGIKPVSEEGTSRLVRAAIDYAIEHGRKSVTLVHKGNIMKFTEGAFKNWGYELAEKEYGDKVFTWAQYDRIAEEQGKDAANKAQSEAEAAGKIIIKDSIADIFLQQILTRPNEFDVVATMNLNGDYISDALAAQVGGIGIAPGANINYETGHAIFEATHGTAPKYAGLDKVNPSSVILSGVLLLEHLGWNEAADLVIKSMEKTIASKVVTYDFARLMDGATEVKCSEFGEELIKNMD

SEQ ID NO: 8871 - protein, 189 aa, Triticum aestivum
  misc_feature (69)..(69): Xaa can be any naturally occurring amino acid
  misc_feature (115)..(115): Xaa can be any naturally occurring amino acid
  misc_feature (151)..(151): Xaa can be any naturally occurring amino acid
MAPTVMASSATSVAPFQGLKSTAGLPVSRRSNGASLGSVSNGGRIRCMQVWPIEGIKKFETLSYLPPLXSTEALLKQVDYLIRSKWVPCLEFSKVGFIFREHNASPGYYDGRYWXTMWKLPMFGVQPNATQVINEGGRRSKKEYPDAYVRXIIGFDNMRHVQCVRFIAFKPPGCKIRQGLNSSLTTGHI

SEQ ID NO: 8872 - protein, 156 aa, Glycine max
  misc_feature (52)..(52): Xaa can be any naturally occurring amino acid
  misc_feature (142)..(142): Xaa can be any naturally occurring amino acid
ANLKISCSAVTAVHRANASMIAPFTGLKSMAGCPLAKTANHITSIASNGGRXHCMHVWPPLVKMKFETISYLPDHDDAQLAKEIEYLLTIGWIPYFEFELEHGIAYREHDMSPRYYQRRYWYTLTCQFLTALIATTVSYELXQARTEYSIGYIRII

SEQ ID NO: 8873 - protein, 113 aa, Zea mays
RHERRGTKARDNRCVNESIAMASRLVAAAASSSSLSSASPLARLISRRGLAGAADGHGSAKVPLWKDPLSPSKWKEEHFVLASLSMWGVIFYGGYKLFSGKKEAKTEAASPQA

SEQ ID NO: 8874 - protein, 126 aa, Schizosaccharomyces pombe
MIGLKGILKVIDNSGATLAECIRVVRAGKFASLGDEVVVVVKKARSGSSVTAANKVKRGDIHHAIIVRTKSPVRRPDGRYVRFDDNACVLVNKECEPLGTRILSVVANELRTKHHTKIASLAPRTI

SEQ ID NO: 8875 - protein, 316 aa, Erwinia carotovora subsp. atroseptica SCRI1043
MNQLEALKQFTVVVADSGDIDSIRQFSPQDATTNPSLILKAATLPQYQPLFDDAIAYANLQGGSPETRLINASDRLAVNIGAEVLKSIPGRISTEVDARLSFDRGMCVAKARKLIGMYQEKDIPRSRILIKLAATWEGIRAAEELEKEGINCNLTLLFSFAQARACAEAGVFLISPFVGRIYDWYQEKQPTSDYQAESDPGVISVRDIYDYYKRHRYQTVIMGASFRKVEQILALAGCDRLTISPALLEQLKNSSDPVERQLTPSTEAFHPPSPLSEAEFRWEHHQDAMAVDKLAEGIRLFAADQQKLEALLAAKL

SEQ ID NO: 8876 - protein, 224 aa, Gossypium hirsutum
MAFVSEEEKTEDYLFKIVLVGDSAVGKSNLLARFARNEFYPNSKSTIGVEFQTQKLDINGKEVKAQIWDTAGQERFRAVTSAYYRGAVGALLVYDISRRQTFDSIGRWLNELQTHSDMNVVTILVGNKSDLRDAREVSTAEGKALAEAQGLFFMETSALDSSNVAAAFQTVVKEIYNILSRKVMMSHELKKQDAPLDGKTVVLQGDENQERATESPKSGGCCSS

SEQ ID NO: 8877 - protein, 191 aa, Triticum aestivum
  misc_feature (92)..(92): Xaa can be any naturally occurring amino acid
  misc_feature (122)..(122): Xaa can be any naturally occurring amino acid
  misc_feature (141)..(141): Xaa can be any naturally occurring amino acid
  misc_feature (151)..(151): Xaa can be any naturally occurring amino acid
  misc_feature (166)..(166): Xaa can be any naturally occurring amino acid
  misc_feature (174)..(174): Xaa can be any naturally occurring amino acid
MAPTVMASSATSVAPFQGLKSTAGLPVSRRSNGASLGSVSNGGRIRCMQVWPIEGIKKFETLSYLPPLSTEALLKQVDYLIRSKWVPCLEFXSKVGFIFREHNASPWGTTMAGYWDNVEAAXVSGWHRRQRKVINEVGGRXKKEYPDAYVXRIIRFDNMRQVQCVXSFIPFKPXPGCEESGKAKQLITRAI

SEQ ID NO: 8878 - protein, 285 aa, Aspergillus nidulans FGSC A4
MARNLSLKSTQKLLSGYEIPILGYGPNKRGGKRHRRGTQARIQTRTTLPARLFDRMADDNEKEVTAAIAKAGLSRSQVFLTTKIPPRANGYEAAKKSIEDSLKQANTEYFDLILIHAPYGGKEGRLGTWKALVEAQKAGKTRSIGVSNFGVHHLEELQMYISSGGGGQIDVGQYELHPWLARPDIVDWLRKHGAVVQAYCPIVRNQRGDEPVLKELGKKYGKSAAQVLIRWSLQKGFVPLPKSVTPSRIKENAEVFDFELTEEDMAKLETGKYEPCAWDPTVEKD

SEQ ID NO: 8879 - protein, 362 aa, Mesorhizobium loti MAFF303099
MANGLDDVVAAETVLSDVDGLGGRLTIRGHSLAELAGRWSFPQVVRLLLDGFFEDLAGDAELAAQLGEARVDVFERLQPSLPLLAPLDIYSAMRAGMALLPDGETLADALRLIAAPAVLTPALLRLQRGEQPVAPDGKAAHAADMLRMLRGSVPSPALAKALDTYLVTVCDHGLNASTFATRVVASTLAGLTSSVLAGLGALKGPLHGGAPGPVIEMLDAIEAHGDAAGWLRNEIAQGRRIMGFGHRIYRVRDPRADVLKAVVRQLGGEGETGRRLAFAEEVEKTALEVLRIAKPQRSLQTNVEFYTALVLEAAGFPPQAFSNVFAAGRVAGWIAHAREQQTTGRLIRPQSRYVGPVPDLVA

SEQ ID NO: 8880 - protein, 486 aa, Pseudomonas putida
MRQIENFIAGEFVAAASGKRFDKRSPVDNRIICSISEAGRSEVDAAVSAARSALHGEWGSLSTDQRIELLLCVANEITRRFDDFVEAEMSDTGQPEHVMKHVFIPRGAANFKVFADVIKSVASESFKMDTPDGRGALNYSIRRPKGVIGVVCPWNAPFMLMTWKVGPALACGNTVVVKPSEESAQTAALLGEVMNAVGIPKGVYNVVHGFGPDSAGEFVTRHPQVDAITFTGETRTGTAIMKAASEGMRDVSFELGGKNAGIVFADADFEAAVESFSRSVFLNTGQVCLGTERVYVERPIFERFVQALKVKAEAVKYGRPDDHQANYGPLISQEHKQKVLSYYRKAVEEGATLVTGGGVPQMPGELAEGAWVQPTIWTGLPETAAVVQEEIFGPCCHISPFDSEDEVVEKANATDYGLSTTIWTSNLARAHRMAGRIDVGITWINSWFLRDLRTPFGGSKQSGIGREGGVHSLEFYTETRNVCVKL

SEQ ID NO: 8881 - protein, 540 aa, Glycine max
MQVMASRILSTLHYVCSSSASATKRCLGLYSHWQRSISGIAASVVADVEPSIAPVQIDQSQLLIDGKFVDAASGKTFPTFDPRTGDVIANVAEGDAEDVNRAVHAARKAFDEGPWPKMTAYERSRIILRFADLLEKHNDEVAAIETWDSGKTYEQAANVEIPMVVRLFRYYAGWADKIHGLTVPADGPYHVQTLHEPIGVAGQIVPWNFPLLIFSWKVAPALACGNTVVMKTAEQTPLSALYVSKLFLEAGLPPGVLNVISGFGPTAGAALCSHMDVDKLAFTGSTSTGKRVLELSAHSNLKPVTLELGGKSPFIVCKDADVDAAVEASHFALFFNQGQCCCAGSRTFVHESIYGEFVEKAKARALKRVVGDPFKNGVEQGPQIDSVQFEKIMKYIRSGVESGAQLESGGQRIGSKGYYIQPTVFSNVQDNMLIAKDEIFGPVQSILKFKDLEEVIRRANATSYGLAAGVFTKNMDTANTLMRALQAGTVWINCYDVFDAAIPFGGYKMSGQGRVRGIYSLRSYLQVKAVVTALKNPAWL

SEQ ID NO: 8882 - protein, 379 aa, Mesorhizobium loti MAFF303099
MSEWLSREEALERLRVRPQTLYAYVSRGRIGMRPDRADPRRSQYRADDIAALATRRARGRSPSAIAESAIAWGEPSIATAISTVWHGHLIYRGRDAAVLSDNATLEETAAVLWGLPEPIRFEAPAPDAPRQPGRASAFAQLALLAGQARPSLGRSAASLCADAARAIGVLAGALGAEAGPDPVHRRLARGWSVDDAGADAIRRALVLLADHELNASTFAARVAASTGASPAACLLAGLATLSGPRHGGAGEAVMQLAEDAARHGADAAIRRWLGHDRPLPAFGHPLYPDGDPRTTALSAAIPVDETLQQLEKAAIAMTGARPNIDFALAALTRGLGLPRDAPFQLFALGRSVGWAAHMVEQIVSGSIIRPRGRYEGLLP

SEQ ID NO: 8883 - protein, 493 aa, Neurospora crassa
MAATFTLDDVRKHNSKDDVWMVIHNKVYNVTTYLEDHPGGSIILREVAGTDATEQFVEIGHSVEATDILEELYVGDLAEEEHAEEVEIFRPTYEKVAMEAAVKVEKATVSKVKKNVRRTIAMSSVIASVGAVGLAKGWWTGPEWALAAVTTAQKPINQLADFIRSKFAQNGSSSKLFWWGVGIATVVELSLTTAATTWALSKFEAQKEFTHFPRSRPAKKERKVAILKIPTNSTSGPAVKPPVKVMDPADWRKFKLVRKVLVSPNVYHLVFALPHPTDVLGLPTGQHVALRALIDGKSVSRSYTPVSNNSDLGRVELLIKVYDQGLMTKHLERMEIGDQIEMRGPKGAMQYVPNSYAKEIGMIAGGTGITPMYQLIRAICEDESDKTKISLLYANNTEADILLREELDGFVKAFPDKLSVQYVLGQADENWTGLRGFVTADMIKDFLPPAADTTKMLLCGPPPMVAAMSKNLVSLGFTAPGTLSKATDQVFLF

SEQ ID NO: 8884 - protein, 255 aa, Aegilops speltoides
HQPFSQQPQQTVPQPQQTFPHQPQQQFPQPQQPQQQFLQPQQPFPQQPQQPYPQQPQQPFPQTQQPQQLFPQSQQPQQPYPQQPQQPYPQQPQQPFPQTQQPQQLFPQSQQPQQPYPQQPQQPFPQTQQPQQQFPQYQQPQQQFPQPQQPQQSFPQQQPSFVQPSLQQQLNPCKNFLLQQCRPVSLVSSLWSMIWPQSDCQVMRQQCCQQLAQIPQRLQCAAIHSVVHSIIMQQQQQEQQQGMRIQLPLYQQQQV

SEQ ID NO: 8885 - protein, 489 aa, Candida albicans SC5314
MSRTKSTKVLIIGAGVSGLKAAETILSKSFLTGDDVLVVEAQNRIGGRLKTTDTSQSKLGINYDLGASWFHDSLNNIVLNHMINDGLLDDEKDVYFDDKDLKTFSSTGEVPIVDKKLNRVLEDIEKYIQLYFNRNLGVPDLSLRDIVAQYFEKYNRLITEEQREYCGRMMRYLEFWFGISWDRISGKYAVTTHQGRNLLNKKGYGYLVESLAKRIPESSLLLEEPVNKIIRNNKDAGKRVLVETINGLQIFCDYLIVTVPQSILSLEESSPYSIKWEPKLPQRLVESINSIHFGALGKVIFEFDRIFWDNSKDRFQIIADHTDGDLSRELTELPKPFTYPLFAVNFGRVHNGKASLVILTQAPLTNYLETHPDQAWQYYQPMLQKLSINDEPIPDPINTIVTDWTTNPYIRGSYSTMYTNDDPSDLIISLSGDFEDLGISEPYIKFAGEHTTSEGTGCVHGAYMSGIYAADCILENIFRNDVTGYTIIG

SEQ ID NO: 8886 - protein, 192 aa, Glycine max
  misc_feature (39)..(39): Xaa can be any naturally occurring amino acid
TLQVLLVGGGDGGILREISRHSSVEHIDICEIDKMVIDXIAFTNSVPEGTYDVIIVDAFQPMGPIAEVLADNCFLESVAKALRPGGVLSAPADSLWHKNFVVADTIANCKKIFKGSVNYAWTTVPTYASGVIGFMLCSTEGPPVNFKHPTNKLNPEQNGVAKGPPKFYNPEIHAAAFCLPSFVDKVVDPKRY

SEQ ID NO: 8887 - protein, 315 aa, Rubrivivax gelatinosus PM1
MEVTVAGRETAAEGVASFELRRADGGPLPGFDAGAHIDVELPNGMVRQYSLCNDPAERGHYRIGVLLEAAGRGGSRSAHAQLLPGSRLRISAPRNHFALVPARHTLLLAGGIGVTPILSMAEQLARADASFELHYCSRSPARTAFVPRLRAAAFAAQVHFHFDDGDAAQRFDARAVLAQAGDTTHLYVCGPKGFMDHVILTARALGWSEGNIHYEYFAGAAVDSSADRGFEVQIAGSGQVVPVAPGQSVVQALAAHGIDVPVSCEQGVCGTCVMRVVQGEPEHRDMYFSAAEHAANHCFTPCCSRSKSARLVIDF

SEQ ID NO: 8888 - protein, 181 aa, Arabidopsis thaliana
MASSMFSSTAVVTSPAQATMVAPFTGLKSSASFPVTRKANNDITSITSNGGRVSCMKVWPPIGKKKFETLSYLPDLSDVELAKEVDYLLRNKWIPCVEFELEHGFVYREHGNTPGYYDGRYWTMWKLPLFGCTDSAQVLKEVEECKKEYPGAFIRIIGFDNTRQVQCISFIAYKPPSFTEA

SEQ ID NO: 8889 - protein, 256 aa, Aegilops speltoides
HQPFSQQPQQTVPQPQQTFPHQQQQQQFPQPQQPQQQFLQPQQPFPQQPQQPYPQQPQQPFPQTQQPQQLFPQSQQPQQPYPQQPQQPYPQQPQQPFPQTQQPQQLFPQSQQPQQPYPQQPQQPFPQTQQPQQQFPQYQQPQQQFPQPQQPQQSFPQQQPSFVQPSLQQQLNPCKNFLLQQCRPVSLVSSLWSMIWPQSDCQVMRQQCCQQLAQIPQRLQCAAIHSVMHSIIMQQQQQEQQQGMRIQLPLYQQQQV

SEQ ID NO: 8890 - protein, 468 aa, Ralstonia metallidurans CH34
MTHPVLDSGGGDTSLAARSQRAVWHPCTRLRPDASANEPPLAIVRGEGPWLIDAGDKRYFDAISSWWVNLFGHANPAINAAIGEQLQTLEHVMLAGCTHAPAVELAERLTALTGGALGNAFYASDGASAVEIALKMSFHYWRNTGLTAKREFICLRHGYHGETVGALAVTDVEIFRDAYDPLTRRAHVVMSPDARQAARSESAADVATRALAELEALLRERAGQIAALIVEPLVQGAAGMAMYDPSYLEGARALCDRYRVHLIADEIAVGCGRTGTFFAWEQARGGDAVPAHAWPDFLCLSKGITGGYLPLSLVLSRPEIQRAFVADDIARSFLHSHSYTGNPLACRAALATLDLFESEDVLARNRERAQWLGTAMAGIAADPRVSHVRQRGMIWAADIDPQAAGANFAGRFHLAARERGVLARPIGHTLYVMPPYVFDAELANWLGEQLLDTLQAVLDPAEEARHAA

SEQ ID NO: 8891 - protein, 411 aa, Rickettsia africae
DSEFAELKIRGKIFKLPILKASIGEDVIDISRVSAEADCFTYDPGFMSTASCQSTITYIDGDKGILRHRGYDIKDLAEKSDFLEVAYLLIYGELPSGEQYNNFTKQVAHHSLVNERLHYLFQTFCSSSHPMAIMLAAVGSLSAFYPDLLNFKEADYELTAIRMIAKIPTIAAMSYKYSIGQPFIYPDNPLDFTENFLHMMFATPCTKYTVNPIIKNALNKIFILHADHEQNASTSTVRIAGSSGANPFACISTGIASLWGPAHGGANEAVINMLKEIGSSEYIPKYIAKAKDKNDPFRLMGFGHRVYKNYDPRAAVLKETCKEVLKELGQLDNNPLLQIAIELEAIALKDEYFIERKLYPNVDFYSGIIYKAMGIPSQMFTVLFVIARTVGWMAQWKEMHEDPEQKISRPR

SEQ ID NO: 8892 - protein, 118 aa, Glycine max
YLSLRSYLLYFRVYLSPESSQYSSRGGQVSALSPTGGQVSALSPTLYEPVNRSCVVDAISDSSAPKHAIQAFHLLSTSREAQAVVASLACDPNVWNAVMENPAVSSFFQSQQSVADLG

SEQ ID NO: 8893 - protein, 468 aa, Methanosarcina barkeri str. fusaro
MISKKVNLETLDESKKYRVGAYSARYIPQVKEKGIPKYEFPEEGMSPRAAYQLVHDEQSLDGNPFLNLASFVNTWMEPEADKLVMENINKNIIDIFEYPQTDKVIQSNIVNMLGRLFNGHHTKFMGTATAGSSEAIMLGLLAHKWSWKNSGRGTGKPNIIFGNDAHVCWDKFAKYFDVEARKIPIDKDERKISAAAVSEQIDENTICVGCVLGTTFTGEIDPVKDINDLLLRYKKEKGWDIPIHIDAASGGFILPFTEPDFEWDFRLESVKSINVSGHKYGLTYPGLGWLIFRDENDLPEDLIFHVNYLGEMEDSYTLNFSGGSAMVVAQYYNILRFGRAGYTRIMKNILEVSQDLAEKVDRLGRFEMLNKGERLPIIAFKQKEETDYSLQQLSYKLRERGWIIPAYCLPENAADIEIMRIVVRENFTSDMAAILVNDIENACQFFENGRKSETKKPCPPDDGMVHIC

SEQ ID NO: 8894 - protein, 412 aa, Rickettsia bellii
NTEFAELKIRDKIFKLPILKASIGQDVIDISKVYSEADCFTYDPGFMSTASCRSTITYIDGDQGILRHRGYDIKDLAEKSDFLEVAYLLIYGELPNNKQYNDFTKKVAHHALVNERLHYLFQTFCSSSHPMAIMLAAVGSLSAFYPDLLNFFKEADYELTAIRMIAKIPTIAAMSYKYSIGQPFVYPDNSLDFTENFLHMMFATPCEKYKVNPVIKNALNKIFILHADHEQNASTSTVRIAGSSGANPFACVSTGIASLWGPAHGGANEAVINMLKEIGSVENIPKYIAKAKDKNDNFRLMGFGHRVYKNYDPRAAVLKETCKEVLKELGQLDNNPLLQIAIELEAIALKDEYFIERKLYPNVDFYSGIIYKAMGIPPQMFTVLFATARTVGWMAQWKEMHEDPEQKISRPR

SEQ ID NO: 8895 - protein, 411 aa, Rickettsia canadensis
DSEFVELKIRGKIFKLPILKASIGEDVIDISRVSSEADCFTYDPGFMSTASCRSTITYIDGDKGILRYRGYDIKDLADKSDFLEVAYLLIYGELPSSEQYNNFTKKVAVHSLVNERLHYLFQTFCSSSHPMAIMLAAVGSLSAFYPDLLNFKEADYELTAIRMIAKIPTMAAMSYKYSIGQPFIYPDNSLDFTENFLHMMFATPCMKYEVNPVIKNALNKIFILHADHEQNASTSTVRIAGSSGANPFACISTGIASLWGPAHGGANEAVINMLKEIGSSENIPKYIAKAKDKDDPFRLMGFGHRVYKNYDPRAAVLKETCNEVLKELGQLENNPLLQIAIELEAIALKDEYFIERKLYPNVDFYSGIIYKAMGIPSQMFTVLFAIARTVGWMAQWKEMHEDPEQKISRPR

SEQ ID NO: 8896 - protein, 252 aa, Prunus emarginata
AHYKYEADVGNAIAEAIRSGLVKREELFITSKASNHGHVVEACKDSLKKLQLDYLDLYLVHYPLATKHSGVGTTASLLDKNKVLDIDVTVSLESTWHDMEKTVSLGLVRSIGLSNYELFLTRDCLSYAKIKPQVNQFETHPYFQRASLVKFCWKHGVCPMAHTPLGGATANVKSFGSISPLDDPVLQGLAKKYKKSVAQIALRWNIDRNTPVIPKSSKIQRLKENLEVLTFKLEKEDIELINSIDKKSRTTL

SEQ ID NO: 8897 - protein, 411 aa, Rickettsia conorii
DSEFAELKIRGKIFKLPILKASIGEDVIDISRVSAEADCFTYDPGFMSTASCQSTITYIDGDKGILRHRGYDIKDLAEKSDFLEVAYLLIYGELPSGEQYNNFTKQVAHHSLVNERLHYLFQTFCSSSHPMAIMLAAVGSLSAFYPDLLNFKEADYELTAIRMIAKIPTIAAMSYKYSIGQPFIYPDNSLDFTENFLHMMFATPCTKYTVNPIIKNALNKIFILHADHEQNASTSTVRIAGSSGANPFACISTGIASLWGPAHGGANEAVINMIKEIGSSEYIPKYIAKAKDKNDPFRLMGFGHRVYKNYDPRAAVLKETCKEVLKELGQLDNNPFLQIAIELEAIALKDEYFIERKLYPNVDFYSGIIYKAMGIPSQMFTVLFAIARTVGWMAQWKEMHEDPEQKISRPR

SEQ ID NO: 8898 - protein, 252 aa, Prunus emarginata
AHYKSEADVGNAIAEAIRSGLVKREELFITSKASNHGHVVEACKNSLEKLQLDYLDLYLVHYPLATKHSGVGTTASLLDENKVLDIDVTVSLESTWHDMEKTVSLGLVRSIGLSNYELFLTRDCLSYAKIKPQVSQFETHPYFQRESLVRFCKKHGVTPMAHTPLGGATANVKSFGSISPLEDPVLLGLAKKYKKSVAQIALRWNIERDTPVIPKSSKVERLKENLEVLNFKLEKEDIELINTIDKKSRTTL

SEQ ID NO: 8899 - protein, 117 aa, Oryza sativa (japonica cultivar-group)
MARAGHNKYVARVMVVALLLAARAPVTCGQVVSTWAPCIMYADGEGVAPTGGCCDGVRTLNSAAATTADRQTTCACLKQQTKAMGRLRPDHVAGIPSKCGVNIPYAISPSTDCSRVH

SEQ ID NO: 8900 - protein, 250 aa, Triticum aestivum
  misc_feature (141)..(141): Xaa can be any naturally occurring amino acid
MYFRPPPKGPEWGGDAEAGQAARPLYPMMLESPQLRWAFVRKVYTILSIQMLLTIAVASVVVFVRPVALFFVSSPAGFGLYIFLIILPFIVLCPLYYYYQRHPVNLLLLALFTVAISFAVGLTCAFTKGEVILESAILTAXLVVEPDRRTPFWAASRGHDFSFLGPFLFAAVMILMVFALIQAFFPLGRISLMVYGGLAALVFCGYIIYDTDNLIKRYSYDEYVWAAVALYLDVINLFLSLLTLFRASDS

SEQ ID NO: 8901 - protein, 375 aa, Glycine max
  misc_feature (61)..(61): Xaa can be any naturally occurring amino acid
  misc_feature (314)..(314): Xaa can be any naturally occurring amino acid
SFYPSQEIIDMCDYCVGLSRQLNGSIIPSERPDHMMFEVWNPLGIVGVITAFNFPCAVLGXGAPTTPLITIAVTKLVAEVLERNKLPGAIFTSFCGGADIGQAIAKDTRIPLVSFTGSSKVGLMVQQTVNERFGKCLLELSGNNAIIVMDDADIKLAVRSILFAAVGTAGQRCTTCRRLFLHESIYADVLDQLIGVYNQVKIGNPLEKGTLVGPLHTPTSVENFQKGISVIKSQGGKILTGGSVLESAGNFVQPTIVEISPDAPVVKEELFGPVLYVMKFQTLEEAIALNNSVPQGLSSSIFTQRPGTIFKWKXQKGISVIPTNGAEIGGAFGGEKATGGGREAGSDSWKQYMRRSTCTINYGSELPLAQGINFG

SEQ ID NO: 8902 - protein, 426 aa, Rubrobacter xylanophilus DSM 9941
MEPGDRSGGRYLTAREAAEELGVSVRTLYAYVSRGLVRSEAAGGGRRGRRYRAEDVRRLRERKEHRRDPARAAEGALDWGMPVLESGISLIADGRLYYRGRDAVALSGERSLEQVAQLIWTGSMAPGDRAAVPGLFRAAARSVAGCPRLPLGGARPVLDELGLALQAAASRDPAAYDLRPAAVVRTGARILRLLVGAATGEQDAGETAARALQRRWVPRDEGAAEILDRALVLCADHELNVSSFTARCVASAGATPYAAVVAGLAALGGVRHGGGTERVEAFLAEVEAAGDPREVVASRLRRGEAVPGFGHRLYPEGDPRAAALLAALAEGYPGSEALGLAEGAAEAAGALVGERPNVDFALAVLARVLGLPPGGALALFALGRAVGWVGHAIEQYASGAPIRPRARYVGEPPPRPESGPSPARSG

SEQ ID NO: 8903 - protein, 224 aa, Gossypium hirsutum
MAFVSEEEKTEDYLFKIVLDGDSAVGKSNLLARFARNEFYPDSKSTIGVELQTQKLDINGKEVKAQIWDTAGQERFRAVTSAYYRGAVGALLVYDISRRQTFDSIGRWLNELQTHSDMNVVTILVGNKSDLRDAREVSTAEGKALAEAQGLFFMETSALDSSNVAAAFQTVVKEIYNILSRKVMMSHELKKQDAPLDGKTVVLQGDENQERATESPKSGGCCSS

SEQ ID NO: 8904 - protein, 428 aa, Nostoc punctiforme PCC 73102
MHLLWFRRDLRLTDNEIVTSSSGNDARVLPFFIIDPWFYTWADVGTARVRFLFESLEKLNSNLQKLSSRLYLFEGNSTGIVQELTRQLTERGYKPKLFFNRDVQVEYGINRDKTIVDFYKQLNLDYHIGLNNFLQSAEQRDEWVNEYYTYQRQSQYKTPAIINTPQITLNLPQLTFEELKQKYHRFWAVEKVYFPGGETQAQAQLDSFLKKRYYGYHWKLSRPMLSQLGATSHLSPHLTFGTISTRTVYQSTKALAEQLKTQPKAEFSLKAFRDRLRWHDSFTQRLYFHPEIAYTNRYREFDKLYTPETLSGAKQELYQAWQQGMTGFPLVDASMRQLQTMGWMNFRMRAMCATFLTINCGVSWHHGAKHYMNYLVDGDLAIDNWQWQMQAGVTNPLSDTFRIYNPSKNIAEKDPLGVNIAKLSPGAR

SEQ ID NO: 8905 - protein, 338 aa, Ralstonia solanacearum
MYSAHDVRVENVPDATIVEPTDAIVRVTQACICGSDLWPYRAMEPSETGQSMGHEAIGVVEAIGSGVNKIKVGDVVIMPFAYSDGRCEFCHEGLQTACVHGGFFGYGGFNGAQAEALRIPQADGTLYALPGGVDSALMASLLTLSDVMGTGHHAARVARVRPGTSAAVIGDGAVGLCGVIAAKRLGAERIILMGRHPDRIALAQAFGATDIVSERGEEAIERVRALTGGHGVHSVLECVGTDQSMQTAANIARPGGAVGRVGVPHYNAIPADTTFFKNVIVGGGPAPVRAYIDDLLPDVLDGKIQPGRVFDRVIGLDEVPDGYRAMDERQAIKVMINL

SEQ ID NO: 8906 - protein, 479 aa, Rubrobacter xylanophilus DSM 9941
METGVKSLKNFIGGRFVEPASGELYDVVNPSTGEVFARAPMSGEEDVDRAFGAAAKAFEEWRESTPSERQRALLRIADRIEERAEELVRAECENTGKPYALTLEDEIPPMADQIRFFAGAARCLEGKSAGEYMRGMTSYIRREPVGVCAQVTPWNYPMMMAVWKFAPAVAAGNTVVLKPSDTTPVSTLLLAEIAAEFLPEGVFNVVCGDRDTGRLLVRHEVPQMVAITGSVRAGMEVAEAAAKDLKRVHLELGGKAPVIVFDDADPEAAAEAIAEAGYFNAGQDCTAATRVLAAPGVHDDFVAALTERARSTRTGPPDDEEAYYGPLNNENQLRRVSGIIERLPDHAEVVAGGGRVGERGYFYAPTVVSGLRQDDEASQTEIFGPVITVQPFSDEDEAVRWANGVRYGLASSVWTRDHGRAMRVSRRLDFGCVWINTHIPLVAEMPHGGFKHSGYGKDLSMYGLEDYTRIKHVMSNIEA

SEQ ID NO: 8907 - protein, 302 aa, Malus xiaojinensis
MSSGTCSTVEPAGAGEIMLFGVRLVVDSMRKSVSLNNLSQYEHPQEAASNNGNNGTAAGKDDAAPGYASENDVVHNSGGNRERERKRGVPWTEEEHKLFLLGLQKAGKGDWRGISRNFVKTRTPTQVASHAQKYYLRRSNLNRRRRRSSLFDITTDTVAPTPMDEEQVQHQDNISQSQLHPLPPPPPSEPRDAGGFSMVPNFARTVGPAVLPVHIENPMENLALRQANPENSTSAKLVHPVALHSAPHATAISDLNLNSTTDASTLTLNLSLSMDSREPSSRHSAFETMQGFSNGDSMISVA

SEQ ID NO: 8908 - protein, 1142 aa, Ralstonia eutropha JMP134
MSEVEKKGFCTLCRSRCGTVNVVDGETLVAVRPDGDHPTGKAMCLKGKAAPELVHSADRILYPMRRTHPKGADDPGWVRISWDEALDEIAARLLHARATRGAESVAFAVTTPSGTALSDSIDWIERFVRLYGSPNICYATEICNWHKDFAHAFTFGCGMPTADYRNAGLILLWGHNPTNTWLSQAEAIGAGRAGGARLIVVDPRQTALAEDADQWLRVKPGSDAALAMALANLMIEANAFDIDFVRRWTNGPLLVRQDNGAFLRGGDIGLADTDALLVWDARQRMAVPAGKGVDDAQHIALRGTFAIPRIGGGERKSLLCQPAFDLYAAECARYTVERAAALTWIPEGDIRHAASLIGAAGRIAYHAWSGVGQHENATQTERAIACLYALTGSFDRRGGNRVYSKPPFNAVSRFDLLSPDQAHKALGLDARPLGPPAQGWVTAPDLYRAITHHAPYAVTSLIAFGTNTLLSQPDVANAEQALRELELYVHCDLFENPSARHADILLPVNTPWEREGLRIGFEVSADAEQFVQLRQRMVAPLGESRSDNDIVFALAARIGLDEAFFGGSLEAGWNHMLAPTGLTVAALRDAPEGIRVLVEDVEMKYAAGTDGQPFNTPTGLVELYSERLLRHGYPPLPGLPESAWNDAGQTSASFPYLMTSAKNGYYCHSQQRGVASLRRKALLPQLDISSDIAAARNIRTGDPVRVSTPAGSARFTARVQPGLHPAVVVGEYGWWQGCDPMGQQPTAVLGTDSANFNALIDATRQDPVSGSSPLRCCHCNVERDATLDIRRRRWEGYRPFRIVGLRKEATDVTAVDLEPADGGRLPDYLPGQHVTIRLCVDTGQQEVVRSYSLTGPAVVADRRRYAIAVRHARARLASGEVVSGVASSFINTRLAIGDTIELRAPAGTFVMPTRTARPLVLLAGGIGITPFINLLESLVGQQDPPRMLLLYANQNGTTHAFRDPLRELEALIPALKVINFYDAPADGDILGSDFQVHGRVTAAAVPDALLASRPLVYMCGPDAMMTAFAAGLAARGVPRFDIQKEVFRSPTVRRIEASQAFQVQFRRSDITLSWRSEHGPLLGFAEALGIRLPSGCRVGQCESCAVRIVSGTVHHLHGEAPDDPGVCLACQAVPASDLVIDA

SEQ ID NO: 8909 - protein, 586 aa, Triticum aestivum
  misc_feature (514)..(514): Xaa can be any naturally occurring amino acid
MAGRSGEEADAAMAGVATGGVEDAYGEDRATEDQPVTPWAVCIASGHSLLRDPRHNKGLSFTEKERDAHYLRGLLPPVVLSQELQEKRLLQNVRQLDVPLQRYMFLMDLQERNERLFYKLMIDNVEELLPVVYTPTVGEACQKYGSIFRRSQGLYISLKDKGRVLEVLRNWPEKSIQVIVVTDGERILGLGDLGCQGMGIPVGKLALYTALGGVRPSACLPITIDVGTNNEELLNDEFYIGLRQKRATGQEYTELLDEFMVAVKQNYGQKVLVQFEDFANHNAFTLLEKYKATHLVFNDDIQGTAAVVLAGLMAGLKFAGGTLADHTFLFFGAGEAGTGIAELVALEISMQSKTSQEEARKNIWLVDSKGLIVSSRKDSIQPFKKLYAHEHEPVKDLLSAIKDIKPTALIGSAGVGQSFTKEVIEAMSSINKRPIILALSNPTSKSECTAEQAYSWSQGRAIFGSGSPFDPVKYNDKLFVPAQANNAYIFPGFGLGVVTSGAIRVKDDMVLAAXAEALAEQVMAEHFDKGLIYPPFSSIRKISTNIAARVAAKAYDLGLASHLPRPKDLVKYAESCMYSPIYRSYR

SEQ ID NO: 8910 - protein, 491 aa, Thalictrum flavum subsp. glaucum
MEVLSAAMVSLFFIFLFIFFILCDSRNKDLPPGPRPSPIVGNLLQLGEKPHAEFAKLAEKYGELFTLKLGSQTVVVASSPAAAAEILKTRDKILSGRYVFQSFRVYEHVLNSIVWSECNENWKLLRKVCRTELFSPKMIESQAYIREAKALDMVRFLRKKENQEVKIVEVVFNTLVNIFGNLIFSKDVFDLEDPTGGSAELKEHLWKLLDMGNSTNPADYFPIMGKFDLFGQRREVAKVLKQIYDVWGVMLKERRSITGHRENDFANVLLNAGLDDQKINALLMELFGAGTETTASTIEWAITELTNNLRVISKLRAELINVVGHKTVKESNIPHLPYLQAIVKETLRLHPPTPLLLPRRALETCKVMNYTIPKECQIMVNAWAIGRDPKTWDDPLTFKPERFMNSTVDYKGNDFELIPFGGGRRICPGLPLASQFLSLIVATLVQNFDWSFPQGMTPNEVPMDEKFGLPLQKDPPLLIVLKARTSMKLQD

SEQ ID NO: 8911 - protein, 483 aa, Aspergillus nidulans FGSC A4
MASGTLPPFPTKLFINNQVENTPHPSTLLPADRMIINLVERDAERLAILESLPTGKPVTPTIHFDIAHMLEVWRYYAGWTDKISGESYPESNGVYKIVRHEPLGVCAGIASWNATFMYIGWKIAPAVAAGNCFIFKPSEKSPFGTLALGALFAEAGFPAGVVQILNGGAETGAALARHMDIAKISFTGSLGGGKAVQEAATKSNLKKVTLELGGKSPAVVFADAELERALGGVCGFLFNSGQVCVATSRVLVQKPIFEKFTQGLKSAFEQTSSTLGADPLDKNVSYGPIVDKAQFDKIMSYIAIGKQTATLLTGGERKGDKGFFIKPTIFVNPEPESPIVKEEIFGPVMVVQTFETEEEAIALANATVYGLAASVYTSNIDRALRVSSALECGGVAVNSPFLPQVNTAFGGIKASGKGRELGLYGLLEYTEAKSVHITCCVNRGGWNDLGTQPDQLQTAGSVMNCLRQEAETIWIDEAYRTST

SEQ ID NO: 8912 - protein, 328 aa, Bacillus cereus G9241
MVERLYGHHFHLQDEYFGGSAIDLNGQPLPQRTLAACLASDAVLLGAVGGPRWDSAKERPEKGLLALRKGLGVFANVRPVTVESATAHLSPLKKADEIDFVVVRELTGGIYFSYPKERTDEVATDTLTYHRHEIERIVSYAFQLASKRKKKVTSIDKANVLESSKLWRTVTEEVALRYSDVELEHILVDAAAMELIRNPGRFDVIVTENLFGDILSDEASVLAGSLGMLPSASHAEKGPSLYEPIHGSAPDIAGKNKANPIAMMRSVAMMLGQSFGLTREGCAIEEAISAVLKSGKCTADIGGTETTTSFTKAVMQEMEEQALVGRGR

SEQ ID NO: 8913 - protein, 335 aa, Bacillus cereus ATCC 14579
MCGITGWVDYKRSLEGERDVVTKMAETLAKRGPDDNKVWIKGNVAFGHKRLIVVDPEGGKQPMTCLKDETNYAICYNGELYNTEDIRKELLRRGYRFKGHSDTEVLLASYIEWKEECVDHLNGIYAFAVWDEQKEQVFIARDRLGVKPLFYKYDSGRLLFGSELKAILSHPDVKAEVTLEGLSEIFGLGPSRTPGHGIYAGIKELRPGHAMTFSKNGLCIWRYWNVESKKHEDSFEETVEKTRFLLQDAITRQLVSDVPLCTFLSGGVDSSAITAIAAKEYERSGKGQLHTYSIDYEDNDKYFKANAFQPNSDAPFINLMTETFQTNPSSLRHFE

SEQ ID NO: 8914 - protein, 481 aa, Pseudomonas aeruginosa PAO1
MNGLPMNLIWFRCDLRTTDNSALLAAADGRPCLALYLLSPAQWREHDDAPCKVDFWLRNLGELQRQLAALNIPLLVRDCGHWRQAPEVIGRLCRELGVGAVHVNQEYGVNEERRDQAVGQRLREQGVAFHSHLDQLFFAPGSVLTRTGGYFQVFSQFRKVCHERLYQALPGVRPRPQPQPPHALASDPLPDAVPAFPRPADSLRRLWPAGEEVAQERLRDFADQHLADYHERRDFPALPGTSQLSPYLAAGVLSPRQCLDAALVANRGEFSGGQQGAATWINELLWREFYKHILVGYPRVSRHRPFREETEALRWRQAPAELEAWQQGRTGIPIIDAAMRQLLATGWMHNRLRMVVAMFLSKNLLIDWREGERWFMRHLIDGDLAANNGGWQWSASTGTDAVPYFRLFNPLSQSERFDPRGEFIRHWLPELAGLERKAIHDPSSLGLFAGVDYPRPMVDLKASRERALAAFRNLPPRDGRA

SEQ ID NO: 8915 - protein, 176 aa, Zea mays
  misc_feature (105)..(105): Xaa can be any naturally occurring amino acid
  misc_feature (116)..(116): Xaa can be any naturally occurring amino acid
MHASGAISYRKEKNKKDTAVAPFQGLKSTASLPIARRSSRSLGNVSNGGRIRCMQVWPAYGNKKFETLSYLPPLSTDDLLKQVDYLLRNGWIPCLEFSKVGFVYXENSTSPCYYDXPYWAMWKLPMFGCNDATQVYKELQEAIKSYPDAFHRVIGFDNIKQTQCVSFIAYKPPGSD

SEQ ID NO: 8916 - protein, 509 aa, Zea mays
MIANGLRKSSAASSQVSKLVKYIASAGSLQGGHSLSEPSARHYSSEPSLQATEENGFKGHSMLAPFTAGWQSTDVHPLVIERSEGSYVYDSNGKKYIDALAGLWCTALGGNEPRLVKAATEQLNKLPFYHSFWNRTTKPSLDLANDILSMFTAREMGKVFFTNSGSESNDSQVKLVWYYNNALGRPDKKKFIARSKSYHGSTLIAASLSGLPALHQKFDLPAPFVLHTDCPHYWRFRLPDETEEEFSTRLANNLENLVLKEGPETIAAFIAEPVMGAGGVILPPKTYFEKIQAVLKKYDILLIADEVITAFGRLGTMFGCDMYNIKPDLVSIAKALSSAYMPIGAILVSPEITDVIYSQSNKLGSFAHGFTYSGHPVSCAVAVETLKIYKERNIVEHVNKIAPRFQEGIKAFSGSPIVGEIRGLGLILGTEFVDNKSPNDPFPAEWGVGSIFGAECEKRGMLIRVAGDSIMLSPPLIMTPNEVEEIISKFGDALKATEERIGELKSRKN

SEQ ID NO: 8917 - protein, 456 aa, Arabidopsis thaliana
MISPTMEQGESLRIRVVMGKDRISELPDGLLLKILSSLPTNIVVATSVLSKQWRSLWKLVPNLEFDSDDYESEHYTFSEIVCKSFLSHKAPVLESFRLKFVNFNPVDIGLWVGIAFSRHLRELVLDFYPAELGKGVTFTFPSSLCTCNTLETLKLVLCILVDIPSPVLMKSLRTLHLEFVRYKDESSVRNLLSGCPGLEELRLYRGDDSDIKVFTIEVPSLQRLTIHDNNDGPEFWGYVINAPFLKYLLIEELRCPEFCLNAPELVEANIAEVTSITIEKFLGSFTSVSRLLLNLSPLKITYPTGSMFYQLVSLEMYTREAEWWNLLTLMLENSPKLQVLKLTDRSQNFHKDGLVSGKWNEPKDVPECLLSQLETFVWRRFDWGREEEKEIATYILKNGRRLKKATFSTNPIESEELNKLKERRKVLNGLDGVVRASNSCQLVFKFDPSYLGSDSP

SEQ ID NO: 8918 - protein, 289 aa, Fusobacterium nucleatum subsp. nucleatum ATCC 25586
MSMTQINWYPGHMKKTKDLIEENLKLIDVVLEIVDARIPLSSKNPNIASLSKNKKRIIVLNKSDLVSKQELDKWKKYFKEQDFADEVVEMSAETGYNVKKLYEAIEFVSKERKEKLLKKGLKKVSTRIIVLGIPNVGKSRLINRIVGKNSAAVGNKPGFTRGKQWVRIKEGIELLDTPGILWPKFESKTVGINLAITGAIRDEILPLEDVACSLLRKMLEQGRWESLKERYKLLEEDRDDKVLENILSKIALRMAMLNKGGELNVLQAAYTLLRDYRVAKLGKFGLDEI

SEQ ID NO: 8919 - protein, 323 aa, Deinococcus radiodurans R1
MVRPDFFLLGEPMPVDPNLYQLLLQLSQAPEPAGLEELRAGVIANAARSPKRPVTIGEVRDLSVAGAEGSLPARLYHPAGQAPASGWPLTVFFHGGGFVVYDLDTHDALCRELCATSGAAVLSVAYRLAPEARFPAPVDDALASVVWAAAHAAELGADAGRLAVAGDSAGANLATVTALRSRDEGGPALRAQLLIYPAADFEHPERYPSRQENGRGYFLTDERMRFFGQMYLARPEDAAHPHASPLNAESLAGLPPALVLTAEFDPLRDEGALRRSSQGRWRNAEYRPGPGMIHGYANMTAFSPVAAQLIDEAGVWLGEQLRG

SEQ ID NO: 8920 - protein, 231 aa, Triticum aestivum
  misc_feature (179)..(179): Xaa can be any naturally occurring amino acid
  misc_feature (191)..(191): Xaa can be any naturally occurring amino acid
  misc_feature (211)..(211): Xaa can be any naturally occurring amino acid
  misc_feature (217)..(217): Xaa can be any naturally occurring amino acid
MKTLLILTILAMAITIGTANIQVDPSGQVQWLQQQLVPQLQQPLSQQPQQTFPQPQQTFPHQPQQPVPQPQQPQQPVPQPQQPQQPFPQQPQQPFPQPPQPPLPQTQQPQQPFPQQPQQPFPQTQQPQQPFPQQPQQPFPQTQQPQQPFPQQPQQPFPQTQQPQQPFPQLQQPQQPFPXPQQQLPQPQQPXQSFPQQQRAFIQPSLQQQLXNPCRNXPTMPNLNWGILLGQ

SEQ ID NO: 8921 - protein, 525 aa, Triticum aestivum
  misc_feature (519)..(519): Xaa can be any naturally occurring amino acid
MAAIKPPPPDRPPQAARLPSPSSSSSAVAAAKRGATGSRGLLMGRYELGRVLGKGTFAKVYHARHVQTGESVAIKVLDREKAVRSGLVSHIKREIAVLRCVRHPNIVHLFEVMATKTKIYFVMELVRGGELFSRVSKGRLKEDIARRYFQHLISAVGFCHTRGVFHRDLKPENLLVDEAGNLKVSDFGLSAVAEPFQPEGLLHTFCGTPAYVAPEVLARRGYEGAKADIWSCGVILFVLMAGYLPFHDQNLMAMYRKVYKGEFRCPRWFSKDLTSLIMRFLDTNPSTRITLPEVMESRWFKKGFRPVKFYIEDDQLYNVIDAENDMLDLGLPDPLPQPLLPPPSSPSPQEVDGDDSGSESDASVVSCPATSSFEERHRLRGPLPRPASLNAFDIISFSRGFNLSGLFEEKGDEVRFISSEPMSGIITKLEEIANVKSFAVRKKDWRVSLEGTREGVKGPLTICAEIFELTPSLVVVEVKKKAGDKEEYDDFCNKELKPGMQHLVHQMAPVPITPTISEXAERPSR

SEQ ID NO: 8922 - protein, 370 aa, Triticum aestivum
  misc_feature (124)..(124): Xaa can be any naturally occurring amino acid
  misc_feature (143)..(143): Xaa can be any naturally occurring amino acid
MEKTNIVACRNPTSRDASDDEEATWSHAWGLISGFAVSITLKTAIELGIIDALTNAAGRALTVDELAAQLPAPDKAGSAASVDRLLRLLAAFDVVRCSTETGPDCEAVRKYTPAPVCRWLTSNXSMTHRLRDQIDHSNFVCYXTGHDAGAAVVCPAPTPFERAHRAPLCVYLGKNPRLSGVFNQAMFHMSVTVISKMVERFDGFDGVEVLVDVGGGTGAALEMITARHKHIKGINFDLPYVITQAPSLPGVENIAGNMFENVPTGDAIFLKWILHLQNDDECIKILKNCHRALPANGKVIVVEIVLPTTTEATREAQNMFLLDVIMFNNQQGGKERTEQDFLKMARSSGFDGAFRSTYIFGNFWALEFTK

SEQ ID NO: 8923 - protein, 250 aa, Thermoplasma acidophilum
MDIDERPLEEPQPGWVTVRVNYAGICGSELSAFVGQNELRKPPSIMGHEFTGKVVKVGSSSDSNLLGKNVAVNPLVTCGKCRYCKTGNRQLCPERKLIGVDYPGGFEEYVNVPSYSCYEITEKPEGSLAEPLATAFRAINHAKPEMDDRALVIGAGTIGLLSAKLLELYGTVERVVTDINDYRLEHALHWGATRTINNKKEKSIPKDFDIVIDAVGTQETRTMAINSIARGGRVVFVGLHEPNAEMPVNL

SEQ ID NO: 8924 - protein, 411 aa, Rickettsia prowazekii
NLEFAELKIRGKLFKLPILKASIGKDVIDISRVSAEADYFTYDPGFMSTASCQSTITYIDGDKGILWYRGYDIKDLAEKSDFLEVAYLMIYGELPSSDQYCNFTKKVAHHSLVNERLHYLFQTFCSSSHPMAIMLAAVGSLSAFYPDLLNFNETDYELTAIRMIAKIPTIAAMSYKYSIGQPFIYPDNSLDFTENFLHMMFATPCTKYKVNPIIKNALNKIFILHADHEQNASTSTVRIAGSSGANPFACISTGIASLWGPAHGGANEAVINMLKEIGSSENIPKYVAKAKDKNDPFRLMGFGHRVYKSYDPRAAVLKETCKEVLNELGQLDNNPLLQIAIELEALALKDEYFIERKLYPNVDFYSGIIYKAMGIPSQMFTVLFAIARTVGWMAQWKEMHEDPEQKISRPR

SEQ ID NO: 8925 - protein, 210 aa, Triticum aestivum
  misc_feature (89)..(89): Xaa can be any naturally occurring amino acid
MDEEGDEVYGPEIPVDGDMEAADVDMTAAGDDAAKELDEMKRRLKEMEEEAAALRDMQAKVAKEMQGGDANASTAEAKEQVDARSVYVXHVDYACTPEEVQQHFQACGTVNRVTILTDKFGQPKGFAYVEFLEQEAVQEALNLNESELHGRQIKVSPKRTNVPGMKQRPPRGFNPYHAYPYRSYGAPYFPPYGYGRVPRFRRPTRYRPYF

SEQ ID NO: 8926 - protein, 489 aa, Streptomyces galilaeus
MDRADRRYQDLVTRGFNGRFRGRPDVVYVVHTADQVVDAVNQAVAAGRRIAVRSGGHCFEGFVDDPAVRAVIDMSQMRQVFYDSGKRAFAVEPGATLGETYRALYLDWGVTIPAGVCPQVGVGGHVLGGGYGPLSRRDGVVADHLYAVEVVVVDASGQARKVVATSAADDPNRELWWAHTGGGGGNFGIVTRYWFRTPGATGTDPSALLPKAPTSTLRHIVTWDWSALTEEAFTRIIDNHGAWHQRNSAAGTPYASMHSVFYLNSRAAGQILLDIQTDGGLDGAETLLNDFVAAVNEGTGVEPAVQRTTEPWLRATLANKFDTGGFDRTKSKGAYLRKPWTAAQAATLYRHLSADSQVWGEVSLYSYGGKVNSVPETATATAQRDSIIKVWMSATWMDPAHDDANLAWIREIYREIFATTGGVPVPDDRTEGTFINYPDVDLADPRWNTSGVPWYTLYYKGNYPRLQRVKARWDPRDVFRHALSVRPPG

SEQ ID NO: 8927 - protein, 430 aa, Amycolatopsis mediterranei
MTVQKAPSQLLAAKLQIPPIPYSHAAGSWVYASDGTRYLDGASGIVNVNIGHAHPTVVAALRDQVGICTYASPGTFAPDLMEQLAAAAARAVHRPDDRVMFTPTGTHATESAIALARLVQRARGEEGRHKILTSTLGYHGNSAFVLALSGHRSRRPHEDDSFGLAPAFNPPYPGQHLGCPFDACRVECVRAVRDAIVAAGPESVAAVLMEPVNGTTGGGYVPPAGYLRALREVCDEFGVLVIHDEVLTGLGRCGLPLASHHTPGSAADIVTLSKGLGAGYVPLAATMLSPDLAEDIMTSGKWLPLMGTMSATPLQGRAGLAVLSVLEELGALDRDEVRGAALGRLVADAVRGRQVVTDVRGLGYFYGIELAPGTLGDVMRITRSRGLLLYPYVGFRPDRTGEGLLVAPRSTRPTAISASSARRWARHWTS

SEQ ID NO: 8928 - protein, 280 aa, Lactococcus lactis subsp. lactis Il1403
MIEQEKYTLNDGHLIPKIGLGTFQIRGYEGVEQILTAIQSGYRLLDTSTNYDSEGAVGEAIRRSGIPRSNFFVTTKLPGKYHHFEDALKMIEESLLRTGLSYFDLYLIHWPLPKRDNYVEAWKALIAAKKRGLVRSIGVSNFEEDHLDKIIQETGVIPAINQNEIHPYWPQEKLLKINKKYGILTEAWSPLGRGSKELEESLIQNIAQKYGKDTGQIILRWQVERGIIPIVKATSPEHQRRNIDIFDFSLSSEEINKITALKQENGRVDNQDPNEYEEFV

SEQ ID NO: 8929 - protein, 322 aa, Gibberella zeae PH-1
MSSYADSWLKFEEGIGGVRPVLRGTAEEMRTQYNGLGSALASLSSPVSDTQVKVTEGDVSGIKYRIYKPQGETKNFPIGVFYHSGGFVVGNLDAEDSFCRTVALRAGITIVNVDYRLSPEHKAPTHVEDAVALYEWAYHNAESISGDPSKMFTIGTSAGGGLALSTARKIVLGQTTLPMDAIKGVVALCPLTLHYENIPAEHQPQHLSYQEHGENIPIVDKLSLSQMLANTGIRPDDKDYFPILDHSCLKLFPPTYVVTCGQDALRDDGNILSNALSSAGVPTKTNHYESMPHCFWIVPTLPETKEFLDALTGGIQWIKSRF

SEQ ID NO: 8930 - protein, 411 aa, Rickettsia rhipicephali
DSEFAELKIRGKIFKLPILKASIGEDVIDISRVSAEADCFTYDPGFMSTASCQSTITYIDGDKGILRHRGYDIKDLAEKSDFLEVAYLLIYGELPSGEQYNNFTKQVAHHSLVNERLHYLFQTFCSSSHPMAIMLAAVGSLSAFYPDLLNFKEADYELTAIRMIAKIPTIAAMSYKYSIGQPFIYPDNSLDFTENFLHMMFATPCTKYKVNPIIKNALNKIFILHADHEQNASTSTVRIAGSSGANPFACISTGIASLWGPAHGGANEVVINMLKEIGSSEYIPKYIAKAKDKNDPFRLMGFGHRIYKNYDPRAAVLKETCKEVLKELGQLDNNPLLQIAIELEAIALKDEYFIERKLYPNVDFYSGIIYKAMGIPSQMFTVLFAIARTVGWMAQWKEMHEDPEQKISRPR

SEQ ID NO: 8931 - protein, 122 aa, Staphylococcus aureus subsp. aureus COL
MANHEQIIEAIKEMSVLELNDLVKAIEEEFGVTAAAPVAVAGAAGGADAAAEKTEFDVELTSAGSSKIKVVKAVKEATGLGLKDAKELVDGAPKVIKEALPKEEAEKLKEQLEEVGATVELK

SEQ ID NO: 8932 - protein, 475 aa, Synechococcus elongatus PCC 7942
MYEKIQPPSEGSKIRFEAGKPIVPDNPIIPFIRGDGTGVDIWPATERVLDAAVAKAYGGQRKITWFKVYAGDEACDLYGTYQYLPEDTLTAIREYGVAIKGPLTTPIGGGIRSLNVALRQIFDLYACVRPCRYYTGTPSPHRTPEQLDVVVYRENTEDIYLGIEWKQGDPTGDRLIKLLNEDFIPNSPSLGKKQIRLDSGIGIKPISKTGSQRLIRRAIEHALRLEGRKRHVTLVHKGNIMKFTEGAFRDWGYELATTEFRTDCVTERESWILANQESKPDLSLEDNARLIEPGYDAMTPEKQAAVVAEVKAVLDSIGATHGNGQWKSKVLVDDRIADSIFQQIQTRPGEYSVLATMNLNGDYISDAAAAVVGGLGMAPGANIGDEAAIFEATHGTAPKHAGLDRINPGSVILSGVMMLEYLGWQEAADLITKGISQAIANREVTYDLARLMEPAVDQPLKCSEFAEAIVKHFDD

SEQ ID NO: 8933 - protein, 167 aa, Magnetospirillum magnetotacticum MS-1
MAPSSFDRQMVSQANVSATVKWFNASKGFGFVAPSDGSPDAFLHISALERAGLTQVAEGATLVVDLGAGQRGPQVVMVHEVDSTTATPRAPRREERGPTETVEGVVKFFSAEKGFGFVACDEGGKDVFVHVKALERSGIKTLESGQRVRVTTTLGLKGPQADTVAII

SEQ ID NO: 8934 - protein, 354 aa, Nicotiana tabacum
MAADNIYDFVASNLLCTETKSLCFDDVDSLTISQQNIETKSKDLSFNNGIRSEPLIDLPSLSEECLSFMVQREMEFLPKDDYVERLRSGDLDLSVRKEALDWILKAHMHYGFGELSFCLSINYLDRFLSLYELPRSKTWTVQLLAVACLSLAAKMEEINVPLTVDLQVGDPKFVFEGKTIQRMELLVLSTLKWRMQAYTPYTFIDYFMRKMNGDQIPSRPLISGSMQLILSIIRSIDFLEFRSSEIAASVAMSVSGEIQAKDIDKAMPCFFIHLDKGRVQKCVELIQDLTTATITTAAAASLVPQSPIGVLEAAACLSYKSGDERTVGSCTTSSHTKRRKLDTSSLEHGTSEKL

SEQ ID NO: 8935 - protein, 99 aa, Brassica napus
  misc_feature (29)..(29): Xaa can be any naturally occurring amino acid
  misc_feature (48)..(48): Xaa can be any naturally occurring amino acid
  misc_feature (93)..(93): Xaa can be any naturally occurring amino acid
RVRELRCFQAVTCYQAVINNLEDAHELIXTAISTALKKTRPAKITTTXKLAGNPKAKFNPQPGPLSRVPKVSKLMGLDTAVEARAEFLSKAVXPVLVGG

SEQ ID NO: 8936 - protein, 77 aa, Glycine max
MGFWTLLEGFLLFANASAILNEDRFLARRGWTLAEMTGPQRNSLKGQVIGLIYACQFLRLPLILFNVITIIVKLFSG

SEQ ID NO: 8937 - protein, 439 aa, Nostoc punctiforme PCC 73102
MSSPQILLIRRACIVLPNGEMMIGDVLTRDRQIVEVAPEISQTAVVTEIDAEGLTLLPGVIDPQVHFREPGLEHKEDLFTASCACAKGGVTSFLEMPNTRPLTTTQQALDDKLERASQKSLVNYGFFIGATAENLPDLLLAKPTPGIKIFMGSMHGQLLVDGETTLETIFAKGDRLIAVHAEDQARINQRRQEFANIHDPAVHSQIQDNQAALLATQLVLKLSQKYHRRLHILHMSTAEEADLLRQEKPSWVTAEVTPQHLVLNTSAYEKIGTLAQMNPPLRSPHDNEVLWQALRDGVIDFIATDHAPHTLEEKAQEYPNSPSGMPGVETSLALMLTAAMEGKCTVSQVVNWMSKNVAVAYGIPNKGVIAPGYDADLVLVDLNTYRPVRREELLTKCHWSPFEGWNLTGWATTTIVGGEIVYDKGQVNTQVRGQALTFL

SEQ ID NO: 8938 - protein, 316 aa, Escherichia coli
TDKLTSLRQYTTVVADTGDIAAMKLYQPQDATTNPSLILNAAQIPEYRKLIDDAVAWAKQQSNDRAQQIVDATDKLAVNIGLEILKLVPGRISTEVDARLSYDTEASIAKAKRLIKLYNDAGISNDRILIKLASTWQGIRAAEQLEKEGINCNLTLLFSFAQARACAEAGVFLISPFVGRILDWYKANTDKKEYAPAEDPGVVSVSEIYQYYKEHGYETVVMGASFRNIGEILELAGCDRLTIAPALLKELAESEGAIERKLSYTGEVKARPARITESEFLWQHNQDPMAVDKLAEGIRKFAIDQEKLEKMIGDLL

SEQ ID NO: 8939 - protein, 100 aa, Glycine max
  misc_feature (13)..(13): Xaa can be any naturally occurring amino acid
  misc_feature (81)..(81): Xaa can be any naturally occurring amino acid
MASSTISDPAVTXVNHAQADIVTTFTDLKSKTALPTRNTNNDITSIGSNTGRVHFMQAYPAHNKNNTDTVSYLAHLYDAQXSKDEEYLIMNGWMNCLQFK

SEQ ID NO: 8940 - protein, 140 aa, Glycine max
  misc_feature (45)..(45): Xaa can be any naturally occurring amino acid
  misc_feature (78)..(78): Xaa can be any naturally occurring amino acid
  misc_feature (106)..(106): Xaa can be any naturally occurring amino acid
  misc_feature (132)..(132): Xaa can be any naturally occurring amino acid
LSTATRAGMVAPFTGLKTMAGFPTSKTNNDITPRASNGGRVSFFXERTPDGKNEVDTLRHLPDDDDAQLAKEPATVLXKGWIPWLEFEKEDGFVYREHKRAPGYYXGRYWTMSDTETFGRTDRSPVLKRLSXGNTGYPQA

SEQ ID NO: 8941 - protein, 288 aa, Oryza sativa (japonica cultivar-group)
MAAAAAACVESPDEGVEIREVWAGNLEAEIAAIRDEVDRYPYVAMDTEFPGIVCRPVGNFRTTDEFNYANLEANVNMLKLIQLGLTLSDEGGDLPRRGTGGRRCIWQFNFRGFDPRTDPSNADSIQMLRTCGIDFDRFAAEGADPIRFAELLMSSGVVLNADVQWITFHSGYDFGYLLRLLTGRNLPDNMPAFFDLIRIYFPVLYDIKHLMRFCSNLHGGLSRLGELLDVKRVGTCHQAGSDSLLTLGCYNKIKEVYFKGSTEKHAGVLYGLVIEDGVNRPPPTQPNE

SEQ ID NO: 8942 - protein, 355 aa, Thalictrum flavum subsp. glaucum
MALQEGVNYLSGLGLSRLICLPMALRAAIELNVFEIIFQAGPEAQLSPAEIVAKIPTKNPNAAIALDRILRMLGASSILSVTTMKDGRVYGLTEESRCLVADKNGVSVVPMLLFTSDKAVVESFYNIKDVVLEEGVIPFDRTHGMDFFAYAGKEQSVNKSFNQAMGAGSTIAFDEVFKVYKGFHDLKELVNVGGGIGTSLSNIIFKYPHIKGINFELPHVIADAPNYPGVEHIAGNMFEGVPNAQNILLKWVLHDWDDERSIKILQNCWKALPEGGTVIVVEFVLPQILGNNAESFNALTPDLLMMTLNPGGKERTTTEFDGLAKAAGFAETKFFPISQGLHVMEFHKATAGVAS

SEQ ID NO: 8943 - protein, 312 aa, Aspergillus nidulans FGSC A4
MSKPGDYNAVRRDIAAQLKKPGYDDGSAGPVFVRLAWHSSGTYDAASDTGGSNGAGMRYEAEGGDPANAGLQHGRAFLEPVKEKHPWITYSDLWTLAGVVAIEEMGGPKIPWLPGRTDFVDDSKVPPRGRLPDGAQGADHLRFIFYRMGFNDQEIVALAGGHNLGRCHADRSGFQGPWVNNPTRFSNQFFKLLLNMEWKPKTLENGVSQFVYIDPEAEDHEEPLMMLPTDVALRDDPAFRPWVERYAKDKDLFFDHFSKAFAKLIELGIQRDASGKVTNTDNVKGGYHSAPKKSDEPTGPPRPHTAQRAAKL

SEQ ID NO: 8944 - protein, 1251 aa, Aspergillus nidulans FGSC A4
MTVWLMWQEERAVESLVTCDAARVGGKERRDLQPKNGLRKEKLIAETVLSAMTEQDNSYRPRSPDLSTFQPAIPSPVYQFGNPLAHRTSYDASPFFTPHYQQPPVASARALQQYIPPYPDHSFDADMARRSSRLSRAVEVAPAPAPEMKYEEPKYEEPLYQEPVKPEQPSEPVEHPKLDPAAGIEVKTKFPVARIKRIMQADEDVGKVAQVTPIAVSKALELFMISLVTKAAKEAKDRNSKRVTASHLKQAVAKDEVLDFLADIIAKVPDQPTGRKHEDDGSDQNEQPKRKRGGRRPKDDNRDGAHILRRCGGGMACIFDVNRALILGTLISLQAINLAFYLHYLLNFPQLCTEKVRTWVLTLNPFRSQGHHAAYSEYFHSPSYLLFSSRLLLVLLPARKYHAVATAKMDFWSRIIGGSRSLSKSPRATSPTERLTTFKRTCNTLQQIWRSSNSTAAEQAAIVHARHCIERLNSVLSDESRGPAPHPCLAYAASSQIFVTVTKLALSSYDEAMLRSATVLFNTLIDSEVDGVVDNRLFARALVDLVRRADKKSADIEGRLVELLFGVANNIRLQPNILPAWFAPRTDDEEQSTGSVEFAGTMRTDDFPLFYLLVEWVHHAGRAGDFARTGLLYLIETASRSKDLERWLIESDLATLMATGLGALYSQLGSLGSCLDVEPVVPHVISHSDHAQQETALPPALGSSMDSFMAYLLFWQDTIDHCKSAEVVATLLDHFQVLFLEQLLYPSLLESSDVEGGSTAAVLTYLYRILASVDQEDLVQRILHFLLASPSGVDVQAPEKKKDMSASRRKSLDVLAAFSQEAARPSPTLFNLRDLVLLGLQSPNRQTVLATLRLLTVILQRYSSFSIFLIRTNPTQPAKQRTVGALNAEVGHLLTMATSIMEEPTLDQSFDNYLKDASWILESRLATPPPDNCSETLPCEIRQEDPIVRELLGCLETFFTNTVIVNLALTEVLMSIASSHLMALDGWLLVDPAKYHYVQSDGGSSNDKSEDILDQVHRMYQEPTWSPADTPALTAALRRLVDKVQEWRKQVEDFDILIAARRDLLHEDDVRTNQAEQNLGTPAPRSTERYSSNTPRTPPLGFDQGTPRGRRDLRNLTSPQRSIVGSPLREVTVNKTHSPPPRDASEARSAAEELRKRLAAPFLPESKVSTFNDRTDNSAQEPSPADQEVAVTDEEERKPKAETASLGHVLTNVVILYEFLLEISAAVQARGAIFEEAGFHGVGSSLPVDDS

SEQ ID NO: 8945 - protein, 150 aa, Brassica napus
MERSLLQWRLLPLLALIASFLSVFFASRSYEKETQCSLLPHDHYWISSKRILTPDGLISGSVEVNGGVIVSVVKEEDWYKEQRSRVKVTDYGEAVIMPGLVDVHAHLDDPGRSEWEGFPSGTKAAAAGGITTLIDMPLNSDPSTVSPETL

SEQ ID NO: 8946 - protein, 333 aa, Glycine max
  misc_feature (53)..(53): Xaa can be any naturally occurring amino acid
MEVVSDEEAFLFGMELAGASAVSMVLKSALELGILETIAKAGPGAYLSPSHIXYNILTYSLHQLPHGKAERHYGLHPKAKYLVNNEGGVSVAAYFLMEHDKVLKDMWFHLTDSVKEGGHPFSNAYGMTAFEFHDTNPRFNKLFNKGLSDISSITMKKILETYNGFEGVGSVVDVGGGTGAIINMVASKYPTTKCVNFDLPHVIKEAPAYTGVEHISGDMFVSVPKGDVIFMKWVCHDWNDEQCLKLLKNCYDSLPDDTGKVILAEGISPETPDSNLAARCEFQMDVIMLCHSPNGKEKTEKEYKALAKGAGFHGFRIASCVLNTHVMEFLKKA

SEQ ID NO: 8947 - protein, 147 aa, Thermotoga maritima MSB8
MLLGRREDIFRPFRELQREIDRLFDDFFRTEVRPAKEFFAPDMDVYETDDEVVIEVEIPGIDRKDVKITVEENILKISGEKKLEREQKGKNYYYVERSAGKFERAIRLPDYVDVEKIKAEYKNGVLTIRVPKKEERKKKVIEVEVQE

SEQ ID NO: 8948 - protein, 481 aa, Mesorhizobium loti MAFF303099
MDIGLLIDGDKRDASGAAAYERLDPFTGKLATRAAAASVADANAAVEAAAAAFATWSKTGPGERRALLSRAADVMASKVGEFTKLMMEETGATAPWAGFNVMLAANMLREAAAMTTQISGEIIPSDKPGTLAMAIRQPAGVCLGIAPWNAPVILGTRAIAMPIASGNTVVLKASEMCPGTHRLIGQVLVEAGLPKGVINVVTNDPKDAAAIVEALVAHPSVKRVNFTGSTKVGRIIAELAGRHLKPALLELGGKAPLLVLDDAAIDAAVNAATFGAFMHQGQICMSTERLIVDERIADEFVSKLAARASQLPAGDPRGHVVLGSLISSQAADKMEELIADAVAKGAKLVAGGKRTGTVVEATLLDHVTPAMRVYAEESFGPVKPVIRVKDEDEAVRVANDTEYGLSSAVFSRDIKRAMAVAARIEAGICHINGPTVGDEAQMPFGGVKGSGYGRFGGKASIAEFTDLRWVTIEDPGQHYPF

SEQ ID NO: 8949 - protein, 473 aa, Schizosaccharomyces pombe
MTNTRLASTRRLASSLLSQASLRSRQLNPLFTSSYSTRSSSLKDRLAELIPEKQAEIKKFRAEHGQDVIGEVTINQMYGGARGVRSLIWEGSVLDPNEGIRFRGYTIPECQKLLPSSPNGKQPLPESLFWLLVTGEIPTLSQVQALSADWAARSQLPKFVEELIDRCPPTLHPMAQFSLAVTALEHDSAFAKAYERGMNKHDYWKYEYEDCMDLIAKTVPIAGRIYRNLYRDGVVAPIQMDKDHSYNFANVLGFANNEEFVELMRLYLTIHADHEGGNVSAHTGHLVGSALSSPFLSMAASLNGLAGPLHGLANQEVLNFLITMKKEIGDDLSEETIKSYLWKLLNSGRVVPGYGHAVLRKTDPRYTAQREFALEHLPKDPMFQLVSRLYEIVPGVLTEHGKTKNPYPNVDSHSGVLLQYYGLKEQSFYTVLFGVSRTLGVASQLIWDRALGLPIERPKSFSTEALKKMVETK

SEQ ID NO: 8950 - protein, 324 aa, Haloferax volcanii
MTEEIVVIPGDGIGAEVIPAAVDVLKAVGDFEFVEADAGDHVKEETGEALPQETYDLAAEADATLFGAAGETAADVILPLRTAVDSFVNVRPAKAYPGVDALRPETDLVFLRENTEGVYSGHEDRLSEDLSTLTRVVTTSASERLAEYACDYVGGEGGSFQVAHKANVMRETDGRFRDAAVAVADERGVETEEVLMDAFATRVCLDPTQFDTIVCPNLAGDVLSDLAAGLVGGLGLLPSANIGPDAALFEPVHGSAPDIAGEGIANPAATILSAAMLLDYLDHEAEADRVRSAVEGVLADGPRTPDLGGDASTEDVTAAILDRL

SEQ ID NO: 8951 - protein, 474 aa, Bacillus cereus G9241
MKKHLYINGDWKSVNTYKPLYAPYSEETLAEIAQGTEEDVKEAVTAAKNAMKEMNTLSAYDRATILEKVAQKMDERREEFAEIIAKEAAKPIRAARGEVDRTVQTYKFAAEEAKRIYGETLPLDAAPGADGRIAYTIRKPIGVIGAITPFNFPLNLVAHKVGPAIAAGNTVVLKPADQTPLSSYALVELFEEAGLPKGALNIISGPGSTVGEAIVTNDDVASITFTGSPKVGIGIKAKAGLKRVTLELGSNAAVIIDKDVELTDELIERVKWGAFVNNGQVCISVQRVFVHEERMDEFLSKLQKAMETLVVGDPLIEETDVSALISKKDVDRIDNWVQEAVKEGANVLYGGNKRDERIFEPTVLTNVPKHVSVQCQEVFGPLMTVNTFKEFDEAIEQANHSRYGLQAGVFTNNLFKAMRAIDELEVGGVMINDIPTFRVDHMPYGGVKESGTGREGIKYAIEEMTEMKLVCIKK

SEQ ID NO: 8952 - protein, 303 aa, Physcomitrella patens
MDQYEKVEKIGEGTYGVVYKARDRLTNETIALKKIRLEQEDEGVPSTAIREISLLKEMHHGNIVRLQDVVHSEKRLYLVFEYLDLDLKKHMDTCPDLAKDPRLIKTFLYQILRGIAYCHAHRVLHRDLKPQNLLIDRRTNALKLADFGLARAFGIPVRTFTHEVVTLWYRAPEILLGSRHYSTPVDVWSVGCIFAEMVNQRPLFPGDSEIDELFKIFRTLGTPNEEVWPGVTSLPDFKTAFPKWPPKPLSSVVPSLEPAGIDLLEVCDLSTPASEFCVVLFFFIISTFSLIVRLKQCMQSYAS

SEQ ID NO: 8953 - protein, 430 aa, Mycobacterium tuberculosis H37Rv
MSVLIRGVRPYGEGERVDVLVDDGQIAQIGPDLAIPDTADVIDATGHVLLPGFVDLHTHLREPGREYAEDIETGSAAAALGGYTAVFAMANTNPVADSPVVTDHVWHRGQQVGLVDVHPVGAVTVGLAGAELTEMGMMNAGAAQVRMFSDDGVCVHDPLIMRRALEYATGLGVLIAQHAEEPRLTVGAVAHEGPMAARLGLAGWPRAAEESIVARDALLARDAGARVHICHASAAGTVEILKWAKDQGISITAEVTPHHLLLDDARLASYDGVNRVNPPLREASDAVALRQALADGIIDCVATDHAPHAEHEKCVEFAAARPGMLGLQTALSVVVQTMVAPGLLSWRDIARVMSENPACIARLPDQGRPLEVGEPANLTVVDPDATWTVTGADLASRSANTPFESMSLPATVTATLLRGKVTARDGKIRA

SEQ ID NO: 8954 - protein, 506 aa, Pseudomonas aeruginosa PAO1
MIYAAPGTPGAVVTFKPRYGNYIGGEFVPPVKGQYFTNTSPVNGQPIAEFPRSTAEDIDKALDAAHAAAEAWGRTSVQERSNILLKIADRIEQNLELLAVTETWDNGKAVRETLNADIPLAADHFRYFAGCIRAQEGSAAEINDSTVAYHIHEPLGVVGQIIPWNFPLLMAAWKLAPALAAGNCVVLKPAEQTPLGICVLLELIGDLLPPGVLNVVQGFGREAGEALATSKRIAKIAFTGSTPVGSHILKCAAENIIPSTVELGGKSPNIYFEDIMQAEPAFIEKAAEGLVLAFFNQGEVCTCPSRALVQESIYPAFMEEVLKKVRAIKRGDPLDTETMVGAQASQQQYEKILSYLDIAQQEGAELLAGGSVEKLEGNLASGYYIQPTLLKGHNGMRVFQEEIFGPVVGVTTFKDEAEALAIANDTEYGLGAGLWTRDINRAYRMGRGIKAGRVWTNCYHLYPAHAAFGGYKKSGVGRETHKMMLDHYQQTKNLLVSYDINPLGFF

SEQ ID NO: 8955 - protein, 475 aa, Staphylococcus aureus subsp. aureus MRSA252
MRDYTKQYINGEWVESNSNETIEVINPATEEVIGKVAKGNKADVDKAVEAADNVYLEFRHTSVKERQALLDKIVKEYENRKDDIVQAITDELGAPLSLSERVHYQMGLNHFVAARDALDNYEFEERRGDDLVVKEAIGVSGLITPWNFPTNQTSLKLAAAFAAGSPVVLKPSEETPFAAVILAEIFDKVGVPKGVFNLVNGDGAGVGNPLSEHPKVRMMSFTGSGPTGSKIMEKAAKDFKKVSLELGGKSPYIVLDDVDIKEAAKATTGKVVNNTGQVCTAGTRVLVPNKIKDAFLAELKEQFSQVRVGNPREDGTQVGPIISKKQFDQVQNYINKGIEEGAELFYGGPGKPEGLEKGYFARPTIFINVDNQMTIAQEEIFGPVMSVITYNDLDEAIQIANDTKYGLAGYVIGKDKETLHKVARSIEAGTVEINEAGRKPDLPFGGYKQSGLGREWGDYGIEEFLEVKSIAGYFK

SEQ ID NO: 8956 - protein, 250 aa, Zea mays
  misc_feature (185)..(185): Xaa can be any naturally occurring amino acid
MAKNYPTVSAEYSEAVEKARRKLRALIAEKSCAPLMLRLAWHSAGTFDVSSRTGGPFGTMKCPAELAHGANAGLDIAVRLLEPIKEEFPTLSYADFYQLAGVVAVEVTGGPEIPFHPGREDKPQPPPEGRLPDATKGSDHLRQVFGKQMGLSDQDIVALSGGHTLGRCHKERSGFEGAWTTNPLXFDNSYFKELLNGDKEGLFQLPSDKALLSDPVFRPLVEKYAADEKAFFYDYKKAPLKLSELGYADA

SEQ ID NO: 8957 - protein, 491 aa, Candida albicans SC5314
MAPKLNNPNLFQNKPFINGQWYDSKSTSTFKVYDPATQELIIELPDQTPEEIDEAIAITHKAFQTYQRTPVYERAKWLRRMYELMIENLQDLATLITWENGKCLADALGEIKYAASYFEWFSEECKRNYGHTIQPSNQNNKVITYKQPVGPVGLLCPFNFPSAMGARKAAPALAAGCTCILKPDGQTPLSSLALAYLAQQAGFPDGCFNVVLTSVTNTPMCGLKFCQSPKLKKISFTGSTNVGKLLMQQSSSTLKKLSMELGGNAPIIVFNDCNLDLAVDQSITSKFRSLGQTCVCANRIYVEKGVYDEFCNKFVEKVNQFKIGNGFEPGVTHGCLINTKAIEKVEDHVQDAVEKGAKLIVEGGRLPQLGENFYSPSVVKDVTQDMKVVKEETFGPLAAIIPFDSKEQVLQWCNDTPYGLASYIFSENLNTVWYMSEFLENGMVSVNTGLFTDAALPFGGVKESGFGREGSLYGMDDYTVIKSITLGNVYN

SEQ ID NO: 8958 - protein, 325 aa, Scutellaria baicalensis
MACMATSFRPIFSIAALVLLLTLVPSEAQLSATFYDSTCPNAVSTIRTSIRQAVSAERRMAASLIRLHFHDCFVQGCDASILLDETSTIQSEKTAGPNAGSVRGFQVIDAAKTAVERLCPGVVSCADILTLAARDASVAVGGPSWTVRLGRRDSTTANRAQANTDLPGPTSTLTQLITRFDAKGLNAREMVALSGAHTLGQSQCGNFRARIYSNGSDIEANFASTRRRQCPQDGSGDSNLAPLDLVTPNSFDNNYYRNLVARRGLLQSDQVLLSGGETDAIVTSYSSNPATFASDFANAMIKMGEIQPLQLGQNGIIRRTCGAVN

SEQ ID NO: 8959 - protein, 193 aa, Magnaporthe grisea 70-15
MAEIRRKLVIVGDGACGKTCLLIVFSKGTFPEVYVPTVFENYVADVEVDGKHVELALWDTAGQEDYDRLRPLSYPDSHVILICFAIDSPDSLDNVQEKWISEVLHFCSGLPIILVGCKKDLRYDQKTIEELRKTSQKPVSPEDGEEIKKKIGAYKYLECSAKTNEGVREVFEHATRAALLSRHKTKKKKCLIL

SEQ ID NO: 8960 - protein, 277 aa, Staphylococcus aureus subsp. aureus COL
MEVKTFYNGNTMPQIGLGTFRVENDENCMESVKYAIEQGYRSIDTAKVYGNEEQVGAGIRAGLESTGIAREDLFITSKLYFEDFGRENVAAAYEASLSRLGLKYLDLYLVHWPGTNEAVMVDTWKGMEDLYKNNNVKNIGVSNFEPEHLEALLAQVSIKPVINQVEYHPYLTQHKLKLYLAAQRIVMESWSPLMNAQILNDETIKDIAQELGKSPAQVVLRWNVQHAVVTIPKSVTPNRISENFQIFDFELSDEQMTRIDGLNQDKRIGPDPKKFEG

SEQ ID NO: 8961 - protein, 278 aa, Zea mays
MTLYLQLVSTSLHAGSPRLALLHLRRSCEFNPRVSMSSYSPPPPPPRDQSMDTEAPNAPITRERRLNPDLQEQLPKPYLARALEAVDPSHPQGTKGRDPRGMSVLQQHAAFFDRNGDGVIYPWETFQGLRAIGCGLTVSFAFSILINLFLSYPTQPGWLPSPLLSIRIDNIHKGKHGSDSETYDTEGRFDPSKFDAIFSKYGRTHPNAITRDELSSMLQGNRNTYDFLGWLAAAGEWLLLYSLAKDKDGLLQRETVRGLFDGSLFERLEDDNNKKKSS

SEQ ID NO: 8962 - protein, 165 aa, Aloe vera
SGYSLLRDPHHNKGLAFTDKERDAHYLRGLLPPVCISQELQEKKLMRSLRQYQVPLQRYMAMMDLQERNERLFYKLLIDNVEELLPVVYTPTVGEACQKYGCIFKRPQGLYISLKEKGKILEVLKNWPERSIQAIVVTDGERILGLGDLGSQGMGIPVGKLSLYT

SEQ ID NO: 8963 - protein, 138 aa, Triticum aestivum
  misc_feature (125)..(125): Xaa can be any naturally occurring amino acid
GTFVAPFQGLKSTAVLPISRRSSSAGLSSVSNGGRIRCMQVSPIEGIKKFETLSYLPPLSTEALLKQDDYLIRSKWVPCLEFSMVGFVFREHNSSPGYYDGRYWTMWKLPMFGCTDAIQVLNEVXEVKMEYPDSYVRL

SEQ ID NO: 8964 - protein, 129 aa, Treponema denticola ATCC 35405
MAALTNEQIIEAIGEKTILELSELIKAMEEKFGVTAAAPVAVVAGGAAGGGAAEEEKTEFTVTLKGLSDPGKKIGVIKEVRNVIPGLGLKEAKELVEGAPKVLKEDVSKEEAAKIKEAITAAGGEVEIA

SEQ ID NO: 8965 - protein, 375 aa, Pseudomonas aeruginosa UCBPP-PA14
MDTPIERAPLAPDLSQARYAVDLTGLVPAEVAAGLPPLPPNHFYFYPPDPLLEGDGAITAIEDSDPFDQYVYRLRRVLYQGRTRWQNVLIADTYNYDRVLMLDGAIQSAESDESLYHELLVQPAMLAHDEPRDVLIIGGGEGATLREVLSHASVRRAVMVDLDRELVELCREHLFQWHQGAFDDPRCELLAEDGRAYLERDPSLYDVVIIDVVDMLDNGPAQALYTRQFYELLHSRLRPGGVVAVQGLEFSHSDDKPHAALARTLRSVFSQVHSYRATVPSFLSSWGFLLASDWLDANHWQAEDIDRRIERKLGPLWLDHLDGDYLKACFVMDRETRFLLAQPGPVLEDGVPFVAPPDIEEIEFGPAQLPALART

SEQ ID NO: 8966 - protein, 338 aa, Pirellula sp. 1
MLIMPVDPTPVLQYINGFRFSKVMFAAVELGVFDSLEQQKRSAEDLAIELQCDPAAVSRLLNGLVGMELLSRDGEQYKNTGLASELLTSTSPNRMTGYIKFSNDVSWKLWSHFENAIREGSHRWKDAYGWDQPIFSSFFADDAAMREFLMGMHGYGVISSPKVVRAVDLSQFNHLVDLGGATGHLPMAACEAYESLTATVFDLPGVIPLTKEIVAQSSVSDRIDVVAGDFFDDELPQADLMSLGRILHDWSDEKIDRLLSKIYDRLPEGGGLLLAEILIQDDRGGPDWGQMQDLNMLVCTEGRERTLAEYEAILRRAGFREVTGQVTGAPVDAVLAIK

SEQ ID NO: 8967 - protein, 208 aa, Oryza sativa (japonica cultivar-group)
MGEYCDWRRSEAIKRQDREATNPSAIRGRRRRRRRRRRGDREMESAMFGLETPLMTALQHLLDIPDGEGGAAGKQGATGGPTRAYVRDARAMAATPADVKDLPGAYAFVVDMPGLKSSDIKVQVEEERLLVISGERRRGGGEEEKEESCKYLRMERRMGKFMRKFVLPDNADVDKISAVCQDGVLTVTVEKLPPPEPKKPKTIEVKVA

SEQ ID NO: 8968 - protein, 389 aa, Glycine max
GAECIDPDCTWVEQWVHRAGPREKIYYKPEEVKAAIVTCGGLCPGLNDVIRQIVITLEIYGVKNIVGIPFGYRGFSDKELTEVPLSRKVVQNIHLSGGSLLGVSRGGPGVSDIANSLEKRGINMLFVLGGNGTHAGANAIHHECRKRRLKVSVIGVPKTIDNDILLMDKTFGFDTAVEEAQRAINSAYIEAHSAYHGIGVVKLMGRSSGFIAMQASLSSGQVDICLIPEVPFNLHGPHGVLSHLKYLLETKGSAVVCVAEGAGQNLLQKTNATDASGNVVFGDIGVYIQQETKKYFKEIGVHADVKYIDPTYMIRAIRANASDGILCTVLGQNAVHGAFAGYSGITVGLCNTHYAYFPIPEVISHPRLVDPNSRMWHRCLTSTGQPDFI

SEQ ID NO: 8969 - protein, 448 aa, Xylella fastidiosa Ann-1
MREHPDTLPLVPIVRGEGVWLVGHDGRRYLDAVSSWWTNLFGHADPRISAAIAAQARTLEHVMLAGFSHEPAVRLAEALLRLAPRQDGREPLSKVFYADNGSAGVEVALKMAFHYFRNRGEEQRTRFIALHNGYHGETIGALAVGDIPLYRRVYAPLLTEVLFAPSPDAYLAEPGQSAAEYALQAAEALEALFKRYSGQICALILEPLLQCAGGMRMHHPVYLHRVRELCDAHGALLICDEIATGFGRTGTLFACEQACSAISTDTDDKQLGIMPDLLCLSKGLTGGVLPLAAVLTTQQLYEEFLDDSRERAFLHSHSYTGNPLACIAALTTLDIFENDCIIERNQVTAARMTQLAASLSGHPHVADVRQTGMVVAFELTRDGNKRTPFPPQARLGLHVYRAALARGVILRPLGDVVYWMPPYCVDEEQLHLLAETTRVAIDEAIACV

SEQ ID NO: 8970 - protein, 404 aa, Emericella nidulans
MASQVQPGQKPKVQPCRYKTGKTLGAGLYSVVKECVHIDTGQYYAAKVINKRLMVGREHMVRNEIAILKQVSTGHQNILTLVDYFETMNNLYLVTDLALGGELFDRICRKGSYYESDAADLVRAILSAVAYLHDHGIVHRDLKPENLLFRTPEDNADLLIADFGLSRIMDEEQLHVLTTTCGTPGYMAPEIFDKSGHGKPVDIWAIGLITYFMLCGYTPFDRETNLEEVQAIATANFSFTPVEYWRGVSQEARDFIKRCLTVNPKKRMTAHQALQHPWINPPYDTTDDLGSGEDLLPNIKKNFNARRTLHKAIDTVRAINKLRENGGLMMDGIMSVDPKPEHVNGSEVVEDRTTPRERENEDAMEIDSRSNARGQTEQQIREQERKVKETVAGLWSRTAPRSER

SEQ ID NO: 8971 - protein, 1025 aa, Chloroflexus aurantiacus
MSVSDVASAPVIPLETILHTRRHLAILGEPGAGKSTTLQFIGLSYALATAQQPVERLSITRPAVPVYLRLPVSASTITQQTVREAMVAEVRDRLQCSAAEAEAVLRSWQEWPGVIILLDGLDEVPVALRVQVRERIKTLMRSGIGRVIITSRPSVLLHLGGLDEYTLKPFEHFDRDVLPYLKGWLRVLKPDLQAQVVDNVAQDVMTKLRASPALRSLIGNPLLLRLIVQYFVTTGDIAWNRADLYRQWVTEAWARARWRGAAATEEPHYLIALHTLAWHLHAGRDNTETALQTVLRTSGLAADDRAAADLLHRLQAQTGLLLRLSTGQDGLAHVRYVFAHQTLREYLVALRLQQAWQRGKHRTWRFLQPRLHLPEWREPLALLVGLLTESEAQHLLRQILHAKSSEERLLCRDLLLTANLAVESGYIHSVWESLAPKLARALRREHLSKETAAVLARVGKPAVPMLAQALNDPSVEVRRAVVQALGLVGDAAVPVLAQALNDAQPEVRWAAVASLVAVGNAAVDTLVQALGDDDAEVRRVIGQALLEIGDAAMPALVKALADKRANVREAAARALGESGYAAAVSALVQSLRDENPWVRQAVAEALGAIGDAAAVVALAQALNDENVWVRQATARALGRIGGAAAMLPLTVALNDENPWVRQAVAEALGTIGDAAAVLPLTRALSDEHAWVRRSAARALGQIGDGAAVPALAKALSDGDVQVRQQVVEALGCIGDSAAAAALVKALGDTNAEVRWTTMKAFEQIGSRNVATLLRAISDGKWQFPWQDAQAWKIGNQAIEAIGSVFNGGDTGKRMIATLALGETGNSAALPALERALRDTDLWVRRAALEALAKIGDQAVIVPALERALRDTDQWVRQTAAEMLVKIDDTAAVLPALERALRDADQWVRRTAAEALGKIGDASAVEALQRALADTESMGAAGRSRGARKDRRCVGGGGAAKGIGRYRSMGAAGRSGGARKDWRCVGSGGAAKGIGRYRSMGAAGRSRGVGEDRRCKSGSITDTVTE

SEQ ID NO: 8972 - protein, 436 aa, Bacillus cereus G9241
MRDYLIKPLVGQPYPMISHGKGVYLYDQNGNKYFDGSSGAITAGIGHGVKEIADVIKKQAEEIAFVYRSQFTSEPAEKLAKKLSDLSVGDLNWSFFVNSGTEANETAMKIAIQHFQERGIQGKHKILSRWMSYHGITMGALSMSGHPLRRQRFVSILEDYPTIPAPYCFRCPVQKVYPTCQLACATELERSIERIGAEHIAAFIAEPIIGAAGGAVVPPKEYYKVIKDICSHYDILFIADEVMTGLGRTGAWFAMEHWGVEPDIMTLGKGLGAGYTPMAATVVSDRVMEPILRGSRSVMSGHTLSANPLSAATALAVIEYMEKHNLPEKTAEKGEYLIKGLQKVQQQSTIIADVRGKGLLIGVELQPFTKASELISVAAKNGLLLYQAVSGQAGKEDSALLVAPPMTTTYSELDELLSIFAKSVEEMMQKGGHSIA

SEQ ID NO: 8973 - protein, 453 aa, Rhodospirillum rubrum
MAQSYDLILKGGTAVLPGRTMRADIAVCGGKVVRVGFLDAGSARQTIDCAGLHVLPGVIDTQVHFREPGLEHKEDLESGTRAAVLGGVTGVFEMPNTAPATDSPEALEEKLTRAQGRTWCDHAFFLGASAANAAALGGWERRDGCAGVKIFMGSSTGSLLVDQDEAIARVLAGGFRRVAVHCEDEARLKERKALVADGASVALHPEWRDVETALAATRRLLALARQAGRKVHVLHVTTAEEMALLQDNRDIASVEVTPQHLTLAAPDCYEGLGTFAQMNPPIREARHREALWRALEQGVVDIIGSDHAPHTLKEKSLPYPKSPSGMPGVQTLVPVMLDHVNTGKLSLERFVDLTSAGPARVYDIAGKGRIAAGYDADFTVVDMNAERTITNEWIASKCGWTPFHGLSVRGWPVMTIIRGAIVMRDGALQGRPLGAPVRFHPLPPLTKESAVLR

SEQ ID NO: 8974 - protein, 103 aa, Oryza sativa (japonica cultivar-group)
MEQGKQQHQPPPPSQPQPQQEKRGSRDDDMHKTTGDVMTHSFGEGYSTRSDEEGFGGVYGQNDPVFNPGTEVHPSHPEYDTSQGSEVKEKEKARHHKDDKHAT

SEQ ID NO: 8975 - protein, 426 aa, Phalaenopsis sp. SM9108
MAFSVGLTRFIVSSHPKTAKEILSSPAFADRPIKESAYELLFNRAMGFAPFGDYWRNLRRISSTYLFSPRRVSSFEKQRSEIGEGMVRDMKRMMERNGVVEVRRMLHYGSLNNIMLTVFGKKFDFAKDEGLELELILKEGYELLGIFNWGDHLPLLGWLDLQGVRRRCRTLVAKVNVFVKKIIDEHKRRANGVGIDEGEGEDFVDVLLGLEEKDRLSESDMVAVLWEMIFRGTDTVAILLEWTLARMVLHPDIQSKAQVEIDSVVDSSRPVLDSDIQRLPYLQSIVKETLRMHPPGPLLSWARLAIHDVPVDGHMIPAGTTAMVNMWAITHDECNWAEPNKFNPDRFIDEDVNILGSDLRLAPFGSGKRVCPGKTMALAAVHLWLAQLLKSFKLLPSRNGVDLSECLKMSLEMKNPLVCVAVPRFE

SEQ ID NO: 8976 - protein, 463 aa, Arabidopsis thaliana
MRSDHYFSLRSPTEDFVGGYPSDEEWHGYINNNDRVLLKVISYSSPTSAGAECLDHDCSWVEQWIHRAGPREKIYFRPEEVKAAIITCGGLCPGLNDVIRHIVITLEIYGVKNIVGIPFGYRGFSDKDLTEMPLSRKVVQNIHLSGGSLLGVSRGGPSVSEIVDSMEERGINMLFVLGGNGTHAGANAIHNECRKRKIKVAVVGVPKTIDNDILHMDKTFGFDTAVEEAQRAINSAYIEAHSAYHGIGVVKLMGRNSGFIAMQASLASGQVDICLIPEVLLCYYFKFQNMIDELALRDPMHLKVPFNLHGPNGVLKHLKYLIETKGSAVICVAEGAGQNFLEKTNAKDASGNAVLGDFGVYIQQETKKYFKEISTPIDVKYIDPTYMIRAVRANASDGILCTVLGQNAVHGAFAGYSGITVGIINTHYAYLPITEVIAYPKSVDPNSRMWHRCLTSTGQPDFI

SEQ ID NO: 8977 - protein, 478 aa, Caulobacter crescentus CB15
MTDTLRHYIGGERVAADAPAESLNPSNTNDVVAKVPMGGQAEVDAAVDAARKAFPAWADASPEVRSDLLDKVGSTIIARSADIGRLLAREEGKTLAEGIGETVRAGRIFKYFAGEALRRHGQNLESTRPGVEIQTYRQAVGVYGLITPWNFPIAIPAWKAAPALAFGNTVVIKPAGPTPATANVLADIMAECGAPAGVFNMLFGRGSMGDALIKHKDVDGVSFTGSQGVGAQVAAAAVARQARVQLEMGGKNPLIVLDDADLERAVAIALDGSFFATGQRCTASSRLIVQDGIHDKFVALLAEKVAALRVGDALDPNTQIGPAVSEDQMETSYRYIDIAASEGGRVVTGGDRIKLDNPGWYVRPTLIADTQAGMRINNEEVFGPVASTIRVKSYEEALEIANGVEFGLSAGIATTSLKHARHFQRYARAGMTMVNLATAGVDYHVPFGGTKSSSYGAREQGFAAVEFFTQTKTSYSWS

SEQ ID NO: 8978 - protein, 319 aa, Mycobacterium tuberculosis H37Rv
MTEPTVARPDIDPVLKMLLDTFPVTFTAADGVEVARARLRQLKTPPELLPELRIEERTVGYDGLTDIPVRVYWPPVVRDNLPVVVYYHGGGWSLGGLDTHDPVARAHAVGAQAIVVSVDYRLAPEHPYPAGIDDSWAALRWVGENAAELGGDPSRIAVAGDSAGGNISAVMAQLARDVGGPPLVFQLLWYPTTMADLSLPSFTENADAPILDRDVIDAFLAWYVPGLDISDHTMLPTTLAPGNADLSGLPPAFIGTAEHDPLRDDGACYAELLTAAGVSVELSNEPTMVHGYVNFALVVPAAAEATGRGLAALKRALHA

SEQ ID NO: 8979 - protein, 320 aa, Mycobacterium tuberculosis H37Rv
MPSLDNTADEKPAIDPILLKVLDAVPFRLSIDDGIEAVRQRLRDLPRQPVHPELRVVDLAIDGPAGPIGTRIYWPPTCPDQAEAPVVLYFHGGGFVMGDLDTHDGTCRQHAVGADAIVVSVDYRLAPEHPYPAAIEDAWAATRWVAEHGRQVGADLGRIAVAGDSAGGTIAAVIAQRARDMGGPPIVFQLLWYPSTLWDQSLPSLAENADAPILDVKAIAAFSRWYAGEIDLHNPPAPMAPGRAENLADLPPAYIAVAGYDPLRDDGIRYGELLAAAGVPVEVHNAQTLVHGYVGYAGVVPAATEATNRGLVALRVVLHG

SEQ ID NO: 8980 - protein, 462 aa, Glycine max
  misc_feature (308)..(308): Xaa can be any naturally occurring amino acid
MESKPHVLMHRYELGRLLGQGTFGKVYYARSTITNHSVAIKVIDKDKVMKTGQAEQIKREISVMRLARHPNIIQLFEVLANKNKIYFVIECAKGGELFNKVAKGKLKEDVAHKYFKQLINAVDYCHSRGVYHRDIKPENILLDENGNLKVSDFGLSALVDSKRQDGLLHTPCGTPAYVAPEVIKRKGYDGTKADIWSCGIVLFVLLAGYLPFHDPNLIEMYRKISKAELKCPNWFPPEVCELLGMMLNPNPETRIPISTIRENSWFKKGQNIKNKRPVVENNTVSSSSTVLLDQNDCDGLAAEANGEXVVPLSINAFDIISRSVGFDLSRFFDESFKIKEARFSSRLPANVIISKLEDIAKQLRMKIKKKAAGLLKLESLNEGRKGVLSIDAEIFEVIPCFHMVEVKKSNGDTLEYQKILKEDIRPSLHDIVWVWQSDQQLQSQQSEQHQHTDDQQQQQPQS

SEQ ID NO: 8981 - protein, 386 aa, Rickettsia aeschlimannii
DSEFAELKIRGKIFKLPILKASIGEDVIDISRVSAEADCFTYDPGFMSTASCQSTITYIDGDKGILRHRGYDIKDLAEKSDFLEVAYLLIYGELPNGEQYNNFTKQVAHHSLVNERLHYLFQTFCSSSHPMAIMLAAVGSLSAFYPDLLNFKEADYELTAIRMIAKIPTIAAMSYKYSIGQPFIYPDNSLDFTENFLHMMFATPCTKYKVNPIIKNALNKIFILHADHEQNASTSTVRIAGSSGANPFACISTGIASLWGPAHGGANEVVINMLKEIGSSEYIPKYIAKAKDKNDPFRLMGFGHRVYKNYDPRAAVLKETCKEVLKELGQLDNNPLLQIAIELEAIALKDEYFIERKLYPNVDFYSGIIYKAMGIPSQMFTVLFAI

SEQ ID NO: 8982 - protein, 182 aa, Brassica napus
  misc_feature (112)..(112): Xaa can be any naturally occurring amino acid
MAYSMLSSAAVVTSPAQATMVAPFTGLKSSSAFPVTRKANNDITSIVSNGGRVSCMKVWPPVGKKKFETLSYLPDLTEVELGKEVDYLLRNKWIPCVEFELEHGFVYREHGXSTPGYYDGRYWTMWKLPLFGCTDSAQVLKEVQECKTEYPNAFIRIIGFDNNRQVQCISFIAYKPPSFTGA

SEQ ID NO: 8983 - protein, 484 aa, Arabidopsis thaliana
MKHSGGNQACYVLGQKTPSIRDLYSLGHKLGQGQFGTTYMCKEISTGREYACKSITKRKLISKEDVEDVRREIQIMHHLAGYKNIVTIKGAYEDPLYVHIVMELCSGGELFDRIIQRGHYSERKAAELIKIIVGVVEACHSLGVMHRDLKPENFLLVNKDDDFSLKAIDFGLSVFFKPGQIFEDVVGSPYYVAPEVLLKHYGPEADVWTAGVILYILVSGVPPFWAETQQGIFDAVLKGHIDFDSDPWPLISDSAKNLIRGMLCSRPSERLTAHQVLRHPWICENGVAPDRALDPAVLSRLKQFSAMNKLKQMALRVIAESLSEEEIAGLKEMFKAMDTDNSGAITFDELKAGLRRYGSTLKDTEIRDLMEAADIDKSGTIDYGEFIAATIHLNKLEREEHLLSAFRYFDKDGSGYITIDELQHACAEQGMSDVFLEDVIKEVDQDNDGRIDYGEFVAMMQKGIVGRTMRKSINMSIRNNAVSQ

SEQ ID NO: 8984 - protein, 471 aa, Pseudomonas syringae pv. tomato str. DC3000
MSGQARGLNEKETVCMSDKSVNLLKSAIDGCVLTPRDPEYGDARLIYNRMHDSMPAAIVYPEHVADIRTSALMAAKEGVSFAMRGGGHHIAGFSTCDGGIVLDFKKWKNITLDVTTGILAVQPGVRLAEIDEFLVSRNLVIPTGTVSDTGLIGLTLGGGIGWLVGLYGLTCDCLVGADVVLADGRLVKAEDSEHGDLLWALKGGSGGFGVITELRYRPLPLPATYCGSGSVSLADTEACLSRLVFFLETQCPGELTVAPNFSRAVSGDVVMNIDYCYSGTAIRWIDTLQALIPEATWEAVTRWDFRDWQRNFDAKFLPPMRGYWKSSYTPSWGLDFSLLGTLMQNAPEGNCSILIEHLHGRFCDSDDAHSAFPLREARFGVLFSARWLSESEDADYIAWVKNGIFSVDPQGRSLSYSNYTSADDVGAAKSFSKLSRARLFSIKSVYDPDHFFKGNHGSLLFAGSGEVHRVQ

SEQ ID NO: 8985 - protein, 480 aa, Burkholderia fungorum LB400
MSQFANYIDGQWVDGASVSRNVNPSNLDDVIGEFAQADAEQTQRAIRAARNAFAQWSLSTPQQRFDLLDQAGSTILARKAELGRLLAREEGKTLPEAIGEVGRAGQIFKFFAGEALRIGGEIVPSVRPGMTVEVTREPLGVIGLITPWNFPIAIPAWKIAPALAYGNTVVVKPADLVPASTWELVRIIAEAGAPAGVINLVMGQGAVVGEALVSSPQVDAVSFTGSVATGRAIGAKCFASGKKFQLEMGGKNPMVVLDDADLDVAVEACINGGFYSTGQRCTASSRFIVTEGIHDRFIDAMKARMQALKVGDALADGTHIGPVVDDKQLQQDERYIAIAREEGGTIFGGERIERDTRGYFLAPALITDTTPDMRINREEVFGPVASVIKVKDYNEALAVANDTEFGLSAGICTTSLKYSSHFRRHVQAGMVMVNTATAGVDYHVPFGGRKGSSYGPREQGSYAREFYTTVKTAYVSPGAV

SEQ ID NO: 8986 - protein, 338 aa, Brassica napus
  misc_feature (65)..(65): Xaa can be any naturally occurring amino acid
  misc_feature (124)..(124): Xaa can be any naturally occurring amino acid
  misc_feature (141)..(141): Xaa can be any naturally occurring amino acid
MDAKEASPTDLKQPSEAADNAAAAASMETENGDQTKEPDCVSSLIPGWFSEMSPMWPGEAHWLKXEKVLFQGYFDYQDFFVLRVCSTMVRVFGNCMEYSNSSSQTNSALSREMIPHLPLCSFPXPYMTVLVIRGGRVEGVXRGVGQMATSAPFCARYPNPKKVLVIGGGDGGVAIGFEDPRVNLVIGDGVAFLKNAAEGSYDAVSPDSSDPIGPAKELFEKPFFQSVARALRPGGVVCTQAESLWLHMDIIEDIVSNCREIFKGSVNYAWTSVPTYPSGVIGFMLCSTEGPDVDFKHPVNPIDDSKSSGPLKFYNAEIHSAAFCLPSFAKKVIESKTN

SEQ ID NO: 8987 - protein, 213 aa, Ammopiptanthus mongolicus
MGCFNSKVRRQFPGQEDPVILASQTAFTVSEVEALFELFKSISSSVIDDGLISKEEFQLAIFKNRKKENIFANRIFDLFDVKKKGVIDFDDFVRSLNVFHPNAPLEDKIDFSFKLYDLDNTGFIERQEVKQMLIALLCESEMKLADEVIETILDKTFLDADLNQDGKIDIVEWQNFVSKNPSLLKIMTLPYLRDITTSFPSFVFNSNVDEVAA

SEQ ID NO: 8988 - protein, 181 aa, Zea mays
  misc_feature (167)..(167): Xaa can be any naturally occurring amino acid
MGDAPETFATTAPLAPVTSERKVRSDLEEKLPKPYLARALVAPDTEHPNGTEGHDSKGMSVMQQHGAFFDQNGDGIVYPWETYAGFRDLGFNPISSVFWSLIINLAFSYVTLPSWLPSPLLPVYIDYIHEAEHGSDSSTYDTEGRYVPFYLENIFSKYALTAANKLXFKEMWNLTEVNECH

SEQ ID NO: 8989 - protein, 508 aa, Oryza sativa (japonica cultivar-group)
MAATPPSSQHRRPLSSSASAASLAGKPRGGGLLLGRYELGRLLGHGTFAKVYQARSADSGEPVAIKVLDKEKAMRHGLVPHIKREIAILRRVRHPNIVRLFEVMATKSKIYFVMELVRGGELFGRVAKGRLKEDTARRYFQQLVSAVGFCHARGVFHRDLKPENLLVDEHGDLKVSDFGLSAVADQFHPDGLLHTFCGTPSYVAPEVLARRGYDGAKADIWSCGIILFVLMAGYLPFHDQNLMAMYRKIYRGEFRCPRWFSKDLSSLLNRILDTNPETRITVKEVMESRWFQKGFRPVRFYVEDDQVHSLADGDNDMPELEPSEPPPPPPFPPPPPQQDDDGEESGWESDSSVASCPATLSSEERRQRPLGSLTRPASLNAFDIISFSKGFDLSGLFEERGSEVRFISAEPMQTIITKLEEIAKVKSFFVRRKDWRVSIEGTREGLKGPLTIGAEIFELTPSLVVVEVKKKAGDKEEYDDFCNRELKPGMQHLVHHMGSVPNIPSDTE

SEQ ID NO: 8990 - protein, 157 aa, Triticum aestivum
MAGMVFGLDAPMMAALQHLLDIPDGEAEPPPEKQGPTRAYVRDARAMAATPADVKELPGAYAFVVDMPGLGSGDIKVQVEDERVLVISGERRREEKEDAKYLRMERRMGKLMRKFVLPENADMEKISPCRDGVLTVTVDKLPPPEPKKPKTIQVQVA

SEQ ID NO: 8991 - protein, 339 aa, Microscilla sp. PRE1
MKAAFYKEKGKFELGEGKVVVPGPGEVRLDVAYCGVCGTDVHIFHGVMDKRVNPPQTIGHEASAVVAEVGEGVTNVKVGYKVAVRPLRFGEPHPFDKGHAHVGKNLKFIGIDSEGAFQNSWTVPAYTLHQLPDGLSLEHGAFIEPLAVACHDVKIGRVKSGENTLVIGGGPIGTLIAYVLKEKGANVIVSEVNEARLKMLSELGFQTINPLKENLVDRISELTEEKMIDCAFEVSGSAPGVKTMTEVVNVRGRIVMVAIHGGEPKPVDLFKFFWSEIELLGARLYEEDDYEEAIRIAASGNIPFSKLITSKNTLDNIQQIFEEIDQNPAGMKYLIDCQA

SEQ ID NO: 8992 - protein, 495 aa, Pirellula sp. 1
MSVATQHTLLPEVQSFLDQSPLASFVGGKHYPSEQGNVLATIDPGSGDQLAEIHDLNAAEIDRAVEIANEAFPAWAGLSQQERSSILLKLADAVESHKAIIAQIEALDAGKIEAQAAGDVQNFVDTMRYFVGLSDKVEKRTKLDVPGHDAYTVKQPWGACAFIFPWNFPFLLIGWGISPALAAGNTVVIKPAEDTSLSAIYLAQLAKEVGVPDGVINVVTGRGATAGAALTNNAEIKRMSFTGSPEVGRLVGESCGRNLVPVKLELGGKGAAVVFDDVDVKATAQALVGAITFHTGQVCCDATRWLIHENIYDEFVAECKQLMEKVRIGHPLDPNSDMGPVVNPKQRERVLGYQEKGTAGGAQCLCGGGPATVDGLNGNYVKPTLLAGSLDNVAAREEIFGPVAYLAKFSDEADAIAKANDTDYGLANSVWTTDVERANRVAESMIAGNSWINAHNVFAHGVPYGGVKKSGMGGGVLSPETLMDYYRSTSVVRPL

SEQ ID NO: 8993 - protein, 204 aa, Pseudomonas aeruginosa UCBPP-PA14
MLKIVLLVTGVAALLLSFIPSLRTEATPFLQHPDAIYLAILGLINLLFAPVLQSSHPTRPLQAGAAALLVLGVVLQALILLAPLPTIADQPAIVLPLLSLVLATALQLAGSLKPGKPVSRSASAPTALGGSQDSGNRETGTVKWFNTSKGFGFISRDSGEDIFVHFRAIRGEGHRILIEGQRVEFSVVQRDKGLQAEDVIASRR

SEQ ID NO: 8994 - protein, 199 aa, Leptospirillum ferrooxidans
SGVMKKIRFPKTASIGIKPVSEEGTKRLVRAAIRFALANNRKSVTLVHKGNIMKFTEGYFRKWGYEVAKEEFGDKTVSWDDCGGNAPAGKLLIKDEIADAFLQKILLRANEYDVIATLNLNGDYLSDALAAQVGGIGIAPGANINYETGAAVFEATHGTAPKYANHDKVNPGAVILSGEMMFRYMGWNEVADLILKGLR

SEQ ID NO: 8995 - protein, 486 aa, Microscilla sp. PRE1
MIMSTVKNYKLYIDGEWIDATTGESQEILSPTDETVVGTVQMGVEADAQIALEAAERAQKQWKKVPARKRADLLRTFAAEIKANKNQLAELLVREQGKLLAVAKMEVEVTASFIEYACDGARSIEGDIIPSDNPAEHIMIHKIPRGVVVAITAWNFPLALAGRKLGPALVAGNSVVLKPTQETPIATLELGNIANKVGLPKGLINILTGQGSVLGNALVANPITKMVSMTGSTPAGQQIFRTAAENLIHVQLELGGKAPCIVFDDADLEQAVEGAFHSRFDNCGQVCTSNERLYVHESIYNEFMERFMEKVKGLKLGNPMDAATTIGPKVNAKEVAHMEHLVTKSVEEGATVAIGGKKPQGKAFEKGHWFEPTILTDVKQNMTIVHEESFGPILPVIKFSEFNEVIGYANDCEYGLAAMVFTNDMNKIMRLNDELEFGEIYINRGHGEQHQGFHNGYKLSGTGGEDSKYGFEQYMEKKTFYIKYKA

SEQ ID NO: 8996 - protein, 304 aa, Chlamydomonas reinhardtii
MDIAQVDEIIERLLDVRNGRPGKQVQLAENEIRLLCLTAKEIFMSQPNLLELEAPIKICGDIHGQYSDLLRLFEYGGFPPEANYLFLGDYVDRGKQSLETICLLLSFKIKYPENFFLLRGNHECASINRIYGFYDECKRRYNIRLWRTFTDCFNCLPVAALIDEKILCMHGGLSPELKSLEQIKRITRPTDVPDSGLLCDLLWADPDKDIQGWGENDRGVSYTFGPDCVTEFLQKHDLDLVCRAHQVVEEGYEFFAKRQLVTIFSAPNYCGEFENAGAMMSVDETLMCSFQILKPAETKAKGRR

SEQ ID NO: 8997 - protein, 491 aa, Burkholderia cepacia R18194
MADWQDKAASLKIEGRAFIDGASRDAHGGKTFDCVSPIDGRVLAKVADCGEADVNAAVAAARRAFDAGVWAGLNPRARKAVLLRWAALMREHLDELSLLETLDAGKPIGDTTTVDVPGAAYCVEWFAEAIDKVGGEVAPADHHLVGLVTREPVGVVAAVVPWNFPILMAAWKFGPALAAGNSVVLKPSEKSPLTAIRVAQLAYEAGIPAGVFNVVPGAGEPGKLLALHRDVDCIAFTGSTAVGKLIMQYAAQSNLKRAWLELGGKSPNIVLADCPDLDRAAQTAAGAIFYNMGEMCTAGSRLLVHRDIKDAFIEKLVAAARAYVPGNPLDPSVSMGAIVDGIQLERVLGYIEAGRSEGKLVTGGARVKEETGGFYVEPTVFEVKPDAKIAREEIFGPVLSVIVFDDVDEAVRIANDTEYGLAAAVWTSNLTTAHDVSRRLRAGTVWVNCYDEGGDMNFPFGGYKQSGNGRDKSLHALEKYTELKSTLIRLR

SEQ ID NO: 8998 - protein, 498 aa, Gluconobacter oxydans
MNVVSKTVSLPLKPREFGFFIDGEWRAGKDFFDRSSPAHDVPVTRIPRCTREDLDEAVAAARRAFENGSWAGLAAADRAAVLLKAAGLLRERRDDIAYWEVLENGKPISQAKGEIDHCIACFEMAAGAARMLHGDTFNNLGEGLFGMVLREPIGVVGLITPWNFPFMILCERAPFILASGCTLVVKPAEVTSATTLLLAEILADAGLPKGVFNVVTGTGRTVGQAMTEHQDIDMLSFTGSTGVGKSCIHAAADSNLKKLGLELGGKNPIVVFADSNLEDAADAVAFGISFNTGQCCVSSSRLIVERSVAEKFERLVVPKMEKIRVGDPFDPETQIGAITTEAQNKTILDYIAKGKAEGAKLLCGGGIVDFGKGQYIQPTLFTDVKPSMGIARDEIFGPVLASFHFDTVDEAIAIANDTVYGLAASVWSKDIDKALAVTRRVRAGRFWVNTIMSGGPETPLGGFKQSGWGREAGLYGVEEYTQIKSVHIETGKRSHWIS

SEQ ID NO: 8999 - protein, 317 aa, Burkholderia cepacia R18194
MTTALDQLKQYTTVVADTGDFQQLAQYQPQDATTNPSLILKAVQKDAYKPILEKTVRDHRNESTDFIIDRLLIAFGTEILKLIPGRVSTEVDARLSFDTPRSIDKGRELIKLYEAAGIGRERILIKLASTWEGIRAAEVLQKEGIKCNMTLLFSLVQAAACAEAGAQLISPFVGRIYDWYKKQAGAEWNEEKDGGANDPGVQSVRRIYTYYKTFGYNTEVMGASFRTTSQITELAGCDLLTISPDLLQKLQDSNDTVTRKLSPDALQDKPAARVAIDEAAFRFQLNDDAMATEKLAEGIRVFAADAVKLEKLIDSLR

SEQ ID NO: 9000 - protein, 435 aa, Thermotoga maritima MSB8
MRKRVFSLLLVLAFLSVGFAQDGVTDVGWSLDMVWILISAALVFFMQAGFAMVESGFTRAKNTVNVLMKNLMDFAIGSVVFFIFGYWIMFGKHPLTFDPSTKEGLWDFAMWMFQMAFAGTAATIVSGAMAERTKFPAYLAYTGFITGIIYSVVGRWIWGGGWLAQKGFIDFAGSTVVHSVGGWAAMIGASLLGPRFGKYDSQGNPKPIPGHNIPLAALGTFILWFGWFGFNGGSTLAGTNGAIGMIILNTNLAAATGALAAMVTVWAKYGKPDASMTMNGALAGLVAITAPCAVVSPVSSLIIGAIGGVIVVFAVEFFDKVLKIDDPVGAISVHGVNGAWGTLAVGLFAESKYALASGMGDVNGLFFGGGVHQLGVQFLGVVSVFAWTVVTSFLVFWFIKKTIGLRVDRDIELKGLDIEEHGMEGYADFEIFTTR

SEQ ID NO: 9001 - protein, 480 aa, Burkholderia cepacia R18194
MTYRNESAWIQPAAPSATAAAPRATQARTTAEYRALDAAHHIHPFSDMGALNRAGSRVIVKADGVYLWDSDGNKVIDGMAGLWCVNVGYGRKELADAAYRQIQELPFYNTFFKTTHPPVIELSAMLAEVTPKGFNHFFYCNSGSEGNDTVLRLVHQYWRVQGQPQKKFVISRKNGYHGSTIAGGTLGGMGYMHEQMPSKVENIVHIDQPYFFGEAAAGETPEAFGLARAQQLEAKILELGAENVAAFIGEPFQGAGGVIFPPSTYWPEIQRICRKYDILLVADEVIGGFGRTGEWFAHQHFGFEPDLITMAKGLTSGYVPMGAVGIHERVARPIIDNGEFNHGLTYSGHPVAAAVAVANLKLLRDEGIVERVKNDTGPYFQALMRETFARHPIVGEVHGHGLVASLQLAESPAERRRFANGGDVGTICRDFCFNGNLIMRATGDRMLLSPPLVISRPEIDELVSKAKKAVDATAQQLGIS

SEQ ID NO: 9002 - protein, 349 aa, Bacillus cereus
MKALLWHNQRDVRVEEVPEPTVKPGAVKIKVKWCGICGTDLHEYLAGPIFIPTEEHPLTHVKAPVILGHEFSGEVVEIGEGVTSHKVGDRVVVEPIYSCGKCEACKHGHYNVCEQLVFHGLGGEGGGFSEYTVVPEDMVHHIPDEMTYEQGALVEPAAVAVHAVRQSKLKEGEAVAVFGCGPIGLLVIQAAKAAGATPVIAVELSKERQELAKLAGADYVLNPATQDVLAEIRNLTNGLGVNVSFEVTGVEVVLRQAIESTSFEGQTVIVSVWEKDATITPNNLVLKEKEVVGILGYRHIFPAVIKLISSGQIQAEKLITKKITVDQVVEEGFEALVKDKTQVKISCFT

SEQ ID NO: 9003 - protein, 1147 aa, Saccharomyces cerevisiae
MPNPNTADYLVNPNFRTSKGGSLSPTPEAFNDTRVAAPATLRMMGKQSGPRNDQQQAPLMPPADIKQGKEQAAQRQNDASRPNGAVELRQFHRRSLGDWEFLETVGAGSMGKVKLVKHRQTKEICVIKIVNRASKAYLHKQHSLPSPKNESEILERQKRLEKEIARDKRTVREASLGQILYHPHICRLFEMCTMSNHFYMLFEYVSGGQLLDYIIQHGSLKEHHARKFARGIASALQYLHANNIVHRDLKIENIMISSSGEIKIIDFGLSNIFDYRKQLHTFCGSLYFAAPELLKAQPYTGPEVDIWSFGIVLYVLVCGKVPFDDENSSILHEKIKKGKVDYPSHLSIEVISLLTRMIVVDPLRRATLKNVVEHPWMNRGYDFKAPSYVPNRVPLTPEMIDSQVLKEMYRLEFIDDIEDTRRSLIRLVTEKEYIQLSQEYWDKLSNAKGLSSSLNNNYLNSTAQQTLIQNHITSNPSQSGYNEPDSNFEDPTLAYHPLLSIYHLVSEMVARKLAKLQRRQALALQAQAQQRQQQQQVALGTKVALNNNSPDIMTKMRSPQKEVVPNPGIFQVPAIGTSGTSNNTNTSNKPPLHVMVPPKLTIPEQAHTSPTSRKSSDIHTELNGVLKSTPVPVSGEYQQRSASPVVGEHQEKNTIGGIFRRISQSGQSQHPTRQQEPLPEREPPTYMSKSNEISIKVPKSHSRTISDYIPSARRYPSYVPNSVDVKQKPAKNTTIAPPIRSVSQKQNSDLPALPQNAELIVQKQRQKLLQENLDKLQINDNDNNNVNAVVDGINNDNSDHYLSVPKGRKLHPSARAKSVGHARRESLKFTRPPIPAALPPSDMTNDNGFLGEANKERYNPVSSNFSTVPEDSTTYSNDTNNRLTSVYSQELTEKQILEEASKAPPGSMPSIDYPKSMFLKGFFSVQTTSSKPLPIVRHNIISVLTRMNIDFKEVKGGFICVQQRPSIETAAVPVITTTGVGLDSGKAMDLQNSLDSQLSSSYHSTASSASRNSSIKRQGSYKRGQNNIPLTPLATNTHQRNSSIPMSPNYGNQSNGTSGELSSMSLDYVQQQDDILTTSRAQNINNVNGQTEQTNTSGIKERPPIKFEIHIVKVRIVGLAGVHFKKVSGNTWLYKELASYILKELNL

SEQ ID NO: 9004 - protein, 503 aa, Acinetobacter sp. M-1
MHYVDPNQSGSKIHFKDQYENFIGGQWVAPVKGVYFDNISPVDGKSFTRIPRSSAEDIELALDAAHKAKKEWNKSSPTTRSNLLLKIADRMEANLEMLAVAETWDNGKPVRETLAADIPLAIDHFRYFAGCIRAQEGGISEIDEDTIAYHFHEPLGVVGQIIPWNFPILMAAWKLAPALAAGNCVVIKPAEQTPVGILLVAELIQDLLPAGVLNIVNGYGAEVGRPLATSPRIAKIAFTGSTQVGQLIMQYATENIIPVTLELGGKSPNVFFADVMDHDDDFLDKTLEGFAMFALNQGEVCTCPSRALIQESIADQFMEKAIERVKRIKLGHPLDTDTMVGAQASLEQQEKILRCIDTGRQEGAEVLLGGHGRQEVGNGYYIEPTIFKGHNNMQVFQEEIFGPVLSVTTFKDFDEAIQIANDTMYGLGAGVWSRSTHTAYRAGRAIEAGRVWTNCYHIYPAHAAFGGYKKSGVGRENHKMMLDHYQQTKNLLVSYSTKAMGFF

SEQ ID NO: 9005 - protein, 126 aa, Glycine max
MVLEATMICIDNSEWMRNGDYSPSRFQAQTDAVNLICGAKTQSNPENTVGVLTMAGKGVRVLVTPTSDLGKILACMHGLEIGGEMNLAAGIQVAQLALKHRQNKKQQQRIIVFAGGPVKHEKKMLE

SEQ ID NO: 9006 - protein, 346 aa, Bifidobacterium longum DJO10A
MKAVVLEEQGVINVREVPDVKDPGPGELRIAPHTVGVCGSDLHYYTHGRVGKYVVEQPMILGHEAAGTVLEVGPGVTDFKPGDRVALEPGIPDMTSRASRLGMYNVDPAVRFFATPPIDGCLCEEVIHPAAFTYHLPDSMSFGEGALLEPTAVGMWAATKARIKPGDVCVVTGSGTVGMLTASAALAGGASKVLVSDVSSIKLGIIGQIPGVIPVDLTTEDLVERVREETAGWGADVAFECSGAPKAYETFWKLIAPGGCAVLVGIPVNPVPIDVTELQATEVRIENIFRYANVYQKAIDLVDSGRLNLKPFITDTFAMKDAKAAFDRMDEGRPGDIKLQITVNRD

SEQ ID NO: 9007 - protein, 439 aa, Arabidopsis thaliana
MAEAKIEEIGCEDRISVLPEDLLVVILDLLPTKDVVATMILSKRWLSIWTMVRTLEYTDDMDDESKKSVWWFLNKSLQLHKAPVIDSLCMELGPQCPTTDDVDIGKWVAKAVDCLVMTLTIKLLWSAGPTSLPKSLYSCTSLSELTLSDQILVNVPSSAYLPSLTELELICVVYKDEDSLVSFLSSCPVLEFLFVLRKIDDNVKTFTVKVPSLLELTYKNLCSDVVDNTDRCLVVNAPAVNTCQITDYSLESFSIEDMPCLQDATIDVDEAYHPDDKFLTSFSSVLSLRMHLSDAMVMRCTTINFSRLIKLSIYPYGPDMLETLLRLLGNAPKLKEFLVDYPSLIASQKFVYNPEDLPWSWKQPSHVPECLSSQLEIFEWRDYGDRIIEEEFLTYVLANSKRLKTATISLRLNLEDPELIIEEIKDLPRVSTTSHLLFK

SEQ ID NO: 9008 - protein, 191 aa, Zea mays
  misc_feature (174)..(174): Xaa can be any naturally occurring amino acid
  misc_feature (177)..(177): Xaa can be any naturally occurring amino acid
MESTGKILMERYEVGRLLGKGTFGKVHYAKNLESNESVAIKMMDKDKVLKAGLSEQIRREITTMRLVAHKNIVELHEVMATRNNIYFVMEYVKGGELFDKIGKSGKLTEAAAHKYFQQLIGAVDYCHSRGVYHRDLKPENLLLDENENLKVSDFWTECTFRIKGADGLLHTHCXTPXAYVAPEVISKTGYD

SEQ ID NO: 9009 - protein, 200 aa, Aspergillus fumigatus
MAEIRRKLVIVGDGACGKTCLLIVFSKGTFPEVYVPTVFENYVADVEVDGKHVELALWDTAGQEDYDRLRPLSYPDSHVILICFAIDSPDSLDNVQEKWISEVLHFCQGLPIILVGCKKDLRHDPKTIEELHKTSQKPVTPEQIIDIFVQGEEVRKKIGAYKYLECSARTNEGVREVFEAATRAALLTKTHKKKGKCTIL

SEQ ID NO: 9010 - protein, 455 aa, Glycine max
MFNFVPVGEACQKYGSIFMHPQGLYISLKEKGKIREVLRNWPEKNIQVIVVTDGERILGLGDLGCQGMGIPVGKLSLYTALGGVRPSACLPITIDVGTNNEKLLNDELYIGLKQRRATGQEYAELMHEFMTAVKQTYGEKVLIQFEDFANHNAFNLLEKYRSTHLVFNDDIQGTASVVLAGLVASLKLVGGNLADHRFLFLGAGEAGTGIAELIALETSKQTNAPLEEVRKNIWLVDSKGLIVSSRKDSLQHFKKPWAHEHEPVKNLLDAVNKIKPTVLIGTSGQGRTFTKEVIEAMASINKRPIILSLSNPTSQSECTAEEAYKWSQGRAIFASGSPFPPVEYEGKVFVPGQANNAYIFPGFGLGLIMSGTIRVHDDLLLAASEALAAQVSQENFDKGLIYPPFTNIRKISAHIAANVAAKAYELGLATRLPQPKDLVKFAESCMYTPAYRSYR

SEQ ID NO: 9011 - protein, 253 aa, Triticum aestivum
  misc_feature (158)..(158): Xaa can be any naturally occurring amino acid
MAPTVMASSATSVAPFQGLKSTAGLPVSRRSNGASLGSVSNGGRIRCMQVWPIEGIKKFETLSYLPPLSTEALLKQVDYLIRSKWVPCLEFSKVGFIFREHNASPGYYDGRYWTMWKLPMFGCTDATQVINEVEEVKKEYPDAYVRIIGFDNMRQVQXVSFIAFKPPGCEEVRQGPKQAHSRTGHILKVPLQLSTLTIAFGVFLSPFIFLNLGLMGPLFHPNIGEASYFMLGGFVYSPDIIIQYTLGKKKKKN

SEQ ID NO: 9012 - protein, 197 aa, Aspergillus fumigatus
MELCGRQKVVQRKMVLLGDGACGKTSALNVFTRGFFPTVYEPTVFENYVHDIFVDNVHMELSLWDTAGQEEFDRLRALSYEDTHVIMLCFSVDSPDSFENVATKWIDEIRENCPGVKLVLTALKCDLRKDDELNDNPNAITFEQGLAKAKEIGAVKYLECSAVQNRGIRETFYEAAKVALDVKPAGSSGSKGQCIIL

SEQ ID NO: 9013 - protein, 198 aa, Aspergillus fumigatus
MASGPATQSLKCVVTGDGAVGKTCLLISYTTNAFPGEYIPTVFDNYTASVMVDGRPISLGLWDTAGQEDYDRLRPLSYPQTDVFLICFSIVSPPSFDNVKAKWYPEIEHHAPNVPIILVGTKLDLRDDPATAESLRQKKMDLSRTRHWPSPKEIRAHKYLECSALRQRNFKSVFDEAIRAVLNPGPAAKPKSKKCTIL

SEQ ID NO: 9014 - protein, 162 aa, Triticum aestivum
MAGMVFGLENPMMTALQHLLDIPDGEAGGAGPAAGEKQGPTRAYVRDARAMAATPADVKELPGAYAFVVDMPGLGSGDIKVQVEDERVLVISGERRREEKEDAKYLRMERRMGKLMRKYVLPENADMEKISAVCRDGVLTVTVEKLPPPEPKKPKTIQVQVA

SEQ ID NO: 9015 - protein, 375 aa, Pisum sativum
MGSNRTIVWFRRDLRIEDNPALAAAARDGSVFPVFIWCPKEEGQFYPGRVSRWWLKQSLAHLDQSLKSLGAKLVLIKTDSTLNALLECVNAIQATKVVFNHLYDPVSLVRDHNIKEKLVELGISVKSYNGDLLYEPWELYDEKGHAFTTFDPFWERCLHKQMEPVSLIPPWQLIPAKGKVERCSIEDLGLENELEKPSNALLGRAWSPGWGNANKALTEFMDKQLLNYSKNRQKVGGDSTSLLSPYLHFGELSVRKVFQMARVKQISWGNEGNSVGKESVTLFLRAIGLREYSRYLCFNFPFTHERALLGHLSFFPWNADPSNFKTWRQGRTGYPLVDAGMRELWATGWMHNRIRVIVSSFAVKMLLLPWKWGMK

SEQ ID NO: 9016 - protein, 491 aa, Treponema denticola ATCC 35405
MNSITELFPSDFTDDEKALAKTHFLKKLSVLTHSFYGGKLQTVPKCGLYGFNWFNVWYTPGVSAISTTIRDDNETSFALSNKGNLVAVVSDSTRVLGDGDCTPPGGLGVMEGKCMLMKYLGGVDSYPLCIDSIVRVDEEGKRGVKAGKHDPDKIIDFVRMLEPSVGAVNLEDIQQPDCFKVLDTLREVCEIPVWHDDAQGTACITLAGLLNAIKLAGKKMEDCKIVLLGAGASNTTIARLILADGGKPENMIICDSRGALHSGRKDIEEDKRYYRKWELCLQTNPKKIETFDEAMKGADVLIALSTPGPNTVTKEQVASMNKKAIVFTCANPIPEIWPHEAKAAGAFIVGTGRGDFPNQINNSVCFPGILKGALLVRAKKISDGMAIRCSHSIADYSEKKGINPDNIVVTMQDEDVFAVEAADVAMQAIKEGLARVTMTWDEAYKKAKKDIEESRSLTKMLMEKNFIKEPPQEFYEKALEYAIEQIKKNRK

SEQ ID NO: 9017 - protein, 193 aa, Zea mays
MHVPDEDMLSPLGALRLDGHFSFHDVSAMARDFGNQCSFLPAAVLHPGSVSDIAATVRHVFSLGEGSPLTVAARGHGHSLMGQSQAAQGIVVRMESLRGARLQVHDGFVDAPGGELWINVLRETLKHGLAPKSWTDYLHLTVGGTLSNAGVSGQAFRHGPQDNSDLFYAALGGLGQFGIITRARIALEPAPEM

SEQ ID NO: 9018 - protein, 481 aa, Glycine max
MLDSATPHDKITTAASGFVLEDVPHLSAYIPHLQTYPDPLQDNPSYSVVAQYYVNVDDTIAQQIVVHKNSPRGTHFRRAGPAQKVYFDSEEVHACIVTCGGLCPGLNTVIREIVCGLYHMYGVHKVLGIQGGYPGFYSRNTVPLTPKVVNDIHKRGGSILGTSYGGHDTSKIVDSIQDRGINQVYILGGYGTQYEAAMIFEEVRRRGLKVAVVGIPKTIDNDIPVIDKSIGFDTAVEEAQRAINSAHVEAESAENGIGVVKLMGRYSGFIAMYATLASRDVDCCLIPESPFYLEGPGGLLEFIEKRLKEQGHMVIVIAEGAGQELLSGNPSIVNKPDASADKLFPDVGLWLSQKIKDHFEKRQKMAINLKYIDPTYMIRAIPSNASDNVYCTLLAQSAVHGAMAGYTGFTVGPVNGRNCYIPFHLINEGEKRVVITDRMWARLLSSTHQPCFLNPKEITGEREERTENQTTDGQNHSEIAD

SEQ ID NO: 9019 - protein, 223 aa, Glycine max
METGGFHGYRKLPNTTSGLKLSVSDMNMNMRQQQVASSDQNCSNHSAAGEENECTVREQDRFMPIANVIRIMRKILPPHAKISDDAKETIQECVSEYISFITGEANERCQREQRKTITAEDVLWAMSKLGFDDYIEPLTMYLHRYRELEGDRTSMRGEPLGKRTVEYATLATAFVPPPFHHHNGYFGAAMPMGTYVRETPPNAASSHHHHGISNAHEPNARSI

SEQ ID NO: 9020 - protein, 352 aa, Ralstonia eutropha JMP134
MQNTSGLAPRDAGADTDHPELTPDRLLQLGMGFWASKTMLSAVELGVFTRLAAGPLGAAELISALGLHRRSALDFLDALVALKLLEREQGKYRNTPDTALFLDAAKPSYVGDLLEMANTRLYPFWGSLTEALRTGQPQNEAKRGGNLFEAVYHDEHALRRFLRAMTGVSLGAAKAMAQKFPWQNYSTFIDIGTAQGALPVQIALAHPHLRGGGFDLPAVGPVFEEYVVSHGLQERLRFQPGDFFKDPCPTADVLVMGHILHDWDLGQKLELLKKCHAALPDEGCLIVYDAVIDDERRQNAFGLLMSLNMLIETPGGFDYTGAQCCAWMKEAGFTQVRVEPLAGPDSMVIGIR

SEQ ID NO: 9021 - protein, 508 aa, Lycopersicon peruvianum
MNPFDKKQEPDTDSKTPFLTEMDSEFAAFSPISLPFADPSSPFINFGSFATPLSQHPVGEGEREGEGEGGEIEQPAEGGLGVPQPMECLHGIQIPPFLSKTFDLVEDPLLDTIISWGTNGESFVVWDPVEFSRLVLPRNFKHSNFSSFVRQLNTYGFRKIDADRWEFANEGFSRGKRHLLKNIQRRRSQQGGSSSGSSAEAGKGTMDEIEKLRNEKSLMMQEVVELQQQQHGTVQLMESVNEKLQAAEQRQKQMVSFLAKVLQNPTFLARVRQMKEQGEITSPRTMRKFVKHQSHGPDGVGSSSMEGQIVKFRSDFQDLAGCFDSPDFNPVVDQQLPETGLGAEAMPFEGGPVADGLTVAHELLNCSDREIRGASFFNSGGSQFKGKNVASPQIEVMPEYFASFPEEMGKEKNISGFSAPAIGSMVKDEELWGMGFEASAGMPSTGPELWDSLSSYVPDFGVSSGLSDLWDIDPLQVAGSSGVDKWPADGSPFGQSESHANQPKNDSF

SEQ ID NO: 9022 - protein, 484 aa, Ralstonia eutropha JMP134
MKQFRNFINGEFVATNKTFENRAPVDNRVIGRVHEAGQAEVDAAVAAARAALHGDWGRMPVARRVELLHAVADEINRRFDDFLEAELADTGKPRSLAAHIDIPRGAANFKVFADIVKNAPTESFEMTTPDGGTAISYALRAPLGVVAVVCPWNLPLLLMTWKVGPALACGNTVIVKPSEETPATATLLGEVMEKVGVPKGVYNVLHGFGPGSAGEFLTRHPGVNGITFTGETRTGEAIMAAAAKGVRPVSFELGGKNAGIVFADADFDKAVAGIARSAFENCGQVCLGTERVYVQRPIFDRFVQALKEKAESLRIGPSDAPGVGLGPLISAEHKAKVMSYYDVARSEGATVVTGGGAPSMPPELAEGHWVQPTIWTGLPESARVIREEIFGPCCHIAPFDTEEEAIALANATDYGLATTVWTQDLGTAHRMARAIDVGLCWINSWFLRDLRTAFGGAKASGIGREGGVHSLEFYTELRNVMVKL

SEQ ID NO: 9023 - protein, 482 aa, Salmonella enterica subsp. enterica serovar Typhi Ty2
MQLNDSTLFRQQAFIDGDWRDARGGDVIPVSNPANGKPLGNVPKMGAEETRDAINAANRALPAWRALTAKERANILRRWFNLMMEHQDDLARLMTLEQGKPLAEAKGEISYAASFIEWFAEEGKRIYGDTIPGHQTDKRLLVIKQPIGVTAAITPWNFPSAMITRKAGPALAAGCTMVLKPASQTPFSALALAELAQRAGILAGVFNVVTGSAGDIGGELTSNPLVRKLSFTGSTEIGRQLMEQCAKDIKKVSLELGGNAPFIVFDDADLDKAVEGALASKFRNAGQTCVCANRLYVQDGVYDRFAEKLNQAVNKLAVGDGLQADVAIGPLIDEKAVAKVQEHIADALEKGARVITGGEAHKLGGNFFQPTILADVPDNAKVAKEETFGPLAPLFRFSDEADVIRQANDTEFGLAAYFYARDLSRVFRVGEALEYGIVGINTGIISNEVAPFGGIKASGLGREGSKYGIEDYLEIKYMCIGL

SEQ ID NO: 9024 - protein, 45 aa, Streptococcus thermophilus
TKGFGFITSEDGQDLFAHFSSIQSDGFKSLDEDQKVEFDVEVGQR

SEQ ID NO: 9025 - protein, 295 aa, Methanosarcina thermophila
MTVDELVREYAGCAFGAGRLAKAVDIYYEMLASEKTTKFFGLAGAMTPAGMRNIIADLIRDGYIDVLVTTGANMVHDTVEALGLHHYKGSDCTNDIQLRHECIDRIYDVYLPDQHFTDLEEFLQGVYAGLPQEKLSIRQVLTEIGKNLDDDSSILKTAAEMGVPVYCPALQDSVIGLQAWLYKEGNPLHVDAFADMHEFMEICFETESAGAMLLGGGVPKNYILQSMLVTPRSFDYAIQLTMDHPETGGLSGATLDEAQSWGKVGENAKSVTVYADSTITLPLIVSAVRTRLSKR

SEQ ID NO: 9026 - protein, 181 aa, Brassica napus
MAYSMLSSAAVVTSPAQATMVAPFTGLKSSSAFPVTRKANNDITSIVSNGGRVNSMQVWPPVGKKKFETLSYLPDLTEVELGKEVDYLLRNKWIPCVEFELEHGFVYREHGSTPGYYDGRYWTMWKLPLFGCTDSAQVLKEVQECKTEYPNAFIRIIGFDNNRQVQCISFIAYKPPSFTGA

SEQ ID NO: 9027 - protein, 485 aa, Aeropyrum pernix K1
MFKTFVAGNWVLTSNLAVVRSPIDGSIIAKVSRLDAAAIEEGVDVVYRLGRRRIRDVPGEKRLNILSRIADLLEKNAGDFEEVLTVNAGKTRKQAAGEVEASIDRLRKAALDLRKLQGEYVPGDWDRHTLESEGIVRREPYGVVLAIIPFNYPLFDTVNKFVYSTIPGNAFIVKPPSADPLPVIMFARLAIEAGFPPESLMIATLRGSEAEKLVADRRISVISLTGSSETGVKVMRSAGIKQLIMELGGGDPAIVLADADLKSAASKIATGITSYSGQRCDAIKLVLVEEPVYNEMKKLLVEELSKIKVGDPRNDSTTMGPLIDKEAVDAMVEAIEEAVSRGAKLLYGGERIGDTYITPALVEVEDKNVLRELKLYKDEVFAPVAVITSFSTLDEAIELANGRRYGLDAAIFGESMARIRKLIRFLEVGAIYINEYPRHGIGYYPFGGRKDSGIGREGIGYSIEYVTALKTIVYNYRGRGIWEYL

SEQ ID NO: 9028 - protein, 340 aa, Erwinia carotovora subsp. atroseptica SCRI1043
MKSIVIQQPNSLVIEERSIPQPAAGEVRVKVKLAGICGSDSHIYRGHNPFAKYPRVIGHEFFGVIEAVGDGVDAARLGERVSVDPVVSCGHCYPCSIGKPNVCTSLVVLGVHRDGGFSEYAAVSAKNAHVIPDEIPDEFAVMVEPFTISANVTAQVKPTEQDIALIYGAGPMGLTSVQVLKGVFKVKEVIVVDRIPERLEMALRSGADRVINNASLSLKDELETLNIKPTLIIDAACHPSILQEAITIASPAARIAIMGFSSEPCQISQQGITSKEISIFSSRLNANKFPIVIEWLKEKRIDPAKLITHRFDYQQVVQAIEVFEKDQKRCCKVLLTFNEA

SEQ ID NO: 9029 - protein, 495 aa, Triticum aestivum
  misc_feature (464)..(464): Xaa can be any naturally occurring amino acid
MVLSHAASAGSSDDSVHSTFASRYVRASLPKFRMPENSIPKEAAYQIINDELMLDGNPRLNLASFVTTWMEPECNKLMMDSINKNYVDMDEYPVTTELQNRYVNMIAHLFNAPLGETETAVGVGTVGSSEAIMLAGLAFKRRWQNKMKAAGKPCDKPNIVTGANVQVCWEKFARYFEVELKEVKLSEGYYVMDPEKAVEMVDENTICVAAILGSTLNGEFEDVKMLNDLLVKKNEETGWDTPIHVDAASGGFIAPFLYPELEWDFRLPLVKSINVSGHKYGLVYAGIGWCIWRSKEDLPDELIFHINYLGADQPTFTLNFSKGSSQVIAQYYQLIRLGFEGYRNIMDNCQENAMVLKEGLERTGRFNIVSKDQGVPLVAFSLKDSSRHDEFEISEFLRRFGWIVPAYTMPPDAQHVTVLRVVIREDFSRTFAERLVIDIEKVLHELDALPSRSSGARPAAPQRXTVSEKDLARQREVVSVWKRAVAARKKTQGVC

SEQ ID NO: 9030 - protein, 593 aa, Zea mays
  misc_feature (141)..(141): Xaa can be any naturally occurring amino acid
  misc_feature (186)..(186): Xaa can be any naturally occurring amino acid
  misc_feature (214)..(214): Xaa can be any naturally occurring amino acid
  misc_feature (564)..(564): Xaa can be any naturally occurring amino acid
  misc_feature (577)..(577): Xaa can be any naturally occurring amino acid
MCGILAVLGCSDWSQAKRARILACSRRLKHRGPDWSGLYQHEGNFLAQQRLAVVSPLSGDQPLFNEDRTVVVVANGEIYNHKNVRKQFTGTHNFSTGSDCEVIIPLYEKYGENFVDMLDGVFAFVLYDTRDRTYVAARDAXIGVNPLYIGWGSDGSVWIASEMKALNEDCVRFEIFPPGHLYSSRXGGFPGGWYTPHWVPGAGAPGRPYQPLVXLERAFEKAVIKRLMTDVPVRGPPSPGGLDSSLVASVTKRHLVETEAAEKFGTELHSFVVGLEGSPDLKAAREVADYLGTIHHEFHFTVQDGIDAIEEVIYHDETYDVTTIRASTPMFLMARKIKSLGVKMVLSGEGSDELLGGYLYFHFAPNKEEFHRETCRKVKALHQYDCLRANKATSAWGLEVRVPFLDKEFINVAMGMDPEWKMYDKNLGRIEKWVMRKAFDDDEHPYLPKHILYRQKEQFSDGVGYNWIDGLKSFTEQQVTDEMMNNAAQMFPYNTPVNKEAYYYRMIFERLFPQDSARETVPWGPSIACSTPAAIEWVEQWKASNDPSGRFISSHDSAATDHTXAVSRRWPTAAATXANGTVNGKDVAVAIAV

SEQ ID NO: 9031 - protein, 395 aa, Thermotoga maritima MSB8
MRAVRLHAKWDPRPEFKLGPKDIEGKLTWLGSKVWRYPEVRVEEVPEPRIEKPTEIIIKVKACGICGSDVHMAQTDEEGYILYPGLTGFPVTLGHEFSGVVVEAGPEAINRRTNKRFEIGEPVCAEEMLWCGHCRPCAEGFPNHCENLNELGFNVDGAFAEYVKVDAKYAWSLRELEGVYEGDRLFLAGSLVEPTSVAYNAVIVRGGGIRPGDNVVILGGGPIGLAAVAILKHAGASKVILSEPSEVRRNLAKELGADHVIDPTKENFVEAVLDYTNGLGAKLFLEATGVPQLVWPQIEEVIWRARGINATVAIVARADAKIPLTGEVFQVRRAQIVGSQGHSGHGTFPRVISLMASGMDMTKIISKTVSMEEIPEYIKRLQTDKSLVKVTMLNE

SEQ ID NO: 9032 - protein, 522 aa, Glycine max
  misc_feature (33)..(33): Xaa can be any naturally occurring amino acid
  misc_feature (62)..(62): Xaa can be any naturally occurring amino acid
  misc_feature (89)..(89): Xaa can be any naturally occurring amino acid
  misc_feature (98)..(98): Xaa can be any naturally occurring amino acid
  misc_feature (173)..(173): Xaa can be any naturally occurring amino acid
  misc_feature (216)..(216): Xaa can be any naturally occurring amino acid
  misc_feature (228)..(228): Xaa can be any naturally occurring amino acid
VNNIQGLYNRFVFFIQRDGNSNRFYVTNENLYXRVLNGNFKVIHRIIYISTIGFLYDNYLGXDRVTAGMYFSAKEKGEKMEMIYSYGVXHVDKIVLTXSNRILGYVDLKVWYIGISTVEHEKYVAADIINLQKILPNMFVVVIIQRKLLDDPLYQRVQHRMADSEKDKISLDXFMVAVHVLWSKAIMSFEGLQKMCAIKTQIRYRARFCMFKDDIXGTAGVELAGLLXTVRSQGQLLSDFLEQKIIVVGAGSAGLGVLSMDGQAVSEMSGRSGTDANSQFFLIDKDGLVTTERSNLDLAAVAFAKNPRDLVVFLEGASIIEVVKKVNPHVLLGFSGSGGVFNTEVLKPMRESVSTYPAIFAMSSPPINAECSAIEAFSHAGENIVFASGSPFENVDLGNGEVGHVNQANNMYLFPGIGLGTLLSGARHITDGMLRAAAECLASYMTEDDVRKGILYPSIDCIRDVTAEVGAAVVCAAVAEKQAEGHGDVGFKELENMSKEETVEYVRGNMWYPEYCPLVHEK

SEQ ID NO: 9033 - protein, 496 aa, Triticum aestivum
  misc_feature (135)..(135): Xaa can be any naturally occurring amino acid
MKPCRAIALALVVAAQCAALATAAGPRVIIVGAGMSGISAGKRLSEAGITDLVILEATDRIGGRIHKTKFAGVNVEMGANWVEGVNGDEMNPIWTMANGTGGLNLRTFRSDFDHLASNTYKQDGGLYDEKVVENXIERMDEVEESGSKLSGTLHHSGQQDMSVSRPLQRLNDHMPSGPARPVDMVVDYYQHDFEFAEPPRVTSLQNTQPLPTFSNFGDDVYFVADQRGYESVVYHVAGQYLRTDRKSGAVADPRLKPNTVVREISYFPSGVMVRTEDNKVYRADYVVVSASLGVLQTDLIRFKPQLPSWKIVSIYQFDMAVYTKVFLKFPKRFWPEGEGKEFFLYASGRRGYFPVWQQFEQQYPGSNVLLVTVTDDESRRIEQQSDNQTMAEAVAVLRKMFPKEDVPDATEILVPRWWSNRFFKGSFSNWPIGVNRYEYDLIRAPVGRVYFTGEHTSEKYNGYVHGAYLAGIDSADILINCAKKKMCKYDVKGKHD

SEQ ID NO: 9034 - protein, 133 aa, Deinococcus radiodurans R1
MCRVSIVGGGGPYLASRSTPAENLKGHAGKRATAACGLLLVRARRFEMATGRVKWFNAEKGFGFIETEGSADVFAHYSAINSSGFRKLNEGDEVEFEIEPGQNGKGPQAKNIVVTKAAPAPAYGDRPRRDDRW

SEQ ID NO: 9035 - protein, 473 aa, Crocosphaera watsonii WH 8501
MTIETMTTLNSSAQLINNPEAAVTALKNSEDEGVRYYAAWWLGKNRILKAIPLLCECLKDERDRTTLGGYPLRRQAARSLGMLKDSQAVTPLIEALDCSDLRLQEAVILALKNIGDRSAIPALINLLNPEIKDKPTEALIEALTAFKVWEVQDHIEPFLQDSSERVKCAAAQYFYALTLKPRYLEMLFQTLGHENRFLRYAAAMDLAALGRFEIAPAIIKAQIPNNIKLATIKRILEALLQNKTEREVKRQEQANFLFPALDELLLDAIQGNIPRSNTVETNQKIEKMKMLVDQQSITSQQVPKSLILELIEAVKSPYPNVKAAAIQGLVELAPLSADVIIEVFDTDEDQDLRAGLTQALMYIGDLRTVSLLEKVIGFDISDHCQGKIRRVAARGLGKIGRQTKNQEVIAQVIEKLKWALLEPTDWALRYSAVVSLEEIGNSDGILALQAASESESDFIVQTRIERALTAIGW

SEQ ID NO: 9036 - protein, 1001 aa, Gibberella zeae PH-1
MDGSAHLSGRNIDTGHELLNLLQSPFSGQLQAASLYSALATSLPVTIGIAIFFSILRPYHQAIYAPKLKHADEKHVPPPIGKAPWSWITTLWRTNEDMLLPLIGMDATVFLRFVRMCRNMFLTLCVTGIGILLPINVSRFKNYEGPKQTSWVISITPLTVYAPAIWSQVVIAWCFNFIVIGFLWFNYRKVHQLRRRYFESEDYQKSLHSRTLMVFDIPKKGCSDEGIARIIDQIAPNSSFARTAVARNVKELPALIEQHDHAVRKLEKILAKYLKDPNNVPTARPMCKPSKKDRSYGTYPRGQKVDAIEYYTQRIRDLEVQIKQVRATVDKRGSMPYGFASYADIAEAHGIAYACRKKKPVGATVKLAPRPNDIIWENMPLYSSTRGRRRWVNNMWITLLTLFWIVPNLGIAIFLVNLENLGKVWPAFQTELAAHPKVWGAIQGVLSPAIMSLTYLVLPMIFRRLSVKAGDQTKTGRERHVLAKLYFFFVFNNLFIFSIFSTVWSFVFSVVQDATGAKKEDAWESIKKQKIASGLFETLCNNSLFWVTYLLQRQLGAAIDLAQAWPLIQAFFLKKFSSPTPRELIELTAPPPFEYASYYNYFLYYATVTMCLAGIQPLVLPATALYFVIDSWLKKYLLLYRFVTKTESGGMFWRVIFNRFIFATILSNLVVMLTCWAHGNFGTHIEFWCVVPLPFIMLIFKIYCNRAFNDKITYYSIQDVTKSPENGVDPKENRMRSERLANRFGHPALYRPLITPMVHAKAQNLLPAIYKGRLTDGREVDSGDMMTGGKPGKAANNVPGFEFVNDTQMDFEYYKNRAEFAENHGGGEIYGRPGEIGRPGTPGSMDGSDFSRPGTPVGRSASPAAFPGGAAQQQRLMSLASNVSGDTSYSSYRPGANTGFTQQMTLGQEPPPARGRSPLYAQNNGSSSSLGLIQNAAAPAYSSNLNTPGRMTPAQSPGPSVGAMGGGPQGYSGLAQHEGGEQSYDYFRGSNRPRRNPGEGW

SEQ ID NO: 9037 - protein, 493 aa, Oryza sativa (japonica cultivar-group)
MDDRRTILMDRYEIGRQLGQGNFAKVYYARNLTSGQAVAIKMIDKEKVTRVGLMVQIKREISIMRLVKHPNILQLFEVMASKSKIYFVLEYAKGGELFKKISKGKFSEDVARRYFHQLISGIDYCHSRGVYHRDLKPENLLLDENESLKVSDFGLSALSESKRHDGLLHTTCGTPAYVAPEVLSRRGYDGAKADIWSCGVILFVLVSGYLPFHDTNLIEMYRKIAKAEYKCPRSFSAELKDLLYKILDPDPSTRISIPKIKRSAWYRKSSDVNALKSKHETGDKVYKGEATTSDTTECSIFEGNRASSRDKVYTNGEATTSDSPECSNSDGKQASLSLPNLNAFDIISLSTGFDLSNLFEERYGRREERFTTRQPAAAIFAKLNELARRFKLKIKKKENGVLRLVAPKEGIKGLLELDAEVFELAPSFHLVEFKKSNGDTIEYQKLMKEDIRPALKDIVWAWQGGQHQQPEQSMQGMQGEQQPSRLPSQQPQG

SEQ ID NO: 9038 - protein, 350 aa, Escherichia coli O157:H7
MRFLLGVLMLMISGSALATIDVLQFKDEAQEQQFRQLTEELRCPKCQNNSIADSNSMIATDLRQKVYELMQEGKSKKEIVDYMVARYGNFVTYDPPLTPLTVLLWVLPVVAIGIGGWVIYARSRRRVRVVPEAFPEQSVPEGKRAGYVVYLPGIVVALIVAGVSYYQTGNYQQVKIWQQATAQAPALLDRALDPKADPLNEEEMSRLALGMRTQLQKNPGDIEGWIMLGRVGMALGNASIATDAYATAYRLDPKNSDATLGYAEALTRSSDPNDNRLGGELLRQLVRTDHSNIRVLSMYAFNAFEQQRFGEAVAAWEMMLKLLPANDTRRAVIERSIAQAMQHLSPQESK

SEQ ID NO: 9039 - protein, 339 aa, Sinorhizobium meliloti 1021
MRAIVLHAPGDIRLETRPKPVAGPGEVLLRVASVGVCGSDLPRMLVKGAWKMPLITGHEFSGHIHALGENVEGWEIGELTAIAPLMPCNQCIECKTGNFSRCRDYDYFGSRRDGAYAEFVAVPVENLIKTPQHVDPRAIAMTDPASIALHAIWKAGGITAGQTGAVVGCGPIGLFAIQWMRIMGTSRVIAVDVTEEKLALARQAGADLCILSADFADNKERADLVIEAVGIDSTINAAVMLAAPGGHVTFIGIPVPDVKLSNATFQRFLRQEVSLHGSWNSFGAPFPGPQWTTTVQKFATGELKWEFMISHDLDLAELPGIFQRFAAKDLHFSKVLFRP

SEQ ID NO: 9040 - protein, 507 aa, Solenostemon scutellarioides
MTSLLAHPLLPPPRRRPLPPLLPPPVSHPAGPRPGRWWRNLYDVKPVRFRCFAEWAQLFGPTFSVWFGSTLNVIVSSSELAKEVLKEKDGQLADPPRSRSAVKLSRDGKDLIWADYGPHYVKVRKVCTVVLFSPKRLELLRPIREDEITVMVESIYQDSAASGKSVVIKKYLASMAFHNITRLVFGKRFVNSEGEVDKQGQEFKAIAINGLKLGASLAVSEHIPWLRWMFPLDEDAFTQHGVRMERLTREIMQEHTLARQKTGGAKQHFFDALLTLKDEYDLSEDTIIALLWDMIAAGMDTPAISVEWAMAELVRNPRVQEKVQEELDRVIGHERIMTELDIPNLPYLQCVVKESLRLHPPTPVMLPHRSNADVKIGGYDIPKGSNVHVNVWAIARDPKSWKVPLEFRPERFLEEDVDIKGHDFRLLRFGAGRRVCPGAQLGIDLATSMIGHLLHHFRWTPPTGVRAEDIDMGENPGTVTYMRTPVEAVPTPRLPANLYKRVAVVDI

SEQ ID NO: 9041 - protein, 196 aa, Vigna radiata
MSTARFIKCVTVGDGAVGKTCMLISYTSNTFPTDYVPTVFDNFSANVTVDGSTVNLGLWDTAGQEDYNRLRPLSYRGADVFLLCYSLISKASYENISKKWIPELRHYAPNVPIVLVGTKLDLRDDKQFLIDHPGGTRITTAQGEELKKMIGAVTYIECSSKTQQNVKTVFDAAIKVALRPPKPKKKPRKKRTCFFL

SEQ ID NO: 9042 - protein, 355 aa, Methanosarcina acetivorans C2A
MSKNICFIDGLEGVLKYREVDINELVKLPYDAVSYLLIRGRLPGEQELAEYSARLHAERRINKEVIDVIRMCNFNIDAMAALRTVISFISQFDPDLNDSSPEGNMRKAIRLIAIVPTIVATYYRMANGKEPLPPDPSLSHGANFLYMIKGSKPDPLDAEVMEKDFILSAEHELNASTFSSRVTASTMSDLYSAVVSGLCTLKGPLHGGARAEVMTMLDEVASPENAEKFVLEKISQREKIMGFGHRVYKTYDPRGVIFKQLSKKLAESKGDMHWYTTAEAVENVVVRELVEKRGKPIYPNVDFYSGVIYKYMEIPPQLATSIFAIGRVSGWIAHCFDQYERKKIIRPRAFMLDEC

SEQ ID NO: 9043 - protein, 212 aa, Nicotiana tabacum
MAVEICVKAAVGAPNVLGDCPFSQRALLTLEEKKVPYKMHLINVSDKPKWFLEVNPEGKVPVIKFDEKWIPDSDVIVGLLEEKYPNPSLSSPPEFASVGSKIFPSFVSFRKSKDASDGTEQALLDELKALEEHLKAHGPYVNGANICSVDLSLAPKLYHLEVALGHFKKWSVPESLSHVRKYMKLLFERESFQKTKAAKEYVIAGWAPKVNP

SEQ ID NO: 9044 - protein, 259 aa, Zea mays
  misc_feature (103)..(103): Xaa can be any naturally occurring amino acid
  misc_feature (134)..(134): Xaa can be any naturally occurring amino acid
WARKNRGGGGSGGERPVRGATESPALWCSRSRVRFTCDRIYFFFWHVNVVGDLFCFTFSNEAGTLPPCGTGGQCCIWQFNFRGFNPDTDPYSPDSIDLLRRSXIDFDLFAVEGVDSTRFAELMMSSGIVLNEEXQRVTFHGCHELGYLLRLLSGREMPYTLDGVLKLTMSFFPVLYDVKHLMKFCGPGLYGGLSRLGKLLKVERVGTGHQAGSDCLLTLQCFMKLKQLYLKESVKLYDGLLFGLIPGEVEIKTAPPPIG

SEQ ID NO: 9045 - protein, 330 aa, Brassica napus
  misc_feature (30)..(30): Xaa can be any naturally occurring amino acid
MDATREASVTDLKRPREEDDNNNTAAVASXETKEPACFSSVIPGWFSEMSPMWPGEAHSLKVEKVLFQGKSDYQDVIVFQSATYGKVLVLDGVIQLTERDECAYQEMITHLPLCSIPNPKKVLVIGGGDGGVLREVARHSSVEQIDMCEIDKMVVDVSKQFFPNVAIGFEDPRVNLVIGDGVAFLKNAAGGSYDAARPDSSDPIGPAKELFEKPFFQSVARALRPGGVVCTQAESLWLHMDIIEDIVSNCREIFKGSGDYAWTSVPTYPSRVIGFMLCPPQAPDVDFKHPVNPIHHTKSSGPFKFYNAQIHSAAFCLPSFAKKVIESKTN

SEQ ID NO: 9046 - protein, 505 aa, Zinnia elegans
MDLLLVEKTLLALFAAIIASIFISKLRGKRFKLPPGPVPVPIFGNWLQVGDDLNHRNLTDLAKKFGEIFLLRMGQRNLVVVSSPNLAKEVLHTQGVEFGSRTRNVVFDIFTGKGQDMVFTVYGEHWRKMRRIMTVPFFTNKVVQQYRTGWEAEAAAVVDDVKKNPKAATEGVVIRKRLQLMMYNNMFRIMFDRRFESEDDPLFVKLKMLNGERSRLAQSFEYNYGDFIPILRPFLKGYLKLCKEVKEKRFQLFKDYFVDERKKLGSTKSMDNNQLKCAIDHILDAKDKGEINEDNVLYIVENINVAAIETTLWSIEWAIAELVNHPEIQAKLRHELVSQLGPGVQVTEPDLHKLPYLQAVIKETLRLRMAIPLLVPHMNLHDAKLGGYDIPAESKILVNAWWLANNPDQWKKPEEFRPERFLEEESKVEANGNDFRYLPFGVGRRSCPGIILALPILGITIGRLVQNFELLPPPGQDKVDTTEKGGQFSLHILKHSTIVAKPRVL

SEQ ID NO: 9047 - protein, 416 aa, Shigella flexneri 2a str. 301
MESKVVVPAQGKKITLQNGKLNVPENPIIPYIEGDGIGVDVTPAMLKVVDAAVEKAYKGERKISWMEIYTGEKSTQVYGQDVWLPAETLDLIREYRVAIKGPLTTPVGGGIRSLNVALRQELDLYICLRPVRYYQGTPSPVKHPELTDMVIFRENSEDIYAGIEWKADSADAEKVIKFLREEMGVKKIRFPEHCGIGIKPCSEEGTKRLVRAAIEYAIANDRDSVTLVHKGNIMKFTEGAFKDWGYQLAREEFGGELIDGGPWLKVKNPNTGKEIVIKDVIADAFLQQILLRPAEYDVIACMNLNGDYISDALAAQVGGIGIAPGANIGDECALFEATHGTAPKYAGQDKVNPGSIILSAEMMLRHMGWTEAADLIVKGMEGAINAKTVTYDFERLMEGAKLLKCSEFGDAIIKNM

SEQ ID NO: 9048 - protein, 350 aa, Haloarcula marismortui ATCC 43049
MLQRAEPQDFERVLSSMCTVPHPSAREAAERFLATNPGDPGTYETIAGLEREAVEYLGDITGLSDPAGYVASGGTEANLQAIRIARNRADTDDPNVVAPVHAHFSFTKAADVLGVELRTAPAADYRVNMAAMAELVDEDTVCVVGVAGSTEYGYVDPIPAIADLAETVDALCHVDAAWGGFYLPFTDHDWHFGHADIDTMTIDPHKVGQAAVPAGGLLARDRTLLDELAVETPYLESTDQLTLTGTRSGAGVASAVAAMESLWPAGYRQQYETSMANADWLADQLSARGHDVVGPELPLVAADLSMPMTDELRDRGWRVSKTGAGEMRVVCMPHVTRSMLRSFVADLDWY

SEQ ID NO: 9049 - protein, 488 aa, Psychrobacter sp. 273-4
MLKTTLNLSNPDLIKQQCLIKDGWYAANDEATIEVSNPFNGDVIGTVPSLTTADVNDAVTYSHEAQITWAAKTPQERAQLLQKWADLIDANKEDLAIIMTAEQGKPLAESRGEIGYANSFIRWFAEEGKRVYGDVIPATNSQLRYVVLKQPVGVCAAITPWNFPAAMITRKAAPALAAGCTIIIKPATETPFSALALGALAEQAGIPAGVIQVVTGKSSTIGDILTGDARIHKLSFTGSTEVGRTLMAQCAPTIKKLSLELGGNAPFIVFDDADLEKAADGLIASKYRNAGQTCVCANRVYVQDSIKDEFLGIFIKKVAELKVGNGMEEGVNVGPLINEKALQKVQALLKDALDKGATLIAGGSTNNASALAYNPTVITDISADMDIASEEIFGPIAPVFTFSSEEEVIRAANDTIYGLAAYFYSSDYARAWRVTEGLEYGMVGHNTGMLSTEVAPFGGVKQSGFGREGSKYGIEEYVVTKYWCSDVS

SEQ ID NO: 9050 - protein, 378 aa, Nostoc punctiforme PCC 73102
MMVCEYKPGLEGIPAAQSSISYVDGQKGILEYRGIRIEELAEKSTFLETAYLLIWGELPSKEELEGFEHEVRYHRRIKYRIRDMMKCFPESGHPMDALQASAAALGLFYSLRDLHNPAYIRDSVVRLIATIPTMVAAFQLMRKGNDPVRPRDDLDYSSNFLYMLDEKEPDPLMARIFDICLILQVEHTMNASTFSARVTASTLTDPYAVVASAVGTLGGPLHGGANEEVIQMLEKIGSVENVRPYIEHCLETKSKIMGFGHRVYKVKDPRAIILQGLAEKLFEKFGYDKFYDIAQEMERVVGEKLGSKGIYPNIDFYSGLVYRKMGIPTDLFTPIFAIARVAGWLAHWKEQLAENRIFRPTQVYNGLHEVTYTPIDQR

SEQ ID NO: 9051 - protein, 441 aa, Glycine max
NVTRSTDEKQLLDWHLANLEYANAGCLSNLSAAYCRSDDPYEMSGDHCFLAGGNMGLIKALCEGVPVFYGKTVNTIRYGNEGVEVIAGEHVFQADIALCTVPLGVLKKKAISFEPELPARKLEAIERMGFGLLNKVAMVFPHVFWGEDRDTFGCLNEHSHQRGEFFLFYCYHTVSGGPALIALVAGEAAQAFESTDASILLHRVLTVLKGIFHPKGIIVPDPIQPTRPRWGSDPLSYGSYSHVSVNSSGADYDILAENVGNRLFFAGEATSRQYPATMHGAFLSGLREASHIYRSARIQNNPRKCMPKNIVSNDILGDLFKWPDLEFGKFAFIFYPSPENLQSTGLLQVTIGDAEEIYEELFSSYPNAAKWPLQLYTIISREQAQQLQKVEGGNESLLSFFTAARRLQLGGPNALLTAGNTLIASIAHSRKGRWRNRVITC

SEQ ID NO: 9052 - protein, 180 aa, Glycine max
MSGRVSGKVKWFNDQKGFGFITPDDGSEELFVHQSQIKSDGFRSLAEGESVEFAIESESDGRAKAVDVTGPDGASVQGTRRGGDGGRSYGGGRGGGYGGGGRGGGGGACYNCGESGHLARDCSQGGGGDRYGGGGGGGGRYGGGGGGRYGGGGGGGGGGGSCYSCGESGHFARDCPSSAR

SEQ ID NO: 9053 - protein, 1113 aa, Oryza sativa (japonica cultivar-group)
GLITKSRKGLDPAVARYARGFGPEEVQDLHEGASLVEVLYTDHQVRKVKPHVLLGLSGVGGIFNEEVLKAMKESDSPRPAIFAMSNPTTKAECTPEDVFKYVGDNAVFASGSPFSNVTLGNGRQGYANQANNMYLFPGIGLGALLSGARHITDGMLQSAAECLASYITDDEIRKGILFPSISSIRHITARVGAAVVRAAVDEDLAEGRCDVDARDLKSMTECWNNSSKKPPAKSAYLRWKKTVGVLPSLLPEVGMEFNTVDEAWMFWVSYGGQKGFEVRKRYSNKRKSDGKVRSCRYVCANEGHRKEDKRDHLTKCPRAETRTDCQVRMGVVLDQEKGNYKVADLVLEHNHILQLPETSHLMVSQRKISELQGFEIETADDAGIGPKAAHQLASIQVGGSLNLNCTLRDHKNYLRGKRQREMVYGQAGSMLMHFQDKIAENPSFQYALQMDSEEQIANIFWVDAKMLTDYAYFGDVVSFDTTFGTNKESRPFGVFVGFNQFRETMVFGAVLLYDETYESFKWLFETFLKAHNGKQPKTIYTDQDSAMGKAIKKVFLESWHGLCTFHIMQNAVKHVAELEDEESSNSPKQTAEDNEEERSILADFSACMFEYEDEETFEQAFSTIRAKASKQSWLDSIYKVKEKWAECYMKDVFTLACTTALEGNNCYLVAIGSLDENCTFEKEYKVVGDPLEQTSTCGCGMFSRTGILCAHALKVLDLMNIKSLPSQYVLKRWTRGAHSGTVQDNHGRSIIENPRLNEMLRYKDMTRKFLNLALRAASHPGSTLLVNNALDILSKQVEEEINGFTDTIALGPTDITPPSDLVSTARLKKKEVETKTSKRKKNWLDKLHKSTKNGSNKGGKRKKKGSKEQKTAKTGGKKKGKEASVHDNPAGQNIYPSTSLPMEEMSEPYMAINTFSQLLTQWSLVLVNRLLVSAGCGTCRDCSFGTLDEQLDLLGKSKVDWLSGVEATGGAELDGRWPEQASGAKRRWPEQGQGATAPRCRGVTGGERGGGWSSGEWRRAPGRWRRDEAERTPTARWSTHLKKRVSPEQKKGGGKSKKKMTWTDVLVPSPSPSSSSTATTNCSRLQRRLGRCAEQHKQGGGGGQDRDPHARPL

SEQ ID NO: 9054 - protein, 506 aa, Glycine max
  misc_feature (71)..(71): Xaa can be any naturally occurring amino acid
MLSQKQGEDAIITNLNHTDSEDGRRFSSSDTEQDHSMFNIKILLHLGGSVWDAWFSCASNQVAQVLLTLPXSFAQLGMVSGILLQIFYGLIGSWTAYLVSVLYIEYRTRKEKENVSFKNHVIQWFEVLDGLLGRYWKAVGLAFNCTFLLFGSVIQLIACASNIYYINDKLYKRTWTYIFGACCAFTVFIPSFHNYRIWSFLGLGMTTYTAWYLAIAAILHGQVENVTHSGPTKLILYFTGATNILYTFGGHAVTVEIMHAMWQPRKFKSIYFLATLYVFTLTIPSAVAVYWSFGDQLLDHSNAFSLLPKNVFRDAAVILMLIHQFITFGFACTPLYFVWEKVIGMHDTKSIWLRALARFPVVLPIWFLAIIFPFFGPINSAVGSLLVSFTVYIIPALAHMLTYRNASARQNAAEKPPFFMPSWTAMYVFNAFIIGWVLVVGFGLGGWASMINLINQIDTFGLFAKCYQCPEPPPPAGAPPPLTHPVVEGGVDLVEPWAPPNLLKII

SEQ ID NO: 9055 - protein, 521 aa, Zea mays
HASVQIKVEDMDAYAPKDLLVVTTGSQGEPRAALNLASYGGSHALKLSKEDVLLYSAKVIPGNETRVMKMMNRLTDLGPKIIMGKDSGLHTSGHAYREELEEVLRIVKPQHFLPVHGELLFLKEHESLGRSTGIRHTTVIKNGEMLGVSHLRNRRVLSNGFVSLGKEDLQLMYSDGDKAFGTSTDLCIDERLRIASDGIIFVSMEIFRPQKEHGLAQSGLKGKFKITTRCLWLDNGRLLDALYKAAHAALSSCPVNCPLSHMERMVAEILRKMVRKYSGKRPDVIAVAMENTTASFSEHLDAKSSGNFGPSSATSHLSRSPAMSLEGSYKTHPDNPEVDAEETLPEAARTTPDDATTSSNGEAFFSSDLHQPKTLEHFWESFKSPTTVKIARIVNGGKKQNLGKIGIMGKDSSIQSAPAPAKSSKKNKWKPEEIKSLIQMRGEMNERFQSVKGRMVLWEEISDNMLKQGISRTPAQCKSLWTSLVQKYEESKKDAESMKTWPYFSAMDRILSQQGEMATKG

SEQ ID NO: 9056 - protein, 123 aa, Triticum aestivum
MAGVSRSMVAPLLVLNLVMYIVVIGLASWNLNHFINGTTNYAGVAGNGATFYFLLFAILAGVVGAASKLAGVHHVRTWRGDSLATSASSALVAWAITALAFGLACKEIHVGGHRGWRLRVLEV

SEQ ID NO: 9057 - protein, 427 aa, Haemophilus somnus 129PT
MSKLTAKLTLSDGREFDLNVQQGTLGYDAVDVQPLVKNKLFTFDPGFMSTASCVSEITYIDGDNGILLHRGYPIADLAKNADYLEVAHLLLFGERPNKEEYANFIKLVKNHTLVHEQISRFFHGFRRDSHPMAIMCGVSGALAAFYHDSLDINDIEHRELTAIRLLAKMPTLAAMCYKYSIGQPFMFPLNKLSYAGNFLYMMFATPCEPYEVNPVLEKAMDRIFILHADHEQNASTSTVRTAASSGANPFACIAAGIASLWGPAHGGANEACINMLEEIGSVDRIPEYIARAKDKNDPFRLMGFGHRVYKNYDPRAKVMRQTCHEVLKELNIQTPLFDVAMELERIALNDPYFIDHKLYPNVDFYSGIILKAIGIPTSMFTVIFALARTVGWIAHWKEMFKPGNMKIVRPRQLYKGHTERNFDAIEK

SEQ ID NO: 9058 - protein, 143 aa, Brassica napus
  misc_feature (34)..(34): Xaa can be any naturally occurring amino acid
  misc_feature (93)..(93): Xaa can be any naturally occurring amino acid
  misc_feature (120)..(120): Xaa can be any naturally occurring amino acid
PAQDQLAAPLTGSKRSAGFPDTRKSNTDSYFHVXASRDARSSCMNEWAPHGKKKIETLSYVPDLTDHQSTKQDDYLLHLTGGTPCVEYEMQHXFVGPERGNTPGYYDARYWTMGKLSLIXCTDSAQMLKEVLECKTEYPNAFI

SEQ ID NO: 9059 - protein, 214 aa, Listeria monocytogenes str. 4b F2365
MRFFIDTANVEEIKKANRMGFIAGVTTNPSLVAKEGRDFNEVIQEITSIVDGPISGEVVSLEADEMIAEGRVIAKIHPNMVVKIPMTGEGLAAVKVLTEEGIKTNVTLVFSATQALLAARAGATYVSPFLGRLDDIGDDGLVLIRDIADIFEIYGIPTEIISASVRHPIHVIECAKAGADIATVPFKVFEQMLKHPLTDSGIDKFLADWEAAKK

SEQ ID NO: 9060 - protein, 138 aa, Triticum aestivum
MRVPQMTRVIHDSGEGMQKEFALDMVSSDVNFPKGHFPDYRIGPNNQIIDPEETHEVVPLKEIVEKETTQLLEQRKRLSVRDLREKFEKGLTGASKLSEEAKRREAASLDRQVLLKKLRDVLDTLKGRVAGRNRDDAD

SEQ ID NO: 9061 - protein, 203 aa, Methylococcus capsulatus str. Bath
MNTHIVWHQSTVTRGQRERQNGHKSFILWFTGLSGAGKSTLAHRVEQLLFEQGCRTYVFDGDNVRHGLCSDLGFSAEDRCENIRRIGEMSKLFVDAGVIALTAFISPFRRDRDLVRALVEPGDFVEIFCDAPLEVCEQRDVKGLYRKARAGEIPEFTGISSPYEKPLAPEITVRTGEDGLDECAGQILGYLEKNGKINLKTTR

SEQ ID NO: 9062 - protein, 240 aa, Zea mays
PTRPPTRPDPRVRPRVRPRVRVDHAVELAHFALFFNQGQCCCAGSRTFVHERVYDEFVEKAKARALKRVVGDPFRKGVEQGPQIDDEQFKKILRYIRYGVDGGATLVTGGDRLGDKGFYIQPTIFSDVQDGMKIAQEEIFGPVQSILKFKDLNEVIKRANASQYGLAAGVFTNSLDTANTLTRALRAGTVWVNCFDVFDAAIPFGGYKMSGMGREKGVDSLKNYLQVKAVVTPIKNAAWL

SEQ ID NO: 9063 - protein, 473 aa, Magnaporthe grisea 70-15
MASAMRLSSAFRATARAPAFTARRTAFNGMRCYSAKTQTLKERFAELLPEKIEEIKSLRKEHGSKVIDKVTLDQVYGGARGIKCLVWEGSVLDSEEGIRFRGKTIPECQELLPKAPGGKEPLPEGLFWLLLTGEVPSEAQVRALSAEWAARSDLPKFVEELIDRCPNDLHPMAQFSMAITALEQTSSFAKAYAKGINKKEYWGYTFEDSMDLIAKLPTIAARIYQNVFKGGKVAPVQKDKDYSFNFANQLGFGNNSDFVELLRLYLTIHTDHEGGNVSAHTTHLVGSALSSPFLSLAAGMNGLAGPLHGLANQEVLNWLTEMKKSVGDDLSDKSITDYLWSTLNSGRVVPGYGHAVLRKTDPRYTAQRVFAQEKMPNDPMFKLVSQVYKIAPGVLTEHGKTKNPFPNVDAHSGVLLQYYGLTEANYYTVLFGVSRAIGVLPQLIIDRAVGAPIERPKSFSTEKWIEIAKKTAA

SEQ ID NO: 9064 - protein, 350 aa, Caulobacter crescentus CB15
MATLLLLPGDGIGPEVCAQVRRVAAALTPDLKVDEALYGGASYDTHGTPLTDEVREQALASDAVLMGAVGGPKWADAPRHLRPEAGLLNLRKAMDVFANLRPAYCFEALAGASSLKPELVSGLDIMFVRELVGGVYFGQPRGIEDLADGQKKGFDTQVYTTSEIERVGRVAFELARGRTNKVHSAEKSNVMESGLLWKQVITELHAREYPDVQLEHILADNCAMQLVRAPKQFDVIVTDNLFGDILSDAAAMLTGSLGMLPSAALGAPGKPGLYEPIHGSAPDIAGKGLANPLAAILSFEMALRWSLKQTEAADALLAAVKAALDNGARTRDLGGSLTTTQMGDAVLAAL

SEQ ID NO: 9065 - protein, 489 aa, Mycobacterium tuberculosis H37Rv
MALWGDGISALLIDGKLSDGRAGTFPTVNPATEEVLGVAADADAEDMGRAIEAARRAFDSTDWSRNTELRVRCVRQLRDAMQQHVEELRELTISEVGAPRMLTASAQLEGPVGDLSFAADTAESYPWKQDLGEASPLGIATRRTLAREAVGVVGAITPWNFPHQINLAKLGPALAAGNTVVLKPAPDTPWCAAALGEIIVEHTDFPPGVVNIVTSSSHALGALLAKDPRVDMISFTGSTATGRAVMADAAATIKKVFLELGGKSAFVVLDDADLAAASAVSAFSACMHAGQGCAITTRLVVPRARYEEAVAIAAATMSSIRPGDPNDPGTVCGPLISARQRDRVQGYLDLAVAEGGRFACGGARPADREVGFYIEPTVIAGLTNDARVAREEIFGPVLTVIAHDGDDDAVRIANDSPYGLSGTVYGADPQRAARIASRLRVGTVNVNGGVWYCADAPFGGYKQSGIGREMGLLGFEEYLEAKLIATAAN

SEQ ID NO: 9066 - protein, 174 aa, Triticum aestivum
MAPAVMASSATTVAPFQGLKSTAGLPVSRRSSGSLGSVSNGGRIRCMQVWPIEGIKKFETLSYLPPLSTEALLKQVDYLIRSKWVPCLEFSKVGFVFREHNSSPGYYDGRYWTMWKLPMFGCTDATQVLNEVEEVKKEYPDAYVRVIGFDNLRQVQCVSFIAFRPPGCEESGKA

SEQ ID NO: 9067 - protein, 372 aa, Glycine max
MANLPNSKLYGKEKMKGEQELEDEESFSRAMLLCSSVVVSMALQSATELGVFDVLQEAGAKLSAKEIASKLSCDNNPEADSMLDRLLALLASHSILNCSLILDHQNLGTFQRLYTITPVARFFARNSDGVSLGPLMALLQDKIFLHSWSELKDSIREGGIPFNRVYGTHAFEYPRLDARFNQVFNTAMINHTTIVMKKVLECYKGFENIKMLVDVGGGLGININLITSKYPHIQGINFDLPHVLEHAPSYPGVEHVGGDMFENVPKGDAIFMKWILHDWSDEYCLKLLKNCYDAIPDDGKVIVVEAVLPIIPETSNAAWKAVSQTDVLMMTQNPGGKERSDQEFMDLATAAGFSGIRYECYVRTFWIMEFFK

SEQ ID NO: 9068 - protein, 181 aa, Brassica napus
MASVMLSSATMTSSLAHSTMVAPFIGLKSSAAFPMTCKANTEITSITSNGGRVNCMKVWPPVGKKKFETLSYLPDLTDVEIAKEVDYLIRNKWTPCIEFELEHGFVYREHGNIPGYYDGRYWTMWKLPLFGCTDSTQVLKEVKKCKQEYPNAFIRIIGFDNNRQAQCISFIAYKPPSFTDV

SEQ ID NO: 9069 - protein, 411 aa, Rickettsia heilongjiangensis
DSEFAELKIRGKIFKLPILKASIGEDVIDISRVSAEADCFTYDPGFMSTASCQSTITYIDGDKGILRHRGYDIKDLAEKSDFLEVAYLLIYGELPSGEQYNNFTKQVAHHSLVNERLHYLFQTFCSSSHPMAIMLAAVGSLSAFYPDLLNFKEADYELTAIRMIAKIPTIAAMSYKYSIGQPFIYPDNSLDFTENFLHMMFATPYTKYTVNPIIKNALNKIFILHADHEQNASTSTVRIAGSSGANPFACISTGIASLWGPAHGGANEAVINMLKEIGSSEYIPKYIAKAKDKNDPFRLMGFGHRVYKNYDPRAAVLKETCKEVLKELGQLDNNPLLQIAIELEAIALKDEYFIERKLYPNVDFYSGIIYKAMGIPSQMFTVLFAIARTVGWMAQWKEMHEDPEQKISRPR

SEQ ID NO: 9070 - protein, 158 aa, Brucella melitensis 16M
MKKNNLFRALLISATFALQATAAFAVNPDEVLSDPKLEKRAREISAELRCMVCQNESIDDSNAELARDLRILVRERLTKGDTDGQVIDFVVDRYGEFVLLKPRFNAQTALLWGFPVIILLIGGGALLVAFRRRRAAGTAPQPLSESEKAELSRLLDGK

SEQ ID NO: 9071 - protein, 324 aa, Methanococcoides burtonii DSM 6242
MVKVKDLKWKQNMTVSELVDSYEFIGFQSVELQRASDVIVKMKKDSAKVFLTFTSNMVTSGLRGFFAQLIDLGVADVIVTTVGGLEEDIMKATGEDFQIGSFHTDDVELHEQGINRVGNLLIKTESYMNFESLVDKILKELYEKQNRWAVSDMLREIGLMLDDESSILYQAAKNNVPIFCPAITDGAFGFHLYLFQQEHPDFIVDVVKDFGNILFASSHDDRKGVIALGGSISKHHAILSTLLNGGAEYAVYMTTAHRTSGSMSGANTNEAKSWGKVKDESDVATVIGDVSITFPLAMIRALDELAADGLLKGLQENRTTGVVK

SEQ ID NO: 9072 - protein, 466 aa, Lactococcus lactis subsp. lactis Il1403
MLYGKENRDEAEFLEPIFGSESEQVDLPKYKLAQQSIEPRVAYQLVQDEMLDEGNARLNLATFCQTYMEPEAVKLMSQTLEKNAIDKSEYPRTTEIENRCVNMIADLWNASEKEKFMGTSTIGSSEACMLGGMAMKFSWRKRAEKLGLDINAKKPNLVISSGYQVCWEKFCIYWDIEMREVPMDKEHMSINLDKVMDYVDEYTIGVVGIMGITYTGRYDDIKALDNLIEEYNKQTDYKVYIHVDAASGGLYAPFVEPELEWDFRLKNVISINTSGHKYGLVYPGVGWVLWRDKKYLPEELIFKVSYLGGELPTMAINFSHSASQLIGQYYNFVRYGFDGYKAIHERTHKVAMFLAKEIEKTGMFEIMNDGSQLPIVCYKLKEDSNRGWNLYDLADRLLMKGWQVPAYPLPKNLENEIIQRLVIRADFGMNMAFNYVQDMQEAIEALNKAHILYHEEPENKTYGFTH

SEQ ID NO: 9073 - protein, 493 aa, Thermoplasma acidophilum
MDTKLYIDGQWVNSSSGKTVDKYSPVTGQVIGRFEAATRDDVDRAIDAAEDAFWAWNDLGSVERSKIIYRAKELIEKNRAELENIIMEENGKPVKEAKEEVDGVIDQIQYYAEWARKLNGEVVEGTSSHRKIFQYKVPYGIVVALTPWNFPAGMVARKLAPALLTGNTVVLKPSSDTPGSAEWIVRKFVEAGVPKGVLNFITGRGSEIGDYIVEHKKVNLITMTGSTATGQRIMQKASANMAKLILELGGKAPFMVWKDADMDNALKTLLWAKYWNAGQSCIAAERLYVHEDIYDTFMSRFVELSRKLALGDPKNADMGPLINKGALQATSEIVEEAKESGAKILFGGSQPSLSGPYRNGYFFLPTIIGNADQKSKIFQEEIFAPVIGARKISSVEEMYDLANDSKYGLASYLFTKDPNIIFEASERIRFGELYVNMPGPEASQGYHTGFRMTGQAGEGSKYGISEYLKLKNIYVDYSGKPLHINTVRDDLFQ

SEQ ID NO: 9074 - protein, 282 aa, Lactococcus lactis subsp. lactis Il1403
MVIQWFPGHMSKARRQVQENLKYVDFVIELVDARLPISSRNPMLGQIIGDKPRIIALNKADLADSNAVAQWIEFFDEQGFVTLAINSKEEYTAKRLTVAAKKLMADKVAHDKERGIAHTTLRTMIIGIPNAGKSTLMNRLAGKKVAVTGNRPGVTKGQQWIRTNKELELLDTPGILWPKFEDQLVGLKLALTGAIKDDLLPMDEVTIFGLNYFLKNYRTVTMKRYRMTEEDLELEIPDLIMELTARFGFRDDYDRFYNMFVKDVRDGKLGLFCLDEVGVDGL

SEQ ID NO: 9075 - protein, 225 aa, Desulfitobacterium hafniense DCB-2
MRPARRRRNQFNPFATPPGVPPHGAFGMTHPVLAALGLKDNESGTYLGHGEWSKTADAGVLEPVNPTDGEVLARVQASSQADYEIILARAQAAFAVWRTTPAPRRGEAIRLCSDALRKHKDALGSLVALEMGKSKPEGDGEVQEMIDIGDFAVGLSRQLYGLTMHSERPGHRMYEQWHPLGIVGIISAFNFPVAVWAWNSFIAAICGDISIWKPSPKTRCRRSRR

SEQ ID NO: 9076 - protein, 214 aa, Glycine max
LALHYRNADHPSRVDTDVDGLLGRLRFIQGLKFQVDVTYMEFLLRVKRVEEHAKGNGTWDAPHPWLNLFVSKSHIVDFDREVFKKILKDGVDGPILVYPLLRNKWDSRHSVVVPDSDMFYIVALLRFTPPPPKGPAAELLVAQNNEIIEFCTSRSLDFKLYFPHYQSREDWIKHFGNQWARFAERKANFDPMAILAPGQKIFSRTSQPQPPSIT

SEQ ID NO: 9077 - protein, 431 aa, Ralstonia eutropha JMP134
MNREQQIQALQKDWDTNPRWKGIKRNFTAEDVVRLRGSVQVEHTLARRGSEKLWNLLHTEPFVNSLGALTGNQAMQQVKAGLKAIYLSGWQVAGDANLAGEMYPDQSLYPANSVPQVVKRINNTFQRADQIQWSEGSGDTDFFAPIVADAEAGFGGVLNAFELMKSMIEAGAAGVHFEDQLASVKKCGHMGGKVLVPTREAVAKLTAARLAADVSGVPTLVIARTDAEAADLLTSDVDDNDKPFCTGERTVEGFYRVRNGLEQSISRALAYAEVADLVWCETGKPDLEFAKKFAEAVHAKFPGKMLAYNCSPSFNWKKNLDDATIARFQRELGAMGYKFQFITLAGFHSLNYSMFNLAYGYARNQMSAFVELQEAEFKAAEKGFTAVKHQREVGTGYFDAVTQAIEGGQSSTTALKGSTEDEQFFEDKKVA

SEQ ID NO: 9078 - protein, 425 aa, Ralstonia solanacearum
MKLHIKGGRLIDPANGIDAQQDLYLAAGKVVGVGRAPADFHANKTIDATGLVVCPGLIDLSARLREPGYEYKATLESEMAAAMAGGVTSLVCPPDTDPVLDEPGLVEMLKFRARNLNQAHVYPLGALTVGLKGLVLTEMAELTEAGCVGFSQADAPMTDTLVLMRALQYAQTFGFTVWLRPEDPFLGKGGVAASGPLASRLGLAGVPVMAETVRLHTIFELIRSTGARVHLCRLSSAAGLELVRRAKAEGLPVTCDVNVHHISLTDVDIGYFNSQMRFMPPLRAGRDRDGIVRALADGTIDAICSDHTPVDDDEKLLPFAEASPGATGLETLLPLTLRWAAEHKVDLPRALARITSEPARVLGLQAGSLEEGAMADVCVFDPDATWKVEPRSLRSQGKNSPYLGFELAGRVRATLVAGHLAYDGH

SEQ ID NO: 9079 - protein, 446 aa, Glycine max
SVIGYCEKTTEGERYKILRELGDGSCGHVYKARDMRTYEIVAVKRLKRKFCFWEEYTNLREVMILRKMNHPNIIKLKEVVRENNELFFIFEYMDCNLYQLIKEREKPFSEEEIRCFMRQVLQGLSHMHKKGFFHRDLKPENMLVTNDVLKIADFGLAREVSSMPPYTQYVSTRWYRAPEVLLRAPCYTPAVDMWAVGAILAELFTLTPIFPGESEIDQLYKIYGILGMPDSTAFTIGASNSQLLDIVAHEVVPPVKLSNIIPNASLEAIDLITQLLHWDPSRRPDADQSLQHPFFHVDAWVPCPPSDPLELKLSSKRAKPNLELKLQDFGPDPDDCFLGLTLGVKPSVSNSDVVQNVSQGVRENVLFCSDFNDHSDQSVFWTLLSPDQNGIHNSAETSLSLSFSPVQHPPIGVPQSVGFSFQPLQPNILTSPFLALSSPFQRGHCL

SEQ ID NO: 9080 - protein, 347 aa, Psophocarpus tetragonolobus
GGELFDRIVQKGHYSERQAATLIKTIVEVVEACHSLGVMHRDLKPENFLFDTLHEDAKLKATDFGLSVFYKPGESFCDVVGSPYYVAPEVLRKLYGPESDVWSAGVILYILLSGVPPFWAETEPGIFRQILLGKIDFQSEPWHSISDSAKDLIRRMLDQNPKTRLTAHEVLRHPWIVDDNLAPDKPLDSAVLSRLKQFSAMNKLKKMALRVIAERLSEEEIGGLKELFKMIDTDNSGTITFDELKDGLKRVGSELMESEIKDLMDAADIDKSGTIDYGEFIAATVHLNKLEREENLVSAFSYFDKDGSGYITLDEIQQACKDFGLDDVHIDDMIKEIDQDNDGQIDY

SEQ ID NO: 9081 - protein, 504 aa, Bifidobacterium adolescentis
  misc_feature (356)..(356): Xaa can be any naturally occurring amino acid
MKNKVQLITYADRLGDGTIKSMTDILRTRFDGVYDGVHILPFFTPFDGADAGFDPIDHTKVDERLGSWDDVAELSKTHNIMVDAIVNHMSWESKQFQDVLAKGEESEYYPMFLTMSSVFPNGATEEDLAGIYRPRPGLPFTHYKFAGKTRLVWVSFTPQQVDIDTDSDKGWEYLMSIFDQMAASHVSYIRLDAVGYGAKEAGTSCFMTPKTFKLISRLREEGVKRGLEILIEVHSYYKKQVEIASKVDRVYDFALPPLLLHALSTGHVEPVAHWTDIRPNNAVTVLDTHDGIGVIDIGSDQLDRSLKGLVPDEDVDNLVNTIHANTHGESQAATGAAASNLDLYQVNSTYYSALGXNDQHYIAARAVQFFLPGVPQVYYVGALAGKNDMELLRKTNNGRDINRHYYSTAEIDENLKRPVVKALNALAKFRNELDAFDGTFSYTTDDDTSISFTWRGETSQATLTFEPKRGLGVDNTTPVAMLEWEDSAGDHRSDDLIANPPVVA

SEQ ID NO: 9082 - protein, 205 aa, Shewanella oneidensis MR-1
MSNIVWHQHSVDQAARARLKGQNPVLLWFTGLSGAGKSTLAGALERALFEAGFHTYLLDGDNVRHGLCKDLGFSVADRDENLRRVGEVAKLMVDAGLVVLSAFISPTREERDSIRARFPEGQFIEVHVSTPLSVCELRDPKGLYVKARKGEIAHFTGISSPYEAPLSAELTIDTSKGDLASQVHALIDYLTAIDVISSNRLASLA

SEQ ID NO: 9083 - protein, 454 aa, Streptomyces avermitilis MA-4680
MTKRDVAALFGNRFLTEPAPSQTFPEEGMTATDTMRLLDEDLVMEGDPQRNLATFVTTWMEPEAQRIIAENLHRNFIDHAEYPISAEIEQRCVRMLADLFHAPGKTTGCRTQGSSEAIMLGALSLKWKWRERRQAANLPADRPNLVFGGDVHVVWEKFCRYFDVEPRIVPLAEDKYTIGPEDVEPHIDENTIGVVAVVGTTFTGHKDDVVGIDKLLRDVRKERDLDIPIHVDGASGGFVWPFLYPDSKWDFRLEQVRSINVSGHKYGLVYPGIGWLVFREESDLAKDLVFYENYLGKTDATFTLNFSTGASMVLAQYYNFVRLGRQGYTYVMETMQKNAHALADNLRSSGRFEVIGSDLEQLPLVAFRLAGEHAYDESDIAWQLSAERGWMVPAYTLPPNAERVKILRALVKETLSREQIERLTQDIADACATLDHKGGTTEVERAQIKRGTGY

SEQ ID NO: 9084 - protein, 346 aa, Escherichia coli
MKSVVNDTDGIVRVAESVIPEIKHQDEVRVKIASSGLCGSDLPRIFKNGAHYYPITLGHEFSGYIDAVGSGVDDLHPGDAVACVPLLPCFTCPECLYGFYSQCAKYDFIGSRRDGGFAEYIVVKRKNVFALPTDMPIEDGAFIEPITVGLHAFHLAQGCENKNVIIIGAGTIGLLAIQCAVALGAKSVTAIDISSEKLALAKSFGAMQTFNSLEMSAPQMQGVLRDVRFNQLILETAGVPQTVELAVEIAGPHAQLALVGTLHQDLHLTSTTFGKILRKELTVIGSWMNYSSPWPGQEWETASRLLTERKLSLEPLIAHRGSFESFTQVVRDIARNAMPGKVLLIP

SEQ ID NO: 9085 - protein, 268 aa, Methanosarcina thermophila
MVSKKVSRKVAAKEELLLLLPEIDRIFDSEPAVLRIDTEPVMIVGDIHGNLQALEYVIEKREEMNYKNFLFLGDYVDRGPQGTEALIRLFRMKLEDPDHIFLLRGNHETVDMNIYYGFFAEIGFDEEFLFRVSQTYDKMPIAAVLSGHTFCVHGGINGIGSINDIRKEKAFPYLWNDPSNHPGLTASRRGSTVKEFGPDIVDGFLKTNHLKRIVRGHTALDKGYRWWFDGKLLSLFSCPDYVGLGNAAAFALFEKEEIKLFVFGDQQE

SEQ ID NO: 9086 - protein, 503 aa, Ralstonia eutropha JMP134
MGQRVPAHVRHGLYTQVMSMFSLKDPGLLRQQAYVDGQWRAAESGKTLDVINPANNEPLGTIPACDAADTRAAIEAANRALPAWSALTTHQRAAVLRKWRELMVAHADDLALIMTLEQGKPLAEARGEILYGASFVEWFAEEGIRAYGETIPATHASRRIIARKVPVGVCAAITPWNFPNAMITRKLAPALAAGCAVVVKPSELTPYSALALAELGERAGIPAGVLNIVTGMPQGIGGELTANPIVRKLTFTGSTQVGKLLLRQCADTVKRVSMELGGNAPVIVFDDADLEQAVAGVMASKFRNSGQTCVCANRIYVQAGIYDRFSARLSEEVRKLKVGAGTEDGVSIGPLINDAALRKVVRHVEDAVAHGAKVIVGGASLSRGQQYFEPTVVTGATDGMLIASEETFGPVAALFPFESETEIIRRANDTPYGLAAYLFSTDVNRVFRVSEALEYGMVGANTGVISSAVAPFGGVKESGLGREGSHHGIDEFLEVQTLHLEIV

SEQ ID NO: 9087 - protein, 490 aa, Pseudomonas putida KT2440
MARFGTQKLYIDGAYVDAGSDATFEAINPATGEVLAHVQRATEADVEKAVESAERGQKVWAAMTAMQRSRILRRAVDILRERNDELAMLETLDTGKSYSETRYVDIVTGADVLEYYAGLVPAIEGEQIPLRESSFVYTRREPLGVTVGIGAWNYPIQIALWKSAPALAAGNAMIFKPSEVTSLTTLKLAEIYTEAGLPNGVFNVLTGSGREVGTWLTEHPRIEKVSFTGGTTTGKKVMASASSSSLKEVTMELGGKSPLIICADADLDKAADIAMMANFYSSGQVCTNGTRVFIPAEMKAAFEAKIAERVARIRVGNPEDENTNFGPLVSFQHMESVLGYIAKGKEEGARVLCGGERLTAGDFAKGAFVAPTVFTDCTDDMTIVKEEIFGPVMSILTYETEEEVIRRANDTDYGLAAGVCTNDITRAHRIIHKLEAGICWINAWGESPAEMPVGGYKQSGVGRENGVSSLAQYTRIKSVQVELGGYNSVF

SEQ ID NO: 9088 - protein, 497 aa, Pseudomonas putida KT2440
MYTLEFWQQRASDLYLPAHALIDGKPVNAQDGATFAAINPATNNVLAQVAACGHAEVDLAVASARRAFEQGPWPRMAPGERKKVLLRLAELIMAHREELALLDSLNMGKPVMDAYNIDVPGSAHVFAWYGEALDKLYDQVAPTAANALATITREALGVVAAVVPWNFPLDMAAWKLAPALAAGNSVVLKPAEQSPFSALRLAQLALEAGVPEGVLNVVPGLGEQAGQALGLHPDVDCLVFTGSTQVGKYFMQYSAQSNLKQVWLECGGKSPNLVFDNCQDLDLAAEKAAFGIFFNQGEVCSANSRLYVQRAIHDEFIERLQAKARQWLPGNPLDPASRAGAIVDAGQTGRIEAAIVRAGQEGARLVCGGRRLTIEGSDNYIEPTIFAGVEGRMSLAREEVFGPVLAVSAFDTEEEAVRLANDSIYGLVASVWSDDFNQVHRVARALKAGTVSVNTVDALDVTVPFGGGKQSGFGRDLSLHSFDKYSQLKTTWYQLRG

SEQ ID NO: 9089 - protein, 491 aa, Zea mays
  misc_feature (14)..(14): Xaa can be any naturally occurring amino acid
  misc_feature (151)..(151): Xaa can be any naturally occurring amino acid
MTRVIHDSGDDMQXEALDLVSSDVNFPKGHFPDYRIGPNNQIIDPEETHEAVPLKEIVAKETAQLLEQHKRLSVRDLKEKFEKGLSGASKLSEEAKRREAASLDRQVLLKKLRDVLDTLKGRVAGRNRDDAEEAISLVEALAVQLTQREGXELIYEKAEVKKLANFLKQATEDARKVAEEERALALAEIEKARAAIEKVEKAWHVHDFASSSREKAEIEELRKEVREARRIKMLHQPSKVMDMEFELQALRTLISEKTQLCNQLKKELAMIKRLEDDSSGLFELEGSNTLGSQLCIIPRVDGASNITNCPIQWYRVISGGTRELISGATKFMYAPEPFDVGRLLQAEIVLNADKIIVQTDGPVDNAAGLERYVDSLMKRTDIEFNVVVTQMNGKDYSSNSVHVFHIGKLRIKLRKGWSTKARESYSTTMKLCGSRGGGNAAARAVFWHPRKGSSYTLAFETDRDRNAAIMIARKFASNCNIALAGPGDQGT

SEQ ID NO: 9090 - protein, 468 aa, Zea mays
  misc_feature (160)..(160): Xaa can be any naturally occurring amino acid
  misc_feature (352)..(352): Xaa can be any naturally occurring amino acid
MARGREGEVRTLVLGKYELGRMLGQGSFAKVYYARDLRDGQSVAIKVIDKARLRQTDGMVEQLRREISVMRMVRHPNVVGIREVLASRQRVFVVMEYARGGELFAKVARGRLTEDAARKYFQQLVAAVAFCHSRGVAHRDLKPENLLLDEEGRLKVTDFXLAALPEQLRHDGLLHTQCGTPVCWRARAHIPTIYETSRRSPGPPRKTMCCARQVPLNRQEGEAGGEERKLVLGKYELGRLLGQGTFAKVYYARRLIARLLVVDPAKRASIPEVMCTPWFRKGFVPPALSVSPPMTPKKRLDGDDCGGALFDSGGGGGGDDDDSSSNSGATSPRSCNAFQLISSMSSGLDLSXLFENEQKAATVFTARAPAATVVEKLESAARALGFETTRGKGWKVRMEAKAGGTNGRLAVTAEVLEVAVDVAVVEFAHDAGDALDFNKFCAVDVRPGLAEIVWAWQGDSPAAVVGTA

SEQ ID NO: 9091 - protein, 497 aa, symbiont bacterium of Paederus fuscipes
MTTPTRADWEIRAKDLNIEGRAFVNGEYRNAASGETFDCLSPVDGRFLAKVASCDQADAEQAVKAARAAFDSGVWSRLAPAKRKRTMIRFADLLLKNAEELALLETLDMGKPISDSLHIDVSSAANSIYWNAEAIDKIYDEVAATPHEELGLVTREPVGVVTAIVPWNFPLLMACWKLGPALATGNSVILKPSEKSPLTAIRIACLATDAGIPTGVFNVLPGYGHTVGKALALHMDVDTLVFTGSTRIAKQLMIYAGESNMKRIWLEAGGKSPNIVFADAPDLKAAAEAAASAIAFNQGEVCTAGSRLLVERSIKDRFLPLVVEALKGWKPSNPLDPDTNVGALVDTQQLHTVLSYIEAGHKDGARLMVGGKRILEETGGVYVEPTLFDGVDNAMKIAREEIFGPVLSVITFENAEEAVRIANNTQYGLAAAVWTSDLSKAHLTAKALRAGSVWINQYDGGDMTAPFGGFKQSGNGRDKSLHAFDKYTELKATWIKL

SEQ ID NO: 9092 - protein, 205 aa, Vibrio parahaemolyticus RIMD 2210633
MTAETPVKDENIVWHQHTVDKQFRAELKKQKPAVLWFTGLSGAGKSTVAGALENRLAELGYHTYLLDGDNVRHGLCSDLGFSEQDRRENIRRIGELAKLMADAGLIVLSAFISPHRAERQLVRDLLPEGEFIEVFVNASLEVCEGRDPKGLYKKARAGEIPNFTGIDSEYQAPINPEIDLPAGEKSVEELVELCLNELKQRRVIS

SEQ ID NO: 9093 - protein, 342 aa, Photorhabdus luminescens subsp. laumondii TTO1
MKALVLEKAGQISIQDWETPEILGENDVEIKIHSVGICGSDVHYYQYGRIGPFIVEKPMILGHEASGVITAVGKNVTHLKIGDRVCMEPGIPNLQSPQSRAGIYNLDPEVRFWATPPIDGCLRERVIHPAAFTFKLPDNVSFAEGAMVEPLAIGMQAATKAEIKPGDIALVIGAGTIGIVTALAALAGGCSDVIICDVFDEKLEIAKQYPGLHPVNSKVLTEKVNALTEGNGVNILFECSGAKPVIATISEHIAPGGIAVLVGMPIDPAPFDVVSAQAKEITFKTIFRYANMYPRTIRLLSSGKLKVTPLLSATYKFKDSVQAYERAAEGRPTDIKIMLEME

SEQ ID NO: 9094 - protein, 248 aa, Orobanche cernua var. cumana
GCDASILLDDGPTIESEKSAGPNVDSVRGFDVIEAAKSAVEGICPGVVSCADILALAARDASVAVGGPTWTVKLGRRDSTTANRTQANTDLPSPFANLQTLVSAFANKGLSQTDMAALSGSHTLGQAQCFLFRARIYSNGTDIDPTFASNLTSQCPQSGGDSNLAPLDLVTPNFFDNNYFKNLIQRRGLLQSDQVLFSGGSTNTTVSRYSANPRMFAADFASAMIRMSEIQPLLGSSGIIRRICSATN

SEQ ID NO: 9095 - protein, 206 aa, Arabidopsis thaliana
METVGRPRGRPRGSKNKPKAPIFVTIDPPMSPYILEVPSGNDVVEALNRFCRGKAIGFCVLSGSGSVADVTLRQPSPAAPGSTITFHGKFDLLSVSATFLPPLPPTSLSPPVSNFFTVSLAGPQGKVIGGFVAGPLVAAGTVYFVATSFKNPSYHRLPATEEEQRNSAEGEEEGQSPPVSGGGGESMYVGGSDVIWDPNAKAPSPY

SEQ ID NO: 9096 - protein, 204 aa, Pichia pastoris
MASRGTSRQQYDLTMKLLLVGDSGVGKSCLLLRFVDDSFNPSFITTIGIDFKIRTVEINGKKVKLQIWDTAGQERFRTITTAYYRGAMGIILVYDVTDERSFNSVHNWYQTLNQHANEDAQLFLVGNKCDDEESRQVTKEQGEQLASELGVPFLEASAKSNKNVDAIFLELAKRFEEKMRNTQQGPGSAGIDVNSSNDTKSSCC

SEQ ID NO: 9097 - protein, 391 aa, Thermoplasma acidophilum
MEKTANIDKGLENVNIKWTKLTYIDGNNGILKYGGYNVNDLIENGAKEDEIQYLFLYGELPNRLDLELFQSKVQKGYELPDFVKDIIFELPRESDAVAMQMAAFSALATSTYNFKWNADLDRDQAAKAIGLMSAVTANVYRHIMGKGPVDLEPSDSFAESFLRSTLDRTPSEDEIDAMNAALILYTDHEVPASTTAGLVAVSTLSDMYSGIAAALAALKGPLHGGAAEASIMQFQEIGDPDNVDAWFRDNIVNGNKRLMGFGHRVYKTYDPRARIFRRYAEKLSANDPEAKKMFDIATRLEKIGIDTFGSKKIYPNTDYFSGIVYLALGYPLRNNIYTSFFALSRVTGWISHFMEYVENQHRLIRPRAVYVGPEDLQFVKIDERRGPIITS

SEQ ID NO: 9098 - protein, 207 aa, Escherichia coli
LRPVRYYQGTPSPVKHPELTDMVIFRENSEDIYAGIEWKADSADAEKVIKFLREEMGVKKIRFPEHCGIGIKPCSEEGTKRLVRAAIEYAIANDRDSVTLVHKGNIMKFTEGAFKDWGYQLAREEFGGELIDGGPWLKVKNPNTGKEIVIKDVIADAFLQQILLRPAEYDVIACMNLNGDYISDALAAQVGGIGIAPGANIGDECAL

SEQ ID NO: 9099 - protein, 457 aa, Lactococcus lactis subsp. lactis Il1403
MYTVGDYLLDRLHELGIEEIFGVPGDYNLQFLDQIISRKDMKWVGNANELNASYMADGYARTKKAAAFLTTFGVGELSAVNGLAGSYAENLPVVEIVGSPTSKVQNEGKFVHHTLADGDFKHFMKMHEPVTAARTLLTAENATVEIDRVLSALLKERKPVYINLPVDVAAAKAEKPSLPLKKENPTSNTSDQEILNKIQESLKNAKKPIVITGHEIISFGLEKTVTQFISKTKLPITTLNFGKSSVDETLPSFLGIYNGKLSEPNLKEFVESADFILMLGVKLTDSSTGAFTHHLNENKMISLNINEGKIFNERIQNFDFESLISSLLDLSGIEYKGKYIDKKQEDFVPSNALLSQDRLWQAVENLTQSNETIVAEQGTSFFGASSIFLKPKSHFIGQPLWGSIGYTFPAALGSQIADKESRHLLFIGDGSLQLTVQERKLQVQVSQPSSSHMNSYS

SEQ ID NO: 9100 - protein, 502 aa, Prochlorococcus marinus subsp. marinus str. CCMP1375
MTTALQSPPRRRIARLQEVSLLEGPMLLLRSIRGFRSNQSLIWLATVPLALLGLGVFGFAARAGVGLSDLSGAQAASFLADNLWLFIATILVIFMNAGFAMVEAGMCRQKNAVNILAKNLFVFALAVTAYWFIGYSIMYGGTPIIGGVIFSNGFFFNPDPSDALSCAAGLGADGCSQLVPAVDFLFQAAFAGTAATIVSGLVAERVKFGEFVVFSLVLTAFIYPIAGSWQWNGAGWLSQLGFIDFAGSSIVHSVGGWAGLVGAMLLGPRIGKFVDGKPQAMPGHNMAIATLGALILWIGWYGFNPGSELAMDEYVAYVAVTTTLAAAGGAIAATLLSTLTSGKPDLTMIINGILAGLVSITAGCGNMTLSGSWLAGFVGGLIVVFAVSALDSAGIDDPVGAFSVHGVCGVWGTVVIGLWGVDGMDPGAAGIGLFNGGGLNTLLIQALGAGAYAIWTVVTCWLAWTVIGGFFGGIRVSEEEEIQGLDIGEHGMEAYPDFASSN

SEQ ID NO: 9101 - protein, 430 aa, Staphylococcus xylosus
GVKDGNIAAIGQDLGEAEQVIDAQNQIVSPGMVDAHVHITEPGGGYRDSWEGYVTGTRAAAKGGVTSFIEMPLNQVPATTEQASIQAKFDAGKGELSVDVASYGGLVPYNLNGGIQELDEAGVVAYKAFLATCGDRSIEGDFENVDDYSLYEGMKQIAKTGKLLSIHAENATITDRLGEIAKANGETTLSAYVDSRPVFTEVEPIRKIILFAKETGCRVHIVHVACEEGVDEIIKAQQEGVDISCETCTHYLYFYKEELDDIGPVVKCSPPIREKSRLEGMWKRVLNGDIGFVTSDHSPCTPDLKDTDNAFEAWGGIAGLQNNVDILFDEGVQKRNMSLNKFADIIATAPAKRFGLEAKGSIAVGKDADFVLIKPNAPYTLAAEDLAYRNKMSPYIGREIGAQVTQTILRGEEIYNQETGISEKRIGQFI

SEQ ID NO: 9102 - protein, 317 aa, Haemophilus influenzae R2866
MTTQLDSLRNMTVVVADTGDIDAIKKYQPQDATTNPSLILSASALPQYAPLIDEAVAYAKAQSNDKAQQLIDAEDKLAVNIGLEILKIVPGRISTEVDARLSYDTQATVEKARKLIALYNAAGISNDRILIKIASTWQGIRAAEILEKEGINCNLTLLFSEAQARACAEAGVYLISPFVGRILDWYKANSDKKEYAPAEDPGVISVTKIYNYYKEYGYNTVVMGASFRNVGEITELAGCDRLTIAPALLKELQENSTALVRKLEYKGEVKAKPQPLTEAEFYWQHNGDAMAVEKLAEGIRKFAIDQEKLETMLSAKL

SEQ ID NO: 9103 - protein, 491 aa, Pseudomonas sp.
MKQYRNFVDGKWVESSKTFQDVTPIDGSVVAVVHEADRDLVDAAVKAGHRALEGEWGRTTAAQRVDWLRRIANEMERRQQDFLDAEMADTGKPLSMAATIDIPRGIANFRNFADILATAPVDSHRLDLPDGAYALNYAARKPLGVVGVISPWNLPLLLLTWKVAPALACGNAVVVKPSEDTPGTATLLAEVMEAVGIPPGVFNLVHGFGPNSAGEFISQHPDISAITFTGESKTGSTIMRAAAEGVKPVSFELGGKNAAVIFADCDFEKMLDGMMRALFLNSGQVCLCSERVYVERPIFDRFCVALAERIKALKVDWPHETDTQMGPLISSKHRDKVLSYFELARQEGATFLAGGGVPRFGDERDNGAWVEPTVIAGLSDDARVVREEIFGPICHVTPFDSESEVIRRANDTRYGLAATIWTTNLSRAHRVSELMRVGISWVNTWFLRDLRTPFGGAGLSGIGREGGMHSLNFYSELTNVCVRIDKESPDV

SEQ ID NO: 9104 - protein, 156 aa, Triticum aestivum
  misc_feature (58)..(58): Xaa can be any naturally occurring amino acid
  misc_feature (72)..(72): Xaa can be any naturally occurring amino acid
  misc_feature (76)..(76): Xaa can be any naturally occurring amino acid
  misc_feature (80)..(80): Xaa can be any naturally occurring amino acid
  misc_feature (100)..(100): Xaa can be any naturally occurring amino acid
  misc_feature (113)..(113): Xaa can be any naturally occurring amino acid
  misc_feature (126)..(126): Xaa can be any naturally occurring amino acid
  misc_feature (128)..(128): Xaa can be any naturally occurring amino acid
  misc_feature (131)..(131): Xaa can be any naturally occurring amino acid
  misc_feature (133)..(133): Xaa can be any naturally occurring amino acid
  misc_feature (137)..(137): Xaa can be any naturally occurring amino acid
  misc_feature (142)..(142): Xaa can be any naturally occurring amino acid
MAPTVMASSATSVAPFQGLKSTAGLPVSRRSNGASLGSVSNGGRIRCMQVWPIEGIKXFETLSYLPPLSTEXLLKXVDYXIRSKWVPCLEFNKVGFIFRXHKHLLGYYDGRYXWTMWKLPKFRCNXAXQVXNXVEEXKKDYXTLFPINRIKSSGHG

SEQ ID NO: 9105 - protein, 69 aa, Triticum aestivum
MPALTGQVKWFNESKGFGFITPDDGSKDVFVHFSAIVDAGFKTLAEGQRVEFRIESGAKGPSAANVKAI

SEQ ID NO: 9106 - protein, 182 aa, Glycine max
LALPLSISNSLSEIRMASQSNTKSVHDFTVKDARGNNVNLADYKGKVLLIVNVASQCGLTNSNYTELNQLYEKYKGKGLEILAFPCNQFGAQEPGTNEEIVEFACTRFKAEFPIFDKVDVNGDNAAPLYKFLKSSKGGLFGDSIKWNFSKFLVDKDGNVVDRYAPTTSPLSIEKDIKKLLDA

SEQ ID NO: 9107 - protein, 168 aa, Zea mays
MAASSTATSVHDFIVKDASGKDVDLSTYKGKVLLIVNVASQCGLTNSNYTELAQLYEKYKDQGFEILAFPCNQFGGQEPGTNEEIVQFACTRFKAEYPIFDKVDVNGNNAAPIYKFLKSSKGGLFGDSIKWNFSKFLVDKEGRVVDRYAPTTSPLSIEKDIKKLLGSS

SEQ ID NO: 9108 - protein, 457 aa, Candida albicans SC5314
MARLTRKRTIEKELNGSSRVTRTLSMESISSLFKRNKKRKHNDGNDSSVNSSDNENINITDDEEQDHIDTKPNHKKRKIKTKAEEEFEANEKKLDEELPIDLRKYRPRGFRFNLPPEDRPIRIYADGVFDLFHLGHMKQLEQAKKSFPNVELVCGIPSDIETHKRKGLTVLTDEQRCETLMHCKWVDEVIPNAPWCVTPEFLQEHKIDYVAHDDLPYASSDSDDIYKPIKEQGKFLTTQRTEGISTSDIITKIIRDYDKYLMRNFSRGATRKELNVSWLKMNELEFKKHINDFRTYWMKNKTNINNVSRDLYFEIREFMRGKKFDFQKFIEDGNSQNSSNHGSDEESTNSSKVSSPLSDFASKYIGNRNKDLNRKGILNNFKGWINRDDHSEQETEEEIKPIVIKPIRRSRRLSGGSSTSSVPSTPVKRTASSASTTPKRKSPLKKSSSVKNTPKTK

SEQ ID NO: 9109 - protein, 93 aa, Glycine max
  misc_feature (11)..(11): Xaa can be any naturally occurring amino acid
  misc_feature (51)..(51): Xaa can be any naturally occurring amino acid
  misc_feature (68)..(68): Xaa can be any naturally occurring amino acid
MFFSMISPPAXTTVNRAGSGMFAPFTGLKSMAGFPTRKTNNDITSIASNCXRVQFMQVLPPFGKKKFXLLSYLPDLYDAQLSYDVLIPSYLCM

SEQ ID NO: 9110 - protein, 281 aa, Oryza sativa (japonica cultivar-group)
MPPPLEARDYIGLAASPASSSSSCCASTPVAEVVGAHLALRLGLPGSESPARAEAEAVVVDAALTLGPAPPPRGGAKRGFVDSLDRSEGRRAAATAGDDERGVREEEEEEKGLGEAAAGAPRAAKAQVVGWPPVRSYRKNTLAASATKTKGEDQGKSEVGCCYVKVSMDGAPYLRKVDLKTYSSYEDLSLALEKMFSCFITGRSSSHKTSKRDRLTDGSRADALKDQEYVLTYEDKDADWMLVGDLPWDLFTTSCRKLRIMRGSDAAGMAPRSLEQTGQNK

SEQ ID NO: 9111 - protein, 508 aa, Triticum aestivum
  misc_feature (120)..(120): Xaa can be any naturally occurring amino acid
MMIARGCLLRSKAESIVKHVASGGSWHGLHSFSEASARGFSSEPSLQAHSTEEIGFKGHGMLAPFTAGWQSTDVHPLVIDRSEGAYVYDINGKKYIDALAGLWCTALGGSEPRLVKAATXQLNKLPFYHSFWNRTTKPSLDLANDVLSMFTAREMGKVFFANSGSEANDSQVKLVWYYNNAMGRPDKKKFIARSKSYHGSTLISASLSGLPALHQKFDLPAPFVLHTDCPHYWRFHLPDETEEEFSTRLANNLENLILKEGPETIAAFIAEPVMGAGGVILPPKTYFEKIQAVLKKYDVLLIADEVITAFGRLGTMFGCDMYNIQPDLVSIAKALSSAYMPIAAILVSPEIADVVHSQSSKLGSFAHGFTYSGHPVACAVAIEALKIYKERNITEHVNTIATRFQEGIKAFSGSPIIGEIRGLGLILGTEFADNKSPNDPFPAEWGVGSIFGAECEKRGMLIRVAGDNIMLSPPLIMTPDEVEEIVSKYGGALKATEERIEELKSAKR

SEQ ID NO: 9112 - protein, 159 aa, Arabidopsis thaliana
MDLGRFPIISILEDMLEVPEDHNNEKTRNNPSRVYMRDAKAMAATPADVIEHPNAYAFVVDMPGIKGDEIKVQVENDNVLVVSGERQRENKENEGVKYVRMERRMGKFMRKFQLPENADLDKISAVCHDGVLKVTVQNFLLRNQRNQRQFKFKLLEFVL

SEQ ID NO: 9113 - protein, 341 aa, Amycolatopsis mediterranei
MRVGVLTGGGDCPGLNAVIRAVVRKGIEVHGWDFVGFRNGWNGPLTGDSRPLGLNDVEDILTRGGTILRSSRTNPYKVEGGVDKIKQVLADQGVDALIAIGGEDTLGVAKRLTDDGIGVVGVPKTIDNDLGATDYTFGFDTAVSIATEAIDRLHTTAESHHRALVVEVMGRHAGWIALHSGLAGGASVILVPERHFNVDQVVSWVERRFEKEFAPIIVVAEGALPEGGEEKLLTGEKDAFGHVRLGGIGTWLADEIAHRTGKESRAVVLGHVQRGGTPTAYDRVLATRFGLNAVDAVADGDFGVMVALKGTDIVRVKLSEATAELKTVPVERYQEAEVFFG

SEQ ID NO: 9114 - protein, 233 aa, Zea mays
MCGILAVLGCGDESQGKRVHVLELSRRLKHRGPDWSGLHQVADNYLCHQRLAIIDPASGDQPLYNEDKSIAVAVNGEVYNHEELRARLSGHRFRTGSDCEVIAHLYEEYGESFIDMLDGVFSFVLLDARDNSFIAARDAIGVTPLYIGWGIDGSVWISSEMKGLNDDCEHFEIFPPGNLYSSKEKSFKRWYNPPWFSEVIPSVPYDPLRLRSAFEKAVIKRLMTDVPFGVSLS

SEQ ID NO: 9115 - protein, 210 aa, Schizosaccharomyces pombe
MASNTAPKNVVTINQKLVLLGDSAVGKSSLVLRFVKDQFDDYRESTIGAAFLTQTLPIDENTSVKLEIWDTAGQERYKSLAPMYYRNANCAIVVYDITQASLEKAKSWIKELQRQAPEGIVIALAGNKLDLAQERRAVEKADAEAYAAEANLLFFETSAKTAENVNELFTAIAKKLPLEDKLNQARGAVNRGVNLSEARPAAQPSGSCSC

SEQ ID NO: 9116 - protein, 462 aa, Poncirus trifoliata
MDSNYTVIPKNSFLELQVYDNDQNPPSRINSHVKIQTFDEEHDADSKNFVDHVDNNQDDEHDDYPLISAKSNEGSGVAGAVFNLTTTVIGAGIMALPAAMKVLGLAVGFVLIIFMGILSEVSVELLVRFSVLCKATSYGEVVQYALGRPAKILSEICIILNNAGVLVVYLIIVGDVMSGSLHHTGVFDQWLGKGMWDHRKLLILIVLVVFLAPLCALDRIESLSMSSAASVALAVVFVVVCFFIAFIKLVEGKLDPPRMSPDFGSKKAILDLLVVIPIMTNAYVCHFNVQPIYNELEGRTPQKMNHVGRLTTILCIVVYSSTAISGYLLFGKDTESDVLTNFDKDLGIGYSTALNYIVRGSAPLLESRKRSLALTGVLLVLIYFGSTMIPSIWTAFKFTGATTAVSLGFIFPPLVALRLRKEGPGLSLWEKFLSGLMLVLAIVVSFVGVMGNIYSLESKSDD

SEQ ID NO: 9117 - protein, 275 aa, Bacteroides fragilis
IDKVGDPFPEETYRVCKNADAVLFSAVGDPKFDNDPTAKVRPEQGLLAMRKKLGLFANIRPFQTFKCLVHKSPLRAELVEGADFLCIRELTGGMYFGEKYQDNDKAYDTNMYTRPEIERILKVGFEYAMKRRKHLTVVDKANVLASSRLWRQIAQEMAPQYPEVTTDYMFVDNAAMKMIQEPKFFSVMVTENTFGDILTDEGSVISGSMGLLPSASTGESTPVFEPIHGSWPQAKGLNIANPLAQILSVAMLFEYFDCKAEGALIRKAVDASLDA

SEQ ID NO: 9118 - protein, 429 aa, Arabidopsis thaliana
MESLPQPQNQSSPATTPAKILLGKYELGRRLGSGSFAKVHLARSIESDELVAVKIIEKKKTIESGMEPRIIREIDAMRRLRHHPNILKIHEVMATKSKIYLVMELASGGELFSKVLRRGRLPESTARRYFQQLASALRFSHQDGVAHRDVKPQNLLLDEQGNLKVSDFGLSALPEHLQNGLLHTACGTPAYTAPEVISRRGYDGAKADAWSCGVILFVLLVGDVPFDDSNIAAMYRKIHRRDYRFPSWISKQAKSIIYQMLDPNPVTRMSIETVMKTNWFKKSLETSEFHRNVFDSEVEMKSSVNSITAFDLISLSSGLDLSGLFEAKKKKERRFTAKVSGVEVEEKAKMIGEKLGYVVKKKMMKKEGEVKVVGLGRGRTVIVVEAVELTVDVVVVEVKVVEGEEDDSRWSDLITELEDIVLSWHNDIM

SEQ ID NO: 9119 - protein, 294 aa, Saccharomyces cerevisiae
TTPLVHVASVEKGRSYEDFQKVYNAIALKLREDDEYDNYIGYGPVLVRLAWHTSGTWDKHDNTGGSYGGTYRFKKEFNDPSNAGLQNGFKFLEPIHKEFPWISSGDLFSLGGVTAVQEMQGPKIPWRCGRVDTPEDTTPDNGRLPDADKDADYVRTFFQRLNMNDREVVALMGAHTLGKTHLKNSGYEGPWTANPNVFDNSFYLNLLNEDWKLEKNDANNEQWDSKSGYMMLPTDYSLIQDPKYLSIVKEYANDQDKFFKDFSKAFEKLLENGITFPKDAPSPFIFKTLEEQGL

SEQ ID NO: 9120 - protein, 181 aa, Brassica napus
  misc_feature (9)..(9): Xaa can be any naturally occurring amino acid
  misc_feature (12)..(12): Xaa can be any naturally occurring amino acid
  misc_feature (23)..(23): Xaa can be any naturally occurring amino acid
  misc_feature (37)..(37): Xaa can be any naturally occurring amino acid
  misc_feature (54)..(54): Xaa can be any naturally occurring amino acid
MAYSMLSSXAVXTSPAQATMVAXFTGLKSSSAFPVTXKANNDITSIVSNGGRVXCMKVWPPVGKKKFETLSYLPDLTEVELGKEVDYLLRNKWIPCVEFELEHGFVYREHGSTPGYYDGRYWTMWKLPLFGCTDSAQVLKEVQECKTEYPNAFIRIIGFDNNRQVQCISFIAYKPPSFTGA

SEQ ID NO: 9121 - protein, 235 aa, Glycine max
MSLFGAYSICEVGKDAAGVAGNIFAFGLFVSPIPTFRRIIRNGSTEMFSGLPYIYSLLNCMICLWYGTPLISPDNLLVTTVNSIGAAFQLVYIILFLMYAEKARKVRMVGLLLAVLGIFVIILVGSLQIDDSAMRRMFVGFLSCASLISMFASPLFIIKLVIRTKSIEFMPFYLSLSTFLMSFSFFLYGLLSDDAFIYVPNGIGTVLGIIQLVLYFYYKGSSSEECREPLIVSYE

SEQ ID NO: 9122 - protein, 196 aa, Pseudomonas aeruginosa PAO1
MNPREHGKRSIDNETRSALKRQRPAVIWLTGLSGAGKSTIASALELALFEQKKHTFLLDGDDLRLGLCRNLGYSDEDRTENIRRIAEVAKILLEAGLIVIVATISPFSRDRRLSRELIGIEHFIEVFVDTPLSECERRDPKGLYRKARSGKIENFTGIDSIYETPAQPNITIDTLSEDPDLAVKRIISYLETNQPA

SEQ ID NO: 9123 - protein, 275 aa, Bacteroides ovatus
IDKVGDPFPEATYQVCKDADAVLFSAVGDPKFDNDPTAKVRPEQGLLAMRKKLGLFANIRPVQTFKCLIHKSPLRAELVENADFICIRELTGGMYFGEKYQDNDKAYDTNYYTRPEIERILKVAFEYAMKRREHLTVVDKANVLASSRLWRQIAQEMAPNYPEVTTDYMFVDNAAMKMIQEPAFFDVMVTENTFGDILTDEGSVISGSMGLLPSASTGESTPVFEPITGSWPQAKGLNIANPLAQILSVAMLFEYFDCKEEGALIRKAVDASLDE

SEQ ID NO: 9124 - protein, 340 aa, Solanum tuberosum
MEVISTHTNGSTITITTNGHHNNGKSDHRNGGTIHDNGNKLLLGNSNSIKPGWFSEFSALWPGEAFSVKIEKLLFQGKSDYQDVMLFESATYGKVLTLDGAIQHTENGGFPYTEMIVHLPLGSIPTPKKVLIIGGGIGFTLFEVLRYSTIEKIDIVEIDDVVVDVSRKFFPYLAANFNDPRVTLVLGDGAAFVKAAQAGYYDAIIVDSSDPIGPAKDLFERPFFEAVAKALRPGGVICTQAESIWLHMHIIKQIIANCRLVFKGSVNYAWTTVPTYPTGVIGYMLCSTEGPEVDFKNPVNPIDKDTTHVKSKLEPLKFYNTDIHKAAFILPSFARSLIES

SEQ ID NO: 9125 - protein, 104 aa, Triticum aestivum
  misc_feature (95)..(95): Xaa can be any naturally occurring amino acid
MSELTHPTIKDGWFREISDMWPGQAMTLKVKNIIHHEKSKYQDVLIFESTDYGTVLVLDNVIQCTERDEFAYQEMITHLANELTPKIPKKVLVIXGGGDGGVPP

SEQ ID NO: 9126 - protein, 275 aa, Bacteroides ovatus
IDKVRDPFPEATYQVCKEADAVLFSAVGDPKFDNDPTAKVRPEQGLLAMRKKLGLFANIRPVQTFKCLIHKSPLRAELVENADFICIRELTGGMYFGEKYQDNDKAYDTNYYTRPEIERILKMAFEYAMKRRKHLTVVDKANVLASSRLWRQIAQEMAPNYPEVTTDYMFVDNAAMKMIQEPAFFDVMVTENTFGDILTDEGSVISGSMGLLPSASTGESTPVFEPIHGSWPQAKGLNIANPLAQILSVAMLFEYFDLKEEGALIRKAVDVALDE

SEQ ID NO: 9127 - protein, 464 aa, Yersinia pseudotuberculosis
IPAATQTSLSQLKLASQLDGEVRLASHPAFDEWYLTSVWNGRGPTRRPAGIVRAATEADVIRTIVFAKERGMEVSVRGSGHNYVGCFLRVDTLMLDISGLKGLDIDSRHKRAIVESGVSSGQLCHALAAKGLAFPTGHVKEVGISGFLLGGGLGINCSQWGGMSVFNVQALDIVTADGRLRHVSETQEPDLFWAARGAGPCSFFVVTRFYLSCYSLPRVITNSLYTLPFTYLHDLLARLEDASPPTNLQVMVSVSPPTSGDTPAVLLNILAFTDSPQEAQALCESFETRLELPLTALAINQPSNFETIYEQFSSMVVSKRFYADNILTDNTQELVSILSRYLSDAPSRGALTTIFWRGVTTYPQAAFSAHGKFFVSTYAQWDDAKDDSVNKYWLKRMYDELQEIARSRYINEYDLETRVGETSKCFAAENWERLQRLRLEYDPDGVFVDVQQLEEHGDQPGANN

SEQ ID NO: 9128 - protein, 305 aa, Thermoplasma volcanium GSS1
MPIDPQVRKYLDAMSKVSVPELNKTPIEDLRKIFDTPASGAPKVKISVVEDMILDTDAAKLPARLYDDSNSDSLVLYFHGGGFVFGSIETHDSLCRRIAKYSGSKVISVGYRLGPENKFPVAQIDAFNSYLYVLKRSEELGVDSDKIALMGDSAGGNLAAVASLMARDKGIKLPRLQVLVYPSTGPDMTSKSYLEYSSIYLTKELLNWFSSQYLNSIEDALNPYFSPILADLSGLPEAIVVTDEYDPLLEQGETYSATLRDSGVPVTSIRVNGMIHGFLSNFHLFRAADVSLMMISGAIHTILES

SEQ ID NO: 9129 - protein, 502 aa, Agastache rugosa
MDLFLLEKTLLGLFAAIVVAAVVSKLRGKKFKLPPGPIPVPIFGNWLQVGDDLNHRNLTDYAKKFGDIFLLRMGQRNLVVVSSPELAKDVLHTQGVEFGSRTRNVVFDIFTGKGQDMVFTVYGEHWRKMRRIMTVPFFTNKVVQQYRHGWEAEVAAVVEDVKKNPDSATTGIVLRRRLQLMMYNNMYRIMFDRRFESENDPLFVKLRALNGERSRLAQSFEYNYGDFIPILRPLLKGYLRICKEVKDRRLQLFKDYFVDERKKLASTKPMDNDGLKCAIDHILDAQQKGEISEDNVLYIVENINVAAIETTLWSIEWGIAELVNNPEVQRKVREEMDRVLGVGVPVTEPDTHKLPYLQAVIKETLRLRMAIPLLVPHMNLHDAKLGGFDIPAESKVLVNAWWLANNPEQWKKPEEFRPERFLEEESKVEANGNDFRYLPFGVGRRSCPGIILALPILGITLGRLVQNFELLPPPGKSKIDTTEKGGQFSLHILNHSTIVMKP

SEQ ID NO: 9130 - protein, 477 aa, Sinorhizobium meliloti 1021
MTLHQNLIAGEWVGGDGVANINPSNTDDVVGEYARASAEDAKAAIAAAKAAFPAWSRSGILERHAILKKTADEILARKDELGRLLSREEGKTLAEGIGETVRAGQIFEFFAGETLRLAGEVVPSVRPGIGVEITREPAGVVGIITPWNFPIAIPAWKLAPALCYGNTIVFKPAELVPGCSWAIVDILHRAGLPKGVLNLVMGKGSVVGQAMLDSPDVQAITFTGSTATGKRVAVASVEHNRKYQLEMGGKNPFVVLDDADLSVAVEAAVNSAFFSTGQRCTASSRIIVTEGIHDRFVAAMGERIKGLVVDDALKPGTHIGPVVDQSQLNQDTDYIAIGKQEGAKLAFGGEVISRDTPGFYLQPALFTEATNEMRISREEIFGPVAAVIRVKDYDEALAVANDTPFGLSSGIATTSLKHATHFKRNAEAGMVMVNLPTAGVDFHVPFGGRKASSYGPREQGKYAAEFYTNVKTAYTLA

SEQ ID NO: 9131 - protein, 506 aa, Yersinia pseudotuberculosis
MRYAHPGTPEALVSFKATYGNYIGGEFVEPLGGQYFMNTSPVNGSDIAQFPRSDARDIDAALDAAHRAADAWGKTSVQHRSNLLLQMADRIEANLEYLAVAESWDNGKPIRETLNADLPLAVDHFRYFAGCLRAQEGGVAEIDEKTVAYHFHEPLGVVGQIIPWNFPLLMAAWKLAPALAAGNCVVLKPAEQTPLGITLLLELVGDLFPAGVLNVVQGYGREAGEALASSKRIAKIAFTGSTPVGRHIMACAAENIIPCTVELGGKSPNIYFADVMEAEPEFIEKAIEGLVLGFFNQGEVCTCPSRALIHESIYAPFMARVMAKVANIRRGDPLDTETMIGAQASRQQFDKILSYIDIARKEGGEILTGGARATMTPALDAGFYIQPTLIKGDNLMRCFQEEIFGPVIGVTTFKDEAEALAIANQTQFGLGAGIWTRDTHLAYRMGRGIKAGRVWTNCYHVYPAHAAFGGYKQSGVGRETHKMALNQYQQTKNLLVSYDTAPLGLF

SEQ ID NO: 9132 - protein, 328 aa, Escherichia coli
MDKKQVTDLRSELLDSRFGAKSISTIAESKRFPLHEMRDDVAFQIINDELYLDGNARQNLATFCQTWDDENVHKLMDLSINKNWIDKEEYPQSAAIDLRCVNMVADLWHAPAPKNGQAVGTNTIGSSEACMLGGMAMKWRWRKRMEAAGKPTDKPNLVCGPVQICWHKFARYWDVELREIPMRPGQLFMDPKRMIEACDENTIGVVPTFGVTYTGNYEFPQPLHDALDKFQADTGIDIDMHIDAASGGFLAPFVAPDIVWDFRLPRVKSISASGHKFGLAPLGCGWVIWRDEEALPQELVFNVDYLGGQIGTFAINFSAGGSGNCTVL

SEQ ID NO: 9133 - protein, 355 aa, Verticillium dahliae
MSRSNAPNPSGSRKISFNVSEQYDIQDVVGEGAYGPPSSAIHKPSGQKVAIKKITPFDHSMFCLRTLREMKLLRYFNHENIISILDIQKPRGYDTFNEVYLIQELMETDMHRVIRTQDLSDDHCQYFIYQTLRALKAMHSANVLHRDLKPSNLLLNANCDLKVCDFGLARSAASQEDNSGFMTEYVATRWYRAPEIMLTFKEYTKAIDVWSVGCILAEMLSGKPLFPGKDYHHQLTLILDVLGTPTMEDYYGIKSRRAREYIRSLPFKKKVPFRTLFPKTSDLALDLLEKLLAFNPVKRITVEEALKHPYLEPYHDPDDEPTAPPIPEEFFDFDKHKDTLSKEQLKQLIYQEIMR

SEQ ID NO: 9134 - protein, 206 aa, Escherichia coli O157:H7
MAIPAFGLGTFRLKDDVVISSVKTALELGYRAIDTAQIYDNEAAVGLAIAESGVPRHELYITTKIWIENLSKDKLIPSLKESLQKLRTDYVDLTLIHWPSPNDEVSVEEFMQALLEAKKEGLTREIGISNFTIPLMEKAIAAVGAENIATNQIELSPYLQNRKVVAWAKQHGIHITSYMTLAYGKALKDEVIARIAAKHNATPAQV

SEQ ID NO: 9135 - protein, 375 aa, Pseudomonas fluorescens PfO-1
MAEAKVLSGAGLRGQVAGQTALSTVGQAGAGLTYRGYDVRELAADAQFEEVAYLLLYGELPTKAQLADYQGKLSKLRDLPQALKEVLERIPADAHPMDVMRTGCSFLGNIEPEKDFSEQRDKTDRLLAAFPAIMCYWYRFSHDGKRINCVSDEPSIGGHFLHLLHDKKPSELHVKVMNVSLILYAEHEFNASTFTARVCASTLSDLYSCVTAAIGSLRGPLHGGANEAAMEMIERFSSPEEAVKGTLGMLERKDKIMGFGHAIYKDSDPRNEVIKGWSKKLADEVGDKVLFAVSEAIDKTMWEQKKLFPNADFYHASAYHFMGIPTKLFTPIFVCSRLTGWAAHVFEQRANNRIIRPSAEYTGVEQRKFVPIEQR

SEQ ID NO: 9136 - protein, 455 aa, Nostoc punctiforme PCC 73102
MAIATINPATGETLKTFEALNDTEILAKLDLANQAFEKYRQTDFSERSQWLQKAADILEQDKAEFAKLMTLEMGKPFKAAIAEVEKCAVVCRYYAEHAPSFLADVSVKTDASQSFVRYQPMGAILAVMPWNFPFWQVFRFAAPALMAGNVGLLKHASNVPQCALAIEDIIRRAGFPEGAFQTLLIGAAKVADLMADDRVKAATLTGSEPAGISLAVAAGKQIKKTVLELGGSDPFIVLESADLETAVVTATTARMLNNGQSCIAAKRFIVAEAIADKFEKLLLEKFEALKVGDPMQSDTDLGPLATPGILQDLDQQVQAATKIGGKVLTGGHPLSDRPGNFYPPTIIIDIPPDTPIAKEEFFGPVALLFRVPDIDAAIKLANDSPFGLGASAWTKNDQECDRLIEEIEAGAVFINSMVKSDPRLPFGGTKRSGYGRELSIQGIHEFVNVKTVWVK

SEQ ID NO: 9137 - protein, 293 aa, Nostoc punctiforme PCC 73102
MAITQNYRLNVIQWYPGHIAKAEKKLKEQLKRVDVVFEVRDARIPLATHHPQIGEWVEGKTRVLILNRVDMITPQMRSLWIDWFKRQGEVPYFTNAQHGKGIAEVARAAQAAGVELNQRRSDRGMLPRPVRAVVIGFPNVGKSALINRLLGRRVVESAARPGVTRQLRWVRISEHLELLDAPGVIPLRLEDQDAALKLAICDDIGEASYDNQLVAAALVDLFNYLEAVTTDLLPKKPLQSRYQLDSTSDTGDTYLHALAEHRYKGDVERAARQLLTDFRKGLLGEMSLELPPN

SEQ ID NO: 9138 - protein, 373 aa, Arabidopsis thaliana
MGYLFQETLSSNPKTPIVVDDDNELGLMAVRLANAAAFPMVLKAALELGVFDTLYAAASRTDSFLSPYEIASKLPTTPRNPEAPVLLDRMLRLLASYSMVKCGKALSGKGERVYRAEPICRFFLKDNIQDIGSLASQVIVNFDSVFLNTWAQLKDVVLEGGDAFGRAHGGMKLFDYMGTDERFSKLFNQTGFTIAVVKKALEVYEGFKGVKVLVDVGGGVGNTLGVVTSKYPNIKGINFDLTCALAQAPSYPGVEHVAGDMFVDVPTGDAMILKRILHDWTDEDCVKILKNCWKSLPENGKVVVIELVTPDEAENGDINANIAFDMDMLMFTQCSGGKERSRAEFEALAAASGFTHCKFVCQAYHCWIIEFCK

SEQ ID NO: 9139 - protein, 107 aa, Glycine max
  misc_feature (92)..(92): Xaa can be any naturally occurring amino acid
MASSMISSPAVITVDRACAGMVAPFTGLKSMAGFPTRKTSNDITSIAINRGKVHCMHVLPPIGNKMFETLSYLPYLDDAQLAKEVEYLLMKXWIPCLEFELEHRFAY

SEQ ID NO: 9140 - protein, 301 aa, Arabidopsis thaliana
MAMEDQSAARSIGKVSWFSDGKGYGFITPDDGGEELFVHQSSIVSDGFRSLTLGESVEYEIALGSDGKTKAIEVTAPGGGSLNKKENSSRGSGGNCFNCGEVGHMAKDCDGGSGGKSFGGGGGRRSGGEGECYMCGDVGHFARDCRQSGGGNSGGGGGGGRPCYSCGEVGHLAKDCRGGSGGNRYGGGGGRGSGGDGCYMCGGVGHFARDCRQNGGGNVGGGGSTCYTCGGVGHIAKVCTSKIPSGGGGGGRACYECGGTGHLARDCDRRGSGSSGGGGGSNKCFICGKEGHFARECTSVA

SEQ ID NO: 9141 - protein, 160 aa, Dechloromonas aromatica RCB
MSQTLYDFSAQRLNGEPQDFEAYRGKVLLIVNTASECGFTPQYTGLEELYWMFKDRGFVVLGFPCNQFGGQEPGDAEAIGQFCQTRFDVTFPLFAKVDVNGDSAHPLYTWLKHEAAGVLGTEAIKWNFTKFLIDREGKVVHRYAPATRPDELVEAVEAQL

SEQ ID NO: 9142 - protein, 422 aa, Pseudomonas putida KT2440
MSDLKTAALEYHAQPRPGKLSVELSKPTATARDLALAYSPGVAEPVREIGRDPELAYKYTGKGNLVAVISDGTAILGLGDLGPLASKPVMEGKGVLFKRFAGIDVFDIEVESESPQAFIDTVRRISITFGGINLEDIKAPECFEIERTLIEQCDIPVFHDDQHGTAIVTAAGMINALEIAGKKLEEAKIVCLGAGAAAISCMKLLVSMGAKVENIFMIDRSGVIHAGRDDLNQYKAQFAHATDKRTLADALDGADVFVGLSGPNLLSPEGLKSMAANPIVFACSNPDPEISPELAHATRNDVIMATGRSDYPNQVNNVLGFPFIFRGALDVRAKRINEEMKIAAAIALKDLAKLPVPKEVCEAYGVEGLEFGREYIIPKPLDARLITVVSDAVAKAAIESGVATLPYPKHYPLTSVDEVFNG

SEQ ID NO: 9143 - protein, 459 aa, Arthrobacter nicotinovorans
MVSSKLATPLSIQGEVIYPDDSGFDAIANIWDGRHLQRPSLIARCLSAGDVAKSVRYACDNGLEISVRSGGHNPNGYATNDGGIVLDLRLMNSIHIDTAGSRARIGGGVISGDLVKEAAKFGLAAVTGMHPKVGFCGLALNGGVGFLTPKYGLASDNILGATLVTATGDVIYCSDDERPELFWAVRGAGPNFGVVTEVEVQLYELPRKMLAGFITWAPSVSELAGLLTSLLDALNEMADHIYPSVFVGVDENRAPSVTVCVGHLGGLDIAERDIARLRGLGRTVSDSIAVRSYDEVVALNAEVGSFEDGMSNLWIDREIAMPNARFAEAIAGNLDKFVSEPASGGSVKLEIEGMPFGNPKRTPARHRDAMGVLALAEWSGAAPGSEKYPELARELDAALLRAGVTTSGFGLLNNNSEVTAEMVAEVYKPEVYCRLAAVKREYDPENRFRHNYNIDPEGS

SEQ ID NO: 9144 - protein, 448 aa, Streptomyces coelicolor A3(2)
MAPAITLAAETELSAANTGFMLICSALVMLMTPALAFFYGGMVRVKSTLNMLMMSFISLGIVTVLWVLYGFSMAFGTDSGSVVGWNSDWVGLSDIGLTELWDGYTIPVFVFLVFQLMFAVLTPALISGALADRVKFTAWALFIALWATIVYFPVAHWVWGAGGWAFELGVIDFAGGTAVHINAGAAALGVILVIGKRVGFKKDPMRPHSLPLVMLGAGLLWFGWFGFNAGSWLGNDDGVGALMFVNTQVATGAAVLGWLAYEKIRHGAFTTLGAASGAVSGLVAITPAGGAVSPLGAIAVGLVAGVVCAMAVGLKYRFGYDDSLDVVGVHLVGGILGSLLIGFFASGKGQSDVEGLFYGGGLDQFWKQCAGVFGVLAYSLVVSAVLAFLLDKTIGMRVSEDVEVAGIDQAEHAETAYDFSGAGGGAARTTATPAASTAGSAPSKKVDA

SEQ ID NO: 9145 - protein, 167 aa, Citrus sinensis
MASQSKTSVHDFSVKDAKGQDVDLSIYKGKLLLIVNVASQCGLTNSNYTELSQLYDKYKNQGLEILAFPCNQFGAQEPGDNEQIQEFACTRFKAEFPIFDKVDVNGDNAAPLYKHLKSSKGGLFGDSIKWNFSKFLVDKEGNVVERYAPTTSPLSIEKDIKKLLETA

SEQ ID NO: 9146 - protein, 503 aa, Arabidopsis thaliana
MAITVPRRQLFIGGQWTEPVLRKTLPVVNPATEDIIGYIPAATSEDVELAVEAARKAFTRNNGKDWARATGAVRAKYLRAIAAKVIERKSELANLEAIDCGKPLDEAAWDMDDVAGCFEYYADLAEGLDAKQKTPLSLPMDTFKGYILKEPIGVVGMITPWNYPLLMAVWKVAPSLAAGCTAILKPSELASLTCLELADICREVGLPPGVLNILTGLGTEAGAPLASHPHVDKIVFTGSTTTGSSIMTSAAKLVKPVSLELGGKSPIIVFDDVDIDKAVEWTMFGCFWTNGQICSATSRLLVHERIADEFLDKLVKWTKNIKISDPFEEGCRLGPVVSKGQYERVLKFVSNARNEGATVLCGGVRPEHLKKGYFVEPAIVSNVTTSMEIWREEVFGPALCVKTFSTEDEAIQLANDSQYGLAGAVLSNDLERCDRVSKAFQAGIVWVNCSQPCFCQAPWGGTKRSGFGRELGEWGLENYLSVKQVTQYISDEPWGWYKPPSKL

SEQ ID NO: 9147 - protein, 275 aa, Bacteroides caccae
IDEVGDPFPEETYQACKNADAVLFSAVGDPKFDNDPTAKVRPEQGLLAMRKKLGLFANIRPVQTFKVLIHKSPLRAELVENADFICIRELTGGMYFGEKYQDNDKAYDTNYYTRPEIERILKVAFEYAMKRRKHLTVVDKANVLASSRLWRQIAQEMAPQYPEVTTDYMFVDNAAMKMIQEPAFFDVMVTENTFGDILTDEGSVISGSMGLLPSASTGESTPVFEPIHGSWPQAKGLNIANPLAQILSVAMLFEYFDLKEEGALIRKAVDASLDE

SEQ ID NO: 9148 - protein, 275 aa, Bacteroides distasonis
IDKVGDPFPEETYRICKDADAVLFSAVGDPKFDNDPTAKVRPEQGLLAMRKKLGLFANIRPVQTFKCLLHKSPLRAELVDGADFLCIRELTGGMYFGEKYQDNDKAYDTNMYTRPEIERILKVGFEYAMKRNKHLTVVDKANVLASSRLWRQIAQEMAPSYPEVTTDYMYVDNAAMRMIQEPKFFDVMVTENTFGDILTDEGSCISGSMGLLPSASTGESTPVFEPIHGSWPQAKGLNIANPLAQILSVAMLFEYFDLKEEGALIREAVDASLDA

SEQ ID NO: 9149 - protein, 275 aa, Bacteroides eggerthii
IDKVGDPFPEATYQACKNADAVLFSGVGDPKFDNDPTAKVRPEQGLLAMRKKLGLFANIRPVQTFKCLLHKSPLRAELVDGADFLCIRELTGGMYFGEKYQDNDKAYDTNMYTRPEIERILKVGFEYAMKRNKHLTVVDKANVLASSRLWRQIAREMAPDYPEVTTDYMYVANAAMRMIQEPKFFDVMVTENTFGDILTDEGSCISGSMGLLPSASTGESTPVFEPIHGSWPQAKGLNIANPLAQILSVAMLFEYFGLKEEGALVREAVDASLDA

SEQ ID NO: 9150 - protein, 505 aa, Pseudomonas syringae pv. tomato str. DC3000
MHDLLTADEYAAIAQSISFPSNAFINGAYKPAISGATFSTINPATGEFLSDLAACRAEDVDDAVSKAKKAFDDGRWRLLAPGERKSVLLKFARLLEDNRHELAVLESLDSGKPVRECQLVDVPDTIHTLRWHAELIDKLYDHTAPVGNDALTLVVREPIGVVGCVLPWNFPLLMLAWKIGPALAAGCSVIVKPAEQTSLTTLRVAELAFEAGVPAGVLNIITGTGKDVGEPIGLHKDIDMVSFTGSTVTGRRFLHYSADSNLKRVVLECGGKNPAVVMEDAEDLDLVAEQVVNGAFWNMGENCSATSRLLVHASVKDELLERMGAYIREWKMGDPLDPQTRVGALVSSDHFAKVKSYLDYANADKLDIVYGGDTQEGAFVQLTVVDGVERDSRLFQEEIFGPILSVTTFNSISEAIALANDTVYGLAASVYTGSLRKAIKLSREIRAGIVTVNCFGEGDASTPFGGFKESGFGGRDKSVFAHDQYTEIKTIWIDVSDRSVDETVK

SEQ ID NO: 9151 - protein, 291 aa, Neurospora crassa
MSEIAHPTIQDGWFREISNMWPGQAMTLKVEKVLHHEKSLYQDVLIFKSTDHGNVLVLDNVIQCTERDEFSYQEMITHLAMNSHPNPKKVLVIGGGDGGVLREVVKHDCVEEAILCDIDEAVIRLSKQFLPHMSAGFEHPKVKVHVGDGFKFLEDFKNTFDVIITDSSDPEGPAESLFQKPYFQLLHDALREGGVITTQAENQWLHLPLITKLKKDCKEVFPVAEYAYTTIPTYPSGQIGFMVCSKDPNANVKVPLRSWSQEEEEKLCRYYNSEIHKASFILPTFAKKALE

SEQ ID NO: 9152 - protein, 275 aa, Bacteroides stercoris
IDKVGDPFPEATYQACKNADAVLFSAVGDPKFDNDPTAKVRPEQGLLAMRKKLGLFANIRPVQTFKCLLHKSPLRAELVDGADFICIRELTGGMYFGEKYQDNDKAYDTNMYTRPEIERILKVGFRYAMKRNKHLTVVDKANVLASSRLWRQIAQEMAPDYPEVTTDYMYVDNAAMRMIQEPKFFDVMVTENTFGDILTDEGSCISGSMGLLPSASTGESTPVFEPIHGSWPQAKGLNIANPLAQILSVAMLFEYFDLKEEGALIRKAVDASLDA

SEQ ID NO: 9153 - protein, 224 aa, Glycine max
  misc_feature (24)..(24): Xaa can be any naturally occurring amino acid
  misc_feature (41)..(41): Xaa can be any naturally occurring amino acid
SVPNIPKVPELPKREWPEFAKSAXGDRSEIPEVPKPELPKXPGVPELPNLELPKVTQLPKSKLPKVPEIPKGPEFPKPELPKVPELSKPELPKAPEIPNVPEFPKPELPKVPELSKPELPKAPEIPKVPEFPKPELPKVPELPKPELPKIPEIPKVPEFPKPELPKVPEVPKPELSKVPKLPKSELPKVPEIPELPKSELPKIPEIPKVPEFPKVPKAFSTTNP

SEQ ID NO: 9154 - protein, 467 aa, Synechocystis sp. PCC 6803
MVHKKIDLNQLSEAESLLTPTYAARGLANSVSKYEMPETEMLPAIAYNLIHDELGLDGNSRLNLATFVTTWMEPEARQLMADTFDKNMIDKDEYPQTAEIELRCVNILSRLWNAPASAEATGCSTIGSSEAAMLGGMAMKWKWRQRRQAAGKPGDRPNLVMGINVQVCWEKFCRYWEVEPRFVPMEGDRYHISPEEAVKLIDENTIGVIGILGSTFDGSYEPIEALNDALETLNQRTGWQVPLHIDAASGGFIAPFLDPDLRWDFRLPWVKSINTSGHKYGLVYPGVGWIIWRDKEELPEELIFHCNYLGGDLPNFALNFSRPGNQVVAQYYNFLRLGKEGYRKIQQTCRDTALYLSGKIAQLGPFELLTDGGDIPVFAWRLKDEVLANTCYTLYDMADKLRERGWLVPAYRMPKNREDLVVQRIVVKEGFSRDMADLLLADMERAIAYFASQPDHKPKQEGSHFSH

SEQ ID NO: 9155 - protein, 496 aa, Magnetospirillum magnetotacticum MS-1
MPLTPELDPFKLAKALSGKHLIGGKFVPAKGGKTFPVDNPATGEEIGTAAFGTKADVDAAVANAKAAQKEWAKQSARARGKLVAECGRVLSAHVEELGRLVALETGKALRTESRVEAGVLADMFVFFGGLGSELKGETIPFNPDMLTVTVREPVGVVGCIIPWNVPLLLMAMKAAAALVAGNAVVVKSAEEAPLTVLRVAEIMNTVLPPGLFNMLSGFGPECGAPLVEHPDVKKVTFTGSVETGRIVYKAAAEKLIPVTLELGGKSPMIVCADADMDQAVAGALAGMRFTRQGQSCTASSRLFVHESIHDEFVARVKAKVDAMVMGDPLDEKTDIGTIVSDGQLERVKSYIKLGEETKGATKHVCSAMPTDPKLAKGRFVQPVIFTGMKNSDRLCQEEIFGPVCAVIKWTDYEDVLAQANDSEYGLAASIWTRDFKVAMDATRRLEAGFVQVNQNLVVQPMLSYGGVKTSGIGKEASLESMLEHFTHKKTIIFNMK

SEQ ID NO: 9156 - protein, 217 aa, Triticum aestivum
PELRWAFVRKIYVILAVQLAMTAAVSGFVVKVPAVSNFFVSSNAGIALYIFLIILPFIVLCPLHYYHQKHPVNLLLLGLFTVAISFAVGMTCAFTSGKIILEAAILTAVVVISLTAYTFWAAKRGHDFNFLGPFLFAAIMVLMVFSLIQIFFPLGKVSVMIYGGLASLIFCGYIIYDTDNIIKRYTYDEYIWAAVSLYLDVINLFLSLLQLLRAADS

SEQ ID NO: 9157 - protein, 117 aa, Prunus dulcis
MAYSAMTKLALVVALCMVVSVPIAQAITCGQVSSNLAPCIPYVRGGGAVPPACCNGIRNVNNLARTTPDRQAACNCLKQLSASVPGVNPNNAAALPGKCGVNIPYQISPSTNCANVK

SEQ ID NO: 9158 - protein, 441 aa, Lactococcus lactis subsp. lactis Il1403
MNLLSKEEKMIKNSQIPSEFYKKYNVKKGLRDINGKGVLAGLTNISAIHSFDKEGNQIPGILEYRAYNIKDIINDLRKENRFGFEEMTYLLLFGELPTANELQEFQNLLASRRTLPEFFIRETILTNPSSDVMNSMSRCILALASYDEKVSDISIENVLEQSFGLIADFPLLAIYSYQSYVHYFKKESLYIHYPDPKMTTAENILRMLRPDCHYTEVEAKVLDIALILHMEHGGGNNSTFTTHVVTSSGTDTYATIAAALSSLKGPKHGGANIKAAKMLENIKENISNYEDDAEIEKYLHKILNKEVFDKQGLIYGIGHAIYSLSDPRFEVFKSYVETLVKEKGLEEEFKLYEKVARLAPKVISENRKIYKTICPNVDFYSGFVYRILEIPQELFTPLFAIARIVGWLAHRIEELINMNKIIRPAYESVLESKNYIKLGER

SEQ ID NO: 9159 - protein, 418 aa, Burkholderia fungorum LB400
MPYQHIKVPTGGDKITVNPDFSLNVSDQPIIPYIEGDGTGIDITPVMIKVVDAAVEKAYAGKRKIHWMEIYAGEKSTKVYGPDVWLPEETLQVLKEYVVSIKGPLTTPVGGGIRSLNVALRQELDLYVCLRPVQYFKGVPSPVREPEKTNMVIFRENSEDIYAGIEWPAESEQAKKIIRFLREEMGVKKIRFPETSGIGIKPVSREGTERLVRKAIQYAIDHDRRSVTLVHKGNIMKFTEGAFRDYGYALAQKEFAAELIDGGPWMKIKNPKTGGDVVLKDVIADAFLQQILLRPAEYDVIATLNLNGDYVSDALAAQVGGIGIAPGANMSDSVAMFEATHGTAPKYAGKDYVNPGSEILSAEMMLRHLGWTEAADLIIKSMEKSILQKRVTYDFARLMEGATQVSCSGFGQVLIENL

SEQ ID NO: 9160 - protein, 412 aa, Lactococcus lactis subsp. lactis Il1403
MKIEMKNGKLVVPDYPAIGYIRGDGVGEDIFPQAQKVFDAAVLKIYGQKKKIEWQKLLAGGEAFETCGEYLPKETLAHINENLIAIKGPLMTPVGESFRSINVTLRQKMDLYACVRPVEYFKGIKSPVKAPEKVDMTIFRENTEDIYAGIEFASETNESHNLLKFLEKELNVHSIRFPKTSALGIKPVSPEGSKRLVNAAFEYALKMNKKRVTFVHKGNIMKFTEGGFRNWAYEVAREYPTFTKLEYDEIKNERGSLQAENEKKAALKSGKIYVDDVIADNFLQQIILNPENFEVIATLNLNGDYISDALAAQVGGIGIAPGANINYKSGHAIFEATHGTAPDIAGKNIANPSSLILSGVMMFEYLGWQEVAELIKIALSFSFRNGNLTADLGGKLSTSKFSDVLIDFIKTY

SEQ ID NO: 9161 - protein, 279 aa, Bacillus thuringiensis serovar konkukian str. 97-27
MKNLQSKAVLNNGVEMPWFGLGVFKVEEGPELVEAIKTAIKAGYRSIDTAAIYGNEKAVGEGIRAGIEATGISREDLFITSKVWNADQGYETTIAAYEESLKKLGLDYLDLYLVHWPSEGKYKDTWRALETLYKEKRVRAIGVSNFQIHHLQDVMKDAEIKPMINQVEYHPRLTQKELQAFCKEQGIQMEAWSPLMQGQLLDNETLQEIAEKHGKTTAQVILRWDLQNGVITIPKSTKEHRIIANADVFNFELTKEDMEKIDALNQNHRVGPDPDNFDF

SEQ ID NO: 9162 - protein, 131 aa, Desulfitobacterium hafniense DCB-2
MSNRLEQLRQLSAVVADTGDIDAIARFRPLDATTNPSLLLKAAGLPAYAPLIDAAVAQATGADRQARVADAGLRLAVAIGGEILKLIPGRVSTEVDARLSFDTQATLAQARRIVALYAEAGIGRERLLIKM

SEQ ID NO: 9163 - protein, 332 aa, Streptomyces carzinostaticus subsp. neocarzinostaticus
MGKRAAHIGLRALADLATPMAVRVAATLRVADHIAAGHRTAAEIASAAGAHADSLDRLLRHLVAVGLFTRDGQGVYGLTEFGEQLRDDHAAGKRKWLDMNSAVGRGDLGFVELAHSIRTGQPAYPVRYGTSFWEDLGSDPVLSASFDTLMSHHLELDYTGIAAKYDWAALGHVVDVGGGSGGLLSALLTAHEDLSGTVLDLQGPASAAHRRFLDTGLSGRAQVVVGSFFDPLPAGAGGYVLSAVLHDWDDLSAVAILRRCAEAAGSGGVVLVIEAVAGDEHAGTGMDLRMLTYFGGKERSLAELGELAAQAGLAVRAAHPISYVSIVEMTAL

SEQ ID NO: 9164 - protein, 606 aa, Zea mays
MDTHIGSVNGAASNQTVGCPASAPGCPMASTPAQPAATLSAGEASLGRHLARRLVQVGVNDVFAVPGDFNLTLLDHLIAEPGLRLVGCCNELNAGYAADGYARARGVGACAVTFTVGGLSVLNAIAGAYSENLPVICIAGGPNSNDYGTNRILHHTIGLPDFSQELRCFQTVTCHQAVVNNLDDAHEQIDTAIATALRESKPVYLSISCNLPGLPHPTFSRDPVPFFLTPRTSNKMGLEAAVEATVEFLNKAVKPVLVAGPKLRVAKAGKAFVDMVDASGYAYAVMPSAKGLVPETHPHFIGTYWGAVSTAFCAEIVESADAYLFAGPIFNDYSSVGYSFLLKKEKAIIVQPERVIVGNGPAFGCVMMKEFLSELAKRVNKNTTAYENYKRIFVPEGQPLESEPNEPLRVNVLFKHVQKMLTGDSAVIAETGDSWFNCQKLKLPEGCGYEFQMQYGSIGWSVGALLGYAQGANHKRVIAFIGDGSFQVTAQDVSTMLRCEQNSIIFLINNGGYTIEVEIHDGPYNVIKNWNYTGFVDAIHNGLGKCWTSKVKSEEELTAAIETALGEKKDCLCFIEVIAHKDDTSKELLEWGSRVSAANSRPPNPQ

SEQ ID NO: 9165 - protein, 321 aa, Papaver somniferum
MESNGVPMITLSSGIRMPALGMGTAETMVKGTEREKLAFLKAIEVGYRHFDTAAAYQTEECLGEAIAEALQLGLIKSRDELFITSKLWCADAHADLVLPALQNSLRNLKLDYLDLYLIHHPVSLKPGKFVNEIPKDHILPMDYKSVWAAMEECQTLGFTRAIGVCNFSCKRLQELMETANSPPVVNQVEMSPTLHQKNLREYCKANNIMITAHSVLGAVGAAWGTNAVMHSKVLHQIAVARGKSVAQVSMRWVYQQGASLVVKSFNEARMKENLKIFDWELTAEDMEKISEIPQSRTSSAAFLLSPTGPFKTEEEFWDEKD

SEQ ID NO: 9166 - protein, 194 aa, Saccharomyces cerevisiae [sequence omitted]

SEQ ID NO: 9167 - protein, 321 aa, Papaver somniferum
MESNGVPMITLSSGIRMPALGMGTVETMEKGTEREKLAFLNAIEVGYRHFDTAAAYQSEECLGEAIAEALQLGLIKSRDELFITSKLWCADAHADLVLPALQNSLRNLKLEYLDLYLIHHPVSLKPGKLVNEIPKDHILPMDYKSVWAAMEECQTLGFTRAIGVSNFSCKKLQELMATAKIPPVVNQVEMSPTLHQKNLREYCKANNIMITAHSVLGAIGAPWGSNAVMDSKVLHQIAVARGKSVAQVSMRWVYQQGASLVVKSFNEARMKENLKIFDSELTAEDMEKISEIPQSRTSSADFLLSPTGPFKTEEEFWDEKD

SEQ ID NO: 9168 - protein, 407 aa, Streptomyces avermitilis MA-4680
MAAEIVNPRSDSSTDQEGGAEPLDSFDPAFALHRGGKMAVQATVPIRDRDDLSLAYTPGVAKVCTAIAEQPELVHDYTWKSSVVAVVTDGTAVLGLGDIGPEASLPVMEGKAILFKQFGGVDAVPIALGTTDADEIVETVVRLAPSFGGVNLEDISAPRCFEIERKLQERLDIPVFHDDQHGTAVVTLAALRNAAKLTGRTLGELRAVISGAGAAGVAIAKFLLAAGLGDVAVADRKGVVSKDRDDLTPVKRELAEITNKAGLSGSLESALAGADVFIGVSGGTVPEPAVASMAEGAFVFAMANPNPEVHPEIAHKYASVVATGRSDFPNQINNVLAFPGIFAGALQVRASRITEGMKIAAADALADVVGDDLAADYVIPSPFDERVAPAVTAAVAAAARAEGVARR

SEQ ID NO: 9169 - protein, 321 aa, Papaver somniferum
MESNGVPMITLSSGIRMPALGMGTAETMVKGTEREKLAFLKAIEVGYRHFDTAAAYQSEECLGEAIAEALQLGLIKSRDELFITSKLWCADAHADLVLPALQNSLRNLKLDYLDLYLIHHPVSLKPGKFVNEIPKDHILPMDYKSVWAAMEECQTLGFTRAIGVCNFSCKKLQELMAAAKIPPVVNQVEMSPTLHQKNLREYCKANNIMITAHSVLGAICAPWGSNAVMDSKVLHQIAVARGKSVAQVSMRWVYQQGASLVVKSFNEGRMKENLKIFDWELTAENMEKISEIPQSRTSSADFLLSPTGPFKTEEEFWDEKD

SEQ ID NO: 9170 - protein, 517 aa, Zea mays
  misc_feature (47)..(47): Xaa can be any naturally occurring amino acid
  misc_feature (198)..(198): Xaa can be any naturally occurring amino acid
  misc_feature (207)..(207): Xaa can be any naturally occurring amino acid
  misc_feature (238)..(239): Xaa can be any naturally occurring amino acid
  misc_feature (246)..(246): Xaa can be any naturally occurring amino acid
  misc_feature (271)..(271): Xaa can be any naturally occurring amino acid
  misc_feature (275)..(276): Xaa can be any naturally occurring amino acid
  misc_feature (278)..(278): Xaa can be any naturally occurring amino acid
  misc_feature (290)..(292): Xaa can be any naturally occurring amino acid
  misc_feature (299)..(299): Xaa can be any naturally occurring amino acid
MVSESNRGGADRTTAAGEERGQLLFDVPEIRFTKLFINGSFVDAVSXRTFETRDPRTGGVIASVAEADKEDVDLAVRAARAAFDHGEWPRMSGSERGRIMARLADLVEERADELAALESLDAGKHPAVTRAVDVGNAAGSLRYFAGAADKIHGETLKMPGQFQGHTLREPLGVAGVIIPWNFPSTMFAVKVAPALAAXGCALVVKPXEQTPLSALYLAQLAKQAGVPDGVINVVPGFXXTAGAALXSHMDVDMVSFTGSTEVGRLIMKASXESNXXPXYLELGGKSPLIXXXDADLDMXVELAVGASFFNKGEACVAASRVYVQERVYDRFEERLPERMRSWVVGDPFSDPSADQGPQVDKAQYERVLSYIDHGKREGATLLTGGRPCGPEGKGYYIEPTVFTNVKEDMIIAKEEIFGPVMCLMKFKTVEEAIARANDTRYGLGAGVVTRDLDVANRVVRSVRAGVVWVNCYFAMGSDCPFGGRKMSGFGKDEGMHALDKYLAVKSVVTPLRASPWI

SEQ ID NO: 9171 - protein, 121 aa, Brassica napus
  misc_feature (88)..(88): Xaa can be any naturally occurring amino acid
GDHQLIFGVTNPNLKGRSLSSFLAKGMVVGKNGPPLQAIEDQGLTFVRLRTFWDAVGEALNRMNLIENEKSQGGNEGLTHARFENCLXNKQGRDLAAKLGGADLFWDWDLPRTRKGFYRFQ

SEQ ID NO: 9172 - protein, 449 aa, Glycine max
  misc_feature (54)..(54): Xaa can be any naturally occurring amino acid
  misc_feature (204)..(204): Xaa can be any naturally occurring amino acid
MEQKGGVLMQRYELGRLLGQGTFAKVYHARNIITGMSVAIKIIDKDKILKVGMXMRLIRHPHVVELYEVMASKTKIYFVMEHAKGGELFNKVVKGKLKEDDARKYFQQLISAVDYCHSRGVCHRDLKPENLLLDENGNLKVTDFGLSALAESKCQDGLLHTTCGTPAYVAPEVINRKGYDGIKADIWSCGVILYVLLAGHLPFXMTPRGEFKFPNWFAPDVRRLLSKILDPNPKTRISMAKIMESSWFKKGLEKPTITQNEDEELAPLDADGVFGACENGDPIEPAKNSKPCNNLNAFDIISYSSGFDLSGLFEETDRKKEERFTSDKPASIIISKLEEICRRLRLKVKKKDGGLFKLEGSKEGRKGPLGIDAEIFEITPVFHLVELKKSSGDTLEYQKLLKQEVRPALKDIVWNWQGEQPQPLQHGVVQKEEQPSYPGISEVVPQSTA

SEQ ID NO: 9173 - protein, 205 aa, Listeria monocytogenes str. 4b H7858
MVVGLGTGSTVYYTIEKLGEMVNNGLHITGVATSEETSKQAQNLGIPLKSLNDVAEIDITIDGADEIDTDFQGIKGGGGALLREKMVASASLKNIWVVSEEKLVRNLGKFPLPIEVIPFGWKQIERTLEKEHVQTILRRQSSGEIYVTNNGNYILDIVNQTFRDAEMWQEKLAQIPGIVEHGLFLHYVDIIVCAKANGEIELIKK

SEQ ID NO: 9174 - protein, 121 aa, Arabidopsis thaliana
MGCLISPVMKLRRLSSADSRRFAYRNLAENMEDPVIRVVVGKEKKEFMVEPYVLEEYPFRVLIGSAKDRAKNRLNRTGRVVWLDHVDSILFEHLLWLLRNDASTFSDLDVLEIIEFYAQDC

SEQ ID NO: 9175 - protein, 319 aa, Glycyrrhiza echinata
MAAAAAAAIEIPTKVLPNSTCELRVPVIGMGSAPDFTCKKDTKEAIIEAIKQGYRHFDTAAAYGSETALGEALKEARDLGLVTREELFVTSKLWVTENHPHLVIPALRKSLETLQLEYLDLYLIHWPLSSQPGKFSFPIQVEDLLPFDVKGVWESMEECLKLGLTKAIGVSNFSVKKLQNLLSVATIRPAVNQVEMNLAWQQKKLREFCTANGIVLTAFSPLRKGASRGPNEVMENDMLKGIAEAHGKSIAQVSLRWLYEQGVTFVAKSYDKERMNQNLQIFDWELTTEDHQKIDQIKQNRLIPGPTKPQLNDLWDDEL

SEQ ID NO: 9176 - protein, 175 aa, Triticum aestivum
  misc_feature (8)..(8): Xaa can be any naturally occurring amino acid
MAPAVMAXSSATTVAPFQGLKSTAGLPVGRRSSGSLGSVSNGGRIRCMQVWPIEGIKKFETLSYLPPLSTEALLKQVDYLIRSKWVPCLEFSKVGFVFREHNSSPGYYDGRYWTMWKLPMFGCTDATQVLNEVEEVKKEYPDAYVRVIGFDNLRQVQCVSFIAFRPPGCEESGKA

SEQ ID NO: 9177 - protein, 159 aa, Tamarix androssowii
MSDEEHHFESKADAGASKTFPQQAGTIRKNGHIVIKNRPCKVVEVSTSKTGKHGHAKCHFVGIDIFTGKKLEDIVPSSHNCDVPHVTRTDYQLIDISEDGFVSLLTETGGTKDDLRLPSDETLLTQIKDGFAEGKDLIVSVMCAMGEEQICALKDIGPK

SEQ ID NO: 9178 - protein, 275 aa, Bacteroides thetaiotaomicron
IDKVGDPFPEETYEVCKNADAVLFSAVGDPKFDNDPTAKVRPEQGLLAMRKKLGLFANIRPVQTFKCLIHKSPLRAELVENADFICIRELTGGMYFGEKYQDNDKAYDTNYYTRPEIERILKVAFEYAMKRRKHLTVVDKANVLASSRLWRQIAQEMAPNYPEVTTDYMFVDNAAMKMIQEPAFFDVMVTENTFGDILTDEGSVISGSMGLLPSASTGESTPVFEPIHGSWPQAKGLNIANPLAQILSVAMLFEYFDCKEEGALIRKAVDASLDE

SEQ ID NO: 9179 - protein, 489 aa, Chloroflexus aurantiacus
MIGGEFVPAQSGKTFERRNPADTRDVVGIFADSDERDVHAAVEAAKAAFPQWSKVPAPKRGEILLRAAELLQARKEQYSRDLTREMGKPLFEAGGDIVEAIGMAQYAGSEGRRMHGVTTPSELPNKFQMSIRQPIGVVGLITPWNFPMAIASWKMLPAIVCGNTVVIKPGEDASVSTYNLVQCLMEAGLPPGVVNIVTGYGPRAGQPLVEHPDVPVISFTGSTETGRLVYELGARRIKRVSLEMGGKNPLIVMPDADLDLALDGVLWAAFGTTGQRCTATSRLIVHRAVAKELVERIVARAQSLRVGNGLDPATEMGPLVNEKQLQRVLNYIDIGKQEGATLLCGGYRLTGGDYDYGYFIAPTVFTNVTSQMRIAREEIFGPVLSVIEVDSLDEAVAIANDVAYGLSSAIYTRDINAAFRAMQALQAGIVYINAPTIGAEIHLPFGGVKATGNGHREAGPTMLDVFSEWKSVYIDYSGALQRAQIDNAD

SEQ ID NO: 9180 - protein, 492 aa, Methanosarcina mazei Go1
MIREYKLLIGGKSVDSSTGETFDDINPATLENLATLQVAGIEDVDRAVEAAEAGFRVWSEVPAPGRAEVLFRAARIMQERKEGLARLMTEEMGKVLPETRGDVQEAIDITIYAAGEGRRMFGETTTSELRDKFCMTVLRPVGVVGMITPWNFPIAIPSWKIMPALIAGNAIVFKPASDTPLLTIKLVEILMEAGLPPGVINIVPGPGGSTGKAIVQHPRIRAISFTGSLDTGKWIMEECAKSMKRVSLELGGKNPVIVMDDANLELALEGVVWGAFGTTGQRCTATSRLILHEKIKDEFIKRLLAKTKSLRVGNGLLPETDVGPVINKAQLEKIEKYVRIGKEEGAAILVGGNRIDPGLPGYFFEPTIFTDVSPEMRIAQEEIFGPVLSIITVSDFDEAIEVANNIKYGLSSAIYTENVRTAFRAIEKLEAGITYVNAPTIGAEVHLPFGGIKGTGNGFREAGTEAIKEFTEVKAVYIDYSGRLQKAQIDTE

SEQ ID NO: 9181 - protein, 303 aa, Brassica napus
MVFVNGGKKQAYFGRCETTEERRRDGKTDYRARIRLINQDKNKYNTPKYRFVVRFTNKDIVAQIVSATITGDIVLASAYAHELPRYGLKAGLTNYAAAYCTGLLLARRVLQMLEMDAEYEGNAEATGEDYSVEPTDTRRPFRALLDVGLVMTTTGNRVFGALKGALDGGLDIPHSDKRFAGFNKEGKNLDAEIHRKYIYGGHVADYMKLLMEDEPEKYQSHFSNYLKKDLAPENMEEMYKNVHAAIRADPSIKKSDKEALKEHKRYNPKKLTYDERKASLIQRVKALNSAIGGDDGDEDEDDE

SEQ ID NO: 9182 - protein, 275 aa, Bacteroides uniformis
IDKVGDPFPEATYEACKNADAVLFSAVGDPKFDNDPTAKVRPEQGLLAMRKKLGLFANIRPVQTFKVLLHKSPLRAELVDGADFLCIRELTGGMYFGEKYQDNDKAYDTNMYTRPEIERILKVGFEYAMKRSKHLTVVDKANVLASSRLWRQIAQEMAPQYPEVTTDYMFVDNAAMKMIQEPKFFDVMVTENTFGDILTDEGSCISGSMGLLPSASTGESTPVFEPIHGSWPQAKGLNIANPLAQILSVAMLFEYFDLKEEGGVIRKAVDASLDA

SEQ ID NO: 9183 - protein, 484 aa, Dechloromonas aromatica RCB
MNLQNTELLRSTNLIGGIWARADDGAQLAVINPATGEKLADVPLCGATETRRAIDAANAAWPAWRALTARRRSQLLQAWFSLIIKNADDLAQLVTAECGKPLQEAKGEVIYGASFVEWFAEEGKRTYGESIPSPAANTRLLVIKQPIGVCAAITPWNFPLAMITRKVAPALAAGCPVVVKPAEATPLTALALAVLAEQAGFPAGVFNVVTGKPAEIGGELCANPIVRKLSFTGSTGVGRLLMAQCAPTIKKLSLELGGNAPFIVFDDADVNAAVDGAIAAKYRNTGQTCVCANRFLIQAGIYDEFAAKFAEKASALKVGAGIEADVAQGPLINAAGLSKVEAHVADAVGKGARVLCGGARHERGGNFFQPTVLADVTTAMMVAREETFGPVAPLFRFETEEQAIAMANDTEFGLAAYFFTRNVGRCWRVGEALEYGMVGINTGMISNEVSPFGGIKQSGLGREGSKYGIEDYLEIKYLCFDVNT

SEQ ID NO: 9184 - protein, 275 aa, Bacteroides vulgatus
IDKVGDPFPEATFQACKNADAVLFSAVGDPKFDNDPTAKVRPEQGLLAMRKKLGLFANIRPVQTFKCLVHKSPLRAELVENADFICIRELTGGMYFGEKYQDNDKAYDTNMYTRPEIERILKVAFEYAMKRRKHLTVVDKANVLASSRLWRQIAQEMAPQYPEVTTDYMFVDNAAMKMLQDPCFFDVMVTENTFGDILTDEGSVISGSMGLLPSASTGESTPVFEPIHGSWPQAKGLNIANPLAQILSVAMLFEYFDLKEEGTLIRKAVDASLDE

SEQ ID NO: 9185 - protein, 162 aa, Triticum aestivum
  misc_feature (29)..(30): Xaa can be any naturally occurring amino acid
  misc_feature (33)..(33): Xaa can be any naturally occurring amino acid
  misc_feature (36)..(36): Xaa can be any naturally occurring amino acid
  misc_feature (38)..(38): Xaa can be any naturally occurring amino acid
  misc_feature (47)..(47): Xaa can be any naturally occurring amino acid
  misc_feature (51)..(53): Xaa can be any naturally occurring amino acid
  misc_feature (56)..(56): Xaa can be any naturally occurring amino acid
  misc_feature (58)..(60): Xaa can be any naturally occurring amino acid
  misc_feature (62)..(63): Xaa can be any naturally occurring amino acid
  misc_feature (65)..(66): Xaa can be any naturally occurring amino acid
  misc_feature (68)..(68): Xaa can be any naturally occurring amino acid
  misc_feature (70)..(70): Xaa can be any naturally occurring amino acid
  misc_feature (72)..(72): Xaa can be any naturally occurring amino acid
  misc_feature (74)..(74): Xaa can be any naturally occurring amino acid
  misc_feature (76)..(78): Xaa can be any naturally occurring amino acid
  misc_feature (80)..(81): Xaa can be any naturally occurring amino acid
  misc_feature (83)..(84): Xaa can be any naturally occurring amino acid
  misc_feature (88)..(88): Xaa can be any naturally occurring amino acid
  misc_feature (97)..(97): Xaa can be any naturally occurring amino acid
  misc_feature (99)..(99): Xaa can be any naturally occurring amino acid
  misc_feature (101)..(101): Xaa can be any naturally occurring amino acid
  misc_feature (106)..(107): Xaa can be any naturally occurring amino acid
  misc_feature (112)..(112): Xaa can be any naturally occurring amino acid
  misc_feature (116)..(116): Xaa can be any naturally occurring amino acid
  misc_feature (118)..(120): Xaa can be any naturally occurring amino acid
  misc_feature (130)..(131): Xaa can be any naturally occurring amino acid
  misc_feature (137)..(139): Xaa can be any naturally occurring amino acid
  misc_feature (141)..(141): Xaa can be any naturally occurring amino acid
  misc_feature (143)..(143): Xaa can be any naturally occurring amino acid
  misc_feature (145)..(145): Xaa can be any naturally occurring amino acid
  misc_feature (147)..(148): Xaa can be any naturally occurring amino acid
  misc_feature (152)..(152): Xaa can be any naturally occurring amino acid
  misc_feature (156)..(158): Xaa can be any naturally occurring amino acid
WIPRAAGIRHQTLASSHTPAYRIHPGTDXXHTXENXLXSKDDSGPAXTYPXXXGAXRXXXHXXIXXHXCXVXEXCXXXTXXHXXAMCXFVAIDIFNXKXLXDIVPXXHNCDXPHVXRXXXHLIDITDDGXXSLLTEXXXTXDXLXLXXDDAXLGQXXXGCAD

SEQ ID NO: 9186 - protein, 275 aa, Bacteroides vulgatus
IDKVGDPFPEATFQACKNADAVLFSAVGDPKFDNDPTAKVRPEQGLLAMRKKLGLFANIRPVQTFKCLVHKSPLRAELVENADFICIRELTGGMYFGEKYQDNDKAYDTNMYTRPEIERILKVAFEYAMKRRKHLTVVDKANVLASSRLWRQIAQEMAPQYPEVTTDYMFVDNAAMKMLQDPCFFDVMVTENTFGDILTDEGSVISGSMGLLPSASTGESTPVFEPIHGSWPQAKGLNIANPLAQILSVAMLFEYFDLKEEGTLIREAVDASLDE

SEQ ID NO: 9187 - protein, 367 aa, Glycine max
  misc_feature (235)..(235): Xaa can be any naturally occurring amino acid
QDTPHSPSRFVLQQLFTSIPTASTTELDAVSAFSEIVPDTVVFDDFEKFPPTAATVSSSLLLGICGLPDTIFRNAVEMALADSECYGLENPNARLSCFVNKAFANIGSDMAKLVPGRVSTEVDARLAYDTHAIIRKVHDLLKLYNDSNVPPKRLLFKIPSTWQGIEAARLLESEGIQTHLTFVYSFAQAAAAAQAGASVIQIFVGRIRDWARNHSGDTEIESAQLRGEDPGLALXNRDIHFSDPTYNYIHKYGHKSKLMAAAVRNKQDLFSLLGVDYIIAPLKVLQSLKESIASPDEKYSFVRRLSAQSAAKYTFSDEELVKWDEDSLTKAMGPAAVQLLAAGLDGHADQAKRVEELFEKIWPPPNV

SEQ ID NO: 9188 - protein, 452 aa, Brucella suis 1330
MNPADEKPYAVISAGSAADIDLAVAAARRAFPAWSETPAEERIAYIRRIAEIYESRLDEMAKTISMEMGAPIKLARESQAAAGLSHTKAFIAACENFEVEEVLSPKYPNQTAVHEPIGVCGLITPWNWPMNQITLKVIPAIAVGCTVVLKPSEIAPMSAMLFAEFVDQAGLPKGVFNLVNGEGPVVGEALSQHPEVDMMSFTGSTRAGTAVSRAAAATVKRVSLELGGKSPNIVFADSDLEKAISRSLAHCFENTSQSCNAPTRMLVERSVYDKAVELAKKAAESTKVGDPAQEGDHIGPLSSSIQFEKVQALIQKGIDEGARLVAGGTGRPEGFTEGDYVKPTVFADVNNNMTIAREEIFGPVLAMIPFDTEEEAIAIANDTPYGLAAYIQTGSPERAKRVARKLRAGMIQINGTSRAPGSPFGGYKQSGNGREGGKWGLEDFMEVKLISG

SEQ ID NO: 9189 - protein, 380 aa, Gloeobacter violaceus PCC 7421
MSGEYVPGLEGVPATRSNISFVDGKAGVLEYRGIPIDQLAESSTFLETAFLLIFDHLPTKDELLSFEVEILGHRRVKYRIRDMIKSFPESGRPMVALQSCIAALGLFYPLQNESKEKYAYDSTIRLLAKMPTMVATFHQMRLGNDPIPPRDDLGHAANFLYMLTGKEPDPRAARIFDVCLMLHAEHTVNASTFSALVTASTLADPYTVITSAAGTLSGPLHGGANEEVIRMLKEIGTIERVRPYLENRLARKEKIMGVGHRVYKVKDPRATILQNLAQELFDRFGHSRLYDIAVEVERVCDELLGQKGIYPNVDFYSGLVYEKMGIPADMFTPVFAISRVAGWLAHWHEQLADNRIFRPTQVYTGSHNVEFTPLSLRSYA

SEQ ID NO: 9190 - protein, 320 aa, Triticum aestivum
SNSHSSQEGAAFARAFDDANEQVLYRFFDPLWKAKRLLNVLSEAAMKRSVRTINDFVYAVIDKKIEQMGRDGHEFAKKQDILSRFLLEREKDPGCFDNKYLRDIILNFVIAGRDTSAGTLSWFLYVLCRDQRIQDKIAREVREATTAGRRDVGGLQELTACLTEDAISSMPYLHAALTETLRLYPAVPIDVKYCFSDDTLPDGHAVRKGDMVNYQPYPMGRMKFLWGDDAEEFRPDRWLDGDGVFVPESPYKFTAFQAGPRICLGKEFAYRQMKIFAAALLCLFRFEMWERDSTVGYRPMLTLKMDGPLRVRASPRRASG

SEQ ID NO: 9191 - protein, 266 aa, Burkholderia fungorum LB400
MPPPKPPPKPPPLPPPAPAPAPAPPLEPPQPQPPLLPPPLLPPPLLPPPLLPPPLLPPPLLPPPLLPPPLLPPPLLPPPLLPPPLLPPPLLPPPLLPPPLLPPPLLPPPLLPPPLLPPPLLPPPLLPPPLLPPPLLPLPLPLPFPLPPPLAPALPLPEPAAPAAPPAPLLPEPAAPLLPLPPPRGAHPLTLALLQSCGRNTSAASSAAVGSPAAMPVLDVPVVELPAAAPSSCASCAAPCTALAGSAASASTIHCGITSVEAGYAT

SEQ ID NO: 9192 - protein, 76 aa, Zea mays
NDVIRRDANMSSDTDMSKVFEDRTFVSSILNSFPGVDPNDPSVKDLLASLPSQKEEEKKEDKSDKTEDEKNCFKLE

SEQ ID NO: 9193 - protein, 102 aa, Triticum aestivum
MEQPKQQQPQVPAQDAAAGDKNKRRDDMHKTTGDVMSHSFGEGYSTRSDEEGFGGVYGGNDPVEHPGTEIHPSHPEYDTSQGSEVKEKEKARHLKDEKHATA

SEQ ID NO: 9194 - protein, 250 aa, Brassica juncea
MTKSYPTVSEDYQKAIEKCKRKLRGLIAEKNCAPIMVRLAWHSAGTFDCASKTGGPFGTMRFDAEQGHGANSGIHIALRLLDPIREQFPAISFADFHQLAGVVAVEVTGGPEIPFHPGREDKPQPPPEGRLPDATKGCDHLRQVFTKQMGLSDKDIVALSGAHTLGRCHKDRSGFEGAWTSNPLIFDNSYFKELLTGEKEGLLQLVSDKALLDDPVFRPLVEKYAADEEAFFADYAEAHLKLSELGFADA

SEQ ID NO: 9195 - protein, 213 aa, Magnaporthe grisea 70-15
MADVEKKEEPVATEQHENDTGAGDDGDDEKISLKTFPQTGRADAACTQQEISAMKKRVAEMEEEAAKLREMQASLDSQSQELSTESRDDVDSRSIFVGNVDYSASPEEIQAHFQSCGSINRVTILLDKFTGQPKGFAYVEFTEPSLVAQALVLNESVFKGRNIKVSPKRTNYPGMSRGRGRGRGRGGFGRGGFPPRGGYRGGYRGRGRGFTPY

SEQ ID NO: 9196 - protein, 321 aa, Papaver somniferum
MESNGVPMITLSSGIRMPALGMGTAETMVKGTEREKLAFLKAIEVGYRHFDTAAAYQSEECLGEAIAEALQLGLIKSRDELFITSKLWCADAHADLVLPALQNSLRNLKLEYLDLYLIHHPVSLKPGKFVNEIPKDHILPMDYKSVWAAMEECQTLGFTRAIGVSNFSCKKLQELMAAAKIPPVVNQVEMSPTLHQKNLREYCKANNIMITAHSVLGAIGAPWGSNAVMDSKVLHQIAVARGKSVAQVSMRWVYQQGASLVVKSFNEGRMKENLKIFDWELTAEDMEKISEIPQSRTSSAAFLLSPTGPFKTEEEFWDEKD

SEQ ID NO: 9197 - protein, 231 aa, Zea mays
MCPTKKGMTGEPSSPCSSASASTLPEHHQTVWTSPPKRPAGRTKFRETRHPVFRGVRRRGSAGRWVCEVRVPGRRGCRLWLGTFDTAEAAARAHDAAMLALAGAAACCLNFADSAWLLAVPASCASLAEVRHAVADAVEDFLRHQVVPEDDALAATPSSPSSEDGNTSDGGESSSDSSPPTGASPFEFDVFNDMSWDLHYASLAQGLLVEPPSAVTAFMDEGFADVPLWSY

SEQ ID NO: 9198 - protein, 250 aa, Brassica juncea
MTKSYPTVSEDYQKAIEKCKRKLRGLIAEKNCAPIMVRLAWHSAGTFDCASKTGGPFGTMRFDAEQGHGANSGIHIALRLLDPIREQFPTISFADFHQLAGVVAVEVTGGPEIPFHPGREDKPQPPPEGRLPDATKGCDHLRQVFTKQMGLSDKDIVALSGAHTLGRCHKDRSGFEGAWTSNPLIFDNSYFKELLTGEKEGLLQLVSDKALLDDPVFRPLVEKYAADEEAFFADYAEAHLKLSELGFADA

SEQ ID NO: 9199 - protein, 54 aa, Glycine max
MGSETFLEVILAILLPPVGVFLRYGCGVELWIDLVLTILGYIPGIIYAIYVLIG

SEQ ID NO: 9200 - protein, 182 aa, Burkholderia pseudomallei
MQYQHIKVPEGGDKITVNKDFSLYVSDQPIIPYIEGDGTGFDITPVMIKVVDAAVEKAYGGKKKIHWMEIYAGEKATKVYGPDVWGPEETLQVLKEYVVSIKGPLTTPVGGGIRSLNVALRQELDLYVCLRPIQYFKGVPSPVREPEKTNMVIFRENSEDIYAGIEWAAESEQAKKVIKFLQ

SEQ ID NO: 9201 - protein, 175 aa, Triticum aestivum
  misc_feature (72)..(72): Xaa can be any naturally occurring amino acid
MAPTVMASSATSVAPFQGLKSTAGLPVSRRSSSAGLSSVSNGGRIRCMQVWPIEGIKKFETLSYLPPLSTEXLLKQVDYLIRSKWVPCLEFSKVGFVFREHNSSPGYYDGRYWTMWKLPMFGCTDATQVLNEVEEVKKEYPDAYVRVIGFDNLRQVQCVSFIAFRPPGCEESGKA

SEQ ID NO: 9202 - protein, 500 aa, Brucella melitensis 16M
MPYCPIALHKETTMKAQPKASHFIGGAFVEDKAGKPLPVIYPATGEEIASLYSATPGIIEAAYAAALKAQGEWAALKPVERGRILRRTAEILREKNRKLSKLETLDTGKALQETLVADAASAADALEFFGGIISGFNGEFVELGGSFAYTRREALGICVGIGAWNYPIQIAAWKSAPALAMGNAFIFKPSENTPLSALALAEAYKEAGLPDGLFNVVQGYGDVGAALVNHRLTAKVSLTGSVPTGRRIMAQAGEQLKHVTMELGGKSPLIVFDDADLESAIGGAMLGNFYSTGQVCSNGTRVFVHKNIRERFIERLVERTRKIRIGDPFDEATQMGPLISAAQRDKVLSYIKKGKAEGATLACGGGVPKLQGFDKGFFIEPTVFADVTDTMTIAREEIFGPVMSVLEFSDEDEVIARANDSEFGLAAGVFTADLSRGHHVIGQIKAGTCWINAYNLTPVEVPFGGYKQSGIGRENGIAALAHYSQIKTVYVEMGKVDSPY

SEQ ID NO: 9203 - protein, 470 aa, Brassica napus
MERGIARLAVLSAHLEVSDQVILPAIEPWCTSGASELHGSLKGSLTIVDERTGKKYQVPVAEDGTVKSIDLKKITMGKDDKGVKLYDPGYLNTAPVRSSISYIDGDEGILRYRGYPIEELAESSTFLEVAYLLIYGNLPSKSQLADWELAISQHSAVPQGLLDMIQSMPQDAYPTGAFVSAMSALSLFHPDANPAHMGQDVYKSAQVRDKQIFRILGQASTIAAAAFLRTAGKPHVLPLSNLSYTENLLYMLNSMGNRFYKPNPRLARVMDTIFILHCEHEMNCSTAAARHLSSSGVDVYTAIGGATGAINGPLHGGAVEAVPKMLSEIGSVENIPEFIECVKNKKRKLYGFGHRIYRNYDPRAKFLKKLADEVFSIVGKDPLVEVAVALEKTALSNEYFVRRKLYPNVDFYSGLVYRAMGVPSHFTRVSRLAGYLSHWRESLDDPDTKIMRPQQAYNGVWLRHYEPVRE

SEQ ID NO: 9204 - protein, 321 aa, Papaver somniferum
MEIGGVPVVTLSSGRGMPILGMGTAENNLQGSERVKLAILKAIEVGYRHFDTAFVYQTEGSLGEAVAEALQNGLIKSRDELFITSKLWCADAYPDHVLPALQNSLRNLKLEYLDLYLIHWPVSLKPGKFVHPIPKDEIFPIDYKSVWAAMEKCQMLGLTKSIGVSNFSCKKLHYLMATANIPPAVNQVEMNPIWQQQKLRDYCKTNNIMVTAYSPLGAKGTMWGSSGVMDSEVLNQISQVRGKSVAQVSLRWVYEQGASLLVKSFNEERMKENLKIFDWELSPEDLKNISELPQRRVSTGDPFVSINGPFKSVEELWDDEV

SEQ ID NO: 9205 - protein, 458 aa, Streptomyces carzinostaticus subsp. neocarzinostaticus
MPSGTFKDQARAVGPAGSRLVTGILSRSGPFSRLGLPLLRGTLSTRDSDLTAAARDFGNRIHLRPVAVLHPADAEDVATIVRFGRENGFAVVPRGAACSVDGQAQTSDGIVVDLSSLSAVGEPAPSLVRVDGGARWRAVLEATLPCGRVPLVVPDHLGLSVGGTLSVGGIGGTSHRYGSVADNVLELEVVTASGDLLTCSPVRRPELFDAVRGSLGRYGIITGATLALTGARSSARTYRLVYHDCAAFLADQQRLVHERRFEHVEGHAHRSGTSGWLFVLEAMQSFDTPHEPDDTALLEGLTHHHVDTIETVSYRDFLGRVAPLEARQRALGSWQHHPHPRCNVLLPGLEAEALITRTLAGLTEEDIGPGGSVLLYPIPTARLAAPHVPKARDALTVVFGLQRTAPPDQPELLDRMVRDNLALRAAARKAGGADYAYAATHCEAPDAYESFGRTPQSR

SEQ ID NO: 9206 - protein, 159 aa, Zea mays
MTWAATLDYGRKTKNEDIRPGPLRPANIIRNKFPTYKNGSNGIVIKLADGPEVPPLKEVVAKETEELLDRRQRFSVRELAMKFEKGLNTATLLSKEVKWRQVALLERDILLKNLKSVLESLRGQVTGKTKDEIEESISMVEILAGQLSQREAELIQQKT

SEQ ID NO: 9207 - protein, 204 aa, Hypocrea jecorina
MSDSPQSPPKDVDQGAQSPDEEGQMNDNQEPHSAGGTGYEFEGVKEQDRWLPIANVARIMKNALPDNAKIAKEAKECMQECVSEFISFITSEASEKCQQEKRKTVNGEDILFAMTSLGFENYAEALKVYLSKYREQQNQSNRDRVLENNTWGNAMIPGEKTEPGTTNPEYAPPEGANPPESGAEPNYMYTSHAGHNGAGAGENY

SEQ ID NO: 9208 - protein, 308 aa, Corynebacterium glutamicum ATCC 13032
MPKASRIVVMLLHPDAQFYIDTLPTLSAEEQVSFGKDAPVSEADATHVATDQDIAGVPVRVYTPLSGAGDLPCLVYFHGGGWSGGTLNMIDATVHSLVVGLPIIAISVDYRLAPAHPFPAAIDDAFAVVSAVLDGVSGLSIDTSRVAIGGDSAGGNIAAVTAQQLRERAVGSTPVLAHQVLIFPVTDVSTTSTPSYLTFGKDCYLTKDAMERYIEQYADGHDRTDPRLSPLLASDLSDLPPTTIVYGECDVLAHEVRAYGQALLEAGNSVTMTEFKGQIHAFINLGGISSDARAARRLIRAELEAALC

SEQ ID NO: 9209 - protein, 215 aa, Zea mays
  misc_feature (27)..(27): Xaa can be any naturally occurring amino acid
  misc_feature (51)..(51): Xaa can be any naturally occurring amino acid
MAAVEVCVKAAAGNPDTLGDCPFSQRXVLLTLEEKKVPYEVKLVDLGNKPXWFLNISPEGKVPVFNGGDGKCIADSDVIIQVIEEKFPTPSLVTPPEYASVGSKIFPAFVKFLKSKDASDGSEKALLDELQALDDHLKAHGPYINGENVSATDLSLGPKLFHLQIALEHFKGWKIPENLTNVHAYTKALFSRESFVKTKPSEEHVIAGWAPKVNA

SEQ ID NO: 9210 - protein, 275 aa, Bacteroides uniformis
IDKVGDPFPEATYEACKNADAVLFSAVGDPKFDNDPTAKVRPEQGLLAMRKKLGLFANIRPVQTFKCLLHKSPLRAELVDGADFLCIRELTGGMYFGEKYQDNDKAYDTNMYTRPEIERILKVGFEYAMKRSKHLTVVDKANVLASSRLWRQIAQEMAPQYPEVTTDYMFVDNAAMKMIQEPKFFDVMVTENTFGDILTDEGSCISGSMGLLPSASTGESTPVFEPIHGSWPQAKGLNIANPLAQILSVAMLFEYFDLKEEGALIRKAVDASLDA

SEQ ID NO: 9211 - protein, 275 aa, Bacteroides uniformis
IDKVGDPFPEATYEACKNADAVLFSAVGDPKFDNDPTAKVRPEQGLLAMRKKLGLFANTCPVQTFKCLLHKSPLRAELVDGADFLCIRELTGGMYFGEKYQDNDKAYDTNMYTRPEIERILKVGFEYAMKRSKHLTVVDKANVLASSRLWRQIAQEMAPQYPEVTTDYMFVDNAAMKMIQEPKFFDVMVTENTFGDILTDEGSVISGSMGLLPSASTGESTPVFEPIHGSWPQAKGLNIANPLAQILSVAMLFEYFDLKEEGGVIRKAVDASLDA

SEQ ID NO: 9212 - protein, 148 aa, uncultured soil bacterium
MALVPWTPMHNFAALQGQMNQLLNQFFRGGNGEEAPWGVSAWMPPVDLYETPDEFILSADLPGLTKDDIHLEVHDRTLTLRGERKPAAGMTEAHYQRRERAYGSFQRAFTLPTPVDTDKVQASMKDGILDLHLPKHEAAKPRRIAVQS

SEQ ID NO: 9213 - protein, 436 aa, Magnetospirillum magnetotacticum MS-1
MAARNSSGLVAYVNARLLDPATGLDTRGALLTNGETIADVGPGLFQGGVPSGMEVVDCQGLCLAPGLVDMRVQLREPGEEHKETLKSAGEAAVAGGVTSMVCLPNTNPVIDEVATVEFVARRARKIGLAKVYPYAAATKRVEGKELAEMGMLAEAGALGFTDGIRAIRNAQVMRRALTYAATFGLLIVQHPEEPSLAEGGMMNEGELATRMGLSGIPVAAEAIMLERDMRLVEITGGRYHAAHIATREGVEIIRKAKAKGLSVTCDTAPPYFALNELAVKDYRTFAKLSPPLRSEPDRLAVVEGLRDGTIDAVASDHSPQDQDSKRVPFAVAEFGGVGLETLLAVTLDLAHNGHMSLIEALKLVTCAPASILNLAAGRLKVGAAADLVLFDPDRGWKVNAKTFHSKSKNSPFDDRPVQGMVMRTIVDGRTVYTHDA

SEQ ID NO: 9214 - protein, 216 aa, Sanguinaria canadensis
IENTTNRQVTFCKRRNGLLKKAYELSVLCDAEVALIVFSNRGRLYEYANNSVKSTIERYKKTCQDPSNSGCAVEANTQFYQQEASKLRQQIGFLQNSNRNLTGEALSSMTVKELKQLETRLEKGISRIRSKKNELLFSEIEYMQKREIDLQNDNMYLRAKIAENERAQQHMNLMPGNEYDVMTSSAYDSRNFLQVNLLESTNHHYSRQEQTALQLG

SEQ ID NO: 9215 - protein, 286 aa, Selenomonas ruminantium
MEIWFSQMDTENVKTSVRVDRQLFSRQSEYQRINVFESREFGRMIVLDGEIIFSEADEFIYNEMVVHVPMAVHPCVKNVLIIGGGDGGVAKVLTQYPEIEAIDVVEPDEMFIEVSREFFPETARGFDDDRVKITNMDGLRFLRRCRDKYDLIINDSTDPFGHTEGLFTREFYGNCYRALHDDGIMVYQHGSPFYDEDEAAFRAMHRKAYQSFPVSRVYQASIPTCPAGIWMFGFASKKYHPLKDFDAQRWNERQLETWYYTTHLHKGAFMLPKYVEDILSEEEMKK

SEQ ID NO: 9216 - protein, 506 aa, Glycine max
  misc_feature (61)..(61): Xaa can be any naturally occurring amino acid
  misc_feature (251)..(251): Xaa can be any naturally occurring amino acid
MVLSKTTSESDVSVHSTFASRYVRTSLPRFKMPEESIPKEAAYQIINDELMLDGNPRLNLXASFVTTWMEPECDKLIMAAINKNYVDMDEYPVTTELQNRCVNMIAHLFNAPLEETEAAVGVGTVGSSEAIMLAGLAFKRKWQNRRKQEGKPFDKPNIVTGANVQVCWEKFARYFEVELKEVKLRDDYYVMDPEKAVELVDENTICVAAILGSTLNGEFEDVKRLNDLLIEKNKITGWDTPIHVDAASGGXFIAPFLYPELEWDFRLPLVKSINVSGHKYGLVYAGIGWVIWRSKEDLPEELIFHINYLGADQPTFTLNFSKGSSQVIAQYYQLIRLGFEGYRNVMENCRDNMLVLKEGLEKTGRFSIVSKDNGVPLVAFTLKKDHTHFDEFQISDFLRRFGWIVPAYTMPPDAQHVTVLRVVIREDFSRTLAERLVADVEKVLHELDSLPARVISSTSVTVTAEENGKVVVAKKSAMETQREITAIWKKFVLERKKNNDKMNGVC

SEQ ID NO: 9217 - protein, 89 aa, Glycine max
  misc_feature (83)..(83): Xaa can be any naturally occurring amino acid
TMIAAPAVTTVHHAGAGMAAPFTGQKSMVGFPTRKTNNGISCIGYNCLRLQCLQVWTPVVKSEVETLSYLPHLVDAQMAKEVXYLIRNG

SEQ ID NO: 9218 - protein, 390 aa, Magnaporthe grisea 70-15
MSYAPASPDLSSFYSGSADSHNAGHHHHHHHSSSSGFGFPVQVSSSNPRSRPLSPPHGLTLPGGPTSSVTTNYQANRVGEVHFSLHSNQQHHHHLHTPYHEHPYSLHTPISPQPNPSQAVHAQNHLHYIHSPFQTQKNIQSLQIVPPSNHNINTSQPGPSPIGLQYIPPYSAQQYKSEPDDAFCFSSVQEIPQRDLFPQQPHRRSYSQPHSDATRIKPEVKSEEQYGVHSPQNIRIKSETQPSYPLPEAMPPRRSAAAAQPSVIASPVKTRFPTARIKRIMQADEEVGKVAQQTPIAVGKALEMFMVALVSKSHDVAKDKGAKRVTAQHLKQVIESDDQWDFLREIVGRISETEEKAGRAGGRAKAESSSDEEVPEPKKKGRGGRKKKVT

SEQ ID NO: 9219 - protein, 458 aa, Streptomyces cattleya
MAGFLLRCRPEGAVPQHLGAGTGLATEVTRDGADVLVVHGDPLTPGGQAPIHAPLDELIAWTVRAYSRFCAVLVRDDRAVLWSDNGATCPLHYARGADDTLLVATSAGALLPLLGTAPVLGEGDRAVLPGGRFAGVTAVPAGTAVTLAVAGFDTEPLLTRRYHRLPARPTETDPERAVTAVRDALTHAVGRLATGLTEAGVMLSGGVDSSSVAALAAREVTSLSTYTVGTPFGDEFAQAAWFAERLGSKHHELVFEPEQLTALLPEMIRSLETWDLLTLQIAAPACFLLGHIATGARQVMLSGYGADLIFAGLGGTGTETRIERSVAAQTAATAVSNEFNPAYADARDVVVRYPYWTREVMSTALGIRGRLKVRPDTAKWVLRSAVTGILPDEVAWRPKRGIHEGTAMSRMFAAALGSDDRHTQARRLYEMATEVFRDTAAGTDELEGSDEGLAGVAS

SEQ ID NO: 9220 - protein, 147 aa, Fritillaria agrestis
TMLSSVATAARAAPAQASMVAPFVGLKSTSSFPVTQKPATGLSTLPSNGGRVQCMKVWPIVGLKKFETLSYLPTLSVESLLKQIEYLIRNGWVPCLEFSLEGFVSRDNNKSPGYYDGRYWTMWKLPMFGCTDAAQVVKEAAECKKEY

SEQ ID NO: 9221 - protein, 147 aa, Fritillaria agrestis
TMLSSVATAARAAPAQASMVAPFVGLKSASAFPVTQKPATGLSTLPSNGGRVQCMKVWPIVGLKKFETLSYLPTLSVESLLKQIEYLIRNGWVPCLEFSLEGFVSRDNNKSPGYYDGRYWTMWKLPMFGCTDAAQVVKEAAECKKEY

SEQ ID NO: 9222 - protein, 329 aa, Methanothermobacter thermautotrophicus str. Delta H
MKSMKIAVIPGDGIGVEVMEAALHILNTLDLDLEFIHADAGDACLKRTGTALPEETLEAVGEARATLFGAAGESAADVIVRLRREFDLFANLRPVKSLPGVPCLYPDLDFVIVRENTEDLYVGDEEYTPEGAVAKRIITRTASRRISQFAFQYAQKEGMQKVTAVHKANVLKKTDGIFRDEFYKVASEYPQMEATDYYVDATAMYLITQPQEFQTIVTTNLFGDILSDEAAGLIGGLGLAPSANIGEKNALFEPVHGSAPQIAGKNIANPTAMILTTTLMLKHLNKKQEAQKIEKALQKTLAEGLVTPDLGGKLGTMEMAAEIARHLED

SEQ ID NO: 9223 - protein, 513 aa, Glycine max
MSKTTTSSEQTARNRLATLAAHLLPSDATSAAAILHPHRLSAPTGDLPPANLKGTLTVVDERTGKKYQIEVTPDGTVRASDFKKISSGKNDKGLKLYDPGYLNTAPVISRISYIDGDAGILRYRGYPIEDLAEKSTFTEVSYLILYGNLPSESQLAEWEFALSQHSAVPQGVLDMIESMPHDAHPMGMLVNAMSALSVFHPDANPALKGLDIYNSKQVRDKQIARVIGKITTIAAAINLRLAGRPPVLPSNKLSYTENFLYMLDSFGNRSYKPNPRLTRALDIIFVLHAEHEMNCSTSAVRHLSSSGVDVYTAIAGAVGALYGPLHGGANEAVLKMLSEIGTVENIPAFIEGVKARKRKLSGFGHRVYKNYDPRAKVLRKLTEEVFSIVGRDPLIEIAVALEKIALSDEYFIKRKLYPNVDFYSGLIYRAMGFQPEFFTVLFAIPRMAGYLAHWRESLDDPDTKIMRPQQVYVGEWLRHYAPINQRTASSNTDKLGQLAVSNASKRRLAGSGA

SEQ ID NO: 9224 - protein, 450 aa, Streptomyces carzinostaticus subsp. neocarzinostaticus
MNGRRPVSPPLRALPGLLRKLAVDRLGMMRDAAALDDAVLVSMGPKKLFVFNRPDYAKHVLADNAANYRKGIGLIESRKMLGDGLLTSEGELWREQRRTVQPAFRPARVAAQADAVAEETMNLRDLLMRRGADGPVDVLQEVTGFTLGVLGRTVLNTDLGGYGGIAHAFEAVQDQAMFDMVTQNMVPTWAPLATQRRFRRARRELIRTVDELVADRSARMTDGEEADDAFSLMIAAARRQTDPRTGQGRLRDELVTLLLAGHETTASTLAWTLLLLARHPHMRDLVREEARGVLADGRAPDAGDLRKLTYTTQVVQEAMRLYPPVWILPRVARQSDEVGPYSVSAGADVLICPYTLHRHPDLWERPEQFDPGRFDPARVADRPRYAYIPFGAGPRFCVGSNLGMMEAVFVTALLTRDLVLEVVPGDERTPEPMMSLRMRGGLPMTVRPVR

SEQ ID NO: 9225 - protein, 98 aa, Glycine max
  misc_feature (58)..(58): Xaa can be any naturally occurring amino acid
MAGAWVFKNGVVRLAENPAGEAVDGSRGGRRKVLVHTASNEGITSYAELEPKLNLLGXERYYDYPVLVQFSQRSTVHLIFLPKNFNKLMPMRMYDIGA

SEQ ID NO: 9226 - protein, 452 aa, Staphylococcus aureus subsp. aureus Mu50
MNYTQQLKQKDSEYVWHPFTQMGVYSKEEAIIIEKGKGSYLYDTNGNKYLDGYASLWVNVHGHNNKYLNKVIKKQLNKIAHSTLLGSSNIPSIELAEKLIEITPSNLRKVFYSDTGSASVEIAIKMAYQYWKNIDREKYAKKNKFITLNHGYHGDTIGAVSVGGIKTFHKIFKDLIFENIQVESPSFYRSNYDTENEIMTAILTNIEQILIERNDEIAGFILEPLIQGATGLFVHPKGFLKEVEKLCKKYDVLLICDEVAVGFGRTGKMFACNHEDVQPDIMCLGKAITGGYLPLAATLTSQKIYNTFLSDSHGVNTFFHGHTYTGNQIVCTVALENIRLYEKRKLLSHIETTSSTLEKQLHALKRHRNVGDVRGRGLMFGVELVTDKDSKTPLEIEKVERIVRKCKENGLMIRNLENVITFVPVLSMSNKEVKTMVRIFKKAVHNILDRKC

SEQ ID NO: 9227 - protein, 302 aa, Emericella nidulans
MTRTHPSSFQQLEKLGEGTYATVYKGRNCQTGEMVALKEIHLDSEEGTPSTAIREISLMKELHHDNILSLYDVVHTENKLMLVFEYMDQDLKKYMDTHGNHGQLEPAIVKSFAFQLLRGIAFCHDNRILHRDLKPQNLLINSKGQLKLADFGLARAFGIPVNTFSNEVVTLWYRAPDVLLGSRTYNTTIDIWSIGCIIAEMFTGRALFPGTTNEDQLQKIFRVMGTPSERTWPGVSQFPEYKSDFPVYPPQDLRQVVPRIDPYGLDLLRCMLRLQPDLRISAVDALRHPWFNDVPGAQPVPV

SEQ ID NO: 9228 - protein, 357 aa, Nicotiana tabacum
MKKGSLAPNLKLSLPPPDEVNLSKFLTESGTFKDGDLLVNRDGVRIVSQSEVEAPSVIQPSDNQLCLADFEAVKVIGKGNGGIVRLVQHKWTGQFFALKAIQMNIEESMRKHIAQELRINQSSQVPYVVISYQSFFDNGAISIILEYMDGGSLADFLKKVKTIPERYLAAICKQVLKGLWYLHHEKHIIHRDLKPSNLLINHIGDVKITDFGVSAVLASTSGLANTFVGTYNYMSPERILGGAYGYRSDIWSLGLVLLECATGVFPYSPPQADEGWVNVYELMETIVDQPAPSAPPDQFSPQFCSFISACVQKDQKDRLSANELMRHPFITMYDDLDIDLGSYFTSAGPPLATLTEL

SEQ ID NO: 9229 - protein, 466 aa, Burkholderia fungorum LB400
MSKTSLIAADRKHLIHPVINYRAHEARGATVLESGQGAYLRDIDGNELLDAFSGLWCVNVGYGQQSIVEAATRQMTKLPYATTYFHFSSEPAIELADKLVALAPASLQHVYFTLGGSDAVDSAIRFITHYFNATGRPSKKQMIALERGYHGSSSVGAGLTALPAFHRNFDLPLPHQHHLPSPYAYRQTHGDDAQALIAASVAALEAKVAALGTDNVAAFFCEPIQGSGGVIVPPVGWLKAMRDACRRLDILFVADEVITGFGRTGPLFACEAEQVEPDLMTVAKGLTSGYAPMGAVLMSDEIYQGIAGDARDTAIVGHGQTYSAHPVSAAIGLEVLRLYQEGGLLANGQAQAPRFAAGLDALLGHPLVGDSRHRGLLGALELVADKDSRARFDPALKLPDRIAAAAYRNRLVFRAFGDSILGFAPALCFGEAEFEQMFGRLKRTLDEVLDETEVRAALRTAGRAAA

SEQ ID NO: 9230 - protein, 372 aa, Candida albicans SC5314
MKKSTGPTQTRQVVFNISQNFKVLKILGEGAYGIVALAVHLPTETKVAIKKIEPFERPLFCLRTLREIKLLTKFKNHDNIVRLYDVQKPMNYDSFNEVYLIQEYMPSDLHNIIHTHLLSDQHVQYFIYQILKGLKMIHSARVIHRDLKPSNILVNEKCDLKICDFGLARLDTKHYNFDEAPRISMLTEYVATRWYRAPEIMLSASNYSTAIDLWSVGCILAELLTYRALFPGSDYINQLKLIFEVLGTPTDEDLQIIKSERAQKFIRSLPTKVKIDLSEFINNHPYRNIKHRGRDQVNPLAIDLLEKLLVFDPAKRITVQEALEHPYLNSYHEQLDEPVTSPIPIEEFDFDIDKKNLDTNDLKKQIFEIVMS

SEQ ID NO: 9231 - protein, 147 aa, Fritillaria agrestis
TMLSSVATAARTAPAQASMVAPFVGLKSTSAFPVTQKPATGLSTLPSNGGRVQCMKVWPIVGLKKFETLSYLPTLSVESLLKQIEYLIRNGWVPCLEFSLEGFVSRDNNKSPGYYDGRYWTMLKLPMFGCTDAAQVVKEAAECKKEY

SEQ ID NO: 9232 - protein, 378 aa, Arabidopsis thaliana
  misc_feature (328)..(328): Xaa can be any naturally occurring amino acid
MANHLQVPLTKPDRVKEEQEVEEEARLLARRLANAAALPMVLKAALELGVIDTITTVGGGDLWLSPSEIALRLPTKPCNLEAPVLLDRMLRFLVSHSVLKCRTVIEENGQTGKVERVYAAEPVCKYLLNKSDDVSGSFASLFMLDLSDVFIKTWTHLKDVILAGRDAFSSAHGMKLFEYIQADERFGKVFNRAMLESSTMVTEKVLKFYEGFKDVKTLVDVGGGLGNTLGLITSKYPHLIGINFDLAPVLANAHSYPGVNHVAGDMFIKIPKGDAIFMKWILHDWTDEQCVAILKNCWKSLEENGKLIIVEMVTPVEAKSGDICSNIXFGMDMTMLTQCSGGKERSLYEFENLAYASGFSRCAIVCAVYPFSVIEIYK

SEQ ID NO: 9233 - protein, 147 aa, Fritillaria agrestis
TMLSSVATAARTAPAQASMVAPFVGLKSTSAFPVTQKPATGLSTLPSNGGRVQCMKVWPIVGLKKFETLSYLPTLSVESLLKQIEYLIRNGWVPCLEFSLEGFVSRDNNKSPGYYDGRYWTMWKLPMFGCTDAAQVVKEAAECKKEY

SEQ ID NO: 9234 - protein, 492 aa, Arabidopsis thaliana
MSDFSSSVKLKYVKLGYQYLINNFLTLLLIPVIATVAIELLRMGPEEILSVLNSLHFELLHILCSSFLIIFVSTVYFMSKPRTVYLVDYSCYKPPVTCRVPFSSFMEHSRLILKDNPKSVEFQMRILERSGLGEETCLPPAIHYIPPTPTMESARNEAQMVIFTAMEDLFKNTGLKPKDIDILIVNCSLFSPTPSLSAMIINKYKLRSNIKSYNLSGMGCSASLISVDVARNLLQVHPNSNAIIISTEIITPNYYKGNERAMLLPNCLFRMGGAAILLSNRRSDRWRAKYKLCHLVRTHRGADDKSYNCVMEQEDKNGNVGINLSKDLMTIAGEALKANITTIGPLVLPASEQLLFLSSLIGRKIFNPKWKPYIPDFKQAFEHFCIHAGGRAVIDELQKNLQLSGEHVEASRMTLHRFGNTSSSSLWYELSYIEAQGRMKRNDRVWQIAFGSGFKCNSAVWKCNRTIKTPTDGAWSDCIERYPVFIPEVVKL

SEQ ID NO: 9235 - protein, 147 aa, Fritillaria agrestis
TMLSSVATAARAAPAQASMVAPFVGLKSTSSFPVTQKPATGLSTLPSNGGRVQCMKVWPIVGLKKFETLSYLPTLSVETLLKQIEYLIRNGWVPCLEFSLEGFVSRDNNKSPGYYDGRYWTMWKLPMFGCTDAAQVVKEAAECKKEY

SEQ ID NO: 9236 - protein, 181 aa, Brassica napus
MAYSMLSSAAVVTSPAQATMVAPFTGLKSSSAFPVTRKANNDITSIVSNGGRVSCMQVWPPIGKKKFETLSYLPDLTEVELGKEVDYLLRNKWIPCVEFELEHGFVYREHGSTPGYYDARYWTMWKLPLFGCTDSAQVLKEVQECKTEYPNAFIRIIGFDNNRQVQCISFIAYKPPSFTGA

SEQ ID NO: 9237 - protein, 360 aa, Triticum aestivum
MGSTAADMAASADEEACMYALQLVSSSILPMTLKNAIELGLLETLVAAGGKLLTPAEVAAKLPSTANPAAADMVDRMLRLLASYNVVSCTMEEGKDGRLSRRYRAAPVCKFLTPNEDGVSMAALALMNQDKVLMESWYYLKDAVLDGGIPFNKAYGMSAFEYHGTDPRFNRVFNEGMKNHSIIITKKLLEVYKGFEGLGTIVDVGGGVGATVGAITAAYPAIKGINFDLPHVISEAQPFPGVTHVGGDMFQKVPSGDAILMKWILHDWSDEHCATLLKNCYDALPAHGKVVLVECILPVNPEATPKAQGVFHVDMIMLAHNPGGRERYEREFEALAKGAGFKAIKTTYIYANAFAIEFTK

SEQ ID NO: 9238 - protein, 234 aa, Methanosarcina mazei Go1
MTERNTSTDSPEKRAAGIAAAGLVSSGMVVGLGTGSTVAYTIKELGRRVKEEGLDILGVVTSYQSEMLAIDAGIRLTTLSQDPELDIAIDGADQIDSNLYTIKGGGAAHTREKIVSVSAKRFVVVADDSKTSTQLDKPVPVEVLPFAKEPAVNRIRKLGGEPRLRSAVKKDGPVITDNGNFVLDVEFGVIKDPEALALQLSAVPGVVEHGIFSNVDELYIGKKDGSVKIISRQK

SEQ ID NO: 9239 - protein, 490 aa, Oryza sativa (japonica cultivar-group)
MALKSPVDFAGSITSGQKDPCCFGVPGCNPRCVRYNKKSRTCRLVTRAISVDRPQLDFSNSDWKKQFQEDFDRRFSLPHLKDVIDVEPRPTTFSLKSRTPLENVNGSMQGSWNGYVNDDDRALLKVIKFASPTSAGADCIDPDCSWVEQWVHRAGPRKQIYFEPQYVKAGIVTCGGLCPGLNDVIRQIVLTLEKYGVKNIVGIQHGFRGFFEDHLAEVPARRLDMLFVLGGNGTHAGANLIHEECRKRKLKVSIVGVPKTIDNDILLMDKTFGFDTAVEAAQRAINSAYIEAHSAFHGIGLVKLMGRSSGFITMHASLSSGQVDICLIPEVPFTLDGPNGVLQHLEHLIETKGFALICVAEGAGQEHLQQSNATDASGNMILGDIGVHLHQKIKAHFKEIGVHSDVKYIDPTYMVRAVRANASDAILCTVLGQNAVHGAFAGFSGITTGICNTHNVYLPISEVIKSTRFVDPNSRMWHRCLTSTGQPDFH

SEQ ID NO: 9240 - protein, 147 aa, Fritillaria agrestis
TMLSSVATAARAAPAQASMVAPFVGLKSTFAFPVTQKPATGLSTLPSNGGRVQCMKVWPIVGLKKFETLSYLPTLSVESLLKQIEYLIRNGWVPCLEFSLEGFVSRDNNKSPGYYDGRYWTMWKLPMFGCTDAAQVVKEAAECKKEY

SEQ ID NO: 9241 - protein, 429 aa, Mesorhizobium sp. BNC1
MTDFYTLVPSAPASRFDGIERTYSAEDVRRLRGSVTIRHTLAEQGANQLWKLLHEENFVNALGALSGNQAMQMVRAGLKAIYLSGWQVAADANTASAMYPDQSLYPANAGPELARRINRTLQRADQIEVAEGKGLSVETWFAPIVADAEAGFGGPLNAFEIMKAYIEAGAAGVHFEDQLASEKKCGHLGGKVLIPTAAHIRNLTAARLAADIMGVPSLIVCRTDAEAAKLITSDIDERDQPFVDYEAGRTVEGFYQVKNGLEPCIARAVAYAPYSDLIWCETSKPDLEQARKFAEGVHKHHPGKMLAYNCSPSFNWKKNLDDATIAKFQRELGAMGYKFQFITLAGFHQLNYGMFELARGYRDRQMAAYAELQEAEFAAEARGYTATKHQREVGTGYFDAVSLAITGGQSSTTAMHGSTEHDQFTQAAE

SEQ ID NO: 9242 - protein, 448 aa, Thermoplasma volcanium GSS1
MIMENEERTEKYNEDALRYSEYYKGKIQTMSKVPVRSLDDFSIWYTPGVAAVSRKIATDHDLSFELTGRWNTIAILTDGTRVLGLGNIGPEAAMPVMEGKALIFNYLGGVNAIPVPIRVSSREEFVSVAKSLEPSFGGINLEDIESPKCFFLLETLQKEMNIPVWHDDQLGTASITLAGIINSIRIVGKKIEEVKVVFNGAGAANIAAAYLFKAAGFKKENIILVDSKGVLQPERQDMDSLMLNNPWKYQLAIETNGERVKGDLKEALKGADILISAAKSGPDTVDAKLVKEMNNDPIVFVLANPIPEMWPEEAKENGAKIVATGRSDFPNQINNSLVFPGVFRGVLDARAKGVNFDVMVAASYEIANFVEEPTAEKIVPTMEEWELYPRLASAVATKTVELGLARKIDSKEGFYKRARDIIENNRNIYRKMMDLGLIRMMPNGERKY

SEQ ID NO: 9243 - protein, 435 aa, Arabidopsis thaliana
MPEIEIAAGSGDNNDALFGKYELGKLLGCGAFAKVFHARDRRTGQSVAVKILNKKKLLTNPALANNIKREISIMRRLSHPNIVKLHEVMATKSKIFFAMEFVKGGELFNKISKHGRLSEDLSRRYFQQLISAVGYCHARGVYHRDLKPENLLIDENGNLKVSDFGLSALTDQIRPDGLLHTLCGTPAYVAPEILSKKGYEGAKVDVWSCGIVLFVLVAGYLPFNDPNVMNMYKKIYKGEYRFPRWMSPDLKRFVSRLLDINPETRITIDEILKDPWFVRGGFKQIKFHDDEIEDQKVESSLEAVKSLNAFDLISYSSGLDLSGLFAGCSNSSGESERFLSEKSPEMLAEEVEGFAREENLRMKKKKEEEYGFEMEGQNGKFGIGICISRLNDLLVVVEARRRGGDGDCYKEMWNGKLRVQLIRVCDQTSSTNAAI

SEQ ID NO: 9244 - protein, 381 aa, Clostridium perfringens str. 13
MTKDELLKQRELAHGLISINPNFDINNREQLSQIYTPGVSTICKEVEHHHNMVKTLTSVGNSIAVITDGTAVLGLGNIGTLAGYPIVEAKALVYKDLAGVNAIPLCVDQIGCNELIKTIKSISPSFSGIHLEDIKAPECFYIEEELKKTLNIPVYHDDQHGTAIAVLGALYNGAKVVNKDFLKLKVLILGAGASGIATAKLLLKAGIEDIILVDKNGALVNGDETLNAPQKEMAKITNKEFKKGTLKEVIKGRDVFIGLSEGNLVTKEMVESMNEDPIIFALANPTPEIKPEIAKEAGARVIATGGPSYPNQINNILVFPGLFKGLLEAKATDVTCDVMIAVGKKLASLVENPTAEKIIPGVFDGDIVKSVSETVVKNIEN

SEQ ID NO: 9245 - protein, 619 aa, Zea mays
MSSISRNLRRSLAPDRLRRLSQHPREYVTSECHRPVVLHKRGPDILHDPWFNRGTAFSMTERDRLGLRGLLPPNVVSSQQQIDRFMLDLKRLQRYARDGPSDTYPLAKWRILNRLHDRNETMYYKVLIDNIEEYAPIVYTPTVGLVCQNYSGLFRRPRGMYFSAEDRGEMMSMVYNWPADQVDMIVVTDGSRILGLGDLGVHGIGIAIGKLDLYVAAAGINPQRVLPVMIDVGTNNEKLLKDPLYLGLQEHRLEGDEYVSVIDEFMEAVFTRWPNVIVQFEDFQSKWAFRLLQRYRKTYRMFNDDVQGTAGVAIAGLLGAVRAQGRPMIDFPKQRIVVAGAGSAGIGVVNAASRTMARMLGNNDVAFESARSQFWIVDAHGLITEDREDIDPDARPFARRKSELGHQGLSEGASLVEVVKKVKPDVILGLSAVGGLFSKEVLEALKDSSSSRPAIFAMSNPTKNAECTPGEAFSILGEKVIFASGSPFHDVDLGDGKIGHSNQGNNMYLFPGIGLGTLLSGARVISDGMLQAAAERLASYMKEEEVLEGIIYPPISRIRDITKEVAAAVVREAVAEDLAEGYRDMDARELARLSEEETNEYVKTNMWSPVYPTIIYKKD

SEQ ID NO: 9246 - protein, 496 aa, Mentha x gracilis
MELDLLSAIIILVATYIVSLLINQWRKSKSQQNLPPSPPKLPVIGHLHFLWGGLPQHVFRSIAQKYGPVAHVQLGEVYSVVLSSAEAAKQAMKVLDPNFADRFDGIGSRTMWYDKDDIIFSPYNDHWRQMRRICVTELLSPKNVRSFGYIRQEEIERLIRLLGSSGGAPVDVTEEVSKMSCVVVCRAAFGSVLKDQGSLAELVKESLALASGFELADLYPSSWLLNLLSLNKYRLQRMRRRLDHILDGFLEEHREKKSGEFGGEDIVDVLFRMQKGSDIKIPITSNCIKGFIFDTFSAGAETSSTTISWALSELMRNPAKMAKVQAEVREALKGKTVVDLSEVQELKYLRSVLKETLRLHPPFPLIPRQSREECEVNGYTIPAKTRIFINVWAIGRDPQYWEDPDTFRPERFDEVSRDFMGNDFEFIPFGAGRRICPGLHFGLANVEIPLAQLLYHFDWKLPQGMTDADLDMTETPGLSGPKKKNVCLVPTLYKSP

SEQ ID NO: 9247 - protein, 494 aa, Mentha x gracilis
MELNLLLVIIILVATYTVSLLNKQWRKPKSQQKQPPKLPVIGHLHLLWGGLPPQHLLRSIAREYGPVAHVQLGEVYSVVLSSAEAAKQAMKVLDPNFADRFDSVGSRIMWYDNDDIIFSPYNDHWHQMRKICVSELLSPKNVRSFGFIRQEEIERLIRVMKQSEGAPVDVTEEVSKMSCFVVCRAAFGSVLKDQGSLAELVKESLAMASGFELKDLYPSSWLLNLLSFNNYRLKRMRRRLDHVLDGFLEEHRVKKNGEFGGEDIVDVLFRMQKDSNIKIPITSNGIKGFIFNTFSAGAEASSTTISWALSELMRNPAKMAKVQAEVREALKGKTSVDLSEMQELKYMRSVVKETLRLHPPFPLIPRQSREECEINGFYIPARTRILINAWSIGRDPLYWEDPDTFRPERFDEVSRDFMGNDFEFIPFGAGQRICPGLHFGLANVEIPLAQLLYHFDWKLPQGMTDADLYVAGTPGLSGPRKKNVFLVPTIHKSR

SEQ ID NO: 9248 - protein, 303 aa, Triticum aestivum
  misc_feature (221)..(221): Xaa can be any naturally occurring amino acid
MKTLLILTILAMATTIATANMQVDPSGQVQWPQQQPFPQPQQPFCQQPQRTIPQPHQTFHHQPQQTFPQPQQTYPHQPQQQFPQTQQPQQPFPQPQQTFPQQPQLPFPQQPQQPFPQPQQPQQPFPQSQQPQQPFPQPQQQFPQPQQPQQSFPQQQQPAIQSFLQQQMNPCKNFLLQQCNHVSLVSSLVSIILPRSDCQVMQQQCCQQLAQIPQQLQCAAXIHSVAHSIIMQQEQQQGVPILRPLFQLAQGLGIIQPQQPAQLEGIRSLVLKTLPTMCNVYVPPDCSTINVPYANIDAGIGGQ

SEQ ID NO: 9249 - protein, 192 aa, Aspergillus nidulans FGSC A4
MVVATIKCVVVGDGAVGKTCLLISYTTNKFPSEYVPTVFDNYAVTVMIGDEPYTLGLFDTAGQEDYDRLRPLSYPQTDVFLVCFSVTSPASFENVREKWFPEVHHHCPGVPCLIVGTQVDLRDDPAVRDKLARQKMQPIRKEDGDRMAKDLGAVKYVECSALTQYKLKDVFDEAIVAALEPAPKKRSRCVLL

SEQ ID NO: 9250 - protein, 202 aa, Hypocrea jecorina
MNPEYDYLFKLLLIGDSGVGKSCLLLRFADDTYTESYISTIGVDFKIRTIELDGKTVKLQIWDTAGQERFRTITSSYYRGAHGICVVYDVTDMDSFNNVKQWLQEIDRYATEGVNKLLVGNKSDMSDKKVVEYTVAKEFADSLGIPFLETSAKNASNVEQAFLTMARQIKERMGTTTANNTKPSVHVGQGQGVGNSSSSSCC

SEQ ID NO: 9251 - protein, 346 aa, Triticum aestivum
MLGVGEMNHRLEANGHGKPVAMAKQEQLQQRGDHEETLWYEEEIHDDLKICYALNSVLHRGKSKYQEIALVDTKCFGKALIIDGKMQSADADEFIYHESLIHPPLLFHPNPETVFIMGGGEGSAAREALKQKTVQRVVMCDIDEEVVHFCRTHLSVNWDAFASDKLCLVINDARAELEKMREEKFDVIVGDLADPMEGGPCYQLYTRSFYEQVLKPRLHDGGIFVTQAGPAGVLTHKEVFSSIYNTLRHVFKHVKAYTAHVPSLADTWGWVMASDHPFTLTAQQINERITDRIDGELSYLDGETLISSTTLNKTVFHSLLNERHVYTEDDARFVHGHGTGRAAMLN

SEQ ID NO: 9252 - protein, 497 aa, Spinacia oleracea
MAFPIPARQLFIDGEWREPIKKNRIPVINPSTEEIIGDIPAATAEDVEVAVVAARRAFRRNNWSATSGAHRATYLRAIAAKITEKKDHFVKLETIDSGKPFDEAVLDIDDVASCFEYFAGQAEALDGKQKAPVTLPMERFKSHVLRQPLGVVGLISPWNYPLLMATWKIAPALAAGCTAVLKPSELASVTCLEFGEVCNEVGLPPGVLNILTGLGPDAGAPLVSHPDVDKIAFTGSSATGSKVMASAAQLVKPVTLELGGKSPIVVFEDVDIDKVVEWTIFGCFWTNGQICSATSRLLVHESIAAEFVDKLVKWTKNIKISDPFEEGCRLGPVISKGQYDKIMKFISTAKSEGATILYGGSRPEHLKKGYYIEPTIVTDISTSMQIWKEEVFGPVLCVKTFSSEDEAIALANDTEYGLAAAVFFNDLERCERITKALEVGAVWVNCSQPCFVQAPWGGIKRSGFGRELGEWGIQNYLNIKQVTQDISDEPWGWYKSP

SEQ ID NO: 9253 - protein, 204 aa, Berberis gilgiana
KRRNGLLKKAYELSVLCDAEVALIVFSARGRLYEYANNSVKTTIERYKKACSDSTNTGSVSEANAQFYQQEATRMRQQIGNLQNANRHLLGQDLSSVSVKDLKQMETRLEKGISRIRSKKNELLFAEIEYMQKREIDLQNDNMYLRAKIAENERAQQQMNLMPGNEYETITSAPYDSRNFLQVNLLPESNNQYSRSDQTALQLG

SEQ ID NO: 9254 - protein, 202 aa, Akebia quinata
RRNGLLKKAYELSVLCDAEVALVVFSNRGRLYEYANNSVKTTIERYKKACIDSSNSGSVSEANAQFYQQESLKLRQQIGNLQNLNRHLMGEALGSMSIKELKQLETRIEKGISRIRSKKNELLFAEIEYMQKREIDLQNDNMYLRAKIAENERAGQHMSLMPGNEYEVMSSAPFDSRNFLQVNLLEPNNHYSHTDQIALQLG

SEQ ID NO: 9255 - protein, 309 aa, Glycine max
MISPQTRHSFGSLLLLFLVLLQKRFQMGLLEENPNHSKTILIREVWASNLESEFQLIRQVIDDYPFISMDTEFPGVVFRPHTVDPTKPYLPPSVHYRFLKSNVDALNLIQIGLTLSDSNGNLPHLGTANRFIWEFNFRDFDVERDAHAPDSIDLLRRQGIDFRRNAAEGVDSYLFAELVMSSGLVCNDSVSWVTFHSAYDFGYLVKILTRRSLPSGLEEFLNMLRAFFGNNVYDIKHMMRFCDTLHGGLDRLARTLNVDRAVGKCHQAGSDSLLTWHAFQKMRDIYFVTDGPQKHAGVLFGLELTCSTS

SEQ ID NO: 9256 - protein, 496 aa, Magnaporthe grisea 70-15
MSLVTELKTPVTGAYQQPTGVFINNEWVEGVDKKTFETINPSTEEVICSVSEATEKDVDIAVKAARKAFEGEWKQTAPGQRSKLLTNLAELVEKNLDLLAAVESLDNGKSLAMAKGDVGAVAGCLRYYGGWADKIEGKTIDIAPDMFHYTRSEPIGVCGQIIPWNFPLLMLAWKLGPALATGNTIVLKTAEQTPLSALVFANLIKEAGFPAGVVNIISGFGKVAGAAISAHMDIDKVAFTGSTVVGRTIMKAAASSNLKKVTLELGGKSPNIIFNDADIEAAVSWVNFGIYYNHGQCCCAGSRIYVQEGVYDKFVAAFKERAEKNKVGDPFKEDTFQGPQVSELQFNRIMEYIKSGKEEGATVETGGERHGDKGYFIQPTIFSNVRPEMKIMKEEIFGPVVAMAKFKTEEEVIALANDTNYGLAAAVHTKDLNTSIRVSNALKAGTVWVNCYNMLHHQLPFGGFKESGIGRELGEAALANYTQNKSVAIRLGGPIF

SEQ ID NO: 9257 - protein, 504 aa, Aspergillus nidulans FGSC A4
MAQPVQLTAPNGVSYSQPTGLFINNEFVPAASGKTLTTVNPYDESIIATVSSAGPKDVDRAVAAARQAFASEWRGLTPSERGLLLLRLADLCDRDKEILATIDAWDNGKPYEQALGEDIAEVIAVFRYYGGWADKIHGSTIDTGDAKFAYTRHEPLGVCGQIIPWNYPVMMAAWKLGPALACGNTVVLKAAEQTPLSVLYLATLIKEAGFPAGVVNLLNGEGASAGAAIAGHPGVDKIAFTGSTNTGRVIMKAAAGNLKAITLETGGKSPLLVFDDANIDQAVKWSHVGIMSNMGQICTATSRIYVQETIYDTFVEKFKQYTIENSKVGSQFDPSVTHGPQISKAQRDRILSYVQSAKSEGAQLVLGDEPVSEKGYFVPPTIFKNTTREMSAVREEIFGPFVVIQSFSTQQDAINKANDTEYGLGAAVFTENITRAHRVAAAIQAGMVWINSSQDSHFAIPFGGYKQSGIGRELGEYALAAYTQVKAVHGKFSLPLEFNLGTWL

SEQ ID NO: 9258 - protein, 364 aa, Aspergillus oryzae
MSSYNIVVFGGDHCGPEVTAEAIKVLRAVEKNRDVTFNLQDHLLGGASIDATGSPLTDEALNAAKNADAVLLGAIGGPKWGTGAVRPEQGILKLRKEMGTFGNLRPCNFAAPSLVESSPLRADVCRGVNFNIIRELTGGIYFGERKEDDGSGYAMDTEPYSRAEIERIIRLAAHLALQHDPPLPVWSLDKANVLATSRLWRKVVTEVMAKEFPQLKIEHQLIDSAAMIMVKNPRQLNGIVVTSNLFGDIISDEASVIPGSLGLLPSASLSGIPDGNSKVNGIYEPIHGSAPDIAGKGIVNPVAAILSVAMMMQYSFGLFAEARAIEQAVSNVIESGVRTGDIGGKATTAEVGDAVAAELEKLLK

SEQ ID NO: 9259 - protein, 337 aa, Thermoproteus tenax
MKIGVLTGGGDAPGLNIAVYTFVKLAERKHEVYAIYHGWRGLLNKEVKRVSSRDLLDFAFSGGTYIRTSRTNPFKDEERARLLESNVKELGLDVVVAIGGDDTLGAAGEAQRRGILDAVGIPKTIDNDVYGTDYTIGFDSAVNAAIEATESFKTTLISHERIGVVEVMGREAGWIALFTGLSTMADAVLIPERPASWDSVAKRVKEAYNERRWALVVVSEGIKEYGGPKDEYGHSRLGGVGNELAEYIERSTGIEARAVVLGHTIRGVPPTAFDRILAVRYATAAYEAVENGRYGVMVAYSNGDIAYVPIVDVVGKNRLVSGYWMRLYETYWPDLAG

SEQ ID NO: 9260 - protein, 372 aa, Ustilago maydis
MPSLASRSGPPAASSSDPKTSSSSTEKVAKSVGSASPLRSSPNRPYALSDFEVVETLGTGTFGRVLLVRLKDRDVADRSAYFALKVLAKTDVIKLKQVSHINSERCILTKVDHPFLVNMIASFQDSKNCYMLMEYVVGGEIFSYLRRAGHFSADVARFYISTIVLAIEYLHSNKVVYRDLKPENLLIDSNGYTKITDFGFAKEVEDRTWTLCGTPEYLAPEIIQCSGHGSAVDWWSLGILLFEMLAGYPPFYDPNPILIYEKILAGNLVFPEEIDPLSRDLISSLLTADRSRRLGNLRGGANDVKNHPWFHGVDWKALQEGRILPPIVPYLGRPGDTSNFSKYEPARPSAMPGLYGADSGHHDLYADLFPDF

SEQ ID NO: 9261 - protein, 353 aa, Gibberella zeae PH-1
MSSNLSFVLNKPGDVSFEERPKPSLASPHDVLVAVNYTGICGSDVHYWVHGSIGKFVVEDPMVLGHESAGTVVEVGDKVKTLKAGDRVALEPGYPCRRCQNCLAGKYNLCPDMVFAATPPYHGTLTGFWSAPADFCFKLPDNVSLQEGALIEPLAVAVHIVKQARVKPGDSVVVMGAGPVGLLCAAVAKAYGASKIVSVDIVQSKLDFAKDFASTHVYASQRIAPEENAKNICDLAGLPDGADVVIDASGAEPSIQASIHVLKNGGSYVQGGMGKADITFPIMAFCIKEATASGSFRYGAGDYPLAVELVATGKVDVKKLITGIVDFKQAEEAFKKVKEGEAIKVLIKGPNEQ

SEQ ID NO: 9262 - protein, 407 aa, Vibrio harveyi
MDIILGVVMFTLIVLALVLVILFAKSKLVPTGDITISVNDDPSLAIVTQPGGKLLSALAGAGVFVSSACGGGGSCGQCRRKIKSGGGDILPTELDHITKGEAREGERLACQVAMKTDMDIELPEEIFGVKKWECTVISNDNKATFIKELKLQIPDGESVPFRAGGYIQIEAPAHHVKYADYDIPEEYREDWEKFNLFRYESKVNEETIRAYSMANYPEEHGIIMLNVRIATPPPNNPDVAPGIMSSFIWSLKEGDKCTISGPFGEFFAKDTDAEMVFVGGGAGMAPMRSHIFDQLKRLHSKRKMSFWYGARSKREMFYVEDFDGLAADNDNFVWHCALSDPLPEDNWDGYTGFIHNVLYENYLRDHEAPEDCEYYMCGPPMMNAAVIGMLKDLGVEDENILLDDFGG

SEQ ID NO: 9263 - protein, 198 aa, Triticum aestivum
  misc_feature (17)..(17): Xaa can be any naturally occurring amino acid
  misc_feature (70)..(70): Xaa can be any naturally occurring amino acid
  misc_feature (168)..(168): Xaa can be any naturally occurring amino acid
  misc_feature (191)..(192): Xaa can be any naturally occurring amino acid
SNTDHQTLSLKLKHPTXSSHSSLSSSTKLDCSLPSTPALAMDMGMDLSGSSPSSSVSSSPEHASGRASPXKRPAGRTKFRETRHPVYRGVRRTGNAGRWVCEVRVPGKRGARLWLGTYLTAEAAARANDAAMLALGGRSARCLNFADSAWLLAVPSALSDLADVRRAXLQAVADFQRREAANGLIARTVAXXTPSSAH

SEQ ID NO: 9264 - protein, 414 aa, Arabidopsis thaliana
MATHSSRSENKDAGEEDELRRRNPYEVLGIPSNSTDQEIKSAYRRMALRYHPDKNPDDPVAAEMFKEVTFAYEVLSDPENRRLYDTTGSEAVGPENEDLELDLSSLGAVNTIFAALFNKLGVQIKTTVSANLLGEALNGTVTTLPLMVGQVVSRKVEKQSAHFYSVTLTEEEAQDGLICKVHSSAKNKFKLLYFDQVENGGLSLALQEDSRKTGKLSTAGLYFFGFPVYRFDHRVNSRALSRDPETGFFKRLDAFQPFEITELKAGSHVFAVYGDNFFKSVSYTLEIFSSAPFGNEKESLRSTEAQIVSKRTELLKFEAEYHEVFAQFTEMASKCTGEVQEIDELLKRRNEICAAYTIFPPTKQGSSKSRSWSKKKSSLLMEPREEGEVAVREEGGVKKKKWYNIQLRQDKKKN

SEQ ID NO: 9265 - protein, 107 aa, Erysimum cheiri
LGLWDTAGQEDYSRLRPLSYRGADIFVLAFSLISKASYENVLKKWMPELRRFAPNVPIVLVGTKLDLRDDKGYLADHTNVITSNQGEELRKQIGAAAYIECSSKTQQ

SEQ ID NO: 9266 - protein, 497 aa, Mentha x gracilis
MELQISSAIIILVATFVASLLIKQWRKSESQQNLPPGPPKLPLVGHLHLLWGKLPQHAMADMAKKYGPVTHVQLGEVFSVVLSSREATKEAMKLLDPACADRFESIGTRIMWYDNDDIIFSPYSDHWRQMRKICVSELLSARNVRSFGFIRQDEMSRLLRHLQSSAGETVDMTERIATLTCSIICRAAFGAIINDHEELVELVKDSLSMASGFELADLFPSSKLLNLLCWNKSKLWRMRRRVDTILEAIVEEHKLKKSGEFGGEDIIDVLFRMQKDSQIKVPITTNAIKAFIFDTFSAGTETSSTTTLWVMAELMRNPAVMAKAQAEVRAALKGKTSVDVDDVQELKYMKSVVKETMRMHPPIPLIPRSCREECEVNGYKIPNKARIMINVWSMGRNPLYWEKPETFWPERFDQVSRDFMGSDFEFIPFGAGRRICPGLNFGLANVEVPLAQLLYHFDWKLAEGMKPSDMDMSEAEGLTGIRKNNLLLVPTPYNPSS

SEQ ID NO: 9267 - protein, 506 aa, Brassica napus
MTSVNVKLLYHYVITNLFNLCFFPLTAIVAGKAYRLTIDDLHHLYYSYLQHNLITIAPLFAFTVFGSVLYIATRPKPVYLVEYSCYLPPTHCRSSISKVMDIFYQVRKADPSRNGTCDDSSWLDFLRKIQERSGLGDETHGPEGLLQVPPRKTFAAAREETEQVIIGALENLFKNTNVNPKDIGILVVNSSMFNPTPSLSAMVVNTFKLRSNVRSFNLGGMGCSAGVIAIDLAKDLLHVHKNTYALVVSTENITYNIYAGDNRSMMVSNCLFRVGGAAILLSNKPGDRRRSKYELVHTVRTHTGADDKSFRCVQQGDDENGKIGVSLSKDITDVAGRTVKKNIATLGPLILPLSEKLLFFVTFMGKKLFKDKIKHYYVPDFKLAIDHFCIHAGGRAVIDVLEKNLALAPIDVEASRSTLHRFGNTSSSSIWYELAYIEAKGRMKKGNKVWQIALGSGFKCNSAVWVALNNVKASTNSPWEHCIDRYPVKIDSDSGKSETRVQNGRS

SEQ ID NO: 9268 - protein, 510 aa, Ralstonia solanacearum GMI1000
MNRGNALLVLAVFVVASCGLAYELIAGALASYLLGDSILQFSSIIGAYLFAMGIGSWVSRYVADDALLARFVDLELLVGLFGGVSAAALFLLFALESAPFRLVLYALVTVIGVLVGMEIPLVMRMLHRRQAKFSDLVSRVLTFDYLGALAVSLLFPLVLAPRLGLVRTGFLFGLCNTAIAVWTLWHFRAELGLSARLRGAMAWRAGMVGAALLAGFAASDRLTHWSERALFGDEIIHAISSPYQRLVVTRWKDDLRLYINGNLQFSSRDEYRYHEALVLPALESVRGARRVLVLGGGDGLALRQILKYPQVEHVTLVDLDPRMTSLFSHAEALVALNQHAFSDPRVTVVNADAGQWLQTAADMFDVAIVDFPDPSNFSIGKLYSVPFYRLLSRHVADTGLVVIQATSPYFAPRSYWCVDATLKEAGYRTWPYHALVPSFGEWGFILAAPGRADFRPPTTYRVPTRFLDADTTHQMFSFAPDMPRPQVEPNRLNNQSLVRYFEEDWHGVLR

SEQ ID NO: 9269 - protein, 262 aa, Fritillaria cirrhosa
MSSAESREENVYLAKLAEQAERYEEMVEFMEKVAKTVETEELTVEERNLLSVAYKNVIGARRASWRIMSSIEQKEESKGNDQNVKLIKGYRHKVEEELAKICNDILTVIDKHLIPSSGSGEATVFYYKMKGDYYRYLAEFKNEHERKEAADQSMKAYQAASNTANTDLPSTHPIRLGLALNFSVFYYEIMNSPERACHLAKQAFDEAIAELDTLSEESYKDSTLIMQLLRDNLTLWTSDLPEDGGDEGFKGEEAKAAGDDEH

SEQ ID NO: 9270 - protein, 369 aa, Candida albicans SC5314
MFRQVTKSAPVIRTTQRLFARSYIAGQFTGSKGSDGKYTVTLIEGDGIGPEISQAVKDIYAAADVPIHWEPVDVTPLLIDGKTTLPQPAVDSVNKNLVALKGPLATPVGKGHTSMNLTLRRTFNLFANVRPCKSIVGYETPYENVDTVLIRENTEGEYSGIEHTIVPGVVQSIKLITKPASEKVIRYAFEYAKSINKPHVLVVHKASIMKLSDGLFVNTAKEVAQEYPDVSLDFELLDNTSLRLTADPSQYKNVVMVMPNLYGDIMSDLSSGLIGGLGLTPSGNMGNKVSIFEAVHGSAPDIAGKGLANPTALLLSSCMMLRHMSLNSDADRIENAVLKTIASGPDNRTGDLKGTATTTRFTEEVIKNL

SEQ ID NO: 9271 - protein, 465 aa, Streptococcus pneumoniae
MFKSNHERRMRYSIRKFSVGVASVAVASLFMGSVVHATEKEGSTQAATSFNRGNGSQAEQRGELDLERDKAMKAVSEYVGKMVRDAYVKSDRKRHKNTVALVNQLGNIKNRYLNEIVHSTSKSQLQELMMKSQSEVDEAVSKFEKDSFSSSSSGSSTKPETPQPENPEHQKPTTPSPDTKPSPQPEGKKPSVPDINQEKEKAKLAVVTYMSKILDDIQNIICRKKNIVRLLALIKELDELKKQALSEIDNVNTKVEIENTVHKIFADMDAVVTKFKKGLTQDTPKEPGNKKPSAPKTGMQPSPQPEVKPQPEKPKPEVKPQLEKPKPEVKPQPEKPKPEVNPQPEKPKPEVKPQPEKPKPEVKPQPEKPKPEVKPQPEKPKPEVKPQPEKPKPDSKPQADDKKPSTTNNLSKDKQPSNQASTNEKATNKPKKSLPSTGSISNLALEIAGLLTLAGATILAKKRMK

SEQ ID NO: 9272 - protein, 181 aa, Solanum tuberosum
MASSIVSSAAVATRSNVAQASMVAPFTGLKSAASFPVTKKNNNVDITSLASNGGRVRCMQVWPPINMKKYETLSYLPDLSDEQLLKEVEYLLKNGWVPCLEFETEHGFVYRENHKSPGYYDGRYWTMWKLPMFGCTDATQVLAEVQEAKKAYPQAWIRIIGFDNVRQVQCISFIAYKPEGY

SEQ ID NO: 9273 - protein, 516 aa, Glycine max
MDYLLLLPLIITIVWINIHVFISSFKPLKSSKNPPGPRPFPIIGNILELGNQPHQALAKLSQIYGPIMSLKLGKTTTIVISSPQVAKEVLQKHDQIFANRTVPDTLRALDHHILSVAWMPPLPQWRTLRRVCATKVFSSQQLDSTQVFRQRKVQDLMDYVKERCEKGEALDIGEASFTTVLNSISNTFFSMDLAYYTSDKSQEFKDIVWGIMEEAGRPNVVDFFPIFRLLDPQGVRRRMNGYFGKLIAFFDGLIEERLRLRASENESKACNDVLDTVLELMLEENSQVTRPHVLHLFLDLFVAGIDTTSSTIEWAMAELLRNPEKLEIVRKELQQVLAKGEQLEESHISNLAYLQAVVKETFRLHPPIPMLVPHKSEVDVELCGFMVPKSAQILVNVWATGRDSSIWTNPNQFTPERFLESDIDFKGQDFELIPFGAGRRICPGLPLASRTVHIVLASLLYNYNWKLTDGQKPEDMDMSEKYGITLHKAQPLLVIPIQAYYQGRLHACNQILNKLS

SEQ ID NO: 9274 - protein, 204 aa, Helleborus orientalis
KRRNGLLKKAYELSVLCDAEVALIVFSTRGRLYEYSNNSVKKTIERYKKASTDSSGSGSVSEVNAQYYQQEASKLRNQIATLQNSNRNLLGEQLSNLNIRELKQIEKKIETGINKIQSKKNELLFAEIEYMQKREADLQNDNMYLRAKISENERTQQHMSLMPGTNDYEVISSGAFDSRNFLQVNLLGSNDTYSRSDQTALQLG

SEQ ID NO: 9275 - protein, 216 aa, Helleborus orientalis
IENTTNRQVTFCKHRNGLLKKAYELSVLCDAEVALIVFSSRGRLYEYSNNSVKKTIERYKKASTDSSNSGSASEANAQYYQQEAAKLRNQIAALQNSNRNLLGEQLSNLSIRELKQIEKKIETGINKIRSKKNELLFAEIEYMQKREVDLQNDNMFLRAKISENERTQQHMSLMPGTNNYEVISSGPFDSRNFLQVNLLESNNNYSRSDQTALQLG

SEQ ID NO: 9276 - protein, 214 aa, Aquilegia alpina
IENTTNRQVTFCKRRNGLLKKAYELSVLCEAEVALIVFSNRGRLYEYANNSVRKTIDRYKKTCGEGSSTLTVSEANLLFYQQESSKMKQQIEILQNSNRHLMGEALSCLSIKELKQLESRLEKGISRIRSKKNEMLLAEIEFMQKREIELHNDNIYLREQITANERAQQHMNSLPGNVYEAITSAPYNSRDFLQVNLRESKPNQYCDSTALQLC

SEQ ID NO: 9277 - protein, 375 aa, Pseudomonas aeruginosa PAO1
MAEAKVLSGAGLRGQVAGQTALSTVGQEGAGLTYRGYDVRDLAAAAIFEEVAYLLLYGELPNKQQLDAYLKKLQGQRDLPQALKEVLERIPKDAHPMDVMRTGASVLGTLEPELSFDQQRDVADRLLAAFPAIMTYWYRFTHEGQRIDCNSDEPTIGGHFLALLHGKKPSELHVKVMNVSLILYAEHEFNASTFTARVCASTLSDLYSCVTGAIGSLRGPLHGGANEAAMELIERFSSPQEATAELLKMLERKDKIMGFGHAIYKDSDPRNEVIKGWSKQLADEVGDKVLFAVSEAIDKTMWEQKKLFPNADFYHASAYHFMGIPTKLFTPIFVCSRTSGWTAHVFEQRANNRIIRPSAEYTGVEQRAFVPLEQR

SEQ ID NO: 9278 - protein, 203 aa, Aquilegia alpina
KRRNGLLKKAYELSVLCEAEVALIVFSSRGRLYEYSNNSVKKTIERYKKASTDSNNSGSVSEANAQFYQQEATKLRNQIASLQNHNRNLLGESLSNLNIRELKQIEKKIEGGISKIRAKKNELLFAEIEYMQKRELDLQTDNKYLRAMIAANERAPEHMNLMPANEYHALSSAPFDSRNFMPANLLDHNNNYSRSDQTTLQLG

SEQ ID NO: 9279 - protein, 203 aa, Pyrococcus furiosus DSM 3638
MAHGPRYRVPFRRRREGKTNYRKRLKLLKSGKPRLVVRKSLNHHIAQIIVYDPKGDRTLVSAHTRELIRDFGWKGHCGNTPSAYLLGLLIGYKAKQAGIEEAILDIGLHPPVRGSSVFAVLKGAVDAGLNVPHSPEIFPDEYRIRGEHIAEYAKMLKEQDEEKFRRQFGGYLVKGLDPEKLPEHFEEVKARIIEKFEGEGARE

SEQ ID NO: 9280 - protein, 203 aa, Clematis integrifolia
KRRNGLLKKAYELSVLCDAEVALIVFSNRGRLYEYANNSVRKTIDRYKKTCSDPQTALTVSEANTMFYQQETTKMKQQIEILQNSNRHLMGEALSCLSIKELKQLESRLEKGLGRIRSKKNEMLLSEIEYMQKREIDLHNDNLYLRAKISDNEKAQHNMNVLPGNVYEAMTSAPYDARNFLQVNLPDTKEHPYCSGSTALQLC

SEQ ID NO: 9281 - protein, 75 aa, Brassica napus
  misc_feature (3)..(3): Xaa can be any naturally occurring amino acid
  misc_feature (13)..(13): Xaa can be any naturally occurring amino acid
  misc_feature (23)..(23): Xaa can be any naturally occurring amino acid
  misc_feature (25)..(25): Xaa can be any naturally occurring amino acid
  misc_feature (33)..(33): Xaa can be any naturally occurring amino acid
  misc_feature (38)..(38): Xaa can be any naturally occurring amino acid
  misc_feature (43)..(43): Xaa can be any naturally occurring amino acid
  misc_feature (56)..(57): Xaa can be any naturally occurring amino acid
  misc_feature (71)..(72): Xaa can be any naturally occurring amino acid
  misc_feature (74)..(74): Xaa can be any naturally occurring amino acid
MAXSMLSSAAVVXSPAQATMVAXFXGLKSSAAXPVTRXANNDXTSITSNGGRVSCXXVWPPVGKKKFETLXXLXD

SEQ ID NO: 9282 - protein, 384 aa, Senecio vulgaris
MHNNSSNSRELIKKWPRSNKEAIDSARSNVFKESESLEGTCAKIGGYDFNNGIDHSKLLKSMVSTGFQASNLGDAMIITNQMLDWRLSHDEVPENCSEEERKNRESVKCKIFLGFTSNLISSGVRETICYLTQHRMVDVLVTTTGGIEEDFIKCLASTYKGEFSLPGADLRSKGLNRIGNLIVPNDNYIKFEDWIIPIFDQMLIEQKTQNVLWTPSKMIARLGKEINNETSYLYWAYKNNIPVFCPSITDGSVGDMLYFHSVSNPGAGLVVDIVQDVIAMDNEAVHASPQKTGIIILGGGLPKHHICNANMMRNGADFAVFINTAQEYDGSDSGARPDEAVSWGKISSTGKAVEVHCDATIAFPLLVAETFAVKKEKASKVNGF

SEQ ID NO: 9283 - protein, 376 aa, Hordeum vulgare subsp. vulgare
MDKISAPFFSGTSPAAASVAGVDEDDRLCFQAQELMFAYNISMVLRAAIQLGLLDALSAAGGKALTPNELVENVETSSNKAEAAAAVDRILRYLSCFNVVTCSSEAAGPDGTLVRRYTTGPLCRWLTKDRGDGTLSPFAVFVVDPDHLFPWHHIAEAVTAGGPSAFERTQKWPYYEYMGKNQRLGTLFDNAMAQHSVILVTKMLERFKGFDGVQRLVDVGGGTGSTLGMITSKYKHMTGINYDLPHVIAQGLPLPGVEHVAGDMYESIPTGDAVLLQWITLMLNDDEFVKILSNCHNALPKDGKVIVVDGILPENPDSSLTARDAFTLDIIMFVLFKGAKQRTEKEFARLAKQAGFTGGIKKTYIFFNFYALEFTK

SEQ ID NO: 9284 - protein, 189 aa, Brassica napus
  misc_feature (160)..(160): Xaa can be any naturally occurring amino acid
MAFAGTTQKCMACDKTVYLVDKLTADNRVYHKACFRCHHCKGTLKLSNYNSFEGVLYCRPHFDQNFKRTGSLEKSFEGTPKIGKPDRPLEGERPAGTKVSNMFGGTREKCVGCDKTVYPIEKVSVNGTLYHKSCFKCTHGGCTISPSNYIAHEGKLYCKXHHIQLIKEKGNLSQLEGGDNAAKDKVDAA

SEQ ID NO: 9285 - protein, 201 aa, Thermosynechococcus elongatus BP-1
MSNPRENIIWHQATVTRARREQLNGHKSCVLWFTGLSGAGKSTLAHAVEERLHQLGYRTFVLDGDNVRHGLCSDLGFTESDRKENIRRIGEVAKLMMEAGLIVMTAFISPFRADREAVRNRMPHGDFLEIYCQASLEVCEARDVKGLYKRARAGEIKNYTGIDSPYEPPLKPELIVNTECLTLEESVGAVLRMLQERGVVQ

SEQ ID NO: 9286 - protein, 549 aa, Zea mays
MARRAASSLVSRCLLARAPAGAPPAAPSAPRRTVPADGMHRLLPGVLQRFSTAAAVEEPITPSVHVNYTKLLINGNFVDSASGKTFPTLDPRTGEVIAHVAEGDAEDINRAVAAARKAFDEGPWPKMTAYERFRILLRFADLIEKHNDELAALETWDNGKPYEQAAQIEVPMVARLMRYYAGWADKIHGLIVPADGPHHVQILHEPIGVAGQIIPWNFPLLMFAWKVGPALACGNTLVLKTAEQTPLSALYISKLLHEAGLPEGVVNVVSGFGPTAGAALASHMDVDKIAFTGSTDTGKIILELAAKSNLKTVTLELGGKSPFIIMDDADVDHAVELAHFALFFNQGQCCCAGSRTFVHERVYDEFVEKAKARALKRVVGDPFRKGVEQGPQIDDEQFKKILRYIRYGVDGGATLVTGGDRLGDKGFYIQPTIFSDVQDGMKIAQEEIFGPVQSILKFKDLNEVIKRANASQYGLAAGVFTNSLDTANTLTRALRAGTVWVNCFDVFDAAIPFGGYKMSGMGREKGVDSLKNYLQVKAVVTPIKNAAWL

SEQ ID NO: 9287 - protein, 461 aa, Methylococcus capsulatus str. Bath
MIPARGECLFLPLGGTGEIGMNLTLYGHDGAWIAVDMGITFGGDDFPDHAVMMPDPAFIAARRERLAGIVLTHGHEDHVGALPYLWKRLRCPVYATPFTAALARTKLARAGIDDAPLVEISPGERFRIGPFAVEYIVMTHSIPEPNTLLIGTPVGAVLHTGDWKLDDRPVVGRGYDHSRLSALRREPLLAMVCDSTNAMVPGRTGFEGDLYEPLLALGAEAAGRIVVTAFASNIARLVTLARVARSLGRRFGVVGPAMEHMVAVARATGHWPDDLPELVEARHIGHLPRSEVFAACTGSQGEPRSALALLAQDLHRDLSLDAGDTVVFSSRVIPGNERAVARIHQRLRETGVHLVTDADARVHVSGHPAQEDLRQLYEWVQPPAVIPVHGTPRHLAANAELAAACHVPHACVVQNGDICRLSRAGIQKLDGIETGRLFVQPDGRLAPVPKDILREMRTKVH

SEQ ID NO: 9288 - protein, 179 aa, Glycine max
  misc_feature (59)..(59): Xaa can be any naturally occurring amino acid
MASSMISSPAVTTVNRAGAGMVAPFTGLKSMAGFPTRKTNNDITSIASNGGRVQCMQAXWHPVGKKKFETLSYLPDLDDAQLAKEVEYLLRKGWIPCLEFELEHGFVYREHNRSPGYYDGRYWTMWKLPMFGCTDASQVLKELQEAKTAYPNGFIRIIGFDNVRQVQCISFIAYKPPGF

SEQ ID NO: 9289 - protein, 390 aa, Enterococcus faecalis V583
MLEEVLAIHQKNIGVLSLEATEAVLNHHDLAKMYTPGVAELSLMIAQNHELAREWTISGKLIAVITDGSAVLGLGNMGTQAGLPIVEGKALLYKNLAGVDAIPLALEQKSVDEMVQTIENLQNSFAGIHLEDISAPKCFEIEEKLQQRLNIPVYHDDQEGTAIVVLAGLINAAKIKGKPLNELRVVINGVGASGVATAKLCIQAGITHLTLVDRQGVLREEDPTLNPYQRALLRQVIKPSVENKDLATAVVNQDVFLGLSEADVLTPALIKSMNQDPIIFALANPKPEIEPALAQANGVRLLATGSSKYPNQVNNILVFPGLFKGLLAAKGRKVDVGLQMTVARSLAAMISEPTVEKFIPNVFDGGVVDTVFNAVLDYIKQEKTTAEEGT

SEQ ID NO: 9290 - protein, 387 aa, Ceriporiopsis subvermispora
MAFTSLLALVALAAITRAAPTTICPDGTRVSNHVCCDFIPLAQALQSTLYMGDCGEDAHETIRLTFHDAIAISQSQGPSAGGGADGSMLIFPTVEPFFHANAGIDDSVNNLIPFLDKFPTITAGDLIQFAGTVALSNCPGAPQLEFLAGRPNATAPAVDGLIPEPQDNVTHILERFADAGGFTPFEVVSLLASHTVARADKVDLTIDAAPFDSTPFTFDTQIFLEVLLKGVGFPGTDNNTGEVESPLPLGNNKQGGNETGEMRLQSDFALARDDRTACFWQGFVNEQEYMMSSFKAAMSKLAILGHNRNDLIDCSEVVPTPKPPVGKPASFPATTGPQDLQLTCKSERFPSLTIDHGAQETLIPHCSNGGQDCPTVQFTGPAGEDDS

SEQ ID NO: 9291 - protein, 152 aa, Triticum aestivum
GEEPFLQTIARALTPAGVLSNLAESMWLHTHLIQDMLSICREVFKGGVHYAWASVPTYPSGVIGFLLCAKDGPPVDFLTPVNPIEKIEGATKDGREMRFYNSEIHRAAFILPTFVKRELEAYSTSTEKEKPEKPTAKPVKMKVMRDSAITAS

SEQ ID NO: 9292 - protein, 614 aa, Triticum aestivum
  misc_feature (505)..(505): Xaa can be any naturally occurring amino acid
NVVLQFTVIVRNIPRGPSHSTSERVDEFFRRNHPDHYLGQQAVYNANRYAKLVKQKERLQNWLDYYQLKFERHPEKRPTGRTGCFGFCGRQVDQIDYYRARISELDKRIASERHRVLNDPKAVMPVSFVTFDSRWGAAVCAQTQQSKNPTQWLTNWAPEPRDVYWQNLAIPFFSLSIRKFLISIAVFALVFFYMIPIAFVQSLANLEGIERVAPFLRPVIEVKVVKSFLQGFLPGLALKLFLYILPTVLMIMSKVEGYVSLSSLERRTASKYYYFMLVNVFLGSIIAGTAFEQLDSFFHDPPSQIPRTIGVAVPMKATFFMTYIMVDGWAGIANEILRVKPLVIYHLKNMFIVKTERDRERAMDPRSISLGENLPSLQLYFLLGLVYAVVTPILLPFIIVFFAFAYLVYRHQIINVYNQEYESAAAFWPQVHSRIIASLLISHVTLFGLMSTMKAAYSTPLLIFLPLLTIWFHKYCKSRFEPAFRKYPLEEAMEKDRMEHASEPXLNLKTYLANAYLHPIFQMFEQEDQKEEATIEVRIDKSEHQQQQQQQHVRSSHSQYEEETSAQTHYHHEERTSSQYQYQYQHQYQYQHEETHMRSEQSPPHFVYHPGVEH

SEQ ID NO: 9293 - protein, 182 aa, Zea mays
VLIDMSVHTAYVNAIRGAQHFIYIENQYFLGSSFNWDSHRDVGEHKNLLLPYDHLKFPKFRTLKYSTLQSCATLCGEKIGSLRLPTKMTMQMMYEIIYKALKEVGLDGTYEPQDYLNFFCLGNREAEDTTCTSSGPFSASNPQKCPKLKERSMEGTRDTEIAMAAYQPQHTWANMLSAPRGQ

SEQ ID NO: 9294 - protein, 364 aa, Brassica napus
MGSTAETQITPVQVTDDEAALFAMQLASASVLPMVLKSALDLDLLEIMAKNSSPMSPSEIASKLQTKNPEAPVMLDRILRLLTSYSILTCSNRTIPGGDSVERIYGLGPVCKYLTKNEDGVSIAALCLMNQDKVLMESWYHLKDAVLDGGIPFNKAYGMSAFEYHGKDLRFNTVFNNGMSNHSTITMKKILETYKGFEGLTSLVDVGGGIGATLKMIVSKYPDLKGINFDLPHVIEEATSHPGIDHVGGDMFVSVPKGDAIFMKWICHDWSDEHCVKFLKNCYEALPEDGKVILAECILPETPDSSLSTKQVVHVDCIMLAHNPGGKERTEKEFEALAKGSGFKGINVACNAFGVYVIELLKKM

SEQ ID NO: 9295 - protein, 194 aa, Colletotrichum trifolii
MVVATIKCVVVGDGAVGKTCLLISYTTNKFPSEYVPTVFDNYAVTVMIGDEPYTLGLFDTAGQEDYDRLRPLSYPQTDVFLVCFSVTSPASFENVREKWFPEVHHHCPGVPCLIVGTQVDLREDPSVREKLSKQKMSPVRKEDGERMAKDLGAVKYVECSALTQYKLKDVFDEAIVAALEPPAPKKKSHKCLVL

SEQ ID NO: 9296 - protein, 115 aa, Glycine max
MAAFLRSKCSSVGRTLMGSVGNNLNGGINSSAETVTRPSHCDAISQQIRTFIQMRTNLKVVDNSGAKRVMCIQSLRGKKGARLGDMIIGSVKEAQPRGKVKKGDVVYGVVVRVRY

SEQ ID NO: 9297 - protein, 203 aa, Clematis integrifolia
KRRNGLLKKAYELSVLCDAEVALIVFSSRGRLYEYSNNSVRKTIERYKKASSDTSNTGSVSEANAQFYQNEAGKLRNQIASLQNNNKNLLGESLSNLSIRELKQLEKKIEGGITKIRSKKNELLFAEIEYMQKREIDLQNDNLYLRAKIADNERTQQQMNLMPGNEYEVISSAPFDSRNFLPVNLLEPNNSYSHCDQTTLQLG

SEQ ID NO: 9298 - protein, 499 aa, Candida albicans SC5314
MFKKALPLVSKLTTPKGITYNQPLGLFINNEYVHPKQQKTFEVISPSTEEKITDVYEALEEDIDTAVAAAQAAYHNGWAQGPPEQRSKVLFKLADLIEENAELLAQIETWDNGKSLQNARGDVALTAAYFRSCGGWADKILGSQINTGNTHFNYTQRVPLVCGQIIPWNFPLLMASWKLGPVLATGSTTVLKTAESTPLSALYLSQLLVEAGMPKGVINIVSGFGATAGAAIAKHPKIEKVAFTGSTATGKIIMKLAAESNLKKVTLELGGKSPNIVFNDADLDKTIQNLIVSIFYNSGEVCCAGSRLLIQSGVYDQVVEKFKEAAESVKVGNPFDEDTFMGAQVSDVQLSKILKYVESGKSQGATVVTGGARADGKGYFVKPTIFADVKKDMDIVREEIFGPVVTLIKFDTVDEAVELANDSDYGLAAGIHSADVNKCIDVANRVKAGTVWVNTYNDFHPMVPFGGFSASGIGREMGEEVLHEYTQVRAVRMKINPPN

SEQ ID NO: 9299 - protein, 137 aa, Brassica napus
GRVGDPDAGSNQGSGIAGAVFNLTTSIIGAGIMALPATMKVLGLALGLLLIVLIAVLSEISVELLVRFSSLYKSRSYGEVVQFALGKPARVLSEVCIVVNNGGFLVVYLIIMGDVMSGSLHHVGGLDQWLGNGFWDH

SEQ ID NO: 9300 - protein, 216 aa, Ranunculus ficaria
IENTTNRQVTFCKRRNGLLKKAYELSVLCEAEVALIVFSNRGRLYEYSNNSVKKTIERYKKHSTDSSNTGSVSEANAQFYQQEANKLRNQIATLQNSNKNLLGESLSNLSVRELKAIEKKIEGGIAKIRSKKNELLFAEIEYMQKREIDLQNDNMFLRAKIAENERTQQQHMSLMPVNDYEVISSAPYDSRNFLPVNLLDSNHNYSRNDQTTLQLG

SEQ ID NO: 9301 - protein, 133 aa, Triticum aestivum
  misc_feature (34)..(34): Xaa can be any naturally occurring amino acid
  misc_feature (70)..(70): Xaa can be any naturally occurring amino acid
  misc_feature (91)..(91): Xaa can be any naturally occurring amino acid
  misc_feature (100)..(101): Xaa can be any naturally occurring amino acid
  misc_feature (103)..(104): Xaa can be any naturally occurring amino acid
MAPAVMASSATTVAPFQGLKSTAGLPVGRRSSGXLSSVSNGGRIRCMQVWPIEGIKKFETLSYLPPLSTXALLKQVDYLIRSKWVPCLEFXAKVGFVLRXXHXXSPGYNERGEYWDNVESWMRHLTPIHATER

SEQ ID NO: 9302 - protein, 203 aa, Ranunculus ficaria
KRRNGLLKKAYELSVLCEAEVALIVFSNRGRLYEYANNSVRKTIDRYKKQCSDASTALTVSEANSLFYQQESSKMKQQIDILQNSNRHLMGEALSCLSIKELKQLESRLEKGLSRIRSKKNEMLLAEIEYVQKREIDLHNDNVYLRQKISENERAQQHMNSLPGNAYEAMTSAPYDARNFLQVNLSDNKDNHYGSSSTALQLC

SEQ ID NO: 9303 - protein, 200 aa, Saxifraga careyana
KRRNGLLKKAYELSVLCDAEVALIVFSTRGRLYEYANNNIRSTIERYKKANSDSLNTGDVVETNTQFYQHESVKLRQQIQMLQNSNRNIMGESLSSLTLKELKQLENRLERGITRIRSKKHEMLLAEIEYMQKREIDLENESIYLRAKIGEAESIEQANVAAANDLHAIQAYVAHNFFQPSLLDAEPSFGYPNKKSPRLG

SEQ ID NO: 9304 - protein, 506 aa, Zea mays
MAPPQTIPRRGLFIGGAWREPCLGRRLPVVNPATEATIGDIPAGTAEDVEIAVAAARDAFSRDGGRHWSRAPGAVRANFLRAIAAKIKDRKSELALLETLDSGKPLDEASGDMDDVAACFEYYADLAEALDGKQQSPISLPMENFKSYVLKEPIGVVGLITPWNYPLLMATWKVAPALAAGCTTILKPSELASVSCLELGAICMEIGLPPGVLNIITGLGPEAGAPLSSHSHVDKVAFTGSTETGKRIMISAAQMVKPVSLELGGKSPLIVFDDIGDIDKAVEWTMFGIFANAGQVCSATSRLLLHEKIAKKFLDRLVAWAKNIKVSDPLEEGCRLGSVISEGQYEKIKKFISTARSEGATILYGGGRPQHLRRGFFLEPTIITDVSTSMQIWQEEVFGPVICVKEFRTESEAVELANDTHYGLAGAVISNDQERCERISKALHSGIIWINCSQPCFVQAPWGGNKRSGFGRELGEWGLDNYLTVKQVTKYCSDEPWGWYQPPSKL

SEQ ID NO: 9305 - protein, 212 aa, Saxifraga careyana
KRRNGLLKKAYELSVLCDAEVALIVFSTRGRLYEYSNNSVKQTIERYKKACSGPSNSGSVSEANAQSYQQEASKLHAQINNLQNTNRQMLGEALGSLSPRDLKNLENKVEKGISKIRSKKNELLFSEIEYMKKREIDLHNENQYIRAKIAETERAQQQMSLMPPGGGSTNYDQQLNMHPQQFDSRDFFQVNALQPNNHHYSRQHDQISLQLV

SEQ ID NO: 9306 - protein, 253 aa, Aspergillus flavus
MGHEDAVYLAKLAEQAERYEMVENMKVVASADVELTVEERNLLSVVYKNVIGARRASWRIVTSIEQKEESKGNESQVTLIKEYRQKIESELAKICDDILEGLDKHLIPSGQSGESKGFYHKIGDYHRYLAEFAIGDRRKGAADASLEAYKAATEVAQTDLTPTHPIRLGLALNFSVFYYEILNSPGQACHLAKLAFDDAIAELDTLSEESYKDSTLIMQLLRDNLLDTLSEESYKDSTLIMQLLRDNHPLDLV

SEQ ID NO: 9307 - protein, 493 aa, Mesorhizobium sp. BNC1
MSTSARNRFPGVSFDPKALRSNLFIGGAWKEGATGNRIPVYDPSTGTVIAEVADAEVEDVMGAIDAAHEALPGWAATPPRHRSEVLRRCFELMIENRDMLAELISLENGKTLADAQGEVAYAAEFFRWFAEETVRLNGELYKAPSGANRILVQHQPIGVSVLVTPWNFPAAMATRKIGPALAAGCTVILKPATETPLTAYALAALCAEAGVPDGVVNVYTSSRSGKTVSAMLHDPRVRKLSFTGSTEVGRILLREAADKVISCSMELGGNAPFIVFDDADLSAALDGAMVAKMRNGGEACTAANRFYVQSGIADAFAKGLAERMKALAIGKGYETGSQCGPLINKDAVERISGLVEEAQSRGARVLAGGKALNREGYYFPPTVIDNVDPASAIMSEEIFGPVAPIIRFDSEDEVLSAANGTEYGLMAYVYTQDLSKGLRVSEKIESGMVGLNRGLVSDPAAPFGGVKQSGLGREGSHHGILEFTETKYIATNW

SEQ ID NO: 9308 - protein, 296 aa, Yersinia pestis CO92
MSQKELWYETLHANFGQYFSVENVLFREKTEHQDLVIFENPELGRVMALDGVVQTTERDEFIYHEMMTHVPLLAHGQAKKVLIIGGGDGAMLREVSRHKNIEQITMVEIDAGVVEFCRQYLPNHSAGAYDDPRFKLVIDDGVNFVNQTTEKFDVIISDCTDPIGPGESLFTSVFYEGCARSLNEGGIFVAQNGVCFLQQDEAVNSHNKLSHYFSDVSFYQAAIPTYYGGIMTFAWATQNPALRQLDLATLQNRFAQAGLACRYYNPAIHVGSFALPQYLLDALTTIPKVIGVDSSE

SEQ ID NO: 9309 - protein, 436 aa, Bradyrhizobium japonicum USDA 110
MMLMLTDRRPILLANARVVDPSRDFDGPGDVLIADGIIRETRRGIGAAGVPEGTDVVNCAGKIVAPGLIDMKAFVGEPGFSHRETFASASQAAATGGITTIICQPDTEPVIDNSATVDFVMRRARDTAIVNIQPMAALTKGMRGEEMTEFGLLKAAGAIAFSDGDRSVTNAQVMRRALTYARDFDALIVHHTEDPDLVGEGVMNEGEFASRLGLMGIPNAAEAVMLERDMRLVALTGGRYHAASLSCIDSLDILKRARDAGLAVSASVSINHLALNENDIGPYRSFLKLSPPLRTEDDRRALVAAVASGLIDVIMSDHNPQDVEVKRLPFAEAAPGAVGLETMLPAGLRLMHNGELDLKTLIQAMSTRPAEILGLPGGTLRAGSPADVIVIDPDVPWVVDPAELKSPCKNTPFDEARFTGRVVRTIVGGRTVFEHV

SEQ ID NO: 9310 - protein, 173 aa, Triticum aestivum
  misc_feature (79)..(79): Xaa can be any naturally occurring amino acid
MAPTVMASSATSVVPFQGLKSTAGLPVSRRSNGASLGSVRNGGRIRCMQVWPIEGIKRWETLSYLPPIRTEALLRQVDXLIRSKWVPCLEFSKVGFIFREHNASPGYYDGRYWTMWKLPMCGCTDPTQVINEVEEVKKEYPDAYVRIIGFDKLRQVQSVSFIAFKPPGCKESG

SEQ ID NO: 9311 - protein, 410 aa, Zea mays
  misc_feature (84)..(84): Xaa can be any naturally occurring amino acid
  misc_feature (372)..(372): Xaa can be any naturally occurring amino acid
  misc_feature (396)..(396): Xaa can be any naturally occurring amino acid
  misc_feature (400)..(400): Xaa can be any naturally occurring amino acid
MSAAATKVKRRVGKYELGRTIGEGTFAKVRFAKNTETGEPVAVKILDKEKVLRHKMAEQIKREISTMKLIKHPNVVRIYEVMGXSKTKVYIVLEYVTGGELFDTIANQGRMREGEARSYFQQLINAVDYCHSRGVYHRDLKPENLLLDSYGNLNVSDFGLSALSQQIKDDGLLHTTCGTPNYVAPEVLEDQGYDGAMADLWSCGVILFVLLAGYLPFEDSNLMTLYKKISNAEYTFPPWTSFPAKRLLTRILDPNPMTENSCDFRITIPEILEDEWFKKGYKRPEFDEKYDTPLDDVDAVFNDSEEHHVTEKKEEEPVALNAFELISRSAGLNLGNLFDSEQEFKRETRFTSKCPPKEIIRKIEEAAKPLGXGVQKKNYKLRLEKDKAGEERDNLXVCYXRILQVAPSLH

SEQ ID NO: 9312 - protein, 183 aa, Escherichia coli O157:H7 EDL933
MQDSILTTVVKDIDGEVTTLEKYAGNVLLIVNVASKCGLTPQYEQLENIQKAWADRGFVVLGFPCNQFLEQEPGSDEEIKTYCTTTWGVTFPMFSKIEVNGEGRHPLYQKLISAAPTAVAPEESGFYARMVSKGRAPLYPDDILWNFEKFLVGRDGLVIQRFSPDMTPEDPIVMESIKLALAK

SEQ ID NO: 9313 - protein, 507 aa, Glycine max
  misc_feature (192)..(193): Xaa can be any naturally occurring amino acid
MDLFLSCMVLFVLTLATLGAHWIWVVSSSRAGSKLPPGPFPLPIIGNLLALGKKPHQSLAKLAETHGPIMTLKFGQVTTIVVSSADMAKEVLLTHDHSLSSNRVIPQAVQVHNHHNHSITFLPVSPLWRDLRKICIANLFSNKTLDASQDLRRSKLHQLLHDIHRSSLAGEAVDVGKAVFNTSMNLLSNTFXXSLDLVHSSSSAAAVDFKDLVLKIMEESGKPNLADFFPVLKFMDPQGIKTRTTVYAGKIIDTFRALIHQRLKLRENNHGHDTNNDMLNTLLNCQEMDQTKIEHLALTLFVAGTDTITSTVEWAMAELLQNEKAMSKAKQELEETIGRGKAVEESDIGRLPYLQAVIKETFRLHPAVPFLIPRKANADVEISGGYTIPKDAQVFVNVWAIGRNSSIWKNNANVFSPERFLMDSEDIDVKGHSFELTPFGAGRRICLGLPLAMRMLYLVLGSLINCFNWKLVEDDDVMNMEDSFGITLAKAQPVILIPEKVHGVIVS

SEQ ID NO: 9314 - protein, 501 aa, Amaranthus hypochondriacus
MAIRVPSRQLFIDGEWREPIKKNRIPIINPSTEEIIGDIPAATAEDVELAVAAARRALKRNKGEDWASASGAHRAKYLRAIAAKITEKKDYFAKLEAMDCGKPLDEAARDIDDVAGCFEYYADQAEALDAKQKAPIALPMDTFKCHVLKQPIGVVGLISPWNYPLLMATWKVAPALAAGCSAVLKPSELASVTCLELAEVCREVGLPPGVLNILTGLGPEAGGPLACHPDVDKVAFTGSTATGSKVMSSAAQLVKPVTLELGGKSPIVIFEDVDLDKAAEWTAFGCFWTNGQICSATSRLLVHESIAAEFLDRLVKWCKNIKISDPFEEGCRLGPVVSKSQYEKVLKFISTAKSEGATILCGGSRPEHLKKGYYVEPTIISDVSTSMQIWREEVFGPVLCQKTFGSEDEAIELANDTQYGLGAAVLSKDLDRCERITKALEVGAVWVNCSQPCFTQAPWGGTKRSGFGRELGEWGIENYLNIKQVTRDTSTDEPWGWYKSP

SEQ ID NO: 9315 - protein, 312 aa, Magnaporthe grisea
MADKDFTLNTGAKIPAFGLGTWQGDKGVIKEAVLTAIKSGYRLIDGAYVYGNEEEVGQGIREAISSGIVKREDLFVVSKCWATYTTRCELGLDQSLKLLGLDYVDLYLVHWPILMNPEGNDEKFPKHADGSRDIIHTHNHVDTWKLMEKLPATGKTKAVGVSNYSKAWLEQLLPHATTVPAVNQVENHPQLPQQELVDFCKEKGIHIMAYSPLGSTGGPLLTAEPVVKIAEKHSISPAAVLLGYQIARGITVIPKSVNPDRIKANAQLKDLDAEDMKLLNDYSEQLAKDGKLNRYVFPPFGTDFGFPDKVGQ

SEQ ID NO: 9316 - protein, 399 aa, Clostridium perfringens str. 13
MNLLIKNVNLIDESNNFFGDIYIEKGVIKELGTELNKECETLDGKGLVLMPAFIDTHAHFRDPGFEYKEDIESGSKAAVRGGYTTVTLMPNTKPVCSSKEILDYVVNKGKEVGLVDLYQTVSITKNLSGEEINHLREFEGNPNVKAITDDGKGVSDSKIMMEAMKIAKENNWIVMSHAESPEFSRVDMRLAENMMTWRDITLAKFVDCRLHMSHVSTKEAMKYIIEGKNDGVKVTCEITPHHLALNNKISNYRVNPPIREEEDVNFLIKAIKMNYVDCIGTDHAPHSKEDKEKGAPGMIGIEQAFSICYTKLVKENHISLNKLSQLMSGNAAKLLNINKGKLQPGFLGDLVLIDLNKKRIFKEEDIVSRSKNTPFNGMEFYGDVVVTIKNGKIVYNGEF

SEQ ID NO: 9317 - protein, 166 aa, Triticum aestivum
  misc_feature (127)..(127): Xaa can be any naturally occurring amino acid
  misc_feature (145)..(145): Xaa can be any naturally occurring amino acid
  misc_feature (156)..(156): Xaa can be any naturally occurring amino acid
  misc_feature (161)..(161): Xaa can be any naturally occurring amino acid
KTKIYFVLEHVKGGELFNKIQRGRLKEDAARKYFQQLICAVDFCHSRGVYHRDLKPENLLLDENSNLKVSDFGLSALAECHRQDGLLHTTCGTPAYVAPEVINRKGYDGAKADIWSCGVILFVLLAXGYLPFHDKNLMDMLGKIXKADFKCPSWVXTDVRXALQRI

SEQ ID NO: 9318 - protein, 202 aa, Lycopersicon esculentum
MSNEYDYLFKLLLIGDSSVGKSCLLLRFADDSYVDSYISTIGVDFKIRTVEQDGKTIKLQIWDTAGQERFRTITSSYYRGAHGIIIVYDVTEMESFNNVKQWLNEIDRYANESVCKLLVGNKCDLVENKVVDTQMGKALADELGIPFLETSAKDSINVEQAFLTMAGEIKKKMGNQPAGAKRTGSTVQIKGQPIEQKGNCCG

SEQ ID NO: 9319 - protein, 447 aa, Oryza sativa (japonica cultivar-group)
MAATKSKAAKKGAPLLGKYELGRLLGRGTFAKVYHARSLAPGADPVAVKVLDKPDLAAAGAGMATRVLREVAAMRRLRHPNVLRLHEVLATRSKVYLVMELAPGGDLLSRLASLPSRRLPEHAAQRVFLQLVSALIYCHARGVSHRDVKPQNVLLDAHGNLKVSDFGLAALPDSLRDDGRLHTACGTPAFAAPEVLRRKAYDGAKADAWSCGVILFVLLAGHLPFDDSNIADMCRKAHRREYALPRWVSQPARRLVSRLLDPNPATRLAVAELATHPWFKRSLSLDSQLGSLLGGQPERELAFQAPPPLNAFDIISMSPGLDLSGLFGESKRRREKRFVTTASPERTVERLGQAGAKLGYFMVGKKGVERLPLGGLSGLVAMSMEMSEVSPSMMLVELRLEGGDDGDGDGGAEEFGWEELRAELGDDVVMAWHGCDGGKKDKEGILL

SEQ ID NO: 9320 - protein, 130 aa, Glycine max
MEGVGARLGRSSTRYGPATVFTGPVRKWKKKWIHVSPSSASSNSNANNHASNASHLLLYKWTPLTQSQNTTNNANANGNAKDAPPEPPAEPPRRKFKYVPVALLEEPKNEAAENEGTEKVDEESKPIDVD

SEQ ID NO: 9321 - protein, 490 aa, Glycine max
MTKISPEVEIRMPMEAFPPVSADVSFISNSFPKYKLDADNQVLEEPVEDNQGPSLKDVIEQEASNLSDQHKRISVRDLASKFDKNLAAAAKLSNEAKLREVASLEGHVLLKKLRDALESLRGRFAGRNKEDVEKAISMVEALAVKLTQNEGELIQEKFEVKKLVNFLKQASEDAKKLVNQEKSFACAEIESARAVVLRIGEALEEQEKASQASKPQDVDGLVEEVQEARRIKLLHQPSKVMAMEYELRALRDQIREKSIFSIKLQKELTMSKRDEENKSRLYMLDGSEALGSYLRVQPCSAEVPQVSKCSFQWYRLSSEGSWREVISGANKSIYAPDPSDVGRILQVDIVSNGKKLTLTTNPIQTVSGLGSHVETLLRKSNTDFNVVISQMNGKDHSSHSTHSFNVGRMRIKLCRGWITKAREIYSPSMQLCGVRSDIANAAKALFWQARKGLSFVLTFESERDRNAAIMVARKYALDCNVVLAGPDDLV

SEQ ID NO: 9322 - protein, 211 aa, Zea mays
  misc_feature (36)..(36): Xaa can be any naturally occurring amino acid
  misc_feature (111)..(111): Xaa can be any naturally occurring amino acid
LTEQALSDYPGGGRNEGKGSPATTNPMPPHRCRRGXGGGDTSAFFAATLVLWAVSVGFEIGVRGRRELAPVAAGFAFFQAANAAVRGSVSRDPLFVNTAVSLLHSSLTSVXLHSIFLHVRKVRRMVGFRDFDRTVVKLEWVLNWTTFVTARVICHILITYKLISDAHKFGKGIELPLALLGMAGMNLLNIFLGLDLLKAFTRERNQQSHQD

SEQ ID NO: 9323 - protein, 368 aa, Brassica napus
MEEDRVLSSVHSTVFKESESLEGKCDKIEGYDFNQGVNYPKLLRSMLTTGFQASNLGDVIDVVNQMLEWRLSDETIAPEDCSEEEKDPAYRESVKCKIFLGFTSNLVSSGVRETIRYLVQHHMVDVIVTTTGGVEEDLIKCLAPTFKGDFSLPGAYLRSKGLNRIGNLLVPNDNYCKFEDWIIPIFDQMLKEQKEESVLWTPSKLLARLGKEINNESSYLYWAYKMNIPVFCRGLTDGSLGDMLYFHSFRTSGLVIDVVQDIRAMNGEAVHATPRKTGMIILGGGLPKHHICNANMMRNGADYAVFINTGQEFDGSDSGARPDEAVSWGKIRGSAKTVKVYCDATIAFPLLVAETFASKREQSCEHKT

SEQ ID NO: 9324 - protein, 78 aa, Zea mays
HVDYACTPEEVQQHFQACGTVNRVTILTDKFGQPKGFAYVEFLEQEGVQEALNLNESELHGRQIKVAPKRTNVPGMKQ

SEQ ID NO: 9325 - protein, 294 aa, Saccharomyces cerevisiae
TTPLVHVASVEKGRSYEDFQKVYNAIALKLREDDEYDNYIGYGPVLVRLAWYTSGTWDKHDNTGGSYGGTYRFKKEFNDPSNAGLQNGFKFLEPIHKEFPWISSGDLFSLGGVTAVQEMQGPKIPWRCGRVDTPEDTTPDNGRLPDADKDADYVRTFFQRLNMNDREVVALMGAHALGKTHLKNSGYEGPWGAANNVFTNEFYLNLLNEDWKLEKNDANNEQWDSKSGYMMLPTDYSLIQDPKYLSIVKEYANDQDKFFKDFSKAFEKLLENGITFPKDAPSPFIFKTLEEQGL

SEQ ID NO: 9326 - protein, 91 aa, Triticum aestivum
  misc_feature (58)..(59): Xaa can be any naturally occurring amino acid
  misc_feature (82)..(82): Xaa can be any naturally occurring amino acid
MSDTDEHHFKSKGDFCAYKTYPQQAGAIRKGGHIVIKARPCKVVEVTTSKTGKQWHAXXYFVAIDIFNGKKLEDLDSSYNNXNVPHGDRQD

SEQ ID NO: 9327 - protein, 320 aa, Burkholderia cepacia R1808
MPLNPKIAQVLDMIERAKRPSYHHQTPQQARAAYEKSAPILDVAPAPMHSVDACVVPTRDGRTIGARLYLPVAPSLAEPLPALVYYHGGGFTVGSVDTHDALCRMFARDAQCAVLSVDYRLAPEHKFPTAVHDAEDALRWLHREAAAFGIDAARLAVGGDSAGGTLATVCAVLARDAGIHLALQLLIYPGVTGHQATESHARLANGYLLTQDTIQWFFSQYVREPADRDDWRFAPLDGTRGAPSSFAGVAPAWIATAEYDPLSDEGAAYAQKLRAAGNTVALVCYPGMIHEFFKMGGYIPEVRAAHADATAALRAAFDGV

SEQ ID NO: 9328 - protein, 246 aa, Glycine max
MTSASELFHTRRHRLGRNALDLGLDTELHAADSLRQLRLRHYYLRRHHPERASDRIDGRYRRSFVSESVDSEENVRSSLRGSSSERLPVGVVLARARLLQRLRGEPLSTNRQYDRDSFGEDPESESSNEDPSGASLVTELTSQMARSQFLQELSTKPPGLTQEALDCLHQEVFSSNASEIGLDSRVLQDCSICLESFTDGDELIRLPCGHKFHSVCLDPWIRCCGDCPYCRRCIVVNTHSSLNEDE

SEQ ID NO: 9329 - protein, 300 aa, Pneumocystis carinii
MEQYQRLEKIGEGTYGVVYKAKDLESGTIVALKKIRLEAEDEGVPSTAIREISLLKEMHNDNVVRLLNIIHQESRLYLVFEFLDLDLKKYMNSIPKDMMLGAEMIKKFMSQLVSGVKYCHSHRILHRDLKPQNLLIDREGNLKLADFGLARAFGVPLRGYTHEVVTLWYRAPEVLLGGRQYATALDIWSIGCIFAEMATKKPLFPGDSEIDEIFRIFRILGTPDENSWPGITSYPDFKATFPKWSPKNLGELITELDSDGIDLLQKCLRYYPAERISAKKALDHPYFDDFINLNRSNVVL

SEQ ID NO: 9330 - protein, 233 aa, Allium sp. AL-2003
VQLKRMENKINRQVTFSKRRNGLLKKAHEISVLCDAEVALIVFSAKGKLYEYSTDSSMEKILERYERYCFAEKSSTMSDIDSQEDWSLEYHKLKAKVESLNNRQRHLMGEQLESLSLREIGQLEQQLENSLKTVRTRKSQELLSSISELQDKEKTLRDENKALENELMKRARAKAILEQQARWKHHNHKQQDNLHNPNINIGNYQTRNNEGGVEPATDVQVRVVRNLLPHWML

SEQ ID NO: 9331 - protein, 208 aa, Magnaporthe grisea 70-15
MATNITWHDGLTRRERNQLRGQRGFTIWFTGLSASGKSTVATALEQHLLHLGLAAYRLDGDNVRFGLNKDLGFSEKDRNENIRRIAEVAKLFADSSVVALTSFISPYRADRQTARELHAQAAQKGDEPLEFVEVYVDIPIEVAEQRDPKGLYKKARAGEIKEFTGISAPYEAPENPEITIKTHENSVEECVAQIVKWLQDKGLVKATP

SEQ ID NO: 9332 - protein, 300 aa, Pneumocystis carinii
MEQYQRLEKIGEGTYGVVYKAKDLESGTIVALKKIRLEAEDEGVPSTAIREISLLKEMHNDNVVRLLNIIHQESRLYLVFEFLDLDLKKYMNSIPKDMMLGAEMIKKFMSQLVSGVKYCHSHRILHRDLKPQNLLIDREGNLKLADFGLARAFGVPLRGYTHEVVTLWYRAPEVLLGGRQYATALDIWSIGCIFAEMATKKPLFPGDSEIDEIFRIFRILGTPDENSWPGITSYPDFKATFPKWSPKNLGELITELDSDGIDLLQKCLRYYPAERISAKKALDHPYFDDFININRSNVVL

SEQ ID NO: 9333 - protein, 418 aa, Glycine max
SARARAEFGSSFAKVYHARHLKTGKSVAMKVVGKEKVVKVGMMEQIKREISAMNMVKHPNIVQLHEVMASKSKIYIAMELVRGGELFNKIARGRLREEMARLYFQQLISAVDFCHSRGVYHRDLKPENLLLDDDGNLKVTDFGLSTFSEHLRHDGLLHTTCGTPAYVAPEVIGKRGYDGAKADIWSCGVILYVLLAGFLPFQDDNLVALYKKIYRGDFKCPPWFSSEARRLITKLLDPNPNTRITISKIMDSSWFKKPVPKNLMGKKREELDLEEKIKQHEQEVSTTMNAFHIISLSEGFDLSPLFEEKKREEKELRFATTRPASSVISRLEDLAKAVKFDVKKSETKVRLQGQEKGRKGKLAIAADLYAVTPSFLVVEVKKDNGDTLEYNQFCSKELRPALKDIVWRTSPAENPTLA

SEQ ID NO: 9334 - protein, 440 aa, Arabidopsis thaliana
MSPAIKAPLLPNQEPSSSSSENHGSFAGAVFNISTSIVGAGIMAIPAAFKVLGVIPSLSIIVIIAWLSNVSAGFLMKSSLAGESTTYAGVMKESFGKSGAVAVTVVTMVVTFGSMIIFSIIIGDVISGNEKDGIIHLGLLQEWFGSHWWNTRFFGLLFIFVFLFLPLVLCRRVERLAFSSAISFLLALLFVVISSVLAIIALVQGKTKPPRLFPELNDGGLSFFSLFTASPVIVTAFTFHFNVHPVAFELKDPLNVLSATRISVILCATIYSATGLFCYLLFGDSTMTDVLMNFDQSTSSSVGSLLNDIVRLSYAIHLMLVFPLLNFSLRANLDELLFPMKLSLVEDNKRFFALTFPLLISCFLGAIAIPDIWYFFQFLGSTSTVSIAFIFPAAIVLRNVNGFSTLREKIVASVMLVLAVATSIIAISTNIYTFTATEET

SEQ ID NO: 9335 - protein, 236 aa, Escherichia coli K12
MGYRSIDTAAAYKNEEGVGKALKNASVNREELFITTKLWNDDHKRPREALLDSLKKLQLDYIDLYLMHWPVPAIDHYVEAWKGMIELQKEGLIKSIGVCNFQIHHLQRLIDETGVTPVINQIELHPLMQQRQLHAWNATHKIQTESWSPLAQGGKGVFDQKVIRDLADKYGKTPAQIVIRWHLDSGLVVIPKSVTPSRIAENFDVWDFRLDKDELGEIAKLDQGKRLGPDPDQFGG

SEQ ID NO: 9336 - protein, 437 aa, Leptospira interrogans serovar Copenhageni str. Fiocruz L1-130
MKFYRRKVEFEKHGKNRMREKSLQYHALHPKGKIEVVPTKPTEDSYDLSLAYSPGVAYPCLEIKDSPELVYEYTNKGNLVGIITNGTAILGLGDIGALAGKPVMEGKAVLFKKFAGIDVFDIEINTKDPDEFIRAVKLLEPTFGGINLEDIKAPESFYIEEQLIEKMNIPVFHDDQHGTAIITVAGLLNSFKLTGKNPDDVKVVICGAGAAGIAIAELIQHIGIKKEQIFLVDTKGVIHHNRNDLNDSKKKYIQKTDSTTLRDVMKGSDIFIGVSVENMVDEDMVRSMSKNPVIFALANPDPEIPYRVAKAVRSDLIMGTGRSDNPNQVNNVLGFPFIFRGALDVRARHITLEMKLAAARSLAELARLEVPEVVSKAYGGEKFTFGPEYLIPKPFDKRVLFHVAPAVAEAAVASGSARIPYLGREKYLGFLEGIIKS

SEQ ID NO: 9337 - protein, 444 aa, Arabidopsis thaliana
MVRRQEEEKKAEKGMRLGKYELGRTLGEGNFGKVKFAKDTVSGHSFAVKIIDKSRIADLNFSLQIKREIRTLKMLKHPHIVRLHEVLASKTKINMVMELVTGGELFDRIVSNGKLTETDGRKMFQQLIDGISYCHSKGVFHRDLKLENVLLDAKGHIKITDFGLSALPQHFRDDGLLHNTCGSPNYVAPEVLANRGYDGAASDIWSCGVILYVILTGCLPFDDRNLAVLYQKICKGDPPIPRWLSPGARTMIKRMLDPNPVTRITVVGIKASEWFKLEYIPSIPDDDDEEEVDTDDDAFSIQELGSEEGKGSDSPTIINAFQLIGMSSFLDLSGFFEQENVSERRIRFTSNSSAKDLLEKIETAVTEMGFSVQKKHAKLRVNQEERTQKGQVGLSVTAEVFEIKPSLNVVELRKSYGDSCLYRQLYERLLKDVGTSSPEQEIVT

SEQ ID NO: 9338 - protein, 145 aa, Alvinella pompejana epibiont 7G3
MLVKRYEPFNEIRRSFDLVNQIINSVDKNVESDNALVDFIPNINTREDSNAYYIEVELAGVKKEDVDIKIDENILSISGEKRFKDNLKAEDYYKIESKYGTFARSFTLPERVDVSKIEAKSEDGIIEIKIPKLTIEKESKKITIK

SEQ ID NO: 9339 - protein, 442 aa, Triticum aestivum
MAIAVSGHWTRLRTLGCGASGAVVSLAADGASGELFAVKSVRAADAAQLSREQGILSGLSSPHVVACIGGGGARDGSYHLFLEFAPGGSLADEAARNGGRLEERAVRAHATDVLRGLAYIHGKSLVHGDVKSRNVVIGADGRAKIADFGCARALGEARPIGGTPAFMAPEVARGEEQGPAADVWALGCTVVEMATGRAPWGEMDNVLAAVHRIGYTDAVPEVPTWLSAEAKSFLAMCFARDARERCTAAELLEHPFVALQAGEAKARWVSPKSTLDAAFWESETDEEEEEVSESPCERIKSLSCSVLPDWDSDEGWIDVLGEQCEEACDSPAATKGPADVSSRAPSKVLGSPAAPAEDAAVVGTLSSDELDAEDEPFGDDIILAADPLVDRQIQVCWSSDRYVLSSSLVPCNNRIDAIEKFRFPQKKKKKKKKKKKKKKKKK

SEQ ID NO: 9340 - protein, 197 aa, Brassica napus
MSASRFAKCVTVGDGAVGKTCLLISYTSNTFPTDYVPTVFDNFSANVVVNGATVNLGLWDTAGQEDYNRLRPLSYRGADVFILAFSLISKASYENVSKKWIPELKHYAPGVPIILVGSKLDLRDDKQFFVDHPGAVPITTAQGEELRKLIDAPTYIECSSKSQENVKAVFDAAIRVVLQPPKQKKKKSKTQKACSIQ

SEQ ID NO: 9341 - protein, 291 aa, Zea mays
  misc_feature (83)..(83): Xaa can be any naturally occurring amino acid
MALSIYTPTSSSLVPPSIQEVRLTSRPPKPATFSLRRPHLAARAAAGNAPTSPVREVVTELDAVAGFSEIVPDTVVFDDFERXPSSCLTLYFFLSCCPIRFGGRVAHCAIVNNHRFAPTAATVSSSLLLGITGLPDTKFKSAIDTALADGECNALEKAEDRMSCYLTKALANVGAELAHQVPGRVSTEIDARLAYDTQGIIHRVHELLNLYNQHDVSTDRLLFKIPATWQGIEASRLLESEGIQTHLTFVYSFAQAAAAAQAGASVVQMFVGRLRDWAKHHSGDPEIDEAL

SEQ ID NO: 9342 - protein, 277 aa, Brassica napus
  misc_feature (72)..(72): Xaa can be any naturally occurring amino acid
  misc_feature (108)..(108): Xaa can be any naturally occurring amino acid
MSLFLKDDSIQIREVWSDNLQEEMDLIREVVDDFPYVAMDTEFPGIVVRPVGTFKSNADYHYETLKLNVNIXLNIIQLGLTFSNEQGNLPHPAAPTGKYCIWQFNSRXFVLDSDFFPVDSIDLPKQSGIDFAKTTPQGIESSRFPELLMSSGIVLNGNVHWVTFHSGYDFGYLLKLLTCKNLPDSQTSFFELINVYFPTVYDIKHLMKFCNSLHGGLNKLAELLEVERVGICHQPGLDSLLTSCTFRKLKENFFVGPLQKYAGVLYGLGVENGQVAL

SEQ ID NO: 9343 - protein, 326 aa, Glycine max
LEGTGEVLNCSAENNGDLFHGVLGGLGQFGIITRARIVLEPAPTMVKWIRVLYSDFTAFTRDQERLISAEKTFDYIEGFVIINRTGLLNNWRLSFNPRDPVQASHFKSDGRTLFCLEMAKYLNVEEIDAANQEVEEHLSRLSYIPSTLFSTEVTFVDFLDRVHISEVKLRSKGLWDVPHPWLNLLIPKSQILNFAQVVFGNILSETSNGPVLIYPVNKSKWDNRTSVVIPEEDIFYLVAFLTSAVPSSNGTDGLEHILSQNKRILEFCERAQLGVKQYLPHYNTQQEWRAHFGPQWETFLLRKSVYDPLAILAPGQRIFQKAITFS

SEQ ID NO: 9344 - protein, 281 aa, Corynebacterium glutamicum ATCC 13032
MDQKNKLSKSEGIPLVTLNDGKTIPQLGFGVFKVDPDEAERVVTEALEVGYRHIDTAAIYGNEEGVGRAIAKSGIPREELFITTKLWNDRHLDVEAAFEESLQKLGLDYVDLYLVHWPAPKNDNYVAAWKGLEKLGDRARSIGVCNFLPEHLEKLLAEATTVPAINQIELHPALQQRDAVEASLAAGITVESWGPLGQGRFDLGAEEPIAAAAKNHGKTPAQVVIRWHLQNGFVVFPKTVTKSRMVENIDVFDFELSDEEMAAITALERNDRGGSHPNDLN

SEQ ID NO: 9345 - protein, 394 aa, Alvinella pompejana epibiont 7G3
MNLEELDKQFVLQTYARDYTNFVRGENATLFSEDGRDFIDFASGIGVSSVGHGNRRLSDAVCEQVRNIIHISNLQVIEPQVKLAQKICELSGYDGAIFFANSGAEANEGAIKVARKYGEVNFDKKRYKVITLEHSFHGRTISTLKATGQKSFHTPSFSPYPDGFLYVKSIEDIYGSIDDETVAVLIELVQGEGGVEPFSIGEVQNLAKFLRENGILLIVDEVQTGVFRTGEMLASNIYQIEPDIITLAKGLGGGVPIGAILTKHRDILKAGEHGSTFGGNYLSTRAGLEVLSILNGLYESGELKETISYFEERLKGIRERFSNLFSQDVGVGLMRGLRAEEADIPSKVVKSSMDSGLIVLKAGRNTVRFLPPLTISKSEIDKGFERFEKAISSI

SEQ ID NO: 9346 - protein, 349 aa, Zea mays
MGDAAASTSAPTTPTSILICLEDGSDLLADADDGAGTDLVVARDERLLVVDQDEEYVALLLSKESASGGGGPVEEMEDWMKAARSGCVRWIIKTTAMFRFGGKTAYVAVNYLDRFLAQRRVNREHAWGLQLLMVACMSLATKLEEHHAPRLSELPLDACEFAFDRASVLRMELLVLGTLEWRMVAVTPFPYISCFAARFRQDERRAVLVRAVECVFAAIRAMSSVEYQPSTIAVASILVARGRETPAGNLDALKAILGSSFPQLDTGHVYSCYSAMIREDDKSPTQSTSTSTGVASSGVSVAAHAGGSGSPSPPGASVSVGANNAAGTAPPATTDNRNKRRRLRSPQRQ

SEQ ID NO: 9347 - protein, 146 aa, Triticum aestivum
  misc_feature (69)..(69): Xaa can be any naturally occurring amino acid
  misc_feature (94)..(94): Xaa can be any naturally occurring amino acid
  misc_feature (137)..(137): Xaa can be any naturally occurring amino acid
MAPTVMASSATSVAPFQGLKSTAGLPVSRRSNGASLGSVSNGGRIRCMQVWPIEGIKKFETLSYLPPLXTEALLKQVDYLIRSKWVPCLEFSKXGFIFREHNASPGYYHGRYWTMWKLPMFRCTHPTQVINEVEEVXKEYPDPYCH

SEQ ID NO: 9348 - protein, 319 aa, Fragaria x ananassa
MAKVPSVTLSSCGDDIQTMPVIGMGTSSYPRADPETAKAAILEAIRAGYRHFDTAAAYGSEKDLGEAIAEALRLQLIKSRDELFITTKLWASFAEKDLVLPSIKASLSNLQVEYIDMYIIHWPFKLGKEVRTMPVERDLVQPLDIKSVWEAMEECKKLGLARGIGVSNFTSSMLEELLSFAEIPPAVNQLEMNPAWQLKKLRDFCKAKGIHVTAYSPLGAARTKWGDDRVLGSDIIEEIAQAKGKSTAQISLRWVYEQGVSIVTKSYNKERMRQNLDIFDFCLTEEELEKMSHLPQRKGVTFASILGPHDIVLKVDEEL

SEQ ID NO: 9349 - protein, 116 aa, Glycine max
  misc_feature (27)..(27): Xaa can be any naturally occurring amino acid
  misc_feature (35)..(35): Xaa can be any naturally occurring amino acid
  misc_feature (52)..(52): Xaa can be any naturally occurring amino acid
  misc_feature (66)..(66): Xaa can be any naturally occurring amino acid
  misc_feature (90)..(90): Xaa can be any naturally occurring amino acid
  misc_feature (106)..(106): Xaa can be any naturally occurring amino acid
LNECLLYSRYETCLSTDDAGPIAEKLXLTNLFWDXDLPRTREGFYTFKGSLXASHVIRRAFAPHAXVIWMETGRPNVIDCTQLSEGDMSXLPEMMLTYNLSTFFNXDAFVMSDEQM

SEQ ID NO: 9350 - protein, 135 aa, Zea mays
AINDTLLSHFQQIRTFIQTRTNLKVVDYSGAKRVMCIQSLRGKKGARLGYMIIRSVKEAQPRGKVKKGDVVYGVVVRVAMKKGRSDDSEVQFDDNEVVLVNKKGELIGIRVFGPVPHELRKKKHLKILALAEHIV

SEQ ID NO: 9351 - protein, 503 aa, Ralstonia eutropha JMP134
MEQSKAGTLIGAFAEFFPGATEIGSYVGGRLVAGTGQEIQLFDPATGEKSLSYRDAGPEIAQQACIAARDAQKTWWGLTHAARGRILYAVAAKVREHNEPLAVLESMSQGKPIRDSRREVEMVAEMFEFYAGWADKFYGHVIPVPTTHLNYTRREPYGTILHIAPWNIPILSFGWQVAPTVAVGNAVLLKPSELTPFTSLAVASLAEQAGVPVGLINVLAGYGHTTAQAAIADDVVKKVVFVGSPATGIRIAEAAAKRVIPCILELGGKSANIVFDDANLDLAAIGAQAAVFSGAGQSCTAGSRLLIQRKVYEQVVDKVAEGARKLRLGHPLEASTEIGPINNRNQYEHIKRMIARGVEEGAQLAAGTTSFGDGGYFVPPTLFAGVSNQMDIARMEVFGPVISAIPFETEEEAIAIANDNEFGLAGAVWTNDVARAHRVAAQVDAGTFWINGYRAIHVGSPFGGYKNSGYGRTSGIEALYEYTQTKSVWVQTASASVTAIGRA

SEQ ID NO: 9352 - protein, 149 aa, Candida albicans SC5314
MSEYSGSNSEDLSLPKATVQKIINEILPKDIGIAKEAREAITECSIEFIMMLSTQSNDIAEKEAKKTIASDHVVKALEELDFKIYLDIINKILDEHKELLKGKEKRNNKFQNSGLTEEELLRQQEELFKKSRARLQNQSGSLTAKPEPN

SEQ ID NO: 9353 - protein, 91 aa, Triticum aestivum
  misc_feature (9)..(9): Xaa can be any naturally occurring amino acid
  misc_feature (37)..(38): Xaa can be any naturally occurring amino acid
  misc_feature (71)..(71): Xaa can be any naturally occurring amino acid
  misc_feature (73)..(73): Xaa can be any naturally occurring amino acid
  misc_feature (86)..(86): Xaa can be any naturally occurring amino acid
  misc_feature (90)..(90): Xaa can be any naturally occurring amino acid
MAPTVMASXATSVAPFQGLKSTAGLPVSRRSNGASLXXVSNGGRIRCMQVWPIEGIKKFETLPYLPPLSTXAXLKQVDYLIRSKWXPCLXF

SEQ ID NO: 9354 - protein, 474 aa, Pseudomonas putida KT2440
MQTQMLINGQLVAGQGPAWTVLNPALGTALAQINEATEAQVDSAVRAADQAFDSWSQTSPKERSQALLALADAIEAHGDELARLESQNCGKPLSAALNDEIPAIADVFRFFAGAARCLGGSAAGEYLPGHTSMIRRDPLGVVASIAPWNYPLMMLAWKIAPALAAGNTVVIKPSELTPLTALRLGELAQDLLPPGVLNILFGRGQTVGNPLITHPKVRMVSLTGSIPTGAHIISATADSVKRMHMELGGKAPVLVFDDADIDAAIDGIRTFGFYNAGQDCTAACRLYVQDGIYERFVERLGKAVASLKPGLQESEETELGPLISAQHRDKVAGLVQRAIAQPHIRLVTGGKPIAGDGFFFEPTVLADALQDDEIVRNEVFGPVVSVTRFTDEAQALEWANDSNYGLASSVWTRDTGRAHRLAARLQYGCTWVNTHFMLVSEMPHGGQKHSGYGKDMSMYGLEDYTCVRHVMIKH

SEQ ID NO: 9355 - protein, 164 aa, Glycine max
HMHVNDAVDYLKSACEGKYDAIIVDSSDPVGPAQELVEKPFFDTIARALRPGGVLCNMAESMWLHTHLIQDMISICRETFKGSVCYAWASVPTYPSGVIGFLLCATEGPPVDFVNPINPIEKLEGANEHKRELRFYNSEMHSAAFALPAFLKREVSVLRDLSLQ

SEQ ID NO: 9356 - protein, 378 aa, Phanerochaete chrysosporium
MAFKSLIAFVALAAAVRAAPTAVCPDGTRVSHAACCAFIPLAQDLQETIFQNECGEDAHEVIRLTFHDAIAISRLQGPKAGGGADGSMLLFPTVEPNFSANNGIDDSVNNLIPFMQKHNTISAADLVQFAGAVALSNCPGAPRLEFLAGRPNKTIAAVDGLIPEPQDSVTKILQRFEDAGGFTPFEVVSLLASHSVARADKVDQTIDAAPFDSTPFTFDTQVFLEVLLKGVGFPGSANNTGEVASPLPLGSGSDTGEMRLQSDFALAHDPRTACIWQGFVNEQAFMAASFRAAMSKLAVLGHNRNSLIDCSDVVPVPKPATGQPAMFPASTGPQDLELSCPSERFPTLTTQPGASQSLIAHCPDGSMSCPGVQFNGPA

SEQ ID NO: 9357 - protein, 351 aa, Gordonia sp. TY-5
MKALVFHGPGQKAWEDVPDPKLSEPTDVIVKMDTTTICGTDLHILKGDVPAVTPGRILGHEGVGTITEVGDAVTTLAVGDQVILSCISSCGKCSFCKQGVYSHCLGSEGTSGIGWIFGHLIDGTQAEYVRVPYAENSVHKLPSAVSPEQGTLLSDILPTGHEIGVRHGAVKPGDVVAVIGTGPVGLAAIATAGLYGPSRVIAVDIDANRVEQARRFGATDGVVSTSSGWREEILAMTDGLGVDVAIEAVGIPDTFQMCLDIVRPAGHVANVGVHGKPVELPIQDLWISNIVMSMGLVNTNTLGTLLKLVAQRRIDPEPFISHRFGLGEIIDAYDVFSRAAETKALKVIMSA

SEQ ID NO: 9358 - protein, 166 aa, Bordetella bronchiseptica RB50
MNTMYDFSAPTITGAERALADFRGQVALVVNVASRCGFTPQYSGLEELYRSYRNEGFVVLGFPCNQFGRQEPDDEAAIAQFCETQYAISFPLFAKIDVNGAHAHPLYRWLKARKPGLLGTRAIKWNFTKFLVGRDGLPLRRYAPAHTPESLRHDIARACAAPGPTP

SEQ ID NO: 9359 - protein, 389 aa, Triticum aestivum
  misc_feature (126)..(126): Xaa can be any naturally occurring amino acid
  misc_feature (140)..(140): Xaa can be any naturally occurring amino acid
  misc_feature (165)..(165): Xaa can be any naturally occurring amino acid
  misc_feature (175)..(175): Xaa can be any naturally occurring amino acid
  misc_feature (185)..(185): Xaa can be any naturally occurring amino acid
  misc_feature (211)..(211): Xaa can be any naturally occurring amino acid
  misc_feature (228)..(228): Xaa can be any naturally occurring amino acid
  misc_feature (240)..(240): Xaa can be any naturally occurring amino acid
SVLYDHDLESCSLFDKNGLAVPMETAAKVGVIFEKILKETVKLRDEQEHDMPLEQAISMVLERHPDLKLEGLDDRILQWCVCRLEAWFAADADEISLKNWDQEHVLTGGHGLMVDGYLPVIQALAXGLDIRLNQRVKNIXRQRRGVPVTLEGWHPITRADAGIIXTVPLGVLKAXNIIKFEPEAXHSWKSSPIRRTLVSGIANKVPMHFDXAFWPNVQVLGMVGPTAXTCGYFLNLHSAXGHPVLVFMAAGRFAQDVEKLSDKEAVELVMCHLRKMIPDATEPNKYLVSRWGSDPNSLGSYSCDLVGKPSDVCERFSAPVESVLYFAGEAASAEHSGAVHGAYSSGMEAAEECRRRLLMSKGVPDLVQVAGAACEEMADVVAPLQICRT

SEQ ID NO: 9360 - protein, 456 aa, Streptococcus pyogenes SSI-1
MAYQTIYPYTNEVLHTFDNMTDQDLADVLERAHLLYKKWRKEDHLEERKAQLHQVANILRRDRDKYAEIMTKDMGKLFTEAQGEVDLCADIADYYADKADEFLMSMPLETDSGQAYYLKQSTGVILAIEPWNFPYYQIMRVFAPNFIVGNPMVLKHASICPRSAQSFEELVLEAGAEAGSITNLFISYDQVSQVIADKRVVGVCLTGSERGGASIAEEAGKNLKKTTLELGGDDAFIILDDADWDQLEKVLYFSRLYNAGQVCTSSKRFIVLDKDYDRFKELLTKVFKTAKWGDPMDPETTLAPLSSDQAKEDVLAQIKLALDNGAELVYGGEAIDHPGHFVMPTIIAGLTKDNPIYYQEIFGPVGEIYKVSSEEEAIEVANDSNYGLGGTIFSSNQEHAKAVAAKIETGMSFINSGWTSLPELPFGGIKHSGYGRELSELGFTSFVNEHLIYYSE

SEQ ID NO: 9361 - protein, 507 aa, Gordonia sp. TY-5
MTVYAKPGTEGSVMSFESRYDNWIGGQWTPPVKGQYFENPSPVDGKTFCEVARSTAEDIDLALDAAHKAAPQWGKTSVAERSLVLLRIADRLEENLEKIAVAETWDNGKAVRETLAADIPLAVDHFRYFAGALRAQEGSISEVDEDTVAYHFHEPLGVVGQIIPWNFPILMAVWKLAPALAAGNAVVLKPAEQTPASILYVMSLIADLLPAGVINIVNGFGVEAGKPLASSNRIRKIAFTGETTTGRLIMQYASENLIPVTLELGGKSPNIFFNDVMSADDGFLDRALEGFSMFALNQGEVCTCPSRALIQEDIYDDFIGKAVDRVSKIKQGNPLDTDTMMGAQASNDQFEKISSYLAIGKEEGAKVLIGGEPADLGGDLSGGYYIKPTVFDGHNKMRIFQEEIFGPVLAVTTFKDYADAIHIANDTLYGLGAGVWSRDGATAYRAGREIQAGRVWTNTYHDYPAHAAFGGYKQSGIGRETHLMMLEHYQQTKNLLVGYAQSAKGFF

SEQ ID NO: 9362 - protein, 581 aa, Glycine max
  misc_feature (481)..(481): Xaa can be any naturally occurring amino acid
  misc_feature (514)..(514): Xaa can be any naturally occurring amino acid
MCGILAVLGCSDSSQAKRVRVLELSRRLKHRGPDWSGLHQYGDNYLAHQRLAIVDPASGDQPLFNEDKTVVVTVNGEIYNHEELRKQLPNHTFRTGSDCDVIAHLYEEHGENFVDMLDGIFSFALLDTRDNSFIVARDAIGVTSLYIGWGLDGSVWISSELKGLNDDCEHFESFPPGHLYSSKERAFRRWYNPPWFSEAIPSAPYDPLALRHAFEKAVVKRLMTDVPFGVLLSGGLDSSLVAAVTARYLAGTNAAKQWGTKLHSFCVGLEGAPDLKAAKEVADYIGTVHHEFHYTVQDGIDAIEDVIYHIETYDVTTIRASIPMFLMSRKIKSLGVKWVISGEGSDEIFGGYLYFHKAPNKDEFHQETCRKIKALHKYDCLRANKSTFAWGLEARVPFLDKDFIRVAMNIDPEYKMIKKEEGRIEKWVLRRAFDDEEHPYLPKHILYRQKEQFSDGVGYGWIDGLKAHAEKHVTDRMMLNXAANIFPFNTPTTKEAYYYRMIFERFFPQNSARXLSVPGGPSVACSTAKAVEWDAAWSNNLDPSGRAALGVHASAYGNQVKAVEPEKIIPKMEVSPLGVAI

SEQ ID NO: 9363 - protein, 170 aa, Zea mays
MYPYTFRAAASSSSSTALGFALGRIGGTTRSGGVAAPGLVVPAAGVARGRSVSSTPAGSAPVPGDQGVGMDQPKQQQQPKVPPRDAAGGENKRDDMHKHTRDVMTHSFGEGYSTRSDEEGFGGVYGGNDPVEHPGAEIHPSHSEYDTSQGSEVKEKEKARHLKDEKHATA

SEQ ID NO: 9364 - protein, 426 aa, Leptospira interrogans serovar Copenhageni str. Fiocruz L1-130
MSEFIEIKVGEKSYQFPLISGTDGKKGIDIRELHQKTGLISYDPGFFNTAYAVSRISRRDPNSGELNYRGYDIADLVQHSTFVETSYLLIYGKLPTEQQLKDFSLKLSKHSLIHEDMINLFDGFPGKGHPLAVLSVMVTSLSSYYPEEYEESLDKGIDHSARLLAKIRTIAAFSYKKIVGQPFVYPLDKHPYCTNFLYMLFSIPSKDYIPTEDIDRILNQLWILYADHEQNVSNTTVQVIGSTQANLFASISSAINALWGSREGGRQVAAVGLIEDILKSRKSVPEYFEKFKGDSEKLFGNGFGHKAYEAKSRRAIIASKLFHDFYKKNPIGPIAEVALKIEEYMQNDEYYINQNLYPNLEFYSAVIFNSLGIPKELFTAMQVIGKLPGWLAHWREQRVSGNYSKARPKQIYSGEMGRKYIPLSER

SEQ ID NO: 9365 - protein, 251 aa, Brassica oleracea var. italica
MGRGRVEMKRIENKINRQVTFSKRRAGLLKKAHEISILCDAEVSLIVFSHKGKLFEYSSESCMEKVLEHYERYSYAEKQLKVPDSHVNAQTNWSVEYSRLKAKIELLERNQRHYLGEDLESISIKELQNLEQQLDTSLKHIRSRKNQLMHESLNHLQRKEKEILEENSMLAKQIRERESILRTHQNQSEQQNRSHHVAPQPQPQLNPYMASSPFLNMGGMYQGEYPTAVRRNRLDLTLEPIYNCNLGYFAA

SEQ ID NO: 9366 - protein, 437 aa, Brucella melitensis 16M
MDMKGKTMSDKTASFTLDGKTFDLPVRKGTVGPDVVDIGPLYKNSHAFTYDPGFTSTASCESKITYIDGDEGVLLYRGYPIDQLAEHGDFLETCYLLLYGELPTATQKADFDYRVTRHTMLHEQMTKFFTGFRRDAHPMAVMVGCLGAMSAFYHDSTDITDPHQRMVASIRLIAKVPTLAAMAYKYHIGQPFVYPKNDLDFASNFLHMCFTVPCEEYKVNPVLARAMDRIFILHADHEQNASTSTVRLAGSSGANPFACIAAGVACLWGPAHGGANEAALNMLSEIGSVDRIPEYIARAKDKNDPFRLMGFGHRVYKNYDPRAKIMQKTCHEVLGELGIKDDPLLDVAMELERIALTDEYFIEKKLYPNIDFYSGITLKALGFPTEMFTVLFALARTVGWVAQWKEMIEDPQQKIGRPRQLYTGATERDYVPLAKRK

SEQ ID NO: 9367 - protein, 217 aa, Chelidonium majus
  misc_feature (211)..(211): Xaa can be any naturally occurring amino acid
VKKAHEISVLCDAEVGLIVFSTKGKLFEFSSESSMDNILERYERQCFVEEELKATHPESEGNWSLEHTKLKARIEILQKNQRHFMGEDLDPLSLKELQNLEHQLDIALKHVRSRKNQLLYASIAELRKKEKALHEQNILLGKKIKQKEEQIAQWSAQQNDAQNSSSFLTQAPQNSQSFLTQALPSLTLRTGYYQTARVVVCEEDGARSNMXMPPWML

SEQ ID NO: 9368 - protein, 404 aa, Brassica rapa
MGICMSVQVKAESPSNTGASPKYMSSEANDTQSMGSKCSSVSVRTSPRTEGEILQSPNLKCFSFAELKAATRNFRLDSVLGEGGFGCVFKGWIDEESLTASKPGTGMVIAVKRLNIEGWQGHQEWLAEVNYLGRLSHPNLVKLIGYCLEDEHHLLVYEFMPCGSLENHLFRRGSYFEPLSWNIRLKIALGCAKGLAFLHSAETQVIYRDFKTSNILLDSNYNAKLSDFGLAKDGPTGDNSHVSTRVIGTYGYVDPGYLLNGHLTTKSDVYSYGVVLLEMLSGRKVVDNNRPPREQKLVDWAKPLLANKKKVSRVIDNRIRDQISVKEAHKVATQVFRCLDVDKNQRPNMNEIVFHLENIQASREEGGNKTEKRMRRRRDSFAQQTGVGGIATAYPRPSASPLFV

SEQ ID NO: 9369 - protein, 111 aa, Rubrivivax gelatinosus PM1
MSVMELNELVKAIEEKFGVSAAAMAAPAAGGGGGAAAAVEEKTEFNVVLLEAGANKVSVIKAVRELTGLGLKEAKDLVDGAPKNVKEAVAKADAEAAVKKLVEAGAKAELK

SEQ ID NO: 9370 - protein, 115 aa, Hordeum vulgare subsp. vulgare
MARAAATQLVLVAMVAAMLIVATDAAISCGQVSSALSPCISYARGNGAKPPVACCSGVKRLAGAAQSTADKQAACKCIKSAAGGLNAGKAAGIPSMCGVSVPYAISASVDCSKIR

SEQ ID NO: 9371 - protein, 197 aa, Brassica napus
MSASRFVKCVTVGDGAVGKTCLLISYTSNTFPTDYVPTVFDNFSANVVVNGATVNLGLWDTAGQEDYNRLRPLSYRGADVFILAFSLISKASYENVSKKWIPELKHYAPGVPIILVGSKLDLRDDKQFFVDHPGAVAITTAQGEELRKLIDAPTYIECSSKSQENVKAVFDAAIRVVLQPPKQKKKKSKAQKACSIQ

SEQ ID NO: 9372 - protein, 251 aa, Brassica napus
  misc_feature (7)..(7): Xaa can be any naturally occurring amino acid
GTASVVXAALIGALRFVGGSLANHRFLFLGAGEAGTGIAELIALEISKKCQIPLEEARKNIWLVDSKGLIVSSRKESIQHFKKPWAHDHKPIKELVDAVKAIKPTVLIGTSGVGQTFTQEVVETMAELNEKPIILSLSNPTSQSECTAEQAYTWSKGRAIFASGSPFAPVEYEGKTFVPGQANNAYIFPGFGLGLIMSGTIRVPDDMLLPASHAFPPHPTDPPYEKGMIFPPFRNIRKISARIAAKVAAKA

SEQ ID NO: 9373 - protein, 188 aa, Eucalyptus camaldulensis
MAFAGTTQKCMACEKTVYLVDKLTADNRIYHKACFRCHHCKGTLKLGNYNSFEGVLYCRPHFDQLFKRTGSLEKSFEGTPKIAKPEKPVDGERPAATKASSMFGGTRDKCVGCKSTVYPTEKVTVNGTPYHKSCFKCTHGGCVISPSNYVAHEGKLYCRHHHTQLIKEKGNLSQLEGDHERETMAPES

SEQ ID NO: 9374 - protein, 229 aa, Corylopsis sinensis
VQLKRMENKINRQVTFSKRRAGLLKKANEISVLCDAEVGLIVFSTKGKLYDMERIFDRYERYSYAERQLVVTNHESQGSWTIEHAKLKARMEVLQRNQRHFMGENLDSVSLKELQNLEHQLDNALKHIRSRKNLLMQESISELQRKDKSLQEENNSLSKKIKEKENALAHRAQWEQQNQGLNSFPILLSQPPQSLNIGTYQTGCSEGEEGTPFQQRPNTLLPHWMVSHL

SEQ ID NO: 9375 - protein, 365 aa, Populus kitakamiensis
MGSTGETQMTPTQVSDEEAHLFAMQLASASVLPMILKTAIELDLLEIMAKAGPGAFLSTSEIASHLPTKNPDAPVMLDRILRLLASYSILTCSLKDLPDGKVERLYGLAPVCKFLTKNEDGVSVSPLCLMNQDKVLMESWYYLKDAILEGGIPFNKAYGMTAFEYHGTDPRFNKVFNKGMSDHSTITMKKILETYKGFEGLTSLVDVGGGTGAVVNTIVSKYPSIKGINFDLPHVIEDAPSYPGVEHVGGDMFVSVPNADAVFMKWICHDWSDAHCLKFLKNCYDALPENGKVILVECILPVAPDTSLATKGVVHVDVIMLAHNPGGKERTEKEFEGLANGAGFQGFEVMCCAFNTHVIEFRKKA

SEQ ID NO: 9376 - protein, 364 aa, Populus kitakamiensis
MGSTGETQMSPAQILDEEANFAMQLISSSVLPMVLKTAIELDLLEIMAKAGPGALLSPSDIASHLPTKNPDAPVMLDRILRLLASYSILICSLRDLPDGKVERLYGLASVCKFLTKNEDGVSVSPLCLMNQDKVLMESWYHLKDAILEGGIPFNKAYGMTAFEYHGTDPRFNKVFNKGMSDHSKMAMKKILESYKGFEGLASLVDVGGGTGAVVSTIVSKYPSIKGINFDLPHVIADAPAFPGVENVGGDMFVSVPKADAVFMKWICHDWSDEHCLRLLKNCYDALPENGKVILVECILPVAPDTSLATKGVMHVDAIMLAHNPGGKERTDKEFEGLARGAGFKGFEVMCCAFNTHVIEFRKQA

SEQ ID NO: 9377 - protein, 222 aa, Brassica rapa subsp. pekinensis
MAAPPARARADYDYLIKLLLIGDSGVGKSCLLLRFSDGSFTTSFITTIGIDFKIRTIELDGKRIKLQIWDTAGQERFRTITTAYYRGAMGILLVYDVTDESSFNNIRNWIRNIEQHASDNVNKILVGNKADMDESKRAVPTAKGQALADEYGIKFFETSAKTNLNVEEVFFSIGRDIKQRLSDTDSRAEPATIRISQTDQELDCAGHTEVCMLWKLKTNYIN

SEQ ID NO: 9378 - protein, 1102 aa, Schizosaccharomyces pombe
MPQSQVATASPSQNAQPNHGMGSKVLSSDPNASLPPQTAYYASPLHANSVSLPPSHLPRSTLHPLLSQQQQPAQQSPSLGPAQQNIQQPPSVSIASQPHYAEAIVPIQQVLQPQQYRQLPPNMVAATNAPQQHPQLQRMMPILSSNQPIQQLPLPNQASPYIPVPLQQQQQSQPQQQPQQQQHQQPQQPQPPQQPLQQQQQQRQLHSGIQQPVSTIVSQNGTYYSIPAVNHPMAGQPIAIAPVPAPNQAALPPIPPQALPANGTPNTLASPVTLPAANSAVQNAQPVPMTSSPAMAVVPQNKTAATSTLAAQQGANVLPPNAPESVRHLISLNEETWIQIGRLAELFDDQDKALSAYESALRQNPYSIPAMLQIATILRNREQFPLAIEYYQTILDCDPKQGEIWSALGHCYLMQDDLSRAYSAYRQALYHLKDPKDPKLWYGIGILYDRYGSHEHAEEAFMQCLRMDPNFEKVNEIYFRLGIIYKQQHKFAQSLELFRHILDNPPKPLTVLDIYFQIGHVYEQRKEYKLAKEAYERVLAETPNHAKVLQQLGWLCHQQSSSFTNQDLAIQYLTKSLEADDTDAQSWYLIGRCYVAQQKYNKAYEAYQQAVYRDGRNPTFWCSIGVLYYQINQYQDALDAYSRAIRLNPYISEVWYDLGTLYESCHNQISDALDAYQRAAELDPTNPHIKARLQLLRGPNNEQHKIVNAPPSNVPNVQTAKYINQPGVPYSNVPVAQLSGNWQPPHLPQAQLPSATGQSGVVQQPYQTQPSVTNNNVATQPVIASTVPVQTAAPSSQTAVPQTIHQSNAFTPRGKHASGSRNSISSTKSPQHKLSDQPRSRNNSISNVSHRERSNSVSSKSRETRTSASNESDPKKSTQRDSSKKLENSTVVSGSPSSSSKSDAAKSIKPQKPEPALKPVEGTADPKSTKRNHQETEKTADTDVSSTEPVKRQKTADVNDDVGEEEVKQSVSEQVDSAQLTSEPKSESLPKSPEEKSDDTSNDVTTENTNDINGDSNMDNVATVDKSTDAVDTSTATVAATTTTAEEELPQKESQERSSPSPENQDSTPLAPKSVSPKQAARTLDIDENYDDDEGEKETVSV

SEQ ID NO: 9379 - protein, 287 aa, Salmonella enterica subsp. enterica serovar Typhi Ty2
MKSIVIEKPNTLTIETRALLQPASGEVRIKVKLAGICGSDSHIYRGHNPFAKYPRVIGHEFFGVIDAVGDNVNRDRIGERVSVDPVISCGHCYPCSVGKPNVCTSLVVLGVHRDGGFSEYAVAPARNAHRIPDNIADHHAVMVEPFTIAANVTGQVNPTEQDVALIYGAGPMGLTTVQALKGVYQVKTVIVVDRIEESPAARIVLMGFSSDPCEIVQQGITGKELAIYSSRLNANKFPVVIDWLNKGLIDPDKLITHTFDYQHVTDAIELFEKDQRQCCKVLLTFAK

SEQ ID NO: 9380 - protein, 425 aa, Streptococcus pyogenes
MLTSKHHNLNKLVWRYGLTSAAAVLLAFGGGASSVKAEVSTAAMTKEERQQEIEKIKEDIKKEYPKASEEKFWESSFWGRRYFNEQEYLKSLQSFTEQRLQDIVNLIEKGATKGDKGDAGPKGERGPAGPQGPVGPKGEAGKVGAQGPKGDPGAPGKDGAKGEKGDKGDTGERGEKGDIGATGAQGPQGEKGETGAQGPAGPQGEAGKPGEQGPAGPQGEAGKPGEKAPEKSPEGEAGQPGEKAPEKSPEVTPTPETPEQPGEKAPEKSPEVTPTPETPEQPGEKAPEKSPEVTPTPETPEQPGEKAPEKSPEVTPTPEMPEQPGEKAPEKSPEVTPTPEMPEQPGEKAPEKSKEVTPAPEKPADKEANQTPERRNGNMAKTPVANNHRRLPATGEQANPFFTAAAVAVMTTAGVLAVTKRKENN

SEQ ID NO: 9381 - protein, 155 aa, Ipomoea nil
MDLRLMGFDHPLFHHIMDYAGDDKSSNSSAPSRTFMLDAKAMAATPADVKEYPNSYVFIIDMPGLKSGDIKVQVDGDNVLSISGERKREAEEKEGAKYVRMERRVGKLMRKFVLPENANKEKITAVCQDGVLTVTVENVPPPEPKKPRTIEVKIG

SEQ ID NO: 9382 - protein, 482 aa, Triticum aestivum
  misc_feature (210)..(210): Xaa can be any naturally occurring amino acid
  misc_feature (417)..(417): Xaa can be any naturally occurring amino acid
  misc_feature (438)..(438): Xaa can be any naturally occurring amino acid
MASPFSAPSLIMEEEGRFEAEVAEVGAWWNTERFRLTKRPYTARDVVLLRGTLRQSYASGEMAKKLWRTLKAHQAGGTASRTFGALDPVQVTMMAKHLDTIYVSGWQCSSTHTSTNEPGPDLADYPYDTVPNKVEHLFFAQQYHDRKQQEARMSLPRAERAHAPFVDFLKPIIADGDTGFGGATATVKLCKLFVERGAAGVHLEDQVVGXTKKCGHMAGKVLVAVSEHVNRLVAARLQFDIMGVETVLVARTDAVAATLIQTNIDARDHQFILGATNPRLKNRSLTAMLSDAMSAGKNGRELQAIEDEWTATAQLKTFSECVKDAIARLNSTDLDKQRKLQEWSKATSYDKCVSHEQARDIAASLGVGSVFWDWDLPRTREGFYRFQGSVASAVVRGRAFAPHADVLWMETSSPNIXECTAFAEGVRAAFPEAVLDPXLSPSFNWDASGMTDADMAGFIPHVAKLGVSLEFINGPGFEPAWS

SEQ ID NO: 9383 - protein, 431 aa, Picrophilus torridus DSM 9790
MNLFIFRRDLRLYDNTALLKSLNNETATIFIMDPAQVKNNEYRSEKALNFMISSLYDLMTDIEGNHGKLAVFHGDPVDVLKRLVNRENINEIYINRDYTPFSIKRDERIKEFSIKNNIKFNALDDYFLSDPELRTGSGSFFKNFTAFYNRAMEINVKKPVYEIKKSNLIPIDGDDMELKYNNYGRKTAIEKMHNFIKNDYSLRDFPELNMTSFLSADIKFGNISIREAYHYIKDPEFRRQLYWRDFYLYIAYHFPYVFGSNFNRKYNIKWENKEKYIDAWKNGLTGYPIVDAAMRSLNETGYINNRLRMIVSSFLVKDLHVDWRIGEKYFAQKLIDYDPASNNGNWQWVASTGVNSRGMYRIINPWIQQKKFDPECKFIKRYVNELSDLEPEIIHNLYKIRLNNYPAPLVDHKTAVMEFRKLINQTPTYLS

SEQ ID NO: 9384 - protein, 384 aa, Ralstonia eutropha JMP134
MSEAQAIATPKPKKSVALSGVTAGNTALCTVGRTGNDLHYRGYDILDVADACEFEEIAHLLVHGKLPNKAELAAYKTKLKSLRGLPANVKAALECVPASAHPMDVMRTGVSVLGTVLPEKDDHNTPGARDIADQLMASLGSMLLYWYHYSHNGRRIEVETDDDTIGAHFLHLLHGKKPSALWERAMHTSLILYAEHEFNASTFTGRVIAGTGSDMHSAICGAIGALRGPKHGGANEVAFEIQKRYDTPDEAQADITRRVENKEVVIGFGHPVYTVADPRNQVIKETARNLSKDAGSMKMFDIAERLETVMWDIKKMFPNLDWFSAVSYHMMGVPTAMFTPLFVIARTSGWAAHIIEQRIDNKIIRPSANYTGPENLTFVPIEKR

SEQ ID NO: 9385 - protein, 365 aa, Rosa chinensis
MGSTGETQMTPTQVSDEEANLFAMQLASASVLPMVLKAAIELDLLEIMAKAGPGAFLSPNDLASQLPTKNPEAPVMLDRMLRLLASYSILTYSLRTLPDGKVERLYGLGPVCKFLTKNEDGVSIAALCLMNQDKVLVESWYHLKDAVLDGGIPFNKAYGMTAFDYHGTDPRFNKVFNKGMADHSTITMKKILETYKGFEGLTSIVDVGGGTGAVVNMIVSKYPSIKGINFDLPHVIEDAPQYPGVQHVGGDMFVSVPKGDAIFMKWICHDWSDEHCLKFLKNCYAALPDNGKVILGECILPVAPDTSLATKGVVHIDVVMLAHNPGGKERTEQEFEALAKGSGFQGIRVACNAFNTYVIEFLKKI

SEQ ID NO: 9386 - protein, 236 aa, Heuchera americana
VQLRRMENKINRQVTFSKRRGGLVKKAHEISVLCDVEVALIVFSNKGKLFEYSTDSCMEKILERYERYSYAERRLVATGSESQENWSLEYTKLKAKIELLQRSQRQFMGEDLDLLSLRELQNLEQQLDTALKHIRSRKNQLMNQSISDLQKKEKAIQEQNNLLAKKIKEKEKAMSQQAEWEQQNNGASTSNFLNPQPLPCLNISSTYQGGAQPEAMRRNELDLTLEPIYSCHLGCF

SEQ ID NO: 9387 - protein, 366 aa, Bacillus cereus ATCC 14579
MPKHRKQSKIKIYRITSYKKDKRSELDSDKFELEQQDKHDIQDKQDKQDEQNKQDKQVQSENVTIVPTDSHSLDVWDEISLKEIQAGEHTSLFEEKSNYQNINLVQVNDVRLYLDKQLQFSSVDEQIYHEALVHPIMAKVIDPKRVLILGGGDGLALREVLKYETVLHVDLVDLDEAMINMARNVPEIVSLNKNAFFDNRVNVHVCDAKEFLNSPSSLYDVIIIDFPDPATELLSTLYTSELFARIATFLTEDGAFVCQSNSPADAPLVYWSIGNTIEHAGLTVKSYHTIVPSFGTDWGFHLATNSAHVLDQIEQLYVVPTPRTLPALLFPLFQFKEEHLEQRNLALLNSESNLILHQCYKQEMKF

SEQ ID NO: 9388 - protein, 348 aa, Rosa hybrid cultivar
NQKWSNGEHSNELLHAQAHIWNHIFSFINSMSLKSAIQLGIPDIINKYGYPMTLSELTSALPIHPTKSHSVYRLMRILVHSGFFAKKKLSKTDEEGYTLTDASQLLLKDHPLSLTPYLTAMLDPVLTNPWNYLSTWFQNDDPTPFDTAHGMTFWDYGNHQPSIAHLFNDAMASDARLVTSVIIDDCKGVFEGLESLVDVGGGTGTMAKAIADAFPHIECTVLDLPHVVADLQGSKNLKYTGGDMFEAVPPADTVLLKWILHDWNDQECIKILKRSRVAITSKDKKGKVIIIDMMMENQKGDEESIETQLFFDMLMMALVGGKERNEKEWAKLFTDAGFSDYKITPILG

SEQ ID NO: 9389 - protein, 354 aa, Zinnia elegans
MGSNQDDQAFLFAMQLASASVLPMVLKTAIELDLLETIAKAGPHGSVSSSELVAQLPKVNNPEAPVMIDRICSLLASYSVLTCTLKETADGCAERFYGLAPVCKFLIKNDAGVSLAPLLLMNQDKVLMESWYYLKDPVLDGGIPFNKAYGMSAFEYHGKDQRFNKVFNSGMFNHSTMTMKKIVELYNGFSGLKTLVDVGGGTGASLNMITSKHKSLKGINFDLPHVIADATTYQGIEHVGGDMFESVPKGDAIFMKWILHDWSDAHCLQVLKNCYKSLPENGKVIVAECILPEAPDTTPATQNVIHIDVIMLAHNPGGKERTEKEFEALAKGAGFKGFNKAACALNTWVMEFCK

SEQ ID NO: 9390 - protein, 477 aa, Azotobacter vinelandii
MSSSVPVHRNYIDGAFVESAAHLEVFNPANGALLSRVPAASAEEVERALAAARAAQKDWARKPAIERAGHLRRIAAKIRADAGRIARTITLEQGKIASLAEVEVNFTADYLDYMAEWARRLEGEIIASDRPGENIFLFRKPLGVVAGILPWNFPFFLIARKMAPALLTGNTIVVKPSEETPNNCFEFARLVAETDLPRGVFNVVCGAGQVGGALSSHPGVDLISFTGSVETGARIMAAAAPNLTKLNLELGGKAPAIVLADADLELAVKAIRDSRIINSGQVCNCAERVYVQRQVAEPFIERIAAAMAATRYGDPLAEPEVEMGPLINRLGLEKIDAKVRTALAQGATLVTGGAIAERPGHHYQPTVLTGCRADTRIMREEIFGPVLPIQIVDDLDEAIALANDCEYGLTSSVFTRDLNKAMHALRELDFGETYINREHFEAMQGFHAGVRKSGIGGADGKHGLYEYTHTHVVYLQS

SEQ ID NO: 9391 - protein, 361 aa, Glycine max
  misc_feature (68)..(68): Xaa can be any naturally occurring amino acid
  misc_feature (199)..(199): Xaa can be any naturally occurring amino acid
WRSVKPLALIRPSAAADVARVVKHAAASSSRTVAARGNGHSINGQAMAEQGLVLDMRAIQDPFEILSXDGSLYVDVSGGALWEDVLKRCVSEFRLAPRSWTDYLGLTVGGTLSNAGVSGQAFRYGPQTANVTELEVVSGKGETLVCSESQNSELFFATLGGLGQFGIITRARVPVQQAPDMVRWIRVVYTEFGDFTRDXEWLVTLREGDGFDYVEGFVFVNSDDPCNGWTTVPVGPNQYFDPVRIPSTAGPVLYCLELALHYRNQDHPSAVDMEVDRLLGRLRFVEGLKFSVDVTYMEFLLRVKRVEEDAKANGIWDAPHPWLNMFVSKSNIAEFDREVFKKILKHGVGGPILVYPLLRSK

SEQ ID NO: 9392 - protein, 348 aa, Rosa hybrid cultivar
NQKWSNGEHSNELLHAQAHIWNHIFSFINSMSLKSAIQLGIPDIINKHGYPMTLSELSSALPIHPTKSHSVYRLMRILVHSGFFAKKKLSKIDEEGYTLTDASQLLLKDHPLSLTPFLTAMLDPVLTKPWNYLSTWFQNDDPTPFDTTHGMTFWDYGNHQPNIAHLFNDAMASDARLVTSVIIDDCKGVFEGLESLVDVGGGTGTVAKAIADAFPHIECTVLDLPHVVGDLQGSKNLKYTGGDMFEAVPPADTVLLKWILHDWNDEECIKILKRSRVAITSKDKKGKVIIIDMMMENQKGDEESIETQLFLDMLMMALVGGKERNEKEWAKLFTDAGFSDYKITPILG

SEQ ID NO: 9393 - protein, 176 aa, Arabidopsis thaliana
MAESQTGGGGGGSHESGGDQSPRSLNVREQDRFLPIANISRIMKRGLPLNGKIAKDAKETMQECVSEFISFVTSEASDKCQREKRKTINGDDLLWAMATLGFEDYIDPLKVYLMRYREMEGDTKGSGKGGESSAKRDGQPSQVSQFSQVPQQGSFSQGPYGNSQGSNMMVQMPGTE

SEQ ID NO: 9394 - protein, 178 aa, Glycine tomentella
MASSMISSPAVTTVNRAGAGTVAPFTGLKSMAGFPTRKTNNDIASIASNGGRVQCMQVWPTTGKKKFETLSYLPDLDDAQLAKEVEYLLRKGWIPCLEFELEHGFVYRENHRSPGYYDGRYWTMWKLPVFGCTDASQVLKELQEAKTAYPNGFIRIIGFDNVRQVQCISFIAYKPPSF

SEQ ID NO: 9395 - protein, 178 aa, Glycine tabacina
MASSMISSPAVTTVNRAGAGTVAPFTGLKSMAGFPTRKTNNDIASIASNGGRVQCMQVWPTTGKKKFETLSYLPDLDDAQLAKEVEYLLRKGWIPCLEFELEHGFVYREHHRSPGYYDGRYWTMWKLPMFGCTDASQVLKELQEAKTAYPNAFIRIIGFDNVRQVQCISFIAYKPPSF

SEQ ID NO: 9396 - protein, 593 aa, Zea mays
GLPTPLPSASASASASASASSGGDSSLGSSTSDDQLDLGVYRLSETSSTLLGRTVAIESRKQSQVPAEGTIFTNNQAVEHTRLSETSVSPRKEFRPQNLDLANDRTTYCRGRRSTEIVFSTQVPTSPPSSRGHHYQNSPVPSRTFGQCPASPTSWQHDSRSSSSPQPLPLPPGSPCLPSSSLQWKKGKLLGSGTFGQVYMGFNSEGGQMCAIKEVKVISDDSNSKESLRQLNQEIVLLSQLSHPNIVQYYGSDLCNETLSVYLEYVSGGSIHKLLQEYGPFGEAVLRNYTAQILSGLAYLHGRNTVHRDIKGANILVDPNGDIKLADFGMAKHISAYTSIKSFKGSPYWMAPEVIMNSNGYSLSVDIWSLGCTILEMATAKPPWSQYEGVAAIFKIGNSKDIPDIPNNLSSEAKGFLKLCLQRDPAARPTAAQLMDHPFVKDQATVRSSRSSITRDMFPNSTDGKNSRVKIETSSYRSLSPLRDPDILGRNLPGPTSPIPSTSSRRIAALNTSNVRMNMSLPVSPCSSPLRQYRQSNRSCLRSPPHPAYSAGAANYNPINNALYPTRPSSGLTDPWLEISQVKTQTFDSPRRL

SEQ ID NO: 9397 - protein, 209 aa, Triticum aestivum
  misc_feature (115)..(115): Xaa can be any naturally occurring amino acid
  misc_feature (129)..(129): Xaa can be any naturally occurring amino acid
  misc_feature (138)..(138): Xaa can be any naturally occurring amino acid
MAAVPPPPPKLPTTRLLLSSEPGRSPPQPPTPPPSTRTGNLAMAAASSATSVHDFTVKDASGKDVDLSVYKGKVLLIVNVASQCGLTNSNYTELSQLYPKYKDQGFEILAFPCNXFGGQEPGTNDEIVXFACTRFKAXPIFDKVDVNGSNVSPLYKFLKSSKGGLFGDSIKWNFSKFLVDKEGHVVDRYAPTTSPLSMEKDIKKLLGSS

SEQ ID NO: 9398 - protein, 495 aa, Chromobacterium violaceum ATCC 12472
MARSHAEWKQLAAELKIEGRAFINGEYRDAAEGKRFDCVNPANGAKLAEIAHCGEAEVEAAVKAARRAFESGVWSELAPLKRAAVLKRFAALIREHADELSLLETLDVGKPIGDTTAVDVPASAYCVEWFAEAIDKVGGEVVPVDPKLVGLVTREPIGVVAAVVPWNFPILMASWKFGPALAAGNAVIVKPSEKSPLTAIRIAALAKQAGIPDGIFQVLPGAGDVGRLLALHMDVDCVAFTGSTNVGKLIAGYAAQSNLKRAWLELGGKSPNIILPDCPDLARAARAAASGIFYNMGEVCTAGSRVLVHKDIKERFLEEFKKAAAGFFPGDPLDPATSMGAIVDDIQYRKVLNYIDKGLSEGANLLLGGKAVHTDKGLFIEPTAFDCPSDDLTICREEIFGPVLSVITFSELDDAIRIANDTSYGLAAAVWTSNVSTAHQVSRRLRAGTVWVNCYDEGGDMNFPFGGYKQSGNGRDKSLHALEKYTELKSTLIKL

SEQ ID NO: 9399 - protein, 401 aa, Chlorobium tepidum TLS
MKKIGILTSGGDCGGLNAVIKGAALMALNKGLELYVIPNGYAGLYNLLNQDRLVRLDEARLDQFQASFAGSEAGHSRVKIKAISNPDKYNRIKVGMKKFDLDALIISGGDDSGSVMIDLNHNGIQCIHCPKTMDLDLQTYSVGGDSTINRIAQFVEDLKTTGRTHNRVLVTEVFGRYAGHTAFRSGVAAEADCILIPEIPVDWDVVYEHIVERFTRRIRQSDVHSGTYTIVVAEGMKNADGTDIVDESAGIDAFGHKKLAGAGKYVCQEIKKRFKTDPRMPQFMKDTGMFVEGIYEIPEVREVHPGHLVRAGHSSAYDINFGFEAGAAAVLLLLEGKTGVTISKVKGRKIEYIEASKAIEQRYVDLDQVAMYESIGTCFGRTPAAYEPILREVDGVYERIY

SEQ ID NO: 9400 - protein, 502 aa, Leymus chinensis
SAIPRRGLFIGGGWREPTLGRRIPVINPATEDTIGDIPAATVEDVELAVAAARSAFLLDGGSRWSRASGATRAKYLNAIAAKIKEKISYLALLETVDSGKPKDEAVADMDDVAACFEYYAGLAEALDGKQHAPISLPMEEFKTYVLKEPIGVVGLITPWNYPLLMATWKVAPALAAGCTAVLKPSELASLTCLELGAICEEIGLPSGVLNIITGLGADAGAPIASHPHVDKIAFTGSTATSKTIMTAAAQMVKPVSLELGGKSPLVIFDDVADIDKAVEWAMFGCFFNGGQVCSATSRLLLREKIAERFLDRLVEWAKNIKISDPLEEGCRLGSVVSKGQYEKIKKFISTARSEGATILHGGDRPKHLGKGFFIEPTIITDVSTSMQIWREEVFGPVICVKVFKTESEAIELANDTHYGLAGGVISDDLERCERIAKVIHSGIVWINCSQPTLVQAPWGGNKQSGFGRELGEWGLENYLSVKQVTRYCKDELYGWYQRPSKL

SEQ ID NO: 9401 - protein, 455 aa, Gibberella zeae PH-1
MDDLHLAPEPHLMHRSLLTRPEAVSSASGVYLNLSSGRKILDGCAGAAVAIIGHGSTEVQDAVVAQASQVSYVHTLTYTTSSAEELADHLLENEPFGLTRAYLVCSGSEAMDSAMKLARQYHVENGQPERTRFVSRRQAYHGNTVGAMSVGSHLARRAPYEGAILLDNVSHVSAAYEYRTKKDGETEEEYSKRLVDELEAEFLSVGPEKIMAFIAETVGGATAGCITPPAGYFSGVSKVCKKYGILLILDEIMCGVGRCGTFFAFEQDGDVQPDMVTIGKGLGGGYMPIAATLVHKGIIETLKKGTASFNHGHTYQAHPVSCAAALAIQKIIRRDNLVSRCATLGERLHKSLVETFKDAEFVGNIRGRGLFWGIEFVQDKKTKMPFDSKIRFGVKVQERAFELGLAVYPGMGTADGLVGDHVIVSPPLTITEEEMDVLVGLLKRAYDDVASKYGV

SEQ ID NO: 9402 - protein, 502 aa, Leymus chinensis
MASPAIPQRQLFIDGEWRAPALGRRLPVINPTTEASIGEIPSGTSEDVDAAVAAARAALKRNRGRDWSRAPGAVRAKYLRAIAAKMIERKADLARLEALDCGKPLDEAAWDMDDVAGCFEFFAGHAEALDKRQNAAVSLPENFKCHLKKEPIGVVSLITPWNYPLLMATWKVAPALAAGCTAVLKPSELASVTCLELADVCKEVGLPPGVLNVVTGLGPEAGAPLSSHPDVDKVAFTGSYATGQKIMVAAAPTVKAVTLELGGKSPIVVFDDVDIDKAVEWTLFGCFWTNGQICSATSRLLIHKNIAKEFVDRMVAWSKNIKVSDPLEEGCRLGPVVSEGQYEKIKKFISNAKSEGATILTGGVRPKHMEKGFFIEPTIITDINTSMEIWREEVFGPVLCVKEFSTEEEAIELANDTHYGLAGAVISGDRERCQRLAEEIDAGCIWVNCSQPCFCQAPWGGNKRSGFGRELGEGGIDNYLSIKQVTEYTSDAPWGWYKAPAN

SEQ ID NO: 9403 - protein, 388 aa, Streptococcus pyogenes SSI-1
MKNQLGQLALEQAKTFGGKLEVQPKVDITNKHDLSIAYTPGVAGVSSAIAKDKTLAYDLTTKKNTVAVISDGTAVLGLGDIGPEAAMPVMEGKAALFKAFAGVDAIPIVLDTKDTEEIISIVKALAPTFGGINLEDISAPRCFEIEQRLIKECHIPVFHDDQHGTAIVVLAAIFNSLKLLQKSLDEVSIVVNGGGSAGLSITRKLLAAGATKVTVVDKFGIINEQEADQLAPHHLDIAKVTNREFKSGTLEDALEGADIFIGVSAPGVLKAEWISKMAARPVIFAMANPIPEIYPDEALEAGAYIVGTGRSDFPNQINNVLAFPGIFRGALDARAKTITVEMQIAAAKGIASLVPGDALSTTNIIPDAFKEGVAEIVAKSVRSVVLKS

SEQ ID NO: 9404 - protein, 391 aa, Streptococcus thermophilus
MAERILMTNGKLKVTDNPIIPFIEGDGVGRDIWKNAQAIFDKAVEAAYEGQRRIEWQEFLAGKKAFDKTGEWLPQETLEAIRESLVAIKGPLETPVGGGIRSLNVALRQELDLYACVRPVRYFEGVASPLKEPEKTDITIFRENTEDIYAGIEWEAGTVDVERVIAFFQTEMNVDKIRFPKSSSIGIKPISIEGSKRLIRSAIDYALKNNLKKVTLVHKGNIQKFTEGGFRKWGYEVAEEEYKEEMLAGRLEVNDIIADNFLQQILLNPEKFDVVALTNLNGDYASDALAAQVGGIGISPGANINYQTGHAIFEATHGTAPDIADQDRANPCSILLSGCMLLEYIGWSEAAELIISAIEKNFKSGIFTVDLAFGKRAYSTSGFSNQILSII

SEQ ID NO: 9405 - protein, 200 aa, Glycine max
MSGRVSGKVKWFNDQKGFGFISPDDGSDDLFVHQSQIKSDGFRSLAEGESVEFAIESESDGRAKAVDVTGPDGASVQGTRRGGDGGRSYGGGRGGGGGGYGGGGGYGGGGGYGGGGGYGGGGRGGGGGACYNCGESGHLARDCSGGGGGDRYGGGGGGRYGGGGGGRYGGGGGGGGGGGGSCYSCGESGHFARDCPSSAR

SEQ ID NO: 9406 - protein, 349 aa, Streptococcus pyogenes SSI-1
MKAATYLSTGNLQLIDKPKPVIIKPTDAIVQLVKTTICGTDLHILGGDVPACKEGTILGHEGIGIVKEVGDAVTNFKIGDKVIISCVTSCHTCYYCKRGLSSHCEDGGWILGHLINGTQAEYVHIPHADGSLYHAPDTIDDEALVMLSDILPTSYEIGVLPSHVKPGDNVCIVGAGPVGLAALLTVQFFSPANIIMVDLSQNRLEAAKTFGATHTICSGSSEEVKTIIDDITNGRGVDISMECVGYPATFDICQKIISVGGHIANVGVHGKPVDFNLDELWIKNITLNTGLVNANTTEMLLNVLKTGKIDATRLITHHFKLSEVEKAYETFKHAGANNALKVIIDNDIS

SEQ ID NO: 9407 - protein, 310 aa, Malus x domestica
MSTVTLSSGYEMPVIGLGLWRLEKDELKEVILNAIKIGYRHFDCAAHYKSEADVGEALAEAFKTGLVKREELFITTKIWNSDHGHVVEACKNSLEKLQIDYLDLYLVHYPMPTKHNAIGKTASLLGEDKVLDIDVTISLQQTWEGMEKTVSLGLVRSIGLSNYELFLTRDCLAYSKIKPAVSQFETHPYFQRDSLVKFCMKHGVLPTAHTPLGGAAANKDMFGSVSPLDDPVLNDVAKKYGKSVAQICLRWGIQRKTAVIPKSSKIQRLKENLEVLEFQLSDEDMQLIYSIDRKYRTSLPSKTWGLDVYA

SEQ ID NO: 9408 - protein, 206 aa, Triticum aestivum
MGERVKGTVKWFNVTKGFGFISPDDGGEDLFVHQSSIKSDGYRSLNENDAVEFEIITGDDGRTKANDVTAPGGGALSGGSRPVEGGGDRGGRGGYGGGGGGYGGGGGGYGGGGGGYGGGGGGYRGGGYGGGGGGGRGCYKCGEEGHISRDCPPGGGGGYRGGGYGRGGRGGGGPECYQCGEEGHISRDWPQGGGGRRWLLKPWAAL

SEQ ID NO: 9409 - protein, 219 aa, Oryza sativa (japonica cultivar-group)
MPDSDNDSGGPSNYAGGELSSPREQDRFLPIANVSRIMKKALPANAKISKDAKETVQECVSEFISFITGEASDKCQREKRKTINGDDLLWAMTTLGFEDYVDPLKHYLHKFREIEGERAAASTTGAGTSAASTTPPQQQHTANAAGGYAGYAAPGAGPGGMMMMMGQPMYGSPPPPPQQQQQQHHHMAMGGRGGFGHHPGGGGGGSSSSSGHGRQNRGA

SEQ ID NO: 9410 - protein, 283 aa, Methanosarcina barkeri str. fusaro
MSNRLSKRNLNRGELMVSGKVSRKIAAKEELLLILPKIDRVLESEPAVLRIDAEPIMIIGDIHGDLQALEFIIEKRQEINCKNILFLGDYVDRGPQGVEVLTRVFRLKLEEPEHIFLLRGNHETVDMNLYYGFFEEIGFDQGFLLRTSRTYDKMPIAAVLSEHTFCVHGGINGTGSIDDIRKEEAFAFPYLWNDPSKHPGLTASTRGSTVKEFGPDIVDGFLQTNNLKRIIRGHTALENGYRWWFDGKLLSLFSCPDYVGLGNAAAFALFEKEEIKLFVFGKQ

SEQ ID NO: 9411 - protein, 439 aa, Nostoc sp. PCC 7120
MSSPQSLLIRGARIILPNGEFLVGDVLTRDRHIVEVGTEIVNTTPATEIDAKGLTLLPGVIDPQVHFREPGLEHKEDLFTASCACAKGGVTSFLEMPNTRPLTTTQQALDDKLQRAASKCLVNYGFFIGATGDNTPELLAAHPTPGIKIFMGSMHGQLLVDQEAALESIFAQGQRLIAVHAEDQARINQRRQEFAGIQDPAIHSQIQDNQAALLATQLALKLSKKYQRRLHILHMSTADEAELLRQDKPSWVTAEVTPQHLVMNTGDYQRIGTLAQMNPPLRSPHDNEVLWQALRDGVIDFIATDHAPHTLEEKAQPYPNSPSGMPGVETSLAVMLTAAMEGKCTIAQVANWMSKAVAVAYGIPNKGAIAPGYDADLVLVDLNTYRPVLREETLTKCHWSPFEGWNLTGWADTTIVGGQIVYHKGKLNTEVRGQALSFV

SEQ ID NO: 9412 - protein, 345 aa, Micromonospora echinospora
MQRQRPPSRAGGDMDRLQSALALYEEAMGYTYAAALRAAAAVGVADHLVDGPRTPAELAAATGTDADALRRVLRLLAVRDVVRESDGRFALTDKGAALRSDSPVPARAGILMFTDTMFWTMSHRVASALGPERPAFADIFGSSLDAYFDGDAEVEALYYEGMETVSAAEHLILARAGDFPATGTVADVGGGRGGFLLTVLREHPGLQGVLLDRAEVVARHRLDAPDVAGRWKVVEGDFLREVPHADVHVLKRILHNWGDEDSVRILTNCRRVMPAHGRVLVIDAVVPEGNDAHQSKEMDFMMLAARTGQERTAAELEPLFTAAGLRLDRVVGTSSVMSIAVGVPA

SEQ ID NO: 9413 - protein, 316 aa, Rhodococcus sp. YK2
MADSRTVRVYQKTWQAEGVVGVTLIDPNGAELPAWEPGAHISLHLRDGLVREYSLCSDPDDRRAWSVAVLRDPKSRGGSTYVHDELPVGALIEVSGPRNAFSLESDASRYVLVAGGIGITPILAMTRDLDKRGRNWSLIYTGRSRSTMAFLNELEAHPRDRVTVHADDEAGTVADIAALLADVDSETLVYCCGPEPLLEACRSALVDPSRLRLERFKAPTVDVEQGPQESFDVVVVSTGQRITVDANTSVLDALQSGGVDVESSCTEGICGTCEIGVVKGDIDHRDFVLTPAEQAGGTTMIACVSRCRSAELVLDL

SEQ ID NO: 9414 - protein, 403 aa, Psychrobacter sp. 273-4
MSHMINTDATILNHLPQSFQNTLPSAVADKIANLEAGSEMWLLPPLVDLCARLREPGQQQHGTLESEGRAARGNGFLHVVIPPDTNPILENGSLLKGLRERALDDGGIYLHVLGALTAGLEGERPSNIAGLKKGGCIAVSNARRPFRNDLVLLRTLEYAATFGMKVFFYPDEPSLSGDGVAHEGYIASYHGLQGIPWIAETVALSTQLLMVEETAIAAHFSQLSCKSSIELMRWAKDKGLPVTCDVAMHQLYLTDDNLEGFNAQAYVLPPLRSNTDQQAIRRGLKDGTIDAICSHHEPLNSTAKKAPFAESTPGISNFDTFMALACQLVKDEVLTLAQLVDKICLNPAKIAGISEQYENIGGAVLVDPNLEWQVTSESMLSNGKNTPFFNQKLQGRVVETFFG

SEQ ID NO: 9415 - protein, 373 aa, Rickettsia sp.
RVSAEADCFTYDPGFMSTASCQSTITYIDGDQGILRHRGYDIKDLAEKSDFLDVAYLLIYGELPSGEQYNNFTKQVAHHSLVNERLHYLFQTFCSSSHPMAIMLAAVGSLSAFYPDLLNFKEADYELTAIRMIAKIPTIAAMSYKYSIGQPFIYPDNSLDFTENFLHMMFATPCTKYKVNPIIKNALNKIFILHADHEQNASTSTVRIAGSSGANPFACISTGIASLWGPAHGGANEAVINMLKEIGSSEYIPKYIAKAKDKNDPFRLMGFGHRVYKNYDPRAAVLKETCKEVLKELGQLDNNPLLQIAIELEAIALKDEYFIERKLYPNVDFYSGIIYKAMGIPSQMFTVLFAIARTVGWMAQWKEMYEDPE

SEQ ID NO: 9416 - protein, 459 aa, Chromobacterium violaceum ATCC 12472
MQKQRTTSQWRELDAAHHLHPFTDTASLNQAGARVMTRGEGVYLWDSEGNKIIDGMAGLWCVNVGYGRKDFAEAARRQMEELPFYNTFFKTTHPAVVELSSLLAEVTPAGFDRVFYTNSGSESVDTMIRMVRRYWDVQGKPEKKTLIGRWNGYHGSTIGGASLGGMKYMHEQGDLPIPGMAHIEQPWWYKHGKDMTPDEFGVVAARWLEEKILEIGADKVAAFVGEPIQGAGGVIVPPATYWPEIERICRKYDVLLVADEVICGFGRTGEWFGHQHFGFQPDLFTAAKGLSSGYLPIGAVFVGKRVAEGLIAGGDFNHGFTYSGHPVCAAVAHANVAALRDEGIVQRVKDDIGPYMQKRWRETFSRFEHVDDVRGVGMVQAFTLVKNKAKRELFPDFGEIGTLCRDIFFRNNLIMRACGDHIVSAPPLVMTRAEVDEMLAVAERCLEEFEQTLKARGLA

SEQ ID NO: 9417 - protein, 541 aa, Glycine max
  misc_feature (519)..(519): Xaa can be any naturally occurring amino acid
MDISVSFSKTRPPPFSPSLCRQLSLRPNAPQLLRFSRNNGTFRRKPPPTISRPNKLAVTAIQISNLSENEDDFVLEDVPHLTDFLPNLPSYPNPLQKSQGYSIVKKTFVSPEDVVAENVVIQKGSPRGVHFRRTGPREKVYFKPEEVRACIVTCGGLCPGINTVIREIVCGLNNMYNVEDILGIEGGYKGFYSKNTMMLTPKVVNHIHKCGGTFLRTSRGGHDTHKIVDNIEDRGINQVYIIGGDGTHKGAALIYEEVKKRGLQVAVAGIPKTIDNDIAVIDKSFGFDTAVEEAQRAINAAHVEVESVENGVGIVKLMGRYSGFIAMYATLASRDVDCCLIPESPFYLEGRGGLFEFIEQRLKENGHLVIVVAEGARQEYIAAEVHAADKKDASGNKLLLDIGPWLSDKIKDHFSMSRKMAVNMKYIDPTYMIRAIPSNASDNIYCTLLAHGAVHGAMAGYTGFTVGPVNSKHAYIPIARVTEKQNKVKLTDRMWARLLASTNQPSFVASDQERVEKEXNEYINNMNIASLSRFKCLMGID

SEQ ID NO: 9418 - protein, 217 aa, Zea mays
  misc_feature (13)..(13): Xaa can be any naturally occurring amino acid
NGEPVAVKILDRXKVLRHKMAEQVMGSKTNVYIVLEYVTGGELFDTIANHGRMREGEARSYFQQLINAVDYCHSRGVYHRDLKPENLLLDSYGNLKVSDFGLSALSQQIKDDGLLHTTCGTPNYVAPEVLEDQGYDGAMADLWSCGVILFVLLAGYLPFEDSNLMTLYKKISNAEYTFPPWTSFPAKRLLTRILDPNPMTVCKSTKAARNKILPKTM

SEQ ID NO: 9419 - protein, 368 aa, Pichia ohmeri
MSTKTITVVPGDHVGTEICDEAIKVLKAIEKVSPVKFEFKHHLIGGAAIDATGVPLPDETLEAAKSSDAVLLGAVGGPKWGTGAVRPEQGLLKIRKELNLYANLRPCNFVSDSLLELSPLKSEIVKGTNFTVVRELVGGIYFGERQEQEESSDGQSAWDTEKYSVEEVTRITRMAAFMALQHNPPLPIWSLDKANVLALSRLWRKTVDHVMSTEFPQLKVQHQLIDSAAMILVKSPSQLNGVIITSNMFGDIISDEASVIPGSLGLLPSASLASLPDTNSAFGLYEPCHGSAPDLPANKVNPVATILSVAMMLRLSLDCLKEAEALEKAVGQVLDAGIRTADLRGSSSTKEVGDAVAAAVEKILAEGK

SEQ ID NO: 9420 - protein, 462 aa, Salmonella enterica subsp. enterica serovar Typhi Ty2
MTMMTATQALSVNPATGQTLAAMPWANAQEIEHALSLAASGFKKWKMTSVAQRAQTLRDIGQALRAHAEEMAQCITREMGKPIKQARAEVTKSAALCDWYAEHGPAMLNPEPTLVENQQAVIEYRPLGVILAIMPWNFPLWQVLRGAVPILLAGNSYLLKHAPNVTGCAQMIARILTEAGTPAGVYGWVNANNEGVSQMINDPRIAAVTVTGSVRAGAAIGAQAGAALKKCVLELGGSDPFIVLNDADLELAVKAAVAGRYQNTGQVCAAAKRFIVEEGIAQAFNDRFVAAAAALKMGDPLVEENDLGPMARFDLRDELHQQVQASVAEGARLLLGGEKIAGEGNYYAATVLADVTPDMTAFRQELFGPVAAITVAKDAEHALALANDSEFGLSATIFTADDTLAAEMAARLECGGVFINGYSASDARVAFGGVKKSGFGRELSHFGLHEFCNVQTVWKNRV

SEQ ID NO: 9421 - protein, 189 aa, Gossypium hirsutum
MSFIGTQQKCKACEKTVYPVELLSADGVPYHKSCSKCSHCKGTLKLANYSSMEGVLYCKPHFEQLFKETGNFNKDFQLSAKAAEKLTPEMTRSPSKAASMFSGTVEKCATCGKTAYPLEKVTVEGQSYLKSCFKCSHGGCSLSPSNYAALEGILYCKHHFSQLFKEKGSYNHLIKSASIKRAAASVPEA

SEQ ID NO: 9422 - protein, 257 aa, Triticum aestivum
  misc_feature (155)..(155): Xaa can be any naturally occurring amino acid
QVCTKKQAGTGPESRGYRRPTRPKLRRTHTQAHSIQGSRRSRFEKPAWASAEEEDLPATDMPRVVGVLSALLERVTERNDAATGPGALEPASGSAFRAMTKPGISVRAYMARIARFAGCSPACFVVGYIYLDRLLRRRRALAVDSYSVHRLLITXVLSAVKFMDDICYNNAYFAKVGGISLPEMNYLEVDFLFGVGFDLNVSPETFGHYCAILQSEMLCLELGPEVPSSGLPASPRSRRRMHCCLSEDDGTSRHHQQ

SEQ ID NO: 9423 - protein, 175 aa, Triticum aestivum
GGRVVWGPLFPSLGEVFGQGGVFALGEIGLWRVPHPWLNVLVPRSRIADFDSAVFKGILQGTDIAGPLVVYPLNKSKWDDGMSAVTPAEEVFYAVSLLFSSVANDLKRLEAQNQKILRFCDLAGIGYKEYLAHYTAHGDWVRHFGGKWQRFVEMKDKYDPKRLLSPGQDIFNLLL

SEQ ID NO: 9424 - protein, 500 aa, Oryza sativa (japonica cultivar-group)
MDVNQLWLLWATLAVSLLYYISNRRRRVGGRRRCPPGPMPLPLVGNLLNLRGHLPPALARLARTYGPVMMLKMGLTTTVVISSGDAAREAFTKHDRHLAARTVLDVTRSLDFADRSMIWLPSSDTVWKTLRGVTAASIFSPRGLAALRGVRESKVRDLVGYFRGRAGEVVDVRHAVYGCMLSLVSSAFFSVDVVDLSAESENEFRQSMTFLMEVVSKTNVSDFFPFLRPLDLQGWRRLTERYLGRVTCFLDDVIDRRFAADASANRHGDFLDSLLDLVSTGKIVRENVTTILLDVFIAGSDTITATVEWAMAELLRNPSEMAKVRAEMDGALGGKKTVDEPDIARLPYLQAVVKEAMRLHPAAPLLLPHRAVEDGVEVGGYCVPKGSMVIFNVWAIMRDPAAWERPEEFMPERFIRRGDDDEVDFWGKTFEFIPFGSGRRVCAGLPMAERVVPFMLASLLRAFEWRLPDGVSAEELDMRHRFTIANFRAIPLKAVPVVVS

SEQ ID NO: 9425 - protein, 171 aa, Zea mays
  misc_feature (99)..(99): Xaa can be any naturally occurring amino acid
  misc_feature (107)..(107): Xaa can be any naturally occurring amino acid
MAAFLRSKCSPVGRTLMGSLGNSLFGAANSSVGAITRPSHCDAISQQIRTFIQMRTNLKVVDNSGAKRVMCIQSLRGKKGARLGDMIIGSVKEAQPRGXKVKKGDVXYGVVFRAAMKKGRSDGSEVQFDDNAVVLVNKKGELIGTRVFGPVPHELRKKKHLKILALAEHIV

SEQ ID NO: 9426 - protein, 468 aa, Azotobacter vinelandii
MRQLIWLRSDLRVRDNRALGAAMGAGPTLALYLLSPAQWRTHDDAPCKVDFRLRNLAELSHGLASLGVPLLIRRVDTWDEAPALLTRLCHEQNIVRVHVNDEYGVHESRRDAAVERALQAQGVGLQRHLDQLLLAPDSLRTRSGGSFRLFAQFRRACHWRLAVSLPAVGGLPMAQPPLNVVGNAVPAALEGFATPPESLRRLWPAGEIAAQRRLHEFVENRLAAYAEARDFPAEPGTSRLSPYLAAGVLSPRQCLHAVLRTGGFDRPEASAWFDELLWREFYKHILAGHPRVSMGRALRTETEALPWRDAPQELAAWQQGRTGFPLIDAAMRQLLATGWMHNRLRMVVAMFLSKNLLIDWRHGERWFMHHLIDGDLAANNGGWQWCASTGTDAVPYFRLFNPLAQSRRFDPEGRFIRQWLPELASLDNRDIHAPAGALRPAGYPPPIVDLPSSRERALAAFKALRRRG

SEQ ID NO: 9427 - protein, 232 aa, Glycine max
ITRPPTRPPTRASTRPVNGDGGRDVNLGDSNYSFGEAEALSDEMEEESRYVAEILRIRDVLLNPEDESEAVLFDSLRRLQLMELTVDCLKATEIGKAVNPLRKHGSKDIRQLSRTLIDGWKEMVDEWVKATTTTAITGSEEGTPDSVNPSVVDDDEEEGLPSPPLDEGAFFVTQAGSMELSQFFDGMDDDGNPRPTGPFSKNRENGRKPVFDSHVVEKRKSQASHDTAIIDR

SEQ ID NO: 9428 - protein, 206 aa, Michelia figo
  misc_feature (107)..(107): Xaa can be any naturally occurring amino acid
  misc_feature (204)..(204): Xaa can be any naturally occurring amino acid
VQLKRMENKINRQVTFSKRRNGLLKKAYELSVLCDAEVALIIFSSRGKLYEFGSAGTNKTLERYQRCCYTPQDVVVSDRETQGWYQEVSKLKAKYESLQRSQRHLLXEDLGPLSVKELQHLERQLEVALSQARQRKTQIMIEQMEELRKKERQLGDINKQLKIKLEAEGQGPFRCIQGSWESGAMVGNNTFSMNAPQAAPLDAXSP

SEQ ID NO: 9429 - protein, 239 aa, Phytolacca americana
  misc_feature (235)..(236): Xaa can be any naturally occurring amino acid
VQLRRMENKINRQVTFSKRRSGLVKKAHEISVLCDAELALIIFSPRGKLFEYSTDSSMEKILERYERYFYAERQLASNDPNTEVNWTFDFAKLKAKLELLQRNHRHYLGQDLDSLNIKDLQSLEQQLDNALKHIRTRKNQLMHESISELHKKEKAMQEQNNMLVKKIKEREKAMAEAQGMQWQRQQNEPPEASNFLLPPPLTSWNTAGDAYHGQIAGEVKRNDLDLTLEPVYSCXXGCF

SEQ ID NO: 9430 - protein, 570 aa, Zea mays
MAGGGVEDVYGEDRATEEQLITPWAFSVASGYTLLRDPRHNKGLAFSEAERDAHYLRGLLPPALASQELQEKKLMQNLRRYEQPLHRYIAMMDLQERNERLFYKLLIDNVEELLPVVYTPTVGEACQKYGSIYRRPQGLYISLRDKGKILEVLKNWPERSIQVIVVTDGERILGLGDLGCQGMGIPVGKLSLYTALGGVRPSACLPITIDVGTNNEALLKDEFYIGLRQRRATGEEYHELLEEFMTAVKQNYGEKVLTQFEDFANHNAFDLLEKYRESHLVFNDDIQGTASVVLAGLLAALKVVGGTLADHTYLFLGAGEAGTGIAELIALEMSKHTGSPIEECRPKIWLMDSKGLIVASRKDSLQAFKKPWAHEHEPVATLLEAVQSLKPTVLIGTSGKGGTFTKEVVEAMASQNEKPVIFALSNPTSHSECTAEQAYTWTKGRAVFASGSPFDSVELDGKVLVPGQSNNAYIFPGFGLGVVISGAIRVRDDMLLAASEALAEQVTEEHFAKGLIFPPFTNIRAISARIAAKVAAKAYELGLASRLPRPDDLVKYAESCMYTPIYRSYR

SEQ ID NO: 9431 - protein, 166 aa, Triticum aestivum
DLGRIEKWVLRKAFDDEEQPFLPKHILYRQKEQFSDGVGYSWIDGLKAHAESNVTDKMMSNAKFIYPHNTPTTKEAYCYRMIFERFFPQNSAILTVPGGPSVACSTAKAVEWDAQWSGNLDPSGRAALGVHLSAYEQEHLPATIMAGTSKKPRMIEVAAPGVAIES

SEQ ID NO: 9432 - protein, 186 aa, Glycine max
GIPWERLNYSRDKYRETRLKQYKNYQNFSRSRHDLRKECFEVQKGETFYDFFFNTRLVKSTIVHFQLRNLLWATSKHDVYFMQNYSVMHWSALLRRGKEVLNVAKPIIPTLKRPGFLAQPVSRVQISTMTVKENLMVAGGFQGELICKNLKHPGVLFCGKITTDDNAITNAVDVYRNPAGSEGNPA

SEQ ID NO: 9433 - protein, 531 aa, Zea mays
MEAVGVTPAPVAAPEKKKLLDLKDPFPAAANGGAKASPAAKWAMKKKLVGGDAGYVLEDVPHLTDYMPQLPTYPNPLQDNPAYSVVKQYFVNPDDTVTQKIVVHKTSARGTHFRRAGPRQRVYFQSDEVNAAIVTCGGLCPGLNTVIRELVCGLYDMYGVSSVVGIEGGYKGFYSKNTVALTPKSVNDIHKRGGTVLGTSRGGHDTAKIVDCLQDRGINQVYIIGGDGTQKGASVIYEEVRRRGLKCSVVGVPKTIDNDIAVIDKSFGFDTAVEEAQRAINAAHVEAESAENGIGVVKLMGRNSGFIAMYATLASRDVDCCLIPESPFYLEGKGGLLEFVERRLKDNGHMVIVVAEGAGQDLIARSMNFVDTQDASGNKLLLDVGLWLSQKIKDHFKKKPSFPITLKYIDPTYMIRAVRSNASDNVYCTLLAHSALHGAMAGYTGFTVAPVNGRHAYIPFYRITEKQNKVVITDRMWARVLCSTNQPCFLSHEDVENMKHDDDEHHHMHNTQLLEGGSSPVSKCNGSAAAV

SEQ ID NO: 9434 - protein, 245 aa, Nicotiana tabacum
MGRGRVQLKRIENKINRQVTFSKRRSGLLKKAHEISVLCDAEVGLIVFSTKGKLFEYSTDSCMERILERYERYSYAERQLTATDHETPGSWTLEHAKLKARFEVLQRNQRHYAGEDLDSLSMKELQNLEHQVDSALKHIRSRKNQLMHESISELQKKDKALQEQNNKLSKQVKEREKELAQQTQWEQQSHDHLNSSTFVLSQPLSSLHLGEAYSTAGDNGEVEGSSRQQQQNTVMPPWMLRHLNN

SEQ ID NO: 9435 - protein, 138 aa, Triticum aestivum
  misc_feature (112)..(112): Xaa can be any naturally occurring amino acid
MAPTVMASSATSVAPFQGLKSTAGLPVSRRSNGASLGSVSNGGRIRCMQVWPIEGIKKVPRTLSYFANRSSNGRALPQSKVELPDPASKVGCPWPSEFKQRLGSILPVEHNXPLGYYDGPVLGMLELPISGCTDARST

SEQ ID NO: 9436 - protein, 119 aa, Oryza sativa (japonica cultivar-group)
MAGCCVFLRWPSASPSRIGYRSLDDGDDGPSPAAVTTTVVVGKERRVFSVDQLVLDTYPFRLLLETAVRKEESKAALFVDVDAILFEHILWLAGHHDRSSSSLLHLDLKEIIDFYSQDA

SEQ ID NO: 9437 - protein, 206 aa, Buchnera aphidicola str. APS (Acyrthosiphon pisum)
MNNNFQNNIFWQKHSITRLKREKKNGHKSIVLWFTGLSGSGKSTIANFLEEILFKNGINSYLLDGDNIRSGLCSDLSFSLADRNENIRRIGEVVKMMLHAGLIILVSVISPYRNQREMVRQMLGKKNFLEVFIDTPIEICESRDPKKLYKQARTGQISDFTGIQCTYETPNTPDVLLKGTDSLKNNSKKLIKILYNHNIISFINID

SEQ ID NO: 9438 - protein, 289 aa, Arabidopsis thaliana
MAISQAVLATVFGILGNIISFFVCLAPIPTFVRIYKRKSSEGYQSIPYVISLFSAMLWMYYAMIKKDAMMLITINSFAFVVQIVYISLFFFYAPKKEKTLTVKFVLFVDVLGFGAIFVLTYFIIHANKRVQVLGYICMVFALSVFVAPLGIIRKVIKTKSAEFMPFGLSFFLTLSAVMWFFYGLLLKDMNIALPNVLGFIFGVLQMILFLIYKKPGTKVLEPPGIKLQDISEHVVDVVRLSTMVCNSQMRTLVPQDSADMEATIDIDEKIKGDIEKNKDEKEVFLISKN

SEQ ID NO: 9439 - protein, 191 aa, Escherichia coli O157:H7 EDL933
MQKVKLNNGIEMPLLGFGVFQMTDAAECERAVIDAINTGYRLIDTAASYQNEPQVGNALKQSGIARNELFVTTKLWLQDTSYEGAKAQFERSLNRLQLDYVDLYLIHQPYGDVHGAWRAMEELQQAGKIRAIGVSNFHPDRLADLIAFNNVVPAVNQVEVNPFNQQLHAVPWMQSRGIQPEAWAPFAVTGR

SEQ ID NO: 9440 - protein, 359 aa, Schizosaccharomyces pombe
RMRVAIIHVGAPAGGMNSATRAAVRYCLNRGHTPLAIDNGFSGFLRHDSIHELSWIDVDEWCIRGGSEIGTNRDTPDLDMGFTAFKFQQHKIDALIIIGGFEAFTALSQLESARVNYPSFRIPMAIIPATISNNVPGTEFSLGCDTCLNAVMEYCDTIKQSASASRRRVFVCEVQGGRSGYIATVGGLITGASAIYTPEDGISLDMLRKDIDHLKATFALEAGRNRAGQLILRNECASKVYNTKVIGNIISEEVISASPLVPLFPSRPTRCNPTPMDRARAARLAMRAIRFFETCRANDLGNDPSSAVVIGIRGTGVSFSSVADVENNETEIEMRRPKNAWWRDMHNLVNILAGKTFAD

SEQ ID NO: 9441 - protein, 328 aa, Bacillus cereus ATCC 10987
MTIPAGTSASVGIVGLTLGGGIGMLSRLFGLTCDQLIEVEMVQACGKFGAKIIRASEHENHNLFWACRGGGGGNFGIITSLTFRVHPIKNVSIFSITWEWKDFIAAFQAWQNWAPYVDERLTSSIELFTKQQNKIEAQGEFVGSPSELHSLLSPLLETGTPSLFIDEVPYIKAVEFFNSGNIPENFKRSGSYVYKPIPLKGIQIMQYFLSHAPNKDASIWHQSLVGAVENIPPTETAYFHRKAIIAQEYITSWKCDDEENRNIRWVKDLREILDPYTLGDYVNWPDIDIKNWQTSYYGPNFQRLRKVKTIYDPCNVFRFQQSIPPFHT

SEQ ID NO: 9442 - protein, 174 aa, Triticum aestivum
  misc_feature (53)..(53): Xaa can be any naturally occurring amino acid
  misc_feature (96)..(96): Xaa can be any naturally occurring amino acid
  misc_feature (113)..(113): Xaa can be any naturally occurring amino acid
  misc_feature (146)..(146): Xaa can be any naturally occurring amino acid
  misc_feature (156)..(156): Xaa can be any naturally occurring amino acid
MSDTDEHHFESKADSGASKTYPQQAGAIRKGGHIVIKARPCKVVEVSTSKTGXKHGHAKCHFVAIDIFNGKKLEDIVPSSHNCDVPHVDRQDYQAXFDITDDGYVSLLTESGXTLKDDPESFPLMMFCLGQFKDWDFADGKDLILXVMSAMGERKXCAVKETGGGKVSSCAVAG

SEQ ID NO: 9443 - protein, 486 aa, Ralstonia eutropha JMP134
MTNRTIELKHPRQLYIDGVWVEPSTGGVFDVLDCSTEQVVATVARAESADMQRAVAAARKAFDDGPWPRMTPLERAGFLEKIAVRLEALNDEFARIWSLETGIVYKVAQPRIGLFISGAFRQYAAMASTFPFTQPCQSVTGNDAYRVYEPVGVVAEIIPWNGPAGLLAYKTAPALLAGCTLVIKSPPEAPCSGYLFAQVCEEVGLPPGVVNVITAERDVSEALVRSPEVDKITFTGSTAAGRRIASIAGDRVARVTLELGGKSPAVILDDYDVETAAATLGNSYFSYNTGQICHSLTRIIVPRAKHDAMVEALSAIAREIVLGDPLAATTTSGPLANARQRDTVERFVAMGVAEGAVLATGGKRPPHLARGFFFEPTVFGNVDNRSSIAQQEIFGPVLSVIPADDEASAIRMANDTPFGLNAAVFTNDRDRALAVARQIRAGTVGHNGPRTDFSIGFGGFKQSGIGREGGVEGLTAFMESKTIVLS

SEQ ID NO: 9444 - protein, 268 aa, Acinetobacter sp. ADP1
MMIVPKFGLGTFRLNDQIVIDSVKTALDVGYRAIDTAQIYDNEAQVGQAIQESGIARDQLFLTTKIWVDHLNSEQLIPSLKQSLQKLRTDAVNLTLIHWPAPQKGIDIAAVMQLLLQAKQQGLTEHIGISNFNIAQTKTAIESIGQSHIATNQIELSPYLQNRTLVDFLKAQQIDVTSYMTLAYGKVLHDPVLQDIASEHQASTAQIALAWALQSGYAVIPSSTKREHLISNLKAQEIQLSQQDMQLIAALERNGREVDPAELAPEWD

SEQ ID NO: 9445 - protein, 275 aa, uncultured bacterium
  misc_feature (32)..(32): Xaa can be any naturally occurring amino acid
  misc_feature (197)..(197): Xaa can be any naturally occurring amino acid
  misc_feature (237)..(237): Xaa can be any naturally occurring amino acid
  misc_feature (241)..(241): Xaa can be any naturally occurring amino acid
MSAEQPRLILNSGQSMPQLGLGAYKVNQDIAXQLVQHALEIGYRRIDTAALYDNEAEVGAAVRKSGLAREEVFVTSKIWNDRHGYHEAKEAIQESIDRLNIDYVDMMLIHWPCPKQDKFVETWHAFEEVLETGLVKGIGVSNFNQPHLEKLLQHSNITPAINQVELHPQLAQNGLREFNERHGIRTEAWAPLGRARXMQHPLLVEIABSLGKSVAQVIIRWHLQIGNLVIPKSSNPXRLAXNFDVFDFELSHHNMSIIATLNTETRIATNPDDMN

SEQ ID NO: 9446 - protein, 160 aa, Hevea brasiliensis
MSDEEHHFESKADAGASKTYPQQAGTIRKNGYIVIKNRPCKVVEVSTSKTGKHGHAKCHFVGIDIFNAKKLEDIVPSSHNCDVPHVNRTDYQLIDISEDGFVSLLTENGNTKDDLRLPTDENLLSQIKDGFAEGKDLVVTVMSAMGEEQICALKDIGPKN

SEQ ID NO: 9447 - protein, 153 aa, Mesorhizobium sp. BNC1
MIFRAFLLVLCLLGFSGIAVAVQPDEILVDPALEARARQLSAELRCMVCQNQSIDDSDAELARDLRVLVRERLKAGDTNEEVLNYIVSRYGEFVLLKPRFNARNAILWAAPVLILVGGSALAFSVLRRRGNTVPAPLSTEEEAALRDILKDES

SEQ ID NO: 9448 - protein, 129 aa, Glycine max
MSTKKIVLKSSDNESFEVDEAVARESQTLAHMVEDDCTDNGIPLPNVTGKILAKVIEYCKKHVDAAAAKTEAAADGGASSDDDLKAWDAEFMKIDQATLFELILAANYLNIKNLLDLTCQTVADMIKGK

SEQ ID NO: 9449 - protein, 258 aa, Zea mays
  misc_feature (167)..(167): Xaa can be any naturally occurring amino acid
  misc_feature (223)..(223): Xaa can be any naturally occurring amino acid
MAGAGAGGWKKRVGRYEVGRTIGRGTFAKVKFAVDADTGAAFAIKVLDKETIFTHRMLHQIKREISIMKIVRHPNIVRLNEVLAGRTKIYIVLELVTGGELFDRIVRHGKLRENEARKYFQQLIDAIDYCHSKGVYHRDLKPQNLLLDSRGNLKLSDFGLSTLSQNXLVHTTCGTPNYVAPEVLSSNGYDGCAADIWSCGVILYVLMAGYLPFEENDLPHLYXKGAKSLIQRILDPNPRTPIVCVKLSTRTSSYISLY

SEQ ID NO: 9450 - protein, 273 aa, uncultured bacterium
MASPLVTLNDGRLMPQLGLGVYKVNQDIAVQLVQTAIEIGYRRVDTAALYDNEAEVGAAIRKSGLDREEIFVTSKIWNDRHGYHEAKDAIQESVDRLNIGYVDMMLIHWPCPKQDKFVETWHAFEEVLETGLVKSIGVSNFHQHHLEKLLAAANVVPAINQVELHPQLAQNSLRHFNKQHNIKTEAWAPLGRAKFLENPLLVEIAESLGKSVAQVIIRWHLQLQNLVIPKSSNPDRLAENFDVFDFELSQHQMGIIATLNTETRIATNPDDMN

SEQ ID NO: 9451 - protein, 423 aa, Bradyrhizobium japonicum USDA 110
MSDKPQHIVIVGAGAAGLMAGRELARAGKKVTVLEARDRCGGRIHPLPAAEFGYPADGGAEFVHGDAPVTRALLREAGLSLQEIEGTLWRFDGAHFSREDRHDPHEAELHAVLGNLKDDLTVADFLRRHFAGPEYDGLRYSIERMVEGYDAADPERASTLALREEWMDGGLHTQARINGGYGALIDFLAAECRRHGAAVRLGCVVSAIEDEGGAVVVRGAGGEVHRCDRVILTVPLPLLREIALPASVRAKAAAADDIGFGNVVKILLRFARPWWRERNPDLADMTFLLSDRTIPVWWTRHPEQHPVLTGWFGGPRTAELQDLDPQALIEAGLGSLATIFGLSREDVARDLVAAAATNWGQDPFARGAYSWATPRTRAAQAMLARADGAVLFSGEALYRGRDMGTVEAALASGLETAGMILRG

SEQ ID NO: 9452 - protein, 180 aa, Brassica napus
MSYGQDTGVERRKGSVKWFDTQKGFGFITPDDGGDDLFVHQSSIRSEGFRSLAAEEPVEFQVENDNNGRPKAIEVSGPDGAPVQGSSGGGSSGGRGGFGGGGRGGGRGFGGGRGGGRGGSDCYKCGEPGHIARDCSEGGGGYGGGGGGGGHGGGGGGGGGSCYSCGESGHFARDCTSGGR

SEQ ID NO: 9453 - protein, 360 aa, Emericella nidulans
MAAARTLRIGLIPGDGIGREVIPAGRRILEALPASLNLKFNFVDLDAGYDCFKRTGTALPDKTVEVLKKECDGALFGAVSSPSTKVAGYSSPIVALRKKLDLFANVRPVKTTAGTSAGKPIDLVIVRENTEDLYVKEESTEETPNGKVARAIKQISERASSRIATIAGEIALRRQNIRDGAAASGLRTKPMVTITHKSNVLSQTDGLFRETARAALAAQKFSSVEVEEQIVDSMVYKLFRQPEYYDVIVAPNLYGDILSDGAAALVGSLGLVPSANVGDNFAIGEPCHGSAPDIEGKNIANPIATLRSVALMLEFLGEEQAAAKIYAAVDGNLDEGKYLSPDMGGKATTTEVLEDVLKRL

SEQ ID NO: 9454 - protein, 275 aa, uncultured bacterium
MSAEQPRLILNSGQSMPQLGLGAYKVNQDITVQLVQHALEIGYRRIDTAAIYDNEAEVGAAVRKSGLAREEVFVTSKIWNDRHGYHEAKEAIQESIDRLNIDYVDMMLIHWPCPKQDKFVETWHAFEEVLETGLVKGIGVSNFNQPHLEKLLQHSNITPAINQVELHPQLAQNGLRELNERHGIRTEAWAPLGRARFMQHPLLIEIAESLGKSVAQVIIRWHLQIGNLVIPKSSNPDRLAENFDVFDFELSHHNMSIIATLNTETRIATNPDDMN

SEQ ID NO: 9455 - protein, 234 aa, Pachysandra terminalis
  misc_feature (204)..(204): Xaa can be any naturally occurring amino acid
  misc_feature (207)..(207): Xaa can be any naturally occurring amino acid
  misc_feature (211)..(211): Xaa can be any naturally occurring amino acid
VQLRRMENKINRQVTFSKRRTGLLKKAHEISVLCDAEVALIVFSTKGKLSQYSSNSSMETILDRYERYSYAERKLMAGDHLDSQGSWPLEYTKLKSKIEVLQRNQRHFMGEELDSLSLKELQYMEHQLDTSLKHIRSRKNQLMNDSIYDLQKKEKALQEQNSTLIKKLKEKEKAPAHQACWEQQGQNLPSFLLSQPLPSLNIGXNYXLARXSRDEEEGAQSHARTNPIMPPWML

SEQ ID NO: 9456 - protein, 425 aa, Arabidopsis thaliana
MRQMPEHPNIVTLKETYEDDKAVHLVMELCEGGELFDRIVARGHYTERAAASVIKTIIEVVQMCHKHGVMHRDLKPENFLFANKKETASLKAIDFGLSVFFKPGERFNEIVGSPYYMAPEVLRRSYGQEIDIWSAGVILYILLCGVPPFWAETEHGVAKAILKSVIDFKRDPWPKVSDNAKDLIKKMLHPDPRRRLTAQQVLDHPWIQNGKNASNVSLGETVRARLKQFSVMNKLKKRALRVIAEHLSVEETSCIKERFQVMDTSNRGKITITELGIGLQKLGIVVPQDDIQILMDAGDVDKDGYLDVNEFVAISVHIRKLGNDEHLKKAFTFFDKNKSGYIEIEELRDALADDVDTTSEEVVEAIILDVDTNKDGKISYDEFATMMKTGTDWRKASRQYSRDLFKCLSLKLMQDGSLQSNGDTK

SEQ ID NO: 9457 - protein, 356 aa, Micromonospora echinospora
MELTTTAARPGLRHRMQQLIYGFFTAQTLHVAVRLRIPDLLADGARDVGDLASATGADAPSLRRLLRALVFLEVLDEPAPGTFALTEQGEVLRADVTGSMRELVLLLSGPESWAAWGQLEHSVRTGEVAWEHVHGRSCFDHLMADPQRQAAFNAAMAEGSRAFVPTLLSAYDFGDLRTVVDVGGGSGALLAGVLAAHPHLRGTVFDTPDGVADAARTVAEQGVADRCGVETGDFFVSVPPGADAYVLKSVLHDWDDEQCVEVLRTVRRAVRPDSRVILVESLMPTTVTTAPSVAQVVMNDLNMMVCHGGRERTVAEFRELLRVAGFRLESVTPCPAPSVVGILEAAPAPATGPDGS

SEQ ID NO: 9458 - protein, 238 aa, Peperomia caperata
  misc_feature (207)..(207): Xaa can be any naturally occurring amino acid
  misc_feature (238)..(238): Xaa can be any naturally occurring amino acid
VQLKRMENKINRQVTFSKRRTGLLKKAHEISVLCDAEVALIVFSTKGKLYEYATNSSSMPGILDRYERHSFTDKEFFIKEGEPPEGAWTLEYAKLKARYELLQKNYRHYLGEDLGSLSGKELQQLEGQLDASLKNVRSRRTQALFHTISDLQKKEKSLLEQNSVMIKKLQDLEKAEKAQQSQLEMQNHERTQNQPPLILLPPPALSXGSFRQENGPSVEGEAAPRVAQKNSLLPPWMX

SEQ ID NO: 9459 - protein, 402 aa, Burkholderia cepacia R1808
MTDITADQMARVKATAPVLAVHGATITKHFYQRMFTRHPELKNLFNQTHQKTGSQPETLAKAVYAYAANIDNLGALGGAVSHIAHKHASLNIRPEHYPIVGENLLASIVEVLGDAVDAQTLEAWRVAYGQLAQILIGAEADLYAGAAWSGFRPFKVARKVRESDEITSFYLTPADGGAAPTFEPGQYVTVKRFVGDLGVDQPRQYSLSDAPHGKWLRISVKRESGQAEAVPAGKVSTLMHDGVEEGAIVEVTAPMGEFSLKRGVDTPVVLISGGVGLTPMVSMASTLVAEGSKRDVRFVHACRSGAVHAFRDWLNDTVREHANFKRTVLYELVGPNDRAGVDHDLEGRLTPERVQQYALVPDADYYICGPIAFMKAQRDALVALGVAPERINTEIFGSGALE

SEQ ID NO: 9460 - protein, 360 aa, Papaver somniferum
MGSIRNVDEDIQACRYAMELASASVPVMVLKTAIELDILEIIKKPGPGTQISVSEIVSQIQNLKNPDAPVMLDRMLRLLASYNILTCSLKDGGNDDKVERLYGLAPVCKFLTKNEAGCSMSALLLMNQDKVLMESWYHLKDAILDGGIPFNKAYGVHAFEYHGKDLRFNKVFNKGMSDHTTITMNKILETYKGFEGLNSIVDVGGGVGATVSMIISKYPTIQGINFDLPHVIQDAPSFPGIKHVGGDMFASVPNADAIFMKWILHDWSDEHSVKILKNCYDALPKNGKVIIVECIIPEVSDSSVAGHGVFHLDNIMLAHNPGGKERSLKQFENLAKDTGFTDFQVVCSAYDTYVMEFYKN

SEQ ID NO: 9461 - protein, 358 aa, Arthrobacter sp. BP2
MKRCSAMHAFAVLPDDATIHDLEFSTPRPEGRQVLLKVMRAGVCHTDTHLREGGYDLGSRGHMSMKDRGIQYPMVLGHEVVGVVEQVGADVASVSAGDVRLIYPWIGCGTCRQCREGHDNRCAAGQNLGVARHGGYAEYIIVPDEKYLVDIEGLDPSWAATLACSGLTAHSAVDKVLPLEPDEPVVIFGAGGLGLTAIAILRARGHRNICAVDVAERNLALARDMGATSTVLSGAGSGAADIQRAAGGPASAVVDFVNNGATATAAFDALAKAGTMVQVGLFGGEVTLPTAMLALRMIRIEGSFVGALSQLQDLVRIAKAGELPTIPVSERTLSAAEVSRALDDLTAGGIAGRIVLTA

SEQ ID NO: 9462 - protein, 226 aa, Triticum aestivum
ADLGDGLADDDAGKLLLMYSAGDDNDVEEEDEEGYLDHLVSKESSFCSADPSPSMASEDWFQCARRDTVRWILETRGHFGFSHRTAYVAIAYFDRFSLRRCVDRSVMPWAARLLAIACVSLAAKMDECQAPALSEFRADDDYDFSCDSIGRMEMLVLSTLDWRMGAVTPFDYLPCLSSRVRRFNGAGRGGGGRAHRRQPPPSSSPPPKVGYLTTTSIHGPCSASIN

SEQ ID NO: 9463 - protein, 452 aa, Triticum aestivum
  misc_feature (267)..(267): Xaa can be any naturally occurring amino acid
  misc_feature (284)..(284): Xaa can be any naturally occurring amino acid
MGEQKGNILMGKYEMGKMLGQGTFAKVYHARNIETSQSVAIKVTDKEKVLKGGLTDQIKREISVMKLVKHPNIVQMYEVMATKTKIYFVLEHVKGGELFNKVQRGRLKEDAARKYFQQLICAVDFCHSRGVYHRDLKPENLLLDENSNLKVSDFGLSTISECRRLDGLLHTSCGTPAYVAPEVINRKGYDGAKADIWSCGVILFVLLAGYLPFQDKNLMNMYKKIGKAEFKCPSWFSSDIRRLLLRILDPNPCARISIGKRCDSRWXHKGHFANLDMYNLQARXTVPAADMTATSDALSCSNSATEGKEQEAKKLTNLNAFDIISLSTGLDLSGMFEDNDKKRESKFTSTNSASTIVSKIEDIAKCMRLKLVKKDGGMMRMESFKPGRKGVMSIDAEIFEVTPDFHLVELKKTNGDTMEYQKVLNQEMRPALKDIVWAWQGEQQPQPQQQPC

SEQ ID NO: 9464 - protein, 211 aa, Pinus taeda
MEKIMVLVCIMSFTILGLSSAKEINHAAAVSLATAPAAAATPAAPAPSPASLNLSGILDKAGQFNTFLSLLKSTQVGMQLQSQLNNSQQGITIFAPSDAAFAALKPGALNSITDQDKIALLQYHALPSYYTFSQFQTVSNPVRTMASGNGGPFAAPTPEPGAPVSSPAVSPSGASGSGASTSSACGSMAALAKGLYLVFLAAGALVLVISS

SEQ ID NO: 9465 - protein, 485 aa, Agrobacterium tumefaciens str. C58
MTSPLQHLQQSGRLKKFYIDGKWVLPSGSDKVAVINPATELEFAEIALGNDEDVALAVAAARGAFAGWARTGPADRSELLNRVHQLMQQRLELLAQALTMEMGAAINYARSVQVPLAAEHIKVARDNAASYSFLSQRGHTAILREPIGVCGLITPWNWPLYQITAKVGPALAAGCTVVLKPSELSPLSALLFAEIIEDAGFPPGVFNLVNGEGTIVGAGLSAHPDVDMISITGSTRAGILVAQAAAPTVKRVAQELGGKSPNIILADADMTRAVPLGVAAAFRNLGQSCSAPTRMIVPRSHQKHIEELAAAAALEIVVGDPLSEHTTHGPVANHAQFDRIQRMISIGMDEGAKLVVGGTGRPDGLDTGFYVRPTIFSDVDPKMQIAQQEIFGPVLSIISYDTLEEAIEIANDTVYGLGAHVQGTDLQTVRIVAEQIRSGQVHLNYPAWDPNAPFGGYKQSGNGREYGTEGMEEYLEIKSILGFYP

SEQ ID NO: 9466 - protein, 474 aa, Emericella nidulans
MASTLRLSTSALRSSTLAGKPVVQSVAFNGLRCYSTGKTKSLKETFADKLPGELEKVKKLRKEHGNKVIGELTLDQAYGGARGVKCLVWEGSVLDSEEGIRFRGLTIPECQKLLPKAPGGEEPLPEGLFWLLLTGEVPSEQQVRDLSAEWAARSDLPKFIEELIDRVPSTLHPMAQFSLAVTALEHESAFAKATAKGINKKEYWHYTFEDSMDLIAKLPTIAAKIYRNVFKDGKVAPIQKDKDYSYNLANQLGFADNKDFVELMRLYLTIHSDHEGGNVSAHTTHLVGSALSSPMLSLAAGLNGLAGPLHGLANQEVLNWLTEMKKVVGNDLSDQSIKDYLWSTLNAGRVVPGYGHAVLRKTDPRYTSQREFALRKLPDDPMFKLVSQVYKIAPGVLTEHGKTKNPYPNVDAHSGVLLQYYGLTEANYYTVLFGVSRALGVLPQLIIDRAFGAPIERPKSFSTEAYAKLVGAKL

SEQ ID NO: 9467 - protein, 188 aa, Triticum aestivum
  misc_feature (80)..(80): Xaa can be any naturally occurring amino acid
  misc_feature (86)..(86): Xaa can be any naturally occurring amino acid
  misc_feature (101)..(101): Xaa can be any naturally occurring amino acid
  misc_feature (109)..(109): Xaa can be any naturally occurring amino acid
  misc_feature (132)..(134): Xaa can be any naturally occurring amino acid
  misc_feature (138)..(138): Xaa can be any naturally occurring amino acid
  misc_feature (140)..(140): Xaa can be any naturally occurring amino acid
  misc_feature (144)..(144): Xaa can be any naturally occurring amino acid
  misc_feature (151)..(151): Xaa can be any naturally occurring amino acid
  misc_feature (157)..(157): Xaa can be any naturally occurring amino acid
  misc_feature (161)..(161): Xaa can be any naturally occurring amino acid
  misc_feature (164)..(164): Xaa can be any naturally occurring amino acid
  misc_feature (168)..(168): Xaa can be any naturally occurring amino acid
  misc_feature (172)..(172): Xaa can be any naturally occurring amino acid
  misc_feature (175)..(175): Xaa can be any naturally occurring amino acid
MAPTVMASSATSVAPFQGLKSTAGLPVSRRSNGASLGSVSNGGRIRCMQVWPIEGIKKFETLSYLPPLSTEALLKQVDYXIRSKWXVPCLQFNKVGFILRXEHNASPGXYYDGRYWTMWKLLCSGCNDPHKXXXKVEXVXKDYXYPYVRIXRFNNMXQVHXSTXRLKXTGCXDPXKAKHKGILNAFNL

SEQ ID NO: 9468 - protein, 468 aa, Glycine max
  misc_feature (61)..(61): Xaa can be any naturally occurring amino acid
CLILCIGVLLQTYPNPLQDNPAYSVVKQYFVHVDDSVPQKVVVHKDGARGVHFRRAGPRQXDEVQAAIVTCGGLCPGLNTVIRELVCGLHHMYGVKKVLGINGGYRGFYARNTITLTPKSVNDIHKRGGTVLGTSRGGHDTKKIVDSIQDRGINQVYIIGGDGTQKGASAIFEEVRKRGLKVSVVGIPKTIDNDIPVIDKSFGFDTAVEEAQRAINAAHVEAESVENGIGVVKLMGRNSGFIAMYATLASRDVDCCLIPESPFYLEGPGGLYEYIEKRLKENGHMVIVIAEGAGQELVSESVQSMSKQDASGNKLFQDVGLWISQKIRDHFAAQKTLPITLKYIDPTYMIRAIPSNASDNVYCTLLAQSAVHGAMAGYTGYTSGLVNGRQTYIPFYRITERQNHVVITDRMWARLLSSTNQPSFLDAKGDNEEKEEEEALNQLPDGHCAKDTSLASKEINSSIYPTAC

SEQ ID NO: 9469 - protein, 280 aa, Methanococcus maripaludis S2
MKFDAWYTEPQTENLSLSTKLKDILYVGQSEYQEIQVLDTYEFGRVLILENTYQTTERDEFIYHELISHPALFTHGNPKKVLVIGGGDGGSVREVLKHKSVEKIDFVELDGQVVEVAKKFLPTLSCEIDNEKVNTIITDGIKYVAETSEKYDVILVDCPDPVGPAAGLFEKEFYNNLYKCLNDDGIMVQQTESPLLHEKLINKIKGHLKDAGFSTIRPLVCSIPTYPSGFWSFTLASKKNDPLNSDVSEIENKLKDMTTKYYDQDVHKGVFLATPRYLKE

SEQ ID NO: 9470 - protein, 160 aa, Hevea brasiliensis
MSDEEHHFESKADAGASKTYPQQAGTIRKNGYIVIKNRPCKVVEVPTSKTGKHGHAKCHFVGIDIFNAKKLEDIVPSSHNCDVPHVNRTDYQLIDISEDGFVSLLTENGNTKDDLRLPTDENLLSQIKDGFAEGKDLVVTVMSAMGEEQICALKDIGPKN

SEQ ID NO: 9471 - protein, 160 aa, Hevea brasiliensis
MSDEEHHFESKADAGASKTYPQQAGTIRKNGYIVIKNRPCKVVEVSTSKTGKHGHAKCHFVGIDIFTAKKLEDIVPSSHNCDAPHVNRTDYQLIDISEDGFVSLLTESGNTKDDLRLPTDENLLSQIKDGFAEGKDLVVTVMSAMGEEQICALKDIGPKN

SEQ ID NO: 9472 - protein, 495 aa, Gibberella zeae PH-1
MSTVKITGIGGRQISVHTGLFINNEFVPAQDNATVKTENPFNGKVLADISAAQASDVDKAVAAAEKAFNGTWKLTQPTVRRDLMNRLADLIERDNEELASLESVDAGILFRESSGMFVPQAVETLRYYAGWADKVDGQSLHIPQGISYSRRVPIGVCAAIVPWNAPLMITMWKLAAALATGNVLIIKTPEASPLYGQKLGQLIVEAGFPPGVVSILCGLGIVAGSALSAHPAIRKLSFTGSPGVGRQILAASAKTNLKKISLELGGKGPSIVFDDADFENALQWTAAGITVNNGQICAAGSRIYVHADIYDKFVKAFSERTKDSVAGDPLLQETTKGPVINAGQKKRVMEYIKIGQDEKVKVLHGADDSKLPTEGHFVPNTAFVDVDPQATVIREEIFGPVACIAKFSTEEEVVRLANDSSYGLGSAVFTKDINKAIRVSEELESGQVTINMWGVVNANVSFGGFKESGFGRDCGKEAIDDWTQAKYISVMVPKL

SEQ ID NO: 9473 - protein, 132 aa, Hevea brasiliensis
MSDEEHHFESKADAGASKTYPQQAGTIRKNGYIVIKNRPCKVVEVSTSKTGKHGHAKCHFVGIDIFTAKKLEDIVPSSHNCDAPHVNRTDYQLIDISEDGFVSLLTESGNTKDNLRLPTDENLLSQIKDGFA

SEQ ID NO: 9474 - protein, 273 aa, uncultured bacterium
MASPLVTLNDGRLMPQLGLGVYKVNQDIAVQLVQTAIEIGYRRVDTAALYDNEAEVGAAIRKSGLEREEIFVTSKIWNDRHGYHEAKEAIQESVDRLNIGYVDMMLIHWPCPKQDKFVETWHAFEEVLETGLVKSIGVSNFHQHHLEKLLAAATVVPAINQVELHPQLAQNSLRHFNKQHNIKTEAWAPLGRAKFLENPLLVEIAESLGKSVAQVIIRWHLQLQNLVIPKSSNPDRLAENFDVFDFELSQHQMGIIATLNTETRIATNPDDMN

SEQ ID NO: 9475 - protein, 501 aa, Glycine max
MGSAAKYELPFKLNNPDLLHNESFVHGKWVKSKSGKTFEVADPGTGKTWIDCPTNDASDVDEAVKSSHECFLEYKKISPRQRAQMLYKWDALIKENREDIATILVYETGKPRAEAYGEIDYSTGFTWWFAGEAERIQGSVFTPALPNRRIFTIKQPLGVAAALVPWNFPIAMILRKAGAALAAGCTMIVKPSPETPITVLALAYLADKAGFPKGALNVLTTDLDKTPELSEALCRHPLVNKVTFTGSTRVGKLVAKICSDNLKKVTLELGGNCPVLIFDDANIEQAMSQVFALKFRHAGQACITANRIYVQSGIFDKFLERWNAEAQKIVVGHGSDEKTTMGPVTTPRAVDKALSLVEDARKKGAKIHTGGNKVEKNGGYFFEPTVITGVTPDMDIAKEEVFSPISTFIKFETEDEVVKAANDTSMGLASYLFTKNVDRMWRLFENLEAGMIGLNTGNSSAAESPFGGIKQSGYGKESGKDVAVNEYMITKTGTFTLEDQS

SEQ ID NO: 9476 - protein, 159 aa, Hevea brasiliensis
MSDEEHHFESKADAGASKTYPQQAGTIRKNGYIVIKNRPCKVVEVSTSKTGKHGHAKCHFVGIDIFNAKKLEDIVPSSHNCDVPHVTRTDYQLIDISEDGFVSLLTENGNTKDDLRLPTDENLLSQIKDGFAEGKDLVVTVMSSMGEEQICALKDIGPK

SEQ ID NO: 9477 - protein, 493 aa, Arabidopsis thaliana
MVLSKTVSESDVSIHSTFASRYVRNSLPRFEMPENSIPKEAAYQIINDELMLDGNPRLNLASFVTTWMEPECDKLMMESINKNYVDMDEYPVTTELQNRCVNMIARLFNAPLGDGEAAVGVGTVGSSEAIMLAGLAFKRQWQNKRKAQGLPYDKPNIVTGANVQVCWEKFARYFEVELKEVNLREDYYVMDPVKAVEMVDENTICVAAILGSTLTGEFEDVKLLNDLLVEKNKQTGWDTPIHVDAASGGFIAPFLYPELEWDFRLPLVKSINVSGHKYGLVYAGIGWVVWRTKTDLPDELIFHINYLGADQPTFTLNFSKGSSQVIAQYYQLIRLGFEGYRNVMDNCRENMMVLRQGLEKTGRFKIVSKENGVPLVAFSLKDSSRHNEFEVAHTLRRFGWIVPAYTMPADAQHVTVLRVVIREDFSRTLAERLVADFEKVLHELDTLPARVHAKMANGKVNGVKKTPEETQREVTAYWKKLLETKKTNKNTIC

SEQ ID NO: 9478 - protein, 159 aa, Hevea brasiliensis
MSDEEHHFESKADAGASKTYPQQAGTIRKNGYIVIKNRPCKVVDVSTSKTGKHGHAKCHFVGIDIFNAKKLEDIVPSSHNCDVPHVTRTDYQLIDISEDGFVSLLTENGNTKDDLRLPTDENLLSQIKDGFAEGKDLVVTVMSSMGEEQICALKDIGPK

SEQ ID NO: 9479 - protein, 263 aa, Burkholderia cepacia R1808
MTVADVEIPGYAQDIALRLYRRADKTGLPVVLYFHGGGFVRGTLDDADFAARFLAERLPALVVSVDYSLAPAFPFPAAPEDAYRAAVWAATRARAFGGNPKKIGVAGHDAGGQLANCLAFIARDRGEVPIAAQALFGPMLDPSMTRIGDADRLSSDITARECAACYRAYLPQAAQRMHPYAAPLESVRLAGLPPTLIVTAQNDVLHVEAEKYAGCLISSGVLTQVIRYPDVTHAALATHAAALEEAVRFFQCRFQARQPNRSE

SEQ ID NO: 9480 - protein, 428 aa, Zea mays
  misc_feature (244)..(244): Xaa can be any naturally occurring amino acid
  misc_feature (394)..(394): Xaa can be any naturally occurring amino acid
MSTTKVKRRVGKYELGRTIGEGTFAKVRFARDTVTGEAVAIKILDKEKVLKHKMVEQIKREISTMKLIKHPNVVRIYEVMGSKTKIYIVLEFATGGELFDTIVNHGRMREDEARRYFQQLINAVDYCHSRGVYHRDLKPENLLLDSYGNLKVSDFGLSALSQQIKDDGLLHTTCGTPNYVAPEVLEDQGYDGAMADLWSCGVILFVLLAGYLPFEDSNLMTLYKKISNAEFTFPPWTSFPAKRXITIPEILEDEWFKKGYKRPEFDEQYDTTLDDVDAVFNDSEEHHVTEKKEEEPVALNAFELISMSAGLNLGNLFDSEQEFKRETRFTSKCPPKEIVRKIEEAAKPLGFDVQKKNYKLRLEKVKAGRKGNLNVATEILQVAPSLHMVEVRKXKGDTLEFHKFYKNLSKTLKDVVWKSDDLQTQHAS

SEQ ID NO: 9481 - protein, 445 aa, Pseudomonas aeruginosa PAO1
MQSLLIRNARMVNEGQVREGDLLVRHGRIERIAGCLENCGASREIDAAGRYLLPGMIDDQVHFREPGYPQKGSIASESRAAVAGGITSFMDMPNTRPATLSLEALAEKKRLAAAHSVANYGFHFGVSRDNLDTVAALDPREVAAVKVFMGASTGDMLVDDLPTLERLFASVPTLLLSHCEDTPRIEANLARWRQRFGERIPAAAHPRIRDAEACYRSTALAVELAQRHGTLLHVLHLSTARELALFEDKPLCQKRITAEVCVHHLLFDDSDYARLGHLLKCNPAIKSREDRDALRRALAGNRLDVIGTDHAPHAWAEKQQAYPQAPAGLPLVQHALPALLELVREGWLSLATLVAKTSHRVAELFAIADRGFLREGYWADLVLVSELEHPALASAMPLLSRCNWTPFRHRAFHHRIDTTIVSGQLAWHAGRLSDDCQGLPLRFSR

SEQ ID NO: 9482 - protein, 412 aa, Neurospora crassa
MATTIKASVLHGARDLSVESRPLPTLSPTDVLISIKSTGLCGSDLHYYTHFRNGDIQVHEPLTLGHESSGIITAIGSPSVSSEYGLNVGDRVALEVGQPCEACELCCPPGTGPIGNYSGGHGEESGGKGGESTTTTSRYNICRAMRFRSSAKGWPQFPHAQGTLQEVVAHPAKWCHKLPESVDYTLGALAEPLAVAMHAAGRAGIPSCVPHSSSSMTSSRGAARVKVLVFGAGAVGLLCAAVCKSITKGDAIVVIADIQADRVKFAVENGFADAAVVVPISDKRPETIEEKLEYAKSVAERVKGAELVKGLGGQATAPGGKIMIIGMGNPIQTLPISAASLKEVDLLGVFRYANAYPKVIELLARGDPHLPDLSKLVTQRYSGLESIPMAFDMAARVKDNEGNLVLKVMIDM

SEQ ID NO: 9483 - protein, 186 aa, Glycine max
  misc_feature (131)..(131): Xaa can be any naturally occurring amino acid
KTLSEAVVEAIERQNNIGEEEKRRKLNEWMHHSSYERCLSNEEGREIAEKLGVRNLFWDWDLPRTREGFYRFKGSVTASVVRGCAFSPHADVIWMETAIPNVVECTEFCEGVKSKHPQMMLGYNLSTSFNXYASGLSDEHMKDLIPLIAEVGVCVQSHTVEGLTSTALSSTTISMALAMEGILADS

SEQ ID NO: 9484 - protein, 478 aa, Arthrobacter sp. BP2
MVPAAGLDYYVIHHRGEPPMGVYTTIDPATGDATAQYPEISDAELDTLIKNSAAAYRSWRTTTLEQRRAVLTRTAEIHREQAEELAKLLTLEMGKPIAQARGEVELVASIYQHYADNLEEYLADESLTFRGSGTAVVRTEPIGPLVGVMPWNYPYYQVARFAAPNIALGNTIILKHARNCPQSALAIERVLTEAGLPAGVYANAFISSAQVAAAVADRRVQGVSLTGSEKAGAAVGEVAGRNLKKCVLELGGSDPFIVLDDADIDAAAAAAVIGRLSNGGQACTASKRFIVADSVYEEFLQKFLDAMASWQTGDPTDSGTKLGPLASAAGVEELDELVQDAVSHGAKLLLGGERPDGPGAYYPATVLAGVTPAMRAFTEELFGPVAVVYRVGSLQEAIDLANNSPFGLSSSVFTSDARNAERLAEELEVGMVWINSTSKSSPDLPFGGVKGSGFGRELAGYGFNEFANKKLVRNPGAR

SEQ ID NO: 9485 - protein, 320 aa, Neurospora crassa
MATKTFKLNTGANIPALGLANPSPPPPSIGTWQGESTQVKDAVVAALKSGYRLIDTAYCYGNEEHVGAGLKEAFDQGIVKREDVFVVTKLWATYTSRAEEGLEKSLRNLGLEYVDLFLVHWPLLMNPEGNDDRFPKLPNGERDILRDYSHVQIWKNMEKLVGSGRTKAIGVSNYSKRYLEELLPHAKIVPAVNQIENHPQLPQQEIVDFCKEKGIHIMAYSPFGSTGSPVTSAEPVIKIAEKHGVKPTTVLLSYHLYRGSTVLPKSTNPERIEANAKLIELDAEDQKLLNDYSEGLVKEGKVQRYVYPPFGVDFGFPDKS

SEQ ID NO: 9486 - protein, 431 aa, Corynebacterium efficiens
MSNVGTPRTAQEIQQDWDTNPRWNGITRDYTAEQVAELQGSVVEEHTLAKRGAEILWDAVSAEGDDYINALGALTGNQAVQQVRAGLKAVYLSGWQVAGDANLAGHTYPDQSLYPANSVPNVVRRINNALLRADEIARVEGDTSVDNWLVPIVADGEAGFGGALNVYELQKGMITAGAAGTHWEDQLASEKKCGHLGGKVLIPTQQHIRTLNSARLAADVANTPTVVIARTDAEAATLITSDVDERDRPFITGERTAEGYYHVKPGLEPCIARAKSYAPYADMIWMETGTPDLELAKKFAEGVRSEFPDQLLSYNCSPSFNWSAHLEADEIAKFQKELGAMGFKFQFITLAGFHSLNYGMFDLAYGYAREGMPAFVDLQNREFKAAEERGFTAVKHQREVGAGYFDTIATTVDPNSSTTALKGSTEECQFH

SEQ ID NO: 9487 - protein, 316 aa, Cenibacterium arsenoxidans
MSIQWYPGHMNAARKKAAEAMEKVDMIIEVLDARVPQASCNPMIEELRTFRQRPCLKILNKSDLADPAATQQWLDFYNKQKNVHAVALSCKKPSDVAKIPALSMKIAPHRGTALKPLRIMIMGIPNVGKSTLMNALLKKRVAKVGDEPAVTKMQQRLYLGNNIVLTDTPGMMWPKIAYPSDGLMLAASHAIGSNALIEEEVATFLADIILARYPALVAARYGMKTEGIDGVSVIEGVAVRRGLRIKGGELDLEKAAHIFLQDYRTGLLGRISLETPESRVELLTTFQPPPSLSDVADESAEDAPEENRDDAFSHRR

SEQ ID NO: 9488 - protein, 505 aa, Agrobacterium tumefaciens str. C58
MHEPLTAAEYKAIASDLQFPANAFIDGAFRPAGSGKTFKTINPATGETLADISACDVSDVDYAVGKARAAFDDGRWRLLPPGERKAILLTFAKLLEQHRHELAVMESLDSGKPVSECQTVDIPDTIHTIRWHAELIDKLYDNTAPVGSNALALVVREPVGVVGCVLPWNFPLLMLAWKIGPALASGCSVIVKPAEETTLTTLRVAELAHEAGIPAGVFNVVPGGGKEVGEPIGMHMDVDMVAFTGSTPTGRRFLRYAADSNLKRIVLECGGKNPAVVLDDAEDLDLVAEQVVNGAFWNMGENCSASSRLIVHAKIKDELLQRIGAYMREWRMGDPLDPQNRVGALVSKAHFDKVHSFLEDVKAENLTIVHGGKTEKGIFIEPTVVDAVPPASRLFREEIFGPILSVTTFNTLAEAVALANDTNYGLAASVYTGSLRKAIKLSREIRAGVVTVNCFGEGDATTPFGGYKESGFGGRDKSIFAHDNYCELKTIWIDVSDRSVDETVR

SEQ ID NO: 9489 - protein, 175 aa, Triticum aestivum
  misc_feature (42)..(42): Xaa can be any naturally occurring amino acid
MAPAVMASSATTVAPFQGLKSTASLPVSRRSSGSLGRVSNGXGRIRCMQVWPIEGIKKFETLSYLPPLSTEALLKQVDYLIRSKWVPCLEFSKVGFVFREHNSSPGYYDGRYWTMWKLPMFGCTDATQVLNEVEEVKKEYPDAYVRVIGFDNLRQVQCVSFIAFRPPGCEESGKA

SEQ ID NO: 9490 - protein, 143 aa, Wolinella succinogenes
MFLTRFDPLRDLKEIERRFLTPFGEGGEGGAKSNLRGFAPVVNTREEEKGYFIEVDLPGVQKEDIHIDVKENTLSITGERKLKEEVKEENYYKVESFFGKFQRSFTLPENVDSDAITAQSKDGVLEIFIPKTAPKDAKRIAIS

SEQ ID NO: 9491 - protein, 225 aa, Zea mays
  misc_feature (129)..(129): Xaa can be any naturally occurring amino acid
MCARSMAPRRPCTTAIALPWLALFLCPHLAGGGAVRFFLASSLDLRPITGGFALFSMAAASSATSVHDFTVKDASGKDVDLSTYKGKVLLIVNVASQCGLTNSNYTELSQLYEKYKDQGFEILAFPCNXQFGGQEPGTNEEIVQFACTRFKAEYPIFDKVDVNGDNTAPIYKFLKSSKGSLFGDNIKWNFSKFLVDKEGHVVERYAPTTSPLSIEKDIKKLLGSS

SEQ ID NO: 9492 - protein, 382 aa, Chromobacterium violaceum ATCC 12472
MTEVVLTGKPKKSVALSGVAAGNTALCTVGRSGNDLHYRGYDILDLAGHCEFEEVAHLLVHGKLPNKAELAGYKKKLKSLRGLPASVKAALEALPAAAHPMDVMRSGVSALGCALPEKDDHNLAGARDIADRLMASMGSMLLYWYHYSHNGKRIEVETDDDSIGGHFLHLLHGVKPSYEWVRAMHTSLNLYAEHEFNASTFTARVIAGTGSDMHSAITGAIGALRGPKHGGANEVAFEIQQRYENPDEAEADIRARVERKEVVIGFGHPVYTISDPRNKVIKEVARELSRSNSDMKMFDIAERLESVMWDVKKMFPNLDWFSAVSYHAMGVPTAMFTPLFVISRTSGWAAHVIEQRQDGKIIRPSANYIGPEDQAFVPLEKR

SEQ ID NO: 9493 - protein, 218 aa, Oryza sativa (indica cultivar-group)
MEVEEAAYRTVWSEPPKRPAGRTKFRETRHPVYRGVRRRGGRPGAAGRWVCEVRVPGARGSRLWLGTFATAEAAARAHDAAALALRGRAACLNFADSAWRMPPVPASAALAGARGVRDAVAVAVEAFQRQSAAPSSPAETFADDGDEEEDNKDVLPVAAAEVFDAGAFELDDGFRFGGMDAGSYYASLAQGLLVEPPAAGAWWEDGELAGSDMPLWSY

SEQ ID NO: 9494 - protein, 343 aa, Vibrio cholerae O1 biovar eltor str. N16961
MKIKALSKLKPEQGIWMNEVDMPELGHNDLLIKIKKTAICGTDVHIYNWDEWSQKTIPVPMVVGHEYVGEVVGIGQEVRGFQIGDRVSGEGHITCGHCRNCRGGRTHLCRNTIGVGVNRTGCFSEYLVIPAFNAFKIPDGISDDLASIFDPFGNAVHTALSFDLVGEDVLITGAGPIGIMAAAVAKHVGARHVVITDVNEYRLDLARKMGVTRAVNVAEQNLEDVMKELGMTEGFDVGLEMSGVPSAFSAMLKTMNHGGRIALLGIPPSSMAIDWNQVIFKGLVIKGIYGREMFETWYKMASLIQSGLDISPIITHHFKVDDFQKGFDIMRSGASGKVILDWQ

SEQ ID NO: 9495 - protein, 424 aa, Acinetobacter sp. ADP1
MSEATGKKAVLKLDGKEIELPIYSGTLGPDVIDVKDVLAAGHFTFDPGFMATASCESKITFIDGNEGVLLHRGYPIDQLATQADYLETCYLLLNGELPTPEQKQEFDAKVRNHTMVHDQVSRFFNGFRRDAHPMAIMVGVVGALSAFYHNQLNIEDVNHREITAIRLIAKIPTLAAWSYKYTVGQPFIYPRNDLGYAENFLHMMFATPADRDYKVNPILAKAMDRIFTLHADHEQNASTSTVRLAGSTGANPYACIAAGISALWGPAHGGANEAVLKMLDEIGTVENVAGFMEKVKTKEVKLMGFGHRVYKNFDPRAKVMKETCDEVLAALGINDPQLELAMELERIALSDEYFIKRNLYPNVDFYSGIILKAIGIPTEMFTVIFALARTVGWISHWLEMHSAPYKIGRPRQLYTGETKRDIKR

SEQ ID NO: 9496 - protein, 397 aa, Xylella fastidiosa 9a5c
MSASFSPHTITLIKSTVPLLAEHGTTIIEAMYHRLFEDPQIEALFNQANQKNGTQIHALAGAILAYARNIDNPGVLASAIERIAQKHVGYAIHPEHYPHVATALLGAIKKVLGDVATSEVLEAWGEAYWFIANLLKDREAVIREGIMTKNGGWIHWRRFVISKRIPESETITSFMLHPEDGGPVVPHQAGQYLTFRFDAAGMPGMKRNYSISCGPNSDHYRITVKREHGTGASAFLHDQAKVGTIIECTPPVGDFFLPSVIERPIVLLSGGVGLTPMVSMMEQIAEAHPDAQVWYVHGTQNRETHAMDAHIRALVSRHKHMKATTFYTQRREADDAEAGFITIDWLRANTPFQKADFYLCGPRPFLRTFVRDLIGAGVPAVQVHYEFFGPMDEEMAA

SEQ ID NO: 9497 - protein, 158 aa, Hevea brasiliensis
SDEEHHFESKADAGASKTYPQQAGTIRKNGYIVIKNRPCKVVEVSTSKTGKHGHAKCHFVGIDIFNGKKLEDIVPSSHNCDVPHVTRTDYQLIDISEDGFVSLLTENGNTKDDLRLPTDENLLTQIKDGFAEGKDLVVTVMSSMGEEQICALKDIGPK

SEQ ID NO: 9498 - protein, 440 aa, Triticum aestivum
MEDAAEGKTNVLQGRYELGRVLGHGNFGRVHAARDLRTGRGVAVKVVAKDKVERAGMVEQIKREIAVMKMVSHPNIVELHEVLATRTKIYLALELVRGGELFARISRAGRLREDVARRYFRQLISAVDFCHGRGVYHRDLKPENLLLDEAGNLKVADFGLSALAGHARPDGLLHTACGTPAYVAPEVLGGNGYDGAKADIWSCGVILYVLLVGALPFQDENLMSMYRKMQRGGFLCPSWVSKDARKLIGRLLDPNPSSRITIASLVESPWFKKTSPIPSPLLEPVPPAAARGNGEDKDEPPEALNAFHLISLSAGFDLSPLFDQEPATGRGTRGGVMRFATREPASGVISRLEGLATGGAMRVTKSGARGGRLEGAERGRKGRLGVAAEFFSVAPSVLVVDVKKDGGDTMEYRSFCSDELRPALKDIVWAAAAAAAAFPR

SEQ ID NO: 9499 - protein, 373 aa, Bacteroides thetaiotaomicron VPI-5482
MKLFDVYPLYDINIVKGQGCKVWDENGTEYLDLYGGHAVISIGHAHPHYVEMISNQVATLGFYSNSVINKLQQQVAERLGKISGYEDYSLFLINSGAEANENALKLASFYNGRTKVISFSKAFHGRTSLAVEATNNPTIIAPINNNGHVTYLPLNDIEAMKQELAKGDVCAVIIEGIQGVGGIKIPTTEFMQELRKVCTETGTILILDEIQSGYGRSGKFFAHQYNHIQPDIITVAKGIGNGFPMAGVLISPMFKPVYGQLGTTFGGNHLACSAALAVMDVIEQDNLVENAKAVGDYLLEELKKFPQIKEVRGRGLMIGLEFEEPIKELRSRLIYDEHVFTGASGTNVLRLLPPLCLSMEEADEFLARFKRVL

SEQ ID NO: 9500 - protein, 526 aa, Zea mays
  misc_feature (242)..(242): Xaa can be any naturally occurring amino acid
  misc_feature (246)..(246): Xaa can be any naturally occurring amino acid
MKPPSSLVHYFKLLVLLALARLTMHVPDEDVLLSLGALRLDGHFSFHDVSAMARDFGNQCSFLPAAVLHPGSVSDIAAIVRHVFSLGEGSPLTVAARGHGHSLMGQSQAAQGIVVRMESLRGPRLQVNDAGVSPPSVDAPGGELWINVLRETLKHGLAPKSWTDYLHLTVGGTLSNAGVSGQAFRHGPQVSNVNQLEIVTGRGDVVTCSPDDNADLFYAALGGLGQFGIITRARIALEPAPXMVRXWIRVLYRLVESFTEDQEMLIMAENSFDYVEGFVIINRTGVLNNWRASFKPQDPVEASHFQSDGRVLYCLELTKNFNSDDTDTMEQEVTVLLSRLRFIQSTLFHTDVTYLEFLDRVHTSELKLRAQSLWEVPHPWLNLLIPRSSIRRFATEVFGRILKDSNNGPILLYPVNKSKWDNKTSVVIPDEEIFYLVGFLSSAPSLSGHGSIAHAMSLNSQIVEFCEEADIGMKQYLAHYTTQEQWKTHFGARWETFERRKHRYDPLAILAPGQRIFPKASLPLSL

SEQ ID NO: 9501 - protein, 204 aa, Oryza sativa (japonica cultivar-group)
MADEEHEVYGQEIPLDGEDVDMGAPGDEAAKMQELDEMKRRLKEMEEEANALREMQTKVAKEMQGLDPNASSSESKEEMDARSVYVGNVDYACTPEEVQQHFNSCGTVNRVTILTDKFGQPKGFAYVEFLEVEAVQEAVKLNESELHGRQIKVAPKRTNVPGMKQPRGGRGFGGHPYMRPYGAPFYNPYGYGYPRFRRPRRPYF

SEQ ID NO: 9502 - protein, 502 aa, Exiguobacterium sp. 255-15
MSTVHEKTIEMKRSVYHLVINGEQVEGTSGETFKTYNPATGEVIAEVAKASKADADRAVQAARDAFDHGKWKMWPVGRRSQVLNKIAGIMRSRFNELVELEILDTGKSLAAAQGQITQAIEDFEFYAGAIVGHRGSVNNVPGQFHNYTEKEPVGVCAQIIPWNYPLMMAAWKVAPAIAVGCSVVVKPATLTPLTAIILGEICLEAGVPAGVVNVIPGSGREIGNHLVEHPNVNKVAFTGSTPVGKDIMGRASESLKRVTLELGGKSPNLVFEDADITAAVDGSLFGIFYNSGQSCEARSRLYIHEDIYDTFMEQFVAKTKQLVLGNPFDKGTHVGAIIDQQQLDVIDGYVQSAKADGATILTGGQVEKVAGFEEGFWYAPTIIADVTHDMKAVQEEIFGPVVVVMKFKDEKEAVRLANDTEFGLGSAIWTKDGARATRIANQIKAGIVMINCPFSAFPGTPFGGYKQSGFGRELCIETLDLYTETKSILSYYGSRPLNPFGL

SEQ ID NO: 9503 - protein, 76 aa, Zea mays
CLYVALQMSVQDANMSSDTDMSKVFEDRTFVSSILNSLPGVDPNDPSVKDLLASLHSQGEQEKKEDTSDKTEDDKN

SEQ ID NO: 9504 - protein, 115 aa, Hordeum vulgare subsp. vulgare
MARTAATKLALVALVAAMLLVAADAAITCGQVSSALGPCAAYAKGSGTSPSAGCCSGVKRLAGLARSTADKQATCRCLKSVAGAYNAGRAAGIPSRCGVSVPYTISASVDCSKIH

SEQ ID NO: 9505 - protein, 474 aa, Erwinia carotovora subsp. atroseptica SCRI1043
MHDKLLIEGKLIAGNGEALAVFNPATGEQIAAIPQADLHQIDAAVLAAESAFAHWGQTTPKTRATLLLKIADAIEENAEVFAKLESLNCGKPYHAVLNDEVPAVADVFRFFAGAARCLSGSAAGEYLEGHTSMIRRDPVGVVASIAPWNYPLMMASWKLAPALAAGNCVVLKPAEQTPLTTFYLAHLLADILPAGVVNIVFGRGADIGDALTGHEKVNMVSLTGSIATGAHILAHTAASVKRTHMELGGKAPVIVFDDADIDQVVDGIRSFGFYNAGQDCTAACRLYVQRAVYDEVVEALGKAVATLKIGDPRDETTELGPLITEPQLERVMGFVERAKALPHITVVTGGERVKGTGFYFQPTVLAGAKQDDEIVQKEVFGPVISITSFDDEAQVIGWANASNYGLASSVWTRDIGRAHRLAACLQYGCTWVNTHFMLVSEMPHGGQKLSGYGKDMSMYGLEDYTIVRHIMIRH

SEQ ID NO: 9506 - protein, 115 aa, Hordeum vulgare subsp. vulgare
MARSAATQLVLVAMVAAMLLVAADAAISCGQVSSALRPCISYASGNGGILPPACCSGVKRLAGAAQSTADKQAACKCIKSAAGGLNAGKAAGIPSMCGVSVPYAISASVDCSKIR

SEQ ID NO: 9507 - protein, 379 aa, Antarctic bacterium DS2-3R
MTEPTIHKGLAGVTADVTAISKVNSDTNSLLYRGYPVQELAAKCSFEQVAYLLWNSELPNDSELKAFVNFERSHRKLDENVKGAIDLLSTACHPMDVARTAVSVLGANHARAQDSSPEANLEKAMSLLATFPSVVAYDQRRRRGEELIEPREDLDYSANFLWMTFGEEAAPEVVEAFNVSMILYAEHSFNASTFTARVITSTLADLHSAVTGAIGALKGPLHGGANEAVMHTFEEIGIRKDESLDEAATRSKAWMVDALAQKKKVMGFGHRVYKNGDSRVPTMKSALDAMIKHYDRPEMLGLYNGLEAAMEEAKQIKPNLDYPAGPTYNLMGFDTEMFTPLFIAARITGWTAHIMEQVADNALIRPLSEYNGPEQRQVP

SEQ ID NO: 9508 - protein, 119 aa, Bartonella chomelii
NEACLKMLQEIGSIEKIPEFIARAKDKNDPFRLMGFGHRVYKNYDPRAKLMQKTCHEVLKELNIKDDPLLDIAMELEKIALSDEYFIEKKLYPNVDFYSGITLKALGFPTEMFTVLFAL

SEQ ID NO: 9509 - protein, 352 aa, Rhodococcus sp. Phi2
MRVFAVQPEDTTIHDLQVPTPSPEGREVLLRVVRAGVCHTDTHLRAGGYDLGSRGMMSMKERGIEYPMVLGHEVVGVVEKVGDGVESVQVGDIRLIYPWIGCGECRQCRAGHDNRCAAGKNLGVARHGGYAENILVPDEKYLVDIDGLDPSWAATLACSGLTAYSAVDKALPLEPDEPVVVFGAGGLGLTAIAILRSRGHRNICAVDVAERNLALARDMGASSTVLSGTGSGADDIRGAAGGPAGAVIDFVNNGATATTAFEVLAKAGIMIQVGLFGGEVTLPTALLALRMIRIEGSFVGTLVQMQDLVRLAQRGELPHIPVVERSLSAAAVSQALDDLTAGGVAGRIVLTA

SEQ ID NO: 9510 - protein, 405 aa, Pisum sativum
PVYISIGCNLPAIPHPTFSRDPVPFSLAPKLSNQMGLEAAVEAAAEFLNKAVKPVLVGGPKLRVAKASDAFVELADASGYALAVMPSAKGMVPEHHPHFIGTYWGAVSTAFCAEIVESADAYLFAGPIFNDYSSVGYSLLLKKEKAIIVMPDRVVIANGPAFGCVLMNDFLKALAKRLKHNNVAYENYHRIFVPDGTPLKSASKEPLRVNVMFQHIQKMLSSETAVIAETGDSWFNCQKLKLPEGCGYEFQMQYGSIGWSVGATLGYAQAVPEKRVIACIGDGSFQVTAQDVSTMLRCGQKTIIFLINNGGYTIEVEIHDGPYNVIKNWNYTGLVDAIHNGEGKCWTTKVFCEEELVEAIAKATGPKKDSLCFIEVIVHKDDTSKELLEWGSRVSAANSRPPNPQ

SEQ ID NO: 9511 - protein, 204 aa, Zea mays
  misc_feature (92)..(92): Xaa can be any naturally occurring amino acid
  misc_feature (193)..(193): Xaa can be any naturally occurring amino acid
MEDEEHEVYGQEIPVDGEDVDMAAGDDATKLQELDDMKRRLKEMEEEAAALREMQAKVAKEMQGVDPNATTSENKEEMDSRSVFIGNVDYAXCTPEEVQQHFNSCGTVNRVTILTDKFGQPKGFAYVEFVEVEAVQEAIKLNESELHGRQLKVAPKRTNVPGMKQPRGRGFNPYHGHPYMRPYGYSPYGYGEXPRFRRPRRPYF

SEQ ID NO: 9512 - protein, 459 aa, Rhodococcus sp. Phi2
MGVYTTTDPATGEEVAQYPEISDAQLDELIGRSAAAYRSWRTTPLEQRRAVLSRAAEIHREQADELAALLTLEMGKPITQAKGEVALVASIYQYYADHAEEFMADEPLDIAGSGTAVVRTEAIGPLVGVMPWNYPYYQVARFAAPNIALGNTIILKHARNCPQSALAIERVLTEAGLPDGVYLNAFISSAQVAAAIADPRVQGVSLTGSEKAGSAVGEVAGRHMKKCVLELGGSDPFIVLGDADVDAAAAAAVVGRLGNGGQACTASKRFLVEEPVYDEFVRKFLDGMISWQPSDPTSPETKLGPLSSRSAVDELDELVQDAVSRGAQVLTGGDPRDEKGAYYPPTVLVGVTPDMRAYYEELFGPVAVVHRVGSLDEAIEAANDSPFGLSSSVFTSDPQKADRVAEELETGMVWINSTSKSSPDLPFGGVKRSGVGRELARFGFDEFANKKLVRKPGKK

SEQ ID NO: 9513 - protein, 510 aa, Zea mays
  misc_feature (233)..(233): Xaa can be any naturally occurring amino acid
  misc_feature (246)..(246): Xaa can be any naturally occurring amino acid
MGAFAKEEHQFLAELGLAQRNPGAFACGAWGGSGPTVTSTSPTNNQVIAEVVEASVHDYEEGMRACFDAAKTWMAIPAPKRGEIVRQIGDALRAKLHHLGRLVSLEMGKILPEGIGEVQEIIDMCDYAVGLSRQLNGSIIPSERPNHMMMEVWNPLGVVGVITAFNFPCAVLGWNACIALVCGNCVVWKGAPTTPLITIAMTKIVASVLEKNNLPGAIFTSFCGGTEIGQAIXLDIRIPLVSFTGXSTRAGLMVQQQVSARFGKCLLELSGNNAIIVMDDVDIQLAVRSVLFAAVGTAGQRCTTCRRLILHENIYQTFLDQLVEVYKQVRIGDPLEKGTLLGPLHTPASKENFLKGIQTIKSQGGKILFGGSAIESEGNFVQPTIVEITPSAPVVKEELFGPVLYVMKFQTLKEAIEINNSVPQGLSSSIFTKRPDIIFKWLGPHGSDCGIVNVNIPTNGAEIGGAFGGEKATGGGREAGSDSWKQYMRRATCTINYGSELPLAQGINFG

SEQ ID NO: 9514 - protein, 186 aa, Triticum aestivum
  misc_feature (85)..(85): Xaa can be any naturally occurring amino acid
  misc_feature (145)..(145): Xaa can be any naturally occurring amino acid
  misc_feature (170)..(170): Xaa can be any naturally occurring amino acid
MAPAVMASSATTVAPFQGLKSTAGLPVSRRSSGSLGRVSNGGRIRCMQVWPIEGIKKFETLSYLPPLSTEALLKQVDYLIRSKWXVPCLEFSKVGFRLPVKHNSSPRVLRRSILGQCGSCLCSGCTDATQVLNEVEGGQEGYPDXFRVIGFDNLRQVQCVSFIAFRPQVXRSPGKAKLQVETMAYV

SEQ ID NO: 9515 - protein, 193 aa, Oryza sativa (japonica cultivar-group)
MSLSTIARRLCCSRPTSGGRLSAVWAHLYSTEAAKDTGAKKYKYPEVYDPYGPMSPPSQKVVDLADRIAALPPEEIKQIAPALLLRLNQPPPQAISGQGFSFSPQGGGGAAGAAKAEEKKAEKTVFDVKLEKFDAAAKIKIIKEIRTFTDLGLKEAKELVEKAPVILKQSLTKEEAEAIIEKIKVAGGVAVME

SEQ ID NO: 9516 - protein, 481 aa, Bacteroides thetaiotaomicron VPI-5482
MEDLNFRKGDAKTDVFGSDRMLQPSPVERIPDGPTTPEVAYQMVKDETFAQTQPRLNLATFVTTYMDDYATKLMNEAININYIDETEYPRIAVMNGKCINIVANLWNSPEKDTWKTGALAIGSSEACMLGGVAAWLRWRKKRQAQGKPFDKPNFVISTGFQVVWEKFAQLWQIEMREVPLTLEKTTLDPEEALKMCDENTICVVPIQGVTWTGLNDDVEALDKALDAYNAKTGYDIPIHVDAASGGFILPFLYPDTKWDFRLKWVLSISVSGHKFGLVYPGLGWVCWKGKEYLPEEMSFSVNYLGANITQVGLNFSRPAAQILGQYYQFIRLGFQGYKEVQYNSLQIAKYIHGEIAKMAPFVNYSENVVNPLFIWYLKPEYAKSAKWTLYDLQDKLSQHGWMVPAYTLPSKLEDYVVMRVVVRQGFSRDMADMLLGDIKNAIAELEKLDFPTPTRMAQEKNLPVEAKMFNHGGRRHKTVKK

SEQ ID NO: 9517 - protein, 106 aa, Capsicum annuum
MLTDFVRGVDCPHAEAVTCGQIQVGVVNCLPYLQNRGPLGRCCGVIKDLLKLCKTPHERRKSCKCVKTAANTIKGIDFGKAAGLSGVCGVKIPFEISPSVDCSKVK

SEQ ID NO: 9518 - protein, 114 aa, Capsicum annuum
MDMFGKIACFVLLCMVVVAPSAEALSCSQVTSGLAPCLPYLQGRGPLGGCCSGVKDLLAAAKTPADRKTACTCMKSTANSIKGIDAGKAASIPATCGVNIPYKISPSTDCTKVE

SEQ ID NO: 9519 - protein, 256 aa, Triticum aestivum
VGREGAMEQGEEDGDWMMEPAAGKKGGVMIDRKKRFSEEQIKSLESMFATQTKLEPRQKLQLARELGLQPRQVAIWFQNKRARWKSKQLERQYAALRDDYDALLSSYDQLKKDKQALLNQLEKLAEMLREPGGAKCGDNAGAAARDDVRLAVAVMRMMGEFGEAGGASKACAAAKGYAGRDGRGLSGKDALVGDDDDGACLLLPTSLDGPTAHSGGFAADGDGPESLPSSRRRPYPAPLEAVPSVRGREYKCQQLS

SEQ ID NO: 9520 - protein, 484 aa, Synechococcus elongatus PCC 6301
MAAPILFWHRRDLRLSDNIGLAAARAQSAQLIGLFCLDPQILQSADMAPARVAYLQGCLQELQQRYQQAGSRLLLLQGDPQHLIPQLAQQLQAEAVYWNQDIEPYGRDRDGQVAAALKTAGIRAVQLWDQLLHSPDQILSGSGNPYSVYGPFWKNWQAQPKPTPVATPTELVDLSPEQLTAIAPLLLSELPTLKQLGFDWDGGFPVEPGETAAIARLQEFCDRAIADYDPQRNFPAEAGTSGLSPALKFGAIGIRQAWRAASAAHALSRSDEARNSIRVWQQELAWREFYQHALYHFPSLADGPYRSLWQQFPWENREALFTAWTQAQTGYPIVDAAMRQLTETGWMHNRCWMIVASFLTKDLIIDWRRGEQFFMQHLVDGDLAANNGGWQWSASSGMDPKPLRIFNPASQAKKFDATATYIKRWLPELRHVHPKDLISGEITPIGRRGYPAPIVNHNLRQKQFKALYNQLKAAIAEPEAEPDS

SEQ ID NO: 9521 - protein, 114 aa, Capsicum annuum
MEMVGKIACVVLLCMVVVAPHAEALTCGQVQSRMTPCLPYLTGSGPLGRCCGGVKGLLGAAKTPADRKTVCSCLKSAAGSIGGINVRKAAGLPNMCGVNIPYQISPSTDCTKVQ

SEQ ID NO: 9522 - protein, 125 aa, Thermoanaerobacter tengcongensis MB4
MSKEEILQAIKNMTVLELAELVKALEEEFGVSAAAPVAVAAAPAAGAPAAAPAEEKTEFDVILQEVGSDKIKVIKVVREITGLGLKEAKDLVDSVPKPIKEGVSKEEANQIKAKFEEVGAKVEIK

SEQ ID NO: 9523 - protein, 441 aa, Chlorobium tepidum TLS
MKSFLSKSGAIAAGLLLAAATFSPPIQAATPTPDAVNAFAIDNFFLFICAVLVLFMQAGFALVETGLNSAKNAVNILFKNLMDMAIGGIIYYFVGYGLMYPGEAFSGGFFGFGGPGISTAMPEIAGGTLYPAVDFLFQVAFAATAATIVSGAVAGRMQFRAYLIYSAVISAVVYPISGFWLWGGGWLKALGFHDFAGSLLVHALGGFAGLAGAIVLGPRIGRFNEDGTPNAMPGHNLALSTLGVFILLIGWYGFNPGSQLAIVGGDNTAAVMKIAVNTTLAACAGAVVAMIFAWGLFKKPDLTMALNGMLAGLVAITANCDVVSYNASLIIGAVGGILVVLGIMLLDKLRIDDPVGAWPVHGLNGIWGGVAAWIFGGQPMVAQLVGSLVVPFWGFVTMMVLFLILKAMGILRVHKDEEMKGLDISEHEEEAYYGFDIYTTQ

SEQ ID NO: 9524 - protein, 309 aa, Bartonella henselae
DGNEGILLYRGYPIDQLAEKGDFLESCYLLLYGELPTKQEKIDFDRCIMQHTMVHEQFARFFHGFRRDSHPMAVMIACLGAMSAFYHDSIDITDPQQRMIASIRLISKVPTLAAMAYKYSIGQAFVYPRNDLSYAANFLRMCFSVPCEEYKINPVLTRAMDRIFTLHADHEQNASTSTVRLAGSSGANPFACIAAGVACLWGPAHGGANEACLKMLQEIGSVERIPEFIARAKDKNDSFRLMGFGHRVYKNYDPRAKIMQQTCHEVLKELNIQNDPLLDIAITLENIALNDEYFIEKKLYPNVDFYSGI

SEQ ID NO: 9525 - protein, 631 aa, Zea mays
  misc_feature (179)..(179): Xaa can be any naturally occurring amino acid
  misc_feature (191)..(191): Xaa can be any naturally occurring amino acid
MASVKLGSKPDAFKRQGQAWFCTTGLPSDVTVEVGDMSFHLHKFPLLSKSAFLERSIEENSDQEECIIKLNDIPGGAKSFELVARFCYGVKIELSPANVVYLRCASEHLEMTEEVAEENLIAQSEMFLNQVVLRNWKDSLAALETCDDLLPHAEDLQIVNRCIESLASKATSNPNLFGXWPIREHGMMQSXPGGSVLWNGISTGARPRNFNSDWWYGDASSLSFPMYKRLISTMESRGIRPEIIAGSLTYYAKKYLPGLRRHSHSMGTMPLTATLSEVEQKNLLEEIDRLLPLHRGIASTKVLLGLLRTAMILKASPTCISNWEKRIGMQLDQATLEDLLLPNFSYTMETLYNVECVHRILDHFLAMDQANGGESPCLDDVMASPSLTPITSVAKLIDGYLAEIAPDINLKPPKFQALASAIPEYARPLDDGLYRAIDIYLKAHSWLSEAEREQFCRLLDCQKLSLEACTHAAQNERLPLRVVVQVLFFEQLQLRTSIAGCLLVSDNLEGSRPLRSGIATSGEAGGWATAVRENQVLKVGMDNMRTRLAELEKECSSMRQEIEKLGGRAGKGGGGGWASRVVPRRLGLKVRSQMCSAQEGSVSEQHRSMSAKLDKLQAKVSKQKKQLAADA

SEQ ID NO: 9526 - protein, 484 aa, Bordetella parapertussis 12822
MENLGYPARLELYVAGQWRGVEGRRTQVVVNPSTQQPLGELPLASAEDIDDALAAADQAFGDWARTTAWERADILQRAAALIEARRDRLAVVLTLENGKPLADSHGELDRVVETILWCAEEGKRTYGRVLPARAQRLSQSSLKRPVGPVAAFVPWNFPAALAARKLAAAMAAGCTVVLKPAEETPAICIELVRAFVDAGTPAGVVNLLYGVPAQVSERLIASPIIRKVSFTGSVAVGRLLASMAAGHLKPATMELGGHAPVVVFDDVDADRVAKMCVGFKYRNAGQVCLSPSRFYVHERIADRFAESFVRHAGLLRVGDGMEEGVQMGPLNNVLRLQAAERLVEQAVGAGASLALGGRRIGQRGYFYPPTVLEGVPDAADILAEEPFCPVAPIMRFGSMDEVIGRANHPSLGLAAYAFTNRMATSAEFAERIEAGWIGINNFVPALADAPIGGMKDSGLGYEGGPEGLDAYLHARFVSQLNVEV

SEQ ID NO: 9527 - protein, 58 aa, Glycine max
MSALFNFHSFLTVILLGICACTYFKMQFPAILDQKTGFRGFFWKAARIGASVLCLTAV

SEQ ID NO: 9528 - protein, 474 aa, Burkholderia cepacia R18194
MRTSQQSYIDGQWLDPADSRSIDVIDPSTARPYAQLRIGGTADVDRAVGAAKQAFDTYSRWPVDERVALLRRVLEIYQHRYEEVAQTISQGMGAPIAFARAAQAAVGTAHLEQTIRALQSFRFSTQTDSLLVSHEPIGVCALITPWNWPINQIVCKVAPALAAGCTMVLKPSEIAPFSAILFAEILDEAGVPPGVFNLVHGYGHEVGDALSRHPDVDMVSFTGSTRAGVEVAKAAADTVKRVHQELGSKSPNLILPDADIEDAVTRGVRSCFSNSGQSCNAPTRMLVHVDHLALAEQAARREAERTVVGDPRSTETGIGPVVSRTQFDRIQHFIRLGIEEGAMLVAGGPGRPDGLGDGFYVRPTVFSNVTPDMTIAREEIFGPVLAIMTYRTEDEAVALANDSVYGLAAYVQTKDPERARKVAARLRVGNVHINYPPWNPAAPFGGYKRSGNGREYAEFGLVEYLETKGTTGYA

SEQ ID NO: 9529 - protein, 465 aa, Burkholderia cepacia R18194
MNAVDVNLDADLQAIGKRHLLMHFTHADAYRDHALTVFDRGEGCWLVDRNGKRYFDGLAGLYCVQVGYSHGAEIGDAIREQMVRLPFATNWGVGHEPAIKLAHKLAALAPEGLNRVFFTSSGSESNESAIKLVRQYHQSRGEPQRRKFIARRVAYHGTSFGALALNGMTNFRKHFEPLMSGVRHVGNTKRYGRPVGETEAQFTRHLLDEIESLIVQEGPDTVAALVVEPLQNAGGSLTPPAGYAAGLRDICDRHGVLLVADEVICGFGRLGEYFGSARYGLKPDIITFAKGIASGYVPLGGVIASDTVVDTVLNGPQQMFLHGATYGGHPVACTAALANLAIMEREGVLENVRSNEAVFRQTLDGLLELPCVGDVRGDGYHYSLELVTDKAARRWAAGVSAQAFVSTLLAPAIFDAGLLCRAGVDHEGTPIVQFSPPLVMSRDEIVWFVAKIRDILVDTYARATR

SEQ ID NO: 9530 - protein, 144 aa, Gibberella zeae PH-1
MDCITAFNDLKLNKKYKFIVYKLSDDYKEIVIDKASESRDWEDFRETLVNATAKSRTGAVGKGPRYAVYDFEYNLASGDGIRNKITFIAWSPDDAGIQPKMIYASSKEALKRSLTGIATELQANDTDDIEYDSILKTVSKGLAA

SEQ ID NO: 9531 - protein, 240 aa, Papaver somniferum
VQLRRMENKINRQVTFSKRRSGLLRPCAEMSVLCDAEVALIVFSTKGKLFEYSTDSGMDRILERYERYSYAERELVTTEIDQGNWSLEYSKLKSKIEILQKNQRHFMGEDLQSMSLKELQNLEQQLDVALKQIRSRKNQLMYESISELQKKEKALQEQNNKLGKQLKEKEKEVAAQQQQASQFSQGQSSPSFLLSQSLPSLNIGSGSYQARGGDNGNEEGNRTQTTRTNTATLMPPWMLN

SEQ ID NO: 9532 - protein, 348 aa, Corynebacterium sp. ST-10
MKAIQYTRIGAEPELTEIPKPEPGPGEVLLEVTAAGVCHSDDFIMSLPEEQYTYGLPLTLGHEGAGKVAAVGEGVEGLDIGTNVVVYGPWGCGNCWHCSQGLENYCSRAQELGINPPGLGAPGALAEFMIVDSPRHLVPIGDLDPVKTVPLTDAGLTPYHAIKRSLPKLRGGSYAVVIGTGGLGHVAIQLLRHLSAATVIALDVSADKLELATKVGAHEVVLSDKDAAENVRKITGSQGAALVLDFVGYQPTIDTAMAVAGVGSDVTIVGIGDGQAHAKVGFFQSPYEASVTVPYWGARNELIELIDLAHAGIFDISVETFSLDNGAEAYRRLAAGTLSGRAVVVPGL

SEQ ID NO: 9533 - protein, 487 aa, Rubrivivax gelatinosus PM1
MREPNEADDAAVARARAADAAPLRSVAALPGPRGWPLIGNLLQFDLPRLHRQFEDWADRHGPTYRLRLGRREVLVISDAETIAALLRDRPDTWRRMRPIEAVIREAGGHGVFSAEGDDWRRQRRLVMSAFDPGHLKRFYPSLQRVTERLMASWREAARRGEAIDLQASLMRYTVDVTTGLAFGVDLNTIDAPHPLQEHLDKLFPMLFRRVNLPFPYWHYLRLPIDREYDRHLRRVHEAVRGFVQAARQRLQDEPTRRERPTDLLEAMLAARDADGSALTEEEVAGNVLTVLLAGEDTTANTLGWAIWLLHEHPDDWQALVAEVDAALGDARLPPSFDAARGLASIEASVGEAMRLKPVAPLLFMEANRETALAGFRLPPGAVVFCLMRRAALDARLAEDVADFRPGRWQDGADRAVQKASMPFGAGPRLCPGRYLALLEMKMVLGMLARNFELLEVGPEGGGAPGERMAFTMFPVGLKMRLAERARR

SEQ ID NO: 9534 - protein, 228 aa, Arabidopsis thaliana
MAESQTGGGGGGSHESGGDQSPRSLNVREQDRFLPIANISRIMKRGLPLNGKIAKDAKETMQECVSEFISFVTSEASDKCQREKRKTINGDDLLWAMATLGFEDYIDPLKVYLMRYREMEGDTKGSGKGGESSAKRDGQPSQVSQFSQVPQQGSFSQGPYGNSQSLRFGNSIEHLEVLMSSTRTLFITIFRDSTMPVVSENLSDPLSIDMDCEAIYHHFIGLLILSCK

SEQ ID NO: 9535 - protein, 274 aa, Mycoplasma gallisepticum
MNHSKINWFPGHMKKTLDDINKIKKHIDLVIQVLDARAINLTSNPDLLEIFKQKKIINVALKSDLADLSYQYDPETIVTNIRDHQFSNFLLNKLHQILSDKIKRLQAKGLVTPHFNIMVIGLPNIGKSSLINKLIKKNHNKVENKAGVTKRQTFVKLNKNFTLYDTPGVLYKRIDDFILGAKLSLLNVINLEVIPMQEVLSFAYSYLNQHYHNQLLEWAKQEIIPEQFHEFIEQYAHKKGFLNKNNAIDLNATYMNFYQDISLAKIAKVNYEKN

SEQ ID NO: 9536 - protein, 500 aa, Agaricus bisporus
MPSIFTHQWDTPVYKGSTSINTGLFINGEFVDGVKNTTIDVVNPANGKLITKISEATEADIDIAVEAAHKAFETTWGLNCSGSKRGDMLYKLAQLMEKNIDDLSAIEALDNGKTFLWAKSVDLSLSISTIKHYAGWADKNFGQVIETDEKKLTYSRHEPIGVVGQIIPWNFPLLMLAWKIGPALATGNCIVLKPSEFTPLSALRMCALIQEAGFPPGVVNVVTGYGSTTGQAISSHMKIDKVAFTGSTLVGRKVMEAAAKSNLKNVTLELGGKSPVVIFDDADLEQSVNWTAHGLFWNHGQACCAGTRIFVQEGIYDKFLQKFTDKIKEIKLGDPFGLGIDQGPQVSQIQYDRIMSYIESGRAEGATVHVGGERHGNEGYFIQPTIFTDTTPDMKIVKEEIFGPVGAVIKFKDGKEVIKQANDSNYGLAAAVFSQDINKAIETAHAFKAGTAWVNCANTIDAGVPFGGYKQSGIGRELGEYALHNYTNVKAVHVNLNWKM

SEQ ID NO: 9537 - protein, 1786 aa, Neurospora crassa
MYQNGQRDPPRPFAVPPPPPPMSPPQVGSGVAGINSVMNIPPPPPRYPGAPGTVGGSLLPPPPGPPPGNPGFPPSAIAPPSALGAAPWHGAWGRPYNGQTAFNLPPPPPGGNGGLQAYNPLLHAQAAAAAAAAAASASNTPGPPATSITIPPPPPPSEQMSATYIPSAGDTYGEGVGIPGLGLPEELGGPGNWTGAEQQRLGGTSMEDAHRLHAAPTADRGLSTTSNTPNSSSAIPPELAAQWPLDRVLMWLQANSFSQDWVNTFKVLNLHGAQFLELGSGHGGRGNFGMMHQQVYPQLAHECQMSKTGWDQTKEREEGKRMRRMIRGIVTGRSVDPSKVAASGGAQGGAGGAGGGGHARRESVSASVPPSAGPDSADSPNVEFSKSHLFVQEEQVQSGPKAPGPGFAGRRFSQSRATTMPLLTSTMSSGEPNHRSMMRNLDIDSARRHSPSTSNVSESGDLNAGTFRTVGRERQDSPIGGSPNPSSALFPSNAGNTILSSSPHRSGSRFGHRSRNSSDSVSSNAAQYGSGIPADAAAMFKNGSLADMIKNSFNSNNPDRRNGQDGGRPLGVVETGDRSAGTDPPNSAKGPKSFLSFLSRNKRKEDGTSPDELDSPTSPATGFKAHSLGSRAGHVSETSLDQRPGSSISTHEHSVGFQSGHSRKKSVVSTRVYLLATLDHWNYRMLDVTDIDSAHDLRQLVCINLGLPDSEGAAIYVTELGKFDHEEPLDDMKLLTNKRLRADAIGTLKLFVKPGGLTSSPYPGPGTQSGQPSSYVPRDAPPMDEETFNRLNGQRQRSSSSPPTSRQNTISSKDRDEKMPVPEPVEHKAEPPRKHAIKETSPIGETTPFGIVGRKVDFDQPRLSPFEDKRPDHLFPVRKAPAPPGDPSATLKKVNSLSKKTGQGFRPSTAHATQHHHHNAIDHGYHQRRVSTDIRENMTSERQTRRPAAIRGTAEVPSPSGGIGSLLINIGGHLGGIGHPVAGGARALSPNRVASAPVGHGGEMSEQQRDAKLRYQAARAPSPSLSPNARRRPSESHISQQQYQQNHRPPSSQQHHPHLQHQAQPQPQPQPQQQQQQQQQQQQQQQYQPRQQQTQQPQQQQQAQQPQQQQQAPAQHEESKRKSHGPDVDFSDNDVRFTPPPESESLNASSNHQDYADDQDDSDDSDDGLFAVPISKNKTAETSKTKDNSGGSDEGLGKRPSLKVATDRSKKNLSVAFTTPQASPRMASFTDETEHASVPASSGHGHRQSAPVPSGSSKEWEQDETECKIGRRKSFIEKDVWANRPPTDALINNLEDFFPNLDVDQPVLEEGGDTEVEVDAPSPIAEVDESQFQTRPQPMAETMAQSNTAVASSSNNNAPMLPPLNRVSSAFNESDTLGSDESTLKALESRPPSMVSGSVRRSRGLGRMKSIREVARGAHEAHKRYTQTSMQTNVATPAVPNATTNLMRRKSTKMFNANIVQIEPRRGSILSTIPQETLPTQDNINTLPKRQTTFRWFKGQLIGKGTFGRVYLGMNATTGEFLAVKEVEVNPKAAQGDKKKMQELVAALDQEIDTMQHLDHVNIVQYLGCERKETSISIFLEYISGGSIGSCLRKHGKFEEPVVASLTRQTLSGLAYLHREGILHRDLKADNILLDLDGTCKISDFGISKKTDNIYGNDKTNSMQGSVFWMAPEVIRSQGEGYSAKVDIWSLGCVVLEMFAGRRPWSKDEAVGAIYKIANGEAPPIPDDIREEITPIAIAFMLDCFTVDPTDRPTADVLLSQHPFCELDPNYSFMDTELYAKIRGTY

SEQ ID NO: 9538 - protein, 373 aa, Nicotiana tabacum
MAIEHNEQQELSQSFLLDALYCEEEEEKWGDLVDDETIITPLSSEVTTTTTTTTKPNSLLPLLLLEQDLFWEDEELLSLFSKEKETHCWFNSFQDDSLLCSARVDSVEWILKVNGYYGFSALTAVLAINYFDRFLTSLHYQKDKPWMIQLAAVTCLSLAAKVEETQVPLLLDFQVEDAKYVFEAKTIQRMELLVLSSLKWRMNPVTPLSFLDHIIRRLGLRNNIHWEFLRRCENLLLSIMADCRFVRYMPSVLATAIMLHVIHQVEPCNSVDYQNQLLGVLKINKEKVNNCFELISEVCSKPISHKRKYENPSHSPSGVIDPIYSSESSNDSWDLESTSSYFPVFKKSRVQEQQMKLASSISRVFVEAVGSPH

SEQ ID NO: 9539 - protein, 336 aa, uncultured gamma proteobacterium eBACHOT4E07
MIRNFLINILFSIPVWLIELVYKFNKDVKRGFIFDSQSRMLFALMPKLDLHKIEDDDIPKIRNLINEKRKNLRLSNKTKKNVITKDHFIDQENNLKLREYIPYKTDNDNVILYFHGGGYVLNSIDTHNLTVSYFSEKLRTRIFSLAYGLSPENKYPHAMNQALSAIDWLVKNGHHIKNISLCGDSAGAHLAASVAHSLSNDQKENVHSQFLIYPMCDPSCASESIELFKDNYLLTKESMKWFWQKFKNNDEDNLKDTFNLLLFNPNKDFPKTIIVTAGFDPLSDEAEKYAFLIHQSGNYVKQLHYPSLFHGFAAMTRLKSANKAVNDFLLEYKKIL

SEQ ID NO: 9540 - protein, 367 aa, Nicotiana tabacum
MVFPLDTQLLNPIFDVLYCEEDRFLDDDDLGEWSSTLEQVGNNVKKTLPLLECDMFWEDDQLVTLLTKEKESHLGFDCLISDGDGFLVEVRKEALDWMLRVIAHYGFTAMTAVLAVNYFDRFVSGLCFQKDKPWMSQLAAVACLSIAAKVEETQVPLLLDLQVADSRFVFEAKTIQRMELLVLSTLKWKMNPVTPLSFIDHIMRRFGFMTNLHLDFLRRCERLILGIITDSRLLHYPPSVIATAVVYFVINEIEPCNAMEYQNQLMTVLKVKQDSFEECHDLILELMGTSGYNICQSLKRKHQSVPGSPSGVIDAYFSCDSSNDSWSVASSISSSPEPQYKRIKTQDQTMTLAPLSSVSVVVGSSPR

SEQ ID NO: 9541 - protein, 231 aa, Zea mays
  misc_feature (188)..(188): Xaa can be any naturally occurring amino acid
MATSELPSESDAFTFPCGDDGTTSPALSPPVVISVLASILERHIALNERAMAAASGLDQSAPGDDDDNSDPAAAAARKRARAFDGGTVLDMSLHAFLERFSRYAHVSPQVYVVAYAYLDRLRRSAGVRVVRANAQRLLTTAILVASKFVEDRNYRNSYFAAVGGLAAAELSALELDFLFLMQFRLNVXAGVFRSYCRHLEREVSHGGWYRVDRPLVCAGEARAQHRQAAAV

SEQ ID NO: 9542 - protein, 164 aa, Zea mays
MADDGGSHEGSGGGGGVRERDRFLPIANISRIMKKAVPANGKIAKDAKETLQECVSEFISFVTSEASDKCQKEKRKTINGDDLLWAMATLGFEEYVEPLKIYLQKYKEMEGDSKLSTKAGEGSVKKDAISPHGGTSSSSNQLVQHGVYNQGMGYMQPQYHNGET

SEQ ID NO: 9543 - protein, 570 aa, Zea mays
MAGGGVEDVYGEDRATEEQLITPWAFSVASGYTLLRDPRHNKGLAFSEAERDAHYLRGLLPPALASQELQEKKLMQNLRRYEQPLHRYIAMMDLQERNERLFYKLLIDNVEELLPVVYTPTVGEACQKYGSIYRRPQGLYISLRDKGKILEVLKNWPERSIQVIVVTDGERILGLGDLGCQGMGIPVGKLSLYTALGGVRPSACLPITIDVGTNNEALLNDDFYIGLRQRRATGEEYHELVEEFMAAVKQNYGEKVLTQFEDFANHNAFDLLEKYRESHLVFNDDIQGTASVVLAGLLAALKVVGGTLADHTYLFLGAGEAGTGIAELIALEMSKHTGSPIEECRPKIWLMDSRGLIVASRKESLQAFKKPWAHEHGAVETLLEAVRSLKPTVLIGTSGKGGTFTKDVVEAMASQNERPVVFALSNPTSHSECTAEQAYTWTEGRAVFASGSPFPAVELDGRALVPGQSNNAYIFPGFGLGVVISGAIRVRDDMLLAASEALAEQVTEAHYAKGLIFPPFTNIRAISARIAAKVAAKAYELGLASRLPRPDDLVSYAESCMYTPTYRSYR

SEQ ID NO: 9544 - protein, 99 aa, Glycine max
MVRWDNRMSASIPDEDIFYTVGFLHSSGFDNWKAYDAQNKEILQFCNDSGIKVKQYLPHYRTQEDWTNHFGPKWRTFVERKHQFDPKMILSPGQRIFNN

SEQ ID NO: 9545 - protein, 207 aa, Triticum aestivum
DCSPLMLRLAWHSAGTFDVSSKTGARRHAGLDIAVRMLEPIKEEIPTISYADLYQLAGVVAVEVSGGPVIPFHPGREDKPQPPPEGRLPDATKGSDHLRQVFGKQMGLSDQDIVALSGGHTLGRCHKERSGFEGPWTRNPLKFDNSYFTELLSGDKEGLLQLPSDKTLLTDPVFRPLVEKYAADEKAFFEDYKEAHLRLSELGYAEA

SEQ ID NO: 9546 - protein, 249 aa, Pisum sativum
GKSYPTVSPDYQKAIEKAKRKLRGFIAEKKCAPLILRLAWHSAGTFDSKTKTGGPFGTIKHQAELAHGANNGLDIAVRLLEPIKEQFPIVSYADFYQLAGVVAVEITGGPEVPFHPGREDKPEPPPEGRLPDATKGSDHLRDVFGKAMGLSDQDIVALSGGHTIGAAHKERSGFEGPWTSNPLIFDNSYFTELLTGEKDGLLQLPSDKALLTDSVFRPLVEKYAADEDVFFADYAEAHLKLSELGFAEA

SEQ ID NO: 9547 - protein, 174 aa, Glycine max
MSDAPASPSHESGGEQSPRGSLSGAAREQDRYLPIANISRIMKKALPPNGKIAKDAKDTMQECVSEFISFITSEASEKCQKEKRKTINGDDLLWAMATLGFEDYIEPLKVYLARYREAEGDTKGSARSGDGSARPDQVGLAGQNAQLVHQGSLNYIGLQVQPQHLVMPSMQSHE

SEQ ID NO: 9548 - protein, 191 aa, Blumeria graminis
MSLRCVVVGDGAVGKTCLLISYTTNKFPSEYVPTVFDNYAVTVMIGDEPYTLGLFDTAGQEDYDRLRPLSYPQTDVFLVCFSVTSPASFENVREKWFPEVHHHCPGVPCLIVGTQTDLRDDLSVREKLNKQKMQPVKREDGERMAKDLGAVRYVECSALTQYKLKDVFDEAIVAALEPPAPKKKHRNCLIL

SEQ ID NO: 9549 - protein, 416 aa, Ehrlichia canis
MVKEAVLELDGQKVKLPVLCDTNGNKVIDITSLYKGTGILTYDPGFMSTAACESKITFIDGNKGILCYRGYNIADLVNNNKSFIEIVYLLFYGSFPSVDNLKDFMLQISQEYMPPEMVCDVIKSFSQDSHPMTILMACFSALASYYHDQAVDKDGLKHPKLAVAKVASIIAMIYRYTTNQDFIEPNHGLSYSENFIHMMFDISSYKFTQVVAKALDVIFTLHADHEQNASTATVRLAGSSGADLFACLVAGIATLWGPAHGGANEAVINMLMAIEKPSNVKQFIQKVKDGNKSTRLMGFGHRVYKNYDPRAKIICEICKEVLNDLGVNDPLLEIALELENIALQDSYFIERSLYPNVDFYSGIILKAIGIPVRMFTTLFALARTSGWSAQWYEMVADKNYKICRPRQLYTGHIAKI

SEQ ID NO: 9550 - protein, 161 aa, Xanthomonas axonopodis pv. citri str. 306
MSDISTFAFTDLEGRTQSMRDYAGNVLLVVNVASKCGFTPQYAGLQALWQRYRERGLVVIGFPCDQFGHQEPGDAAQIRQFCSLDYAVDFPLAAKIDVNGNGAHPLWQWLKHEQRGVLGSEAIKWNFTKFLIGRDGRVLERYAPTTKPEALATEIERALDA

SEQ ID NO: 9551 - protein, 344 aa, Mesorhizobium loti MAFF303099
MTETLATDDDREELDLLLRGFQVSRMLRLIADLGVADKIPTDGQVTVKDIAAACAVLPEPMLRVLRALAAFRIFEVTADGSVAHTPRSRLLRTDTLNSLHHAARFWTGPGSWGAWNKLDVAMTGGTPHEAAWSTGRFAYLKQHPDEARLFDAMMANFPDNRHAAVAAAYDFSGASLIADIGGGNGAALRQILARFSTPRGLVFDREDVITAVTSNDLMQGRITVQGGSFFDQVPCGADIYMLIRVLHDWPDEDCLRILRACRAAMGPQARLLLGEQILEPDPARGRATGYLIDVQMMTMFGDARARSEAEFRGLFDQSGFSLRQVIPTASPVSIIEAAPIAGPF

SEQ ID NO: 9552 - protein, 406 aa, Magnaporthe grisea 70-15
MSFSGMLNRLHGQPESYDKKSKYRFGKTLGAGTYGIVREAEGQTGKVAIKIILKKNVKGNERMVYDELEMLQRLQHPHIVRFVDWFESRDKYYIVTELATGGELFDRICEQGKFTEKDASQTIKQVLGAVDYLHSKNVVHRDLKPENLLYLSKAPDSDLVLADFGIAKMLDSRDEVLTTMAGSFGYAAPEVMMKKGHGKPVDMWSMGVITYTLLCGYSPFRSEGLQDLIEECSNAQVTFHDRYWRDVSEDAKNFIRSLLQANPDDRATSGQALRHPWLSGENATDHNLLPEIKSFMAKARLRRGIEMVKLANRIQTLKLQEEDPDNTDMPDDAVEAADDSQGNAGSSGGSGLFKPGEKKTMSKAVKGAIFREVVLAKVREMKTQEETLKVAEEVEKEARRKSFTGS

SEQ ID NO: 9553 - protein, 312 aa, Azotobacter vinelandii
MGVCGSDVHYYTHGRIGHFIVDQPMVLGHEAAGTVIEVGSNVTHLAKGDRVCMEPGIPNPRSKASRLGLYNVDPSVVFWATPPVHGCLTPEVVHPAAFAYKLPDHVSFAEGALVEPFAIGMQAAVKARIKPGDVAVVIGAGTIGMMTALAALAGGASQVLVSDLMVEKLAIAQRYEGITAVNVREQSLQDKVAEATGGWGADVVFEASGSARAYGDALAAVCPGGALVLVGMPVEPVLFDVVAAQAKEIRIETVFRYANVYERAVNLIASGKVDLKPLISATFPFERGVEAFERAASAQPGDVKVQITFGDA

SEQ ID NO: 9554 - protein, 197 aa, Bacillus cereus G9241
MDTNITWHTASVSKDERRVKNGHHSFVIWFTGLSASGKSTVANAVARKLFEKNIGNYVLDGDNIRHGLNKDLGFSESDRMENIRRIGEVAKLFVDQGTVVLTAFISPFRVDRKQVRDLLAADEFIEVFVKCPIEECEKRDPKGLYKKARKGDIKDFTGIDSPYEEPEKAELIVQTHKYSIEECAEQIVKYLQERSFI

SEQ ID NO: 9555 - protein, 493 aa, Bordetella parapertussis 12822
MSLSVGNAALLPGRNLIGSEWREAALGARFAVADPATGKVIAHVPDSGARDAGAAVTAAHQAFADWRRTPAKVRAQIIKRWNALLHENAEDLARLISSEQGKPLAEARGEVSYAASYVEWFAEEATRADGDLIPSPAQGRRMFALREPVGVVAAITPWNFPAAMIARKIAPALAAGCTVVCKPAEDTPLTSLALTALAQQAGVPPGVLNIVTASRGRAAEVADAWLDDPRVRKITFTGSTPVGKHLARRSADTLKRVSLELGGNAPFIVFDDADLDAAVEGLMVSKFRNGGQTCVCPNRIFVQAGVHDAFVRKLAARVEGLVVGPASDPASQIGPMINARAVEKIEHHVADALERGARLAVGGKRIHSARCAGDHYYAPTVLTGVDETMACFREETFGPVAPITVFASEADVVAAANATAFGLAAYFYSTDVRRIWRLADALETGIVGVNEGALAAEAAPFGGVKDSGYGREGSRHGLAEYMQIKYVCQGQLD

SEQ ID NO: 9556 - protein, 407 aa, Haemophilus somnus 2336
MEITLGIAMFTVIVLALAVLILFAKSKLVNSGDITIEINDDPGKAINLPAGGKLLGALANKGIFVSSACGGGGSCGQCIVKVTEGGGDILPTELSHISKREAKEGYRLSCQVNVKNSMKIELPEEVFGVKKWECTVISNDNKATFIKELKLQIPEGEEVPFRAGGYIQIEAEPHTVHYKDFDIPKEYHEDWDKFDLWRYTSKVDEHIIRAYSMASYPEEKGIIMLNVRIATPPPRNPDVPPGQMSSYIWSLKEGDKVTISGPFGEFFAKETDNEMVFIGGGAGMAPMRSHIFDQLKRLKSKRKMSFWYGARSKREMFYVEDFDMLQAENDNFVWHVALSDPLPEDDWDGYTGFIHNVLYENYLKNHEAPEDCEYYMCGPPVMNAAVIKMLKDLGVEDENILLDDFGG

SEQ ID NO: 9557 - protein, 1200 aa, Magnaporthe grisea 70-15
MDGGVKRRLRNSAGSGRDILSMGAKDSIQLGDPLPASTPPRPSRGASNKSSNPSPSTRSRRQAIRSSPTAQPEPAHLPPASTSAPSALVSVRSVSIASTEDASEIIVKTGAAETTSSEESMVSTPLGTDSPPSMEDPLPTLKPSLSAMVEDDGPSYSRCISELSDQSELSSVPSSLSSKATTPIDLDRPEPPVPPVALAPEAPEVPETSKPLEPSPEPISQEAQPPSETVRPVESIQPPPLKPSPRPSKFRIKYGQNKKYDLRPRTSIPTDVSTQEYAIQCIAAAESSRLNPYALHPDEYLMLRDHISQAQITTYLNLRNGILRLWVRNPTFVLTREEAIGCAKDSRWFDVASVCFDWLVREGYINFGCCEVRPLRSKPGASGTPTKQKTIVVIGAGLSGLGCARQLQGLFAQYARRFRERGELLPKVVVLEGRSRIGGRVYSRPFRTAPPARGDGPPRRYTAEMGGMIITGFDRGNPINILIRGQLGLGCHALRSDLNLVNIYDTNGKPFDPDRDMLIDKLYNHCIERVAEYKWKLPLPKWLEGKRELIDEGKDSWAEVHKTISYVEETAAAQPQAPSVAEQNIAPRVDLVPVSSDRATGRVHLEPGTPAAHKAAHTVKLLGWNLKKGVDDDADIDIGPAVNAPDATFGSVLDETIMQFKDIVDLNSQDMRMFNWHVANLEYSNATNVHQLSLRGWDIDMGNEWEGKHTMVVGGYQSLALGLAQIPSSLDIKYKKVVKTIRRKSSDEDSLPADEQPGYKIELEDGSNIDADYVVNTIPLGVLKHGDITFDPPLPSWKADAIERLGFGVLNKVVLVYDQPFWEEDKDIFGVLRAPQSRSSLHPKDYSSDRGRFFQWFNVTNTSGMPTLLALMAGDAAFDTENTPNDDLVAEATEVLRSIFGKSVPQPRESIITRWASDRFARGSYSSAGPNMQLEDYDLMSRSIDRLYFAGEHTSATHPATVHGAYMSGLRAAAEVLNDMLGPIEVQTPLIVPKETGTTSTLLKRKSTTDQVRDPQKEAEEAWQAQLWEHQWSLLGEHPLQPAKVATKAHLLFSKANTEAARQKCLEGRRPGKGPPTAHEVRAMAGKMWNAASEEQRRPFIEQVATLKEVYVKAMAEWTKKSNEWNKQALEIAADFEKKNPKPTAHTNAVVGPSSVGEDVKASRPAAGSPAVEEEAGRQAKKLAVDKAGVKEDGDIEMTG

SEQ ID NO: 9558 - protein, 413 aa, Trichoderma atroviride
MADLQGRKVFKVFNQDFVVDERYTVTKELGQGAYGIVCAAVNGQTNEGVAIKKVTNVFSKKILAKRALREIKLLQHFRGHRNITCLYDMDIPRPDNFNETYLYEELMECDLAAIIRSGQPLTDAHFQSFIYQILCGLKYIHSANVLHRDLKPGNLLVNADCELKICDFGLARGFSVDPEENAGYMTEYVATRWYRAPEIMLSFQSYTKAMDVWSVGCILAELLGGRPFFKGRDYVDQLNQILHILGTPNEETLRRIGSPRAQEYVRNLPFMPKKPFPALFPDANPDALDLLDKMLAFDPSQRISVEQALEHPYLHIWHDASDEPDCPTTFNFDFEVVEDVGDMRKMILDEVLRFRQLVRTAPASGNQAAAQQIQVPMPQAGGQWTAEDPRPQEYMGHANGLEQDLAAGMDIRR

SEQ ID NO: 9559 - protein, 277 aa, Brassica oleracea
MNTFPASTEMVGSENESPVTTVVGGDYYPMLAASCPKKPAGRKKFQETRHPIYRGVRLRKSGKWVCEVREPNKKSRIWLGTFKTAEMAARAHDVAALALRGRGACLNYADSAWRLRIPETTCHKDIQKAAAEAALAFEAEKSDVTMEETMAVASQAEVNDTTTDHGMNMEEATAVASQAEVNDTTTDHGVDMEETMVEAVFTEEQSEGFNMAEESTVEAAVVTDELSKGFYMDEEWTYEMPTLLADMAAGMLLPPPSVQWGHNDDLEGDADMNLWSY

SEQ ID NO: 9560 - protein, 477 aa, Sinorhizobium meliloti
MLDKRKFYIDGKWVEPATQNDLLVLNPATEKPIAVISLGTAVDVDRAVAAAKKAFASYSRTSVEERLALLEKLLAIYKRRYDEMADTITAELGAPRTMSHEQQADVGVGHLQGFIDALKRLKLREKLPNGDTLLREPIGVCGLITPWNWPVNQIALKVVPALATGCTCVLKPSEFTPLNAMLYAEMIEEAGFPAGVFNLVNGDGIHAGAALSKHKDIDMMSFTGSTRAGIAVSKDAADTVKRVTLELGGKSPNIVFADADIEERVTASILECFNNSGQSCDAPTRMLVERSAYDEVVEIARRVGMEARVGDPTKVGSHIGPLVSHIQFERVQALIEAGVAEGATLLAGGPGKPEGFETGYFVQPTIFADVDNSMRIAREEVFGPVLSIIPFDTEEEAIAIANDTNYGLAAYVQTRDRERAERVASRLRAGMVHINGGPHRYGSPFGGYKQSGNGREGGMFGLEDFLEVKTVHLPDAA

SEQ ID NO: 9561 - protein, 316 aa, Oryza sativa (japonica cultivar-group)
MDPVLLDDIIRRLIEVKNLKPGKNAQLSESEIKQLCATSKEIFLNQPNLLELEAPIKICGDVHGQYSDLLRLFDYGGYPPQSNYLFLGDYVDRGKQSLETICLLLAYKIKYPENFFLLRGNHECASVNRIYGFYDECKRRFSVKLWKTFTDCFNCLPVAALIDEKILCMHGGLSPELNKLDQILNLNRPTDVPDTGLLCDLLWSDPSNDAQGWAMNDRGVSYTFGPDKVSEFLEKHDLDLICRAHQVVEDGYEFFANRQLVTIFSAPNYCGEFDNAGAMMSVDDTLMCSFQILKPARKMLGGSTNSKSGFKSLRGW

SEQ ID NO: 9562 - protein, 250 aa, Brassica oleracea
MNSVSTFSELLGSENESPVGGDYCPMLAASCPKKPAGRKKFRETRHPIYRGVRLRKSGKWVCEVREPNKKSRIWLGTFKTAEIAARAHDVAALALRGRGACLNFADSAWRLRIPETTCAKDIQKAAAEAALAFEAEKSDTTTNDHGMNMASQAEVNDTTDHGLDMEETMVEAVFTEEQRDGFYMAEETTVEGVVPEEQMSKGFYMDEEWMFGMPTLLADMAAGMLLPPPSVQWGHNDDFEGDADMNLWNY

SEQ ID NO: 9563 - protein, 117 aa, Retama raetam
MASIKVACVVLICMVMVGAAPIAQAITCGQVVSNLTPCITYLQRGGAVPGQCCNGVKTLVSSAQTTADKQTACNCLKSTAATIPNINFGNAGSLPGKCGVNLPYKISPSTNCASIKF

SEQ ID NO: 9564 - protein, 278 aa, Glycine max
MGVFSEDPNPNPNPIVIREVWASNLESEFELIRELIDRYPFISMDTEFPGVIFRPHVDPTKPFNHRNRPSDHYRLLKSNVDALNLIQVGLTLTDAAGNLPDLAGNRSIWEFNFRDFDVARDAYAPDSIDLLRRQGIDFARNTADGVDSTCFAELMMSSGLVCNDAVSWVTFHSAYDFGYLVKILTRRNLPTRLEEFLKTVKVFFGDNVYDVKHMMRFCDTLYGGLDRVARTLNVERAVGKCHQAGSDSLLTWHAFQKIVDIYFVKDEHRKHAGVLYGL

SEQ ID NO: 9565 - protein, 513 aa, Zea mays
MGNCCPGSSSSAEPAPPQPPDPSGSSRPVASPASVSPTAAPAPARPPAPIGPVLGRPMEDVRATYAVGKELGRGQFGVTSLCTHKATGHRFACKTISKRKLSTKEDVEDVRREVQIMYHLSGQPGVVELKGAYEDKGSVHLVMELCAGGELFDRIIARGHYTERAAASLLRTIVEIVHTCHSMGVIHRDLKPENFLLLSKDEDAPLKATDFGLSVFRDIVGSAYYIAPEVLKRSYGPEADIWSVGVIVYILLSGVPPFWAESEHGIFNAILRGQVDFTSDPWPRISQGAKDLVRKMLNPDPKQRISAYDVLNHPWIKEDGEAPDTPLDNAVLGRLKQFRAMNQFKKAALRVIAGCLSEEEIRGLKEMFKSMDSDSSGTITVDELRRGLANKGTKLSEAEVQQLMEAADADGNGTIDYEEFITATMHMNRMDRDEHLYTAFQYFDKDNSGYITMEELEQALREKGLLDGRDIKEIVAEVDADNDGRINYTEFAAMMRKGDPEPSNPKKRRDIVL

SEQ ID NO: 9566 - protein, 211 aa, Pinus taeda
MEKIMVLVCIMSFTILGLSSAQEINHAAAVSLATAPAAAATPAAPAPSPASLNLSGILDKAGQFNTFLSLLKSTQVGMQLQSQLNNSQQGITIFAPSDAAFAALKPGALNSITDQDKIALLQYHALPSYYTFSQFQTVSNPVRTMASGNGGPFAAPTPEPGAPVSSPAVSPSGASGSGASTSSACGSMAALAKGLYLVFLAAGALVLVISS

SEQ ID NO: 9567 - protein, 291 aa, Pyrobaculum aerophilum str. IM2
MSKVPGPIVLMEPLSGKTSLIIKINAIHVSKRSKYQGILIVDTDDYGRTLVLDDYIQSSYYDEIYYHESLVHPAVTTHPRPSDVLILGGGEGATLREVLKHNTVKRAVMVDIDGDVVELSKKYLPQMHQGAFDDPRSEVRIEDGFVYVENALKRGEKFDVVIMDLTDPYSSDIAKQLYTPEFFGKVKRLLREDGIVVTQAGNSFYFPEAYDYVLQGVKGNFPIIAEYSVWIPSFGYAVNFVLGSLKHDPHSLSAEEVDKRLSERGVRAEFYSGKTHIALMNMPVIKKILRV

SEQ ID NO: 9568 - protein, 275 aa, Erwinia carotovora subsp. atroseptica SCRI1043
MTQPKVKLADGNIMPQLGLGVWRASSEDTVIAVNEALSIGYRAIDTAAIYKNEEAVGQALSSANLPREEVFITTKLWNGDHTDPQKALEESLRKLRLDYIDLYLIHWPLPQQNTFVDAWRGLIKLQEQGLAKSIGVSNFHIHHLQRLKEETGVLPVIDQVELHPLLQQKQLHAWNATHHIQTESWSPLAQGGEGVFDHPIIRKLAMKYGKTPAQIVIRWHLDSGLVVIPKSVTPARIKENFEVFDFRLDKDELSEITKLDCGKRLGSDPDEPRND

SEQ ID NO: 9569 - protein, 176 aa, Fagus sylvatica
KLELHRGGGRSRTSGSPGLQEFGTRSELSKICDGILGLLETHLIPSASSAESKVFYLKMKGDYHRYLAEFKTGAERKEAAESTLLAYKSAQDIALADLPPTHPIRLGLALNFSVFYYEILNSPDRACNLAKQAFDEAISELDTLGEESYKDSTLIMQLLRDNLTLWTSDITDDAGD

SEQ ID NO: 9570 - protein, 130 aa, Glycine max
  misc_feature (93)..(93): Xaa can be any naturally occurring amino acid
  misc_feature (102)..(102): Xaa can be any naturally occurring amino acid
IADADATIDYRAGALVHTSFTGLKAMAGFPTMRTNNDITSIASNRGRVQCMQDWPPFGKKMSVTLSYLPDLDDAQLAKEVQYLLMNGWILWLXEFGAEHGFXYRERNRSPGIYHGRYWTMCTLTMTGCTD

SEQ ID NO: 9571 - protein, 446 aa, Oryza sativa (japonica cultivar-group)
MRMGKYEMGRALGEGHFGKVKLARHADTGAAFAIKILDRQRILAMKIDEQIKREIATLKLLKHPNVVRLHEVSASKTKIYMVLEYVNGGELFDKIALKGKLSEKEGRKLFQQLMDAVSYCHEKGVYHRDLKPENVLVDAKGNIKVSDFGLSALPQNQRKDGLLHTTCGSPNYIAPEIQVLLNRGYDGSLSDIWSCGVILYVMLTGNLPFDDQNTVVLYQKILKGDARIPKWLSPGAQDILRKILDPNPITRLDITGIRAHEWFRQDYTPAMPFDDDDDNNISDGNLHMTENQDIETSPAISQINAFQLIGMSSCLDLSGFFEKEDVSERKIRFVSNYSPTSLFEKIESTVTEKGFQVQKNSGKLKVIQVCKEPANPRGHGNLLISAEVFEINESLYVVELKRSSGDCSLYRQLCASLSEDLGICKRQQLLKKDSMRQDLCRYNSSF

SEQ ID NO: 9572 - protein, 505 aa, Oryza sativa (japonica cultivar-group)
MGHELWVLWATLAVSLLCYLYLTSHRLGSRRRRWPPGPRPLPLLGNLLDLRGGNLHHTLARLARAHGAPVMRLQLGLSPAVVISSPGAAREAFTAHDRRLAARAVPDANHALGFCDRSMIWLPSADPMWRTLRGVVAAHAFSPRALAAARAVHERKVRDLVAYLRGRAGREVDVKDAVYGGVLNLVSSALFSADVVDVGGESAQGFRELVEELIESIAKPNVSDLFPFLRRFDLQGWRRWTSGHLAKIYKVLDDIIDRRSAEDDAAMDKRGDFLDVLLELMSTGKIAREYLTNILFDVFTAGSDTMSLTVVWAMAELLRNPGVMAKARAEIDAALGGREAVEEADVARMPYVQAVLKEAMRLHPVAPVMLPRKAAEDGVEIGGFEVPRGCAVIFNTWAIMRDPAAWERPDEFVPERFVGRSRATEEMDFRGKDFGFLPFGSGRRLCPGVPMAERVLPLIMASLLHAFEWRLPDGMSAEQLDVSEKFTTANVLAVPLKAVPVVIAC

SEQ ID NO: 9573 - protein, 303 aa, Cicer arietinum
GVALAGLLGTVRSQGRPLSDFVNQKIVVAGAGSAGLGVLKMAINAVAKISGCSETAAKSQFFLIDKNGLVTTERNNLDPAAAPFAQNPRDIDGLTEGASIVEVVKKVKPHVLLGLSGVGGIFNEEVLKAMRESVSTKPAIFAMSNPTMNAECTAIDAFNHAGEHIVFASGSPFENVDFGNGNVGHVNQANNMYLFPGIGLGTLLSGAHLITDGMLQAAAECLASYMSEEDILKGILYPSVDSIRDVTAEVGAAVLRAAVEEDLAEGQGDVGPRELAHMSKEETVEYVRRNMWFPVYSPLVHEK

SEQ ID NO: 9574 - protein, 320 aa, Glycine max
MEAKKIPEVILNSGKKMPVIGLGTASIPLPSHEALTSILIDAFEVGYRHFDTASLYESEESLGKAVAKALELGLINSREELFITSKLWSTDAHPDLVVPALKTSLQKLGLEYVDLYLIHWPVRLKPEAKGYHNILKENVLPSFDMKGIWEAMEECYRLGLAKSIGVSNFGIKKLSQLLENATIPPAVNQVEMSPAWQQGKLKEFCKQKGIHVSAWSPLGAYKSAQGTNAVMESPILKEIACERQKSMAQIALRWIYEQGAIAIVKSFNKERMKQNLDIFDWELSQEESQKFSQIPQRRMYRGITFVSENGPYKTLEELWD

SEQ ID NO: 9575 - protein, 421 aa, Bacillus sp. KSM-K16
MAAEKIQTQNGVLNVPNEPIVPFIEGDGTGPDIWAAASRVLDAAVEKAYNGERKIHWKEILAGEKAYNETGEWLPAETLDAVREYLIAIKGPLTTPIGGGIRSLNVALRQELDLFTCLRPVRYFTGVPSPVKRPEDTDMVIFRENTEDIYAGIEFKEGSDEVKKLIAFLQDELGATNIRFPETSGIGVKPVSKEGTERLVRSAIQYALDEGRKSVTLVHKGNIMKFTEGAFKNWGYELAEREFGDKVFTWAEYDKIVEESGREAADKAQSEAEAAGKIIVKDAIADIFLQQILTRPKEFDVVATMNLNGDYISDALAAQVGGIGIAPGANINYDTGHAIFEATHGTAPKYAGLDKVNPSSVLLSGELLLRHLGWTEAADLIMASMDKTIASKVVTYDFARLMDGATEVSCSGFADELIKNL

SEQ ID NO: 9576 - protein, 234 aa, Arabidopsis thaliana
MERGGFHGYRKLSVNNTTPSPPGLAANFLMAEGSMRPPEFNQPNKTSNGGEEECTVREQDRFMPIANVIRIMRRILPAHAKISDDSKETIQECVSEYISFITGEANERCQREQRKTITAEDVLWAMSKLGFDDYIEPLTLYLHRYRELEGERGVSCSAGSVSMTNGLVVKRPNGTMTEYGAYGPVPGIHMAQYHYRHQNGFVFSGNEPNSKMSGSSSGASGARVEVFPTQQHKY

SEQ ID NO: 9577 - protein, 273 aa, Thermoplasma acidophilum
MKLIENWFSERYSDNLQLSFRVSDQLLSIKTDYQRIDLFDTYDFGKLLAIDGTVQLTERDEFIYHELITMVPYHLTPRPPENALIIGGGDGGAARRLIDLGLKHIVNVEIDDQVVEVSKRFFPSLSSAFNDSHVKLLIQDGIKYVKNTSEKFDLIIIDSTDPEGPAEGLFSKDFYNDTRKIMNEGAVIVSQSGSPFYQPKAIKLAYSGMREVFSDVRVYTGFIPTYPSGFWSFTVASPWTMKPRPVNMSGKYFNADVMEGSFRLPQFVKELIT

SEQ ID NO: 9578 - protein, 333 aa, Thermoplasma acidophilum
MRSMGSRCEGECRKLKSAKQYTGMDRKELLSRPVRDLSITADTRLGDLMDQFSSIGGFTAAKIHEAYEIIKDMFSEDNTTFLSFPADIISTGLRGLINEVVKRKLVDVIITTSGTLDHDIARTYRNYYCGSFSYSDIELRDLGINRLGNVLVPDESYGEIIEEKVMESLEKLYAKKKEWATVDLIHEVGLDINSESSIIYNAAKNNIPVFVPGITDGSFGSQLWSFYEQHHDFKINLLEDEHRLSDIIFDAKKTGAIMIGGGISKHHTIWWNQFRDGLDYAVYVTTAQEYDGSLSGAKLEEAISWKKVRPDARYVNVYGDATVIMPVLLAPFL

SEQ ID NO: 9579 - protein, 501 aa, Catharanthus roseus
MALASIEKVATGLICFILLIFSLKRIGHPRDWALVGILSVWFPSLGHIYEKLAKSLAKNDKTFVLKGSFLSKQDVIFTCDPANMHHVMSTNFSNYPKGPENRNVFDVYGEMLFTADHEKWKSHRKVTNAYFHDQRFNGFSQKVNKEVIEKELFPFLDHAAEEALVFDLQDVFQRLMLDSSSILTTGQNHRSLRVGLPYDETLEAINIANYQIFVRHILPAKIWKFQKWLGIMGEKKIKKAWRILDDISVEYMNRRKKEISSTISSQEDMDVVKFSEEDHVVLKSVDASDNLLRDTVKGILLAGTDTTATVLSWFFWLILKNPRVEQKIREEIELYLKQKNGEHGLYTNPEELNELMYLHAAIYETMRLYPAAPFTSRKSIQADVFPTGHQVNPNTTIVMAYYAVGRMKSIWGEDCLEFKPERWLSDKGKLIPVQTNKFLAFGTGPRICPGKELGLNRVKAVAAAIIPKYSFKIMRNKPVMPAACATLYLKDGLIVRVNKII

SEQ ID NO: 9580 - protein, 503 aa, Ralstonia metallidurans CH34
MTAAYTASQTIAGDCTVSLPSALYRNYVDGRFEEAANLFPNLSPVDGSIVGHVCEADASQVDRAVQAARAAMEGPWGNTSAAERARVLHAVADGIERRFDEFVAAEVADTGRTEQQARALDIRRGVLNFRTFADLASQAGGDYFDMRTAEGDVFSYTVRKPHGVVGIISPWNLPMLLMTWKVAPALACGNAVVVKPSEETPGSATLLAEVMHEAGVPAGVFNLVHGFGGGSAGEFLSRHPGIDALTFTGESRTGSTIMKAVADGVKEISFELGGKNAAVVFADCDFDKAVAGVMRSSFTNTGQVCLCSERVYVERPIFERFVAAMKARAEALRIGYPTVEGVEMGSLISRNHRDKVLSYYALAREEGATVVTGGGVPHFGDARDNGAYVQPTIWTGLPDSARCIQEEIFGPVCHIAPFDTDAEVVKRVNDSRYGLAASVWTRDLARAHRVTRQFDVGIVWVNTWFLRDLRTPFGGTRLSGIGREGGRHSLDFYSSLTTICVNP

SEQ ID NO: 9581 - protein, 447 aa, Nostoc sp. PCC 7120
MSKPKNNSPVVNVIQDQSVISSVITDFGSLIKGNTLGIIRPHNLEELSSALRFAKQQNLRLKARGKGYTQGGQSVAQDAFTLDLTRLNHVSKVDTVAQAIATEAGATWQDIVTTTVKYGMLPCVLPLNLEQTVGGLLSTGGIGSTSKTYGPVVANVIDLHIITGNGEYIQCSRTQTPELYHAVLGGLGGCGVIASATLALRKTKKYIRTFHLLYDSLKPWMDDHIFLGRNHQIEHLEGFCWTSAKGIRHTTSGKKFFAHWLYGLQVGIEYDEVAPSASDVLHDLNYWRLFHTEDEETVSHVFRYQPRFEVMRTSGAWNQAHPWIECFISAEALAEVLPEILDMLPLSLGDGHRAIMVAPDNLPNLFMMPPAKNILCFAILPMAVPVEDTKTFDVLEKVNQLLLRAGGKRYLSGWLGKSNFDWRQHYGTSYKTWETMKQQYDPSHVLS

SEQ ID NO: 9582 - protein, 448 aa, Saccharomyces cerevisiae
MVASIRSGVLTLLHTACGAGILAMPYAFKPFGLIPGVIMIVLCGACAMQSLFIQARVAKYVPQGRASFSALTRLINPNLGIVFDLAIAIKCFGVGVSYMIVVGDLMPQIMSVWTRNAWLLNRNVQISLIMLFFVAPLSFLKKLNSLRYASMVAISSVAYLCVLVLLHYVAPSDEILRLKGRISYLLPPQSHDLNVLNTLPIFVFAYTCHHNMFSIINEQRSSRFEHVMKIPLIAISLALILYIAIGCAGYLTFGDNIIGNIIMLYPQAVSSTIGRIAIVLLVMLAFPLQCHPARASIHQILQHFAEENVSISATSADEPTVATESSPLIRDSSLDLNEVIEEESIYQPKETPLRGKSFIVITCSILVASYLVAISVSSLARVLAIVGATGSTSISFILPGLFGYKLIGTEHKTAVPLTTKIFKYTGLLLFIWGLIIMITCLTAALKLN

SEQ ID NO: 9583 - protein, 396 aa, Photorhabdus luminescens subsp. laumondii TTO1
MLDNQTIATVKSTIPLLSATGPKLTAHFYERMFKHNPELKNIFNMSHQLNGDQREALFNAICAYAANIDNLKVLLPAVEKIAHKHASLNIQPEHYQIVGTHLLATLNEMFQPGNEILDAWGKAYGVLADIFINREEQIYHSGELTDGGWRGLRPFRINRKEVKSEVICSFEFAPQDGGKVMDYKPGQYLSIYLQDDSFANREIRQYSLTAAPNGSSYRIAIKREPQGIVSNHMHDKMQEGDTVWLTAPRGDFFLDIKPETPVTLISAGVGLTPMMSMLYHLHQQNHNSPINWLHAAEHGGHHAFSHEVAAIAQAMPNFAGTIWYREPRDEDQQGIHYQHKGFMDLTVLNEALKTEGMHFYFCGPVAFMQYVAKQLLDMGIDKQFIHYECFGPHKVI

SEQ ID NO: 9584 - protein, 170 aa, Triticum aestivum
MAAFLRSKCSSVGRAMMGSLGNNLYGGASSSIETVARPSRSDAVCQQIRTFIQMRTNLKVVDNSGAKRVMCIQSLRGKKGARLGDMIIGSVKEAQPRGKVKKGDVVYGVVVRAAMKKGRSDGSEVQFDDNAIVIVNNKGELIGTRVFGPVPHELRKKKHLKILALAEHIV

SEQ ID NO: 9585 - protein, 192 aa, Triticum aestivum
  misc_feature (157)..(157): Xaa can be any naturally occurring amino acid
  misc_feature (176)..(176): Xaa can be any naturally occurring amino acid
PFLDKEFINVAMSMDPEWKMYDKNLGRIEKWVMRKAFDDEENPYLPKHILYRQKEQFSDGVGYNWIDGLKAFTEQQVTDEMMSNAAQTFPYNTPVNKEAYYYRMIFERLFPQDSARETVPWGPSIACSTPAAIEWVEQWKASNDPSGRFISSHDSAXTTPAAVSWRWWPTAATAPXNGTVNGGNDVAVAIAV

SEQ ID NO: 9586 - protein, 446 aa, Chromobacterium violaceum ATCC 12472
MNHPLTTRSEFDHLDLRAHWMPFSANRNFQRDPRLIVSGEGNYLTDADGRRIFDSLSGLWCCGAGHSRKEIAEAAYRQLSTLDYSPGFQFGHPLSFRLAERVAAMAPGALNHVFFTNSGSECADTAVKMARAYWRLKGQASKTKLIGRARGYHGVNIAGTSLGGMNGNRKLFGPLMDADHLPHTLLPANAFSRGLPEQGAELADDLLRLIELHDASNIAAVIVEPMAGSAGVIVPPQGYLQRLREICTQHGILLIFDEVITGFGRTGSLFGADHFGVTPDIMNLAKQLTNGAVPMGAVVASSEIYDAFMAQATPEYAVEFAHGYTYSAHPVACAAALAALDVLEQENLVARAAELAPHFERGIHGLKGLPHVIDIRNCGLAGAVQIAPSGGDAIVRPYEAAMALWRKGFYVRYGGDALQFGPPFTATPQELDSLFDAVGETLAKLA

SEQ ID NO: 9587 - protein, 387 aa, Debaryomyces hansenii
MVSDGEFTRTQIFGTVFEITNRYTDLNPVGMGAFGLVCSAIDKLTGQNVAVKKIMKPFLTSVLAKRTYRELKLLKHLRHENLITLDDIFLSPLEDIYFVTELQGTDLHRLLTSRPLEKQFIQYFTYQILRGLKYVHSAGVIHRDLKPSNILINENCDLKICDFGLARIQDPQMTGYVSTRYYRAPEIMLTWQKYDTEVDLWSVGCILSEMIEGKPLFPGKDHVHQFSIITELLGSPPPDVIETICSENTLRFVQSLPHRDPIPFSERFAQCTHVEPEAIDLLAKMLIFDPKKRISALDALSHPYMEPYHDPTDEPVCEVKFDWSFNDADLPVDTWRVMMYSEILDFHQIIGAGANGTTQEQMAQIQQEGIQAPSSQYQQTNQEQKVE

SEQ ID NO: 9588 - protein, 394 aa, Thermoanaerobacter tengcongensis MB4
MDLKKEALKLHRENKGKIEVVSKVPVKNEEDLSLAYTPYVAEPCKEIEKDKDLVYEYTVKGHMVAVVTDGSAVLGLGNIGPYAALPVMEGKAVLFKEFGGIDAIPICLATQDVDEIIRTVLNIAPTFGGINLEDISAPRCFEIEKRLDEMLDIPVFHDDQHGTAIVTFAALVNALKIVKKSLYEIVAVVNGAGAAGVAISKFLVNAGVKDVIVCDRSGIIYEGRKDLDSSKQKIAKITNKKKIKGTLKEALEGADVFIGVSGPNLLTKEMVKKMAKKPIVFALANPVPEIHPEEAKEAGAYVVGTGRSDFPNQVNNVLAFPGVFKGALRVRATTINERMKLAAAYAIANTISEEELSSEYILPKPFDKRVAENVAYAVAKEAINTGVSRITKFD

SEQ ID NO: 9589 - protein, 260 aa, Zea mays
MAISLTLCPVTHTQAAVRPRPSDGSWNTRFRGPHHRMQVVQVGSKCAAECACPAASARLGSASLVQRTEQPPSLYITRAPRSSAALPFFIPGLVVANLSAGLPSAADDRRDHQLAVRNPERACAGGSSERLILIPCPKKRTASSMDRRPPARRRPGDPHRRGAAMHGAVEQQKQHRGRRPPQGTVPPPPPAGYFTAELLLAFVFVAVSLAFLPLVLPPLSPPPFLLLLVPVGLLAVLLALAFVPLDAHSHLVVVGSGSSR

SEQ ID NO: 9590 - protein, 282 aa, Triticum turgidum subsp. durum
MQVDPSGQVQWPQQQPFPQPQQPFCEQPQRTIPQPHQTFHHQPQQTFPQPEQTYPHQPQQQFPQTQQPQQPFPQPQQTFPQQPQLPFPQQPQQPFPQPQQPQQPFPQSQQPQQPFPQPQQQFPQPQQPQQSFPQQQQPAIQSFLQQQMNPCKNFLLQQCNHVSLVSSLVSIILPRSDCQVMQQQCCQQLAQIPQQLQCAAIHSVAHSIIMQQEQQQGVPILRPLFQLAQGLGIIQPQQPAQLEGIRSLVLKTLPTMCNVYVPPDCSTINVPYANIDAGIGGQ

SEQ ID NO: 9591 - protein, 371 aa, Bacillus sp. KSM-K16
MTTTRGLEGIVATQSSVSSIIDDELTYHGYGIDDLAENASFEEVVYLLWNGELPTKEELESFSRALAEQAGVPDEIFEQMKAYPIDSVHPMAALRTSVSMLGLFDDEAESVEEEKNYRKAIKLQAKIPTIVAGFERIRSGKEPIAPNKELSFAANFLYMLTGENPDAISVKAFNKALVLHADHELNASTFTARVCVATLSDMYSGITAAIGALKGPLHGGANEGVMKMLLEIEEFERVEPYIQKALDNKEKIMGFGHRVYKNGDPRAKHLREMSKQLTDVIKESKWYDMSLRIEELVTTQKGLLPNVDFYSATVYHSLGIKHDLFTPIFAISRTSGWIAHILEQYANNRLIRPRAEYVGPNKRSYKPVESR

SEQ ID NO: 9592 - protein, 113 aa, Zea mays subsp. parviglumis
MGRTACCAKEGVKRGAWTSKEDDALAAYVKAHGEGKWREVPQKAGLRRCGKSCRLRWLNYLRPNIRRGNISYDEEDLIIRLHRLLGNRWSLIAGRLPGRTDNEIKNYWNSTLV

SEQ ID NO: 9593 - protein, 212 aa, Oryza sativa (indica cultivar-group)
SSSSSSISHGFRPSIIRARSGAMDGEEDSEWMMMDVGGKGGKGGGGGGAADRKKRFSEEQIKSLESMFATQTKLEPRQKLQLARELGLQPRQVAIWFQNKRARWKSKQLEREYSALRDDYDALLCSYESLKKEKLALIKQLEKLAEMLQEPRGKYGDNAGDDARSGGVAGMKKEEFVGAGGAATLYSSAEGGGTSSTEQTCSSTPWWEFESE

SEQ ID NO: 9594 - protein, 319 aa, Bacillus sp. KSM-K16
MKRIGVLTSGGDSPGMNAAIRAVVRKAIFHGLEVYGISYGYQGLINGDIKKMELGSVGDIIHRGGTMLYTARCEEFKTLEGQQKGIEQLKKFGIEGLVVIGGDGSYRGAQQLTKHGFPTIGVPGTIDNDIPGTDFTIGFDTALNTVIDAIDKIRDTATSHDRTYVIEVMGRHAGDLALWAGLADGAETIVIPEAEHNMEQILATIKRGQERGKKHSIIVVAEGVGSGIEFGDRISKEMNMETRVTVLGHIQRGGSPTGADRVLASRLGAKAVDLLLEGKAGMTVGIQKNELVYHPIDEILDRPHTIDQEMYKLSQELSI

SEQ ID NO: 9595 - protein, 484 aa, Xanthomonas axonopodis pv. citri str. 306
MLRSLIVCCRVRMSYAIVWFRRDLRLEDNPALRAALDAGHHPIPLYIDAPHEEGEWTPGAASRTWRHRSLAALDGALRALGSGLVIRVGNSAQVLDEVIAQTGAVAVYWNRKYEPATQPRDAQIKRDLRERGIEVQSCNCALLFEPWQLSTQQGGPYKVFTPFWRNALTQLQLPAAIGAPRSLPPLPASLKTDALDTLQLVPGLQWDQGFWEHWQPGEAGAHEMLEIFIDGALSGYRENRDRPDRVGTSQLSPHLHFGEIAPWRIANTLETHRTARNGAEIDAYIRQLGWRDFAYHLLHHFPDTTNQNLNPRFAGFDWATVDPVALQAWQRGRTGIPIVDAGMRQLWHTGWMHNRVRMIVASFLCKHLRIHWIEGARWFWDTLVDADLANNTLGWQWVAGTGADAAPYFRVFNPVTQAEKFDPQAAYITRWVPELGKLAVKERFAPWLHPLSLARLAPEYPRTPIIGLAEGRDAALAAYAKTRG

SEQ ID NO: 9596 - protein, 284 aa, Triticum aestivum
  misc_feature (177)..(177): Xaa can be any naturally occurring amino acid
  misc_feature (189)..(189): Xaa can be any naturally occurring amino acid
  misc_feature (203)..(203): Xaa can be any naturally occurring amino acid
  misc_feature (233)..(233): Xaa can be any naturally occurring amino acid
  misc_feature (235)..(235): Xaa can be any naturally occurring amino acid
MAAAAAGATRRAASSLASRCLLSRPAASPAAVPSALRRADGARGLLPGLLQRFGTAAAAEEPISPSVQVGETQLLINGKFVDAASGKTFPTLDPRTGEVIARVSEGDAEDVDRAVVAARKAFDEGPWPKMTAYERSRILLRFADLIEKHNDEIAALETWDNGEPYEQAAHIEVPMLXARLMRYYAGWTXDKIHGLIVRADGPXHVQVLHEPIGVVGQIIPWNFPLLMYGWKGXPXLLACGNTIGLKTVEATPLSAPNVSKLWDGGGLPRGGPQKRIWVWGPMGG

SEQ ID NO: 9597 - protein, 228 aa, Schizosaccharomyces pombe
DRCGLLLERHAKIATDGQKPFLKKDSDFKEVPSGDIDLETAISLIKPTVLLGCSGQPGKFTEKAIREMSKHVKHPIIFPISNPTTLMEAKPVQIDEWSNGKALMATGSPLPPLTRNGKEYVISQCNNALLYPALGVACVLSRCKLLSDGMLKAASDALATVPRSLFVADEALLPDLDNAREISRHIVFAVLKQAISEGMSTVDLPKDDAKLKEWIIEREWNPEYRNFV

SEQ ID NO: 9598 - protein, 410 aa, Bacillus sp. KSM-K16
MPTTREEALHMHRINQGKLESKAKVPVKDARDLSLAYSPGVAEPCKEIFEDVETVYEYTMKGNMVAVVSNGTAVLGLGNIGPEASLPVMEGKAVLFKSFAGVDAFPICLRSNDVDEIVNTVKLLEPTFGGVNLEDIAAPDCFVIEERLKKETNIPIFHDDQHGTAIVTLAGLINALKISGKKLSEIKVVANGAGAAGIAIIKLMLRMGVRNIIMCDTKGAIYEGRPYGMNAVKEAVAKRTNMNKEEGKLEDVIKGADVFIGVSVEGAVTKEMVESMNDNPIIFAMANPVPEIMPEDAKAAGASVIGTGRSDFPNQVNNVLAFPGIFRGALDARATHINEEMKVAAVYAIANLVSEEELSVDYVIPAPFDSRVAPAVAAAVAKKAMETGVARVKVDPEEVAEKTRKLAIID

SEQ ID NO: 9599 - protein, 230 aa, Erwinia carotovora subsp. atroseptica SCRI1043
MLNAQLTLISHPLCPFVQRAAIVLLEKNVSFERIDVDLAAKPDWFLALSPMDKVPLLKVELADNSDAILFESAAICEYLNETQAGASLYSSDALSRAQQRAWVEFGVAALSDAWQFLNAKELAVANDKKAAFRDKLQRLESTLEQGPYFSGSAFSMVDAMFAPVFRYFDLLSPDVSQPIFDNLPRVSAWRASLANRPSVLAAVRDDYADRFKQHLVKQQVILSDSMCKTT

SEQ ID NO: 9600 - protein, 489 aa, Halobacterium sp. NRC-1
MSDLDFGDVDWNVQYIDGEYVPPGDRGTLEVDDPSTRELFTEIPAGTTDDVDAAYEAAADAQTEWADTPPQERARIVAAASEILASHRDEVVDLLATESGTTYTKGAAEFEASVGITDEAASFPTRMNGDHKQSVVEGKENIVVREPQGVVGIISPWNFPLNLSIRAVAPAVAAGNSVVLKPASNTPVTGGLLIAKVFEAAGLPEGVFNVVTGKGSEIGDRIAGHPHADVISFTGSTAIGRQVAATAGENLALPAMELGGNNVHIVTEDADLDDAVDSGVFGSFLHSGQICISINRHVVHEDVYDEYVERLTERAAALPTGTAHDADTVVGPIIDESQRDQILDYIERTVDAGATLETGGDHDGLVVEPTVLSDATNDMAAACNEHFGPVAPVIPFSDDDEAVEIANSTEYGLSGSVHAGDTGRARDIADRIDTGMIHINDQPVNQEPHLPFGGYKNSGLGRYNGEYVLNEFTQEKWVSIQRETRDYPF

SEQ ID NO: 9601 - protein, 233 aa, Rhodobacter sphaeroides 2.4.1
MMNSLSNSLAAADIAHSLHPYTNARAHERNGPLIITRGQGVHVYDSEGREYIEGLAGLWSVAVGFSEPRLAEAAARQMAELPYYHTFAGKAHEPQIRLAEKLVEMTPEALTRVFFTNSGSEANDTVVKLVWFMNNALGRPQKKKFLSRIKGYHGITIASGSLTGLPVNHRASICPPSRSCIWAARTTGASAPRARARPSSAPASCARPRRRSSPRGPRPSPPSSASRSWARAG

SEQ ID NO: 9602 - protein, 57 aa, Zea mays
MKEGTANCIDILIAIILPPLGVFLKFGCKVEFWLCLLLTFLAYLPGIIYAIYVITKD

SEQ ID NO: 9603 - protein, 90 aa, Glycine max
MASFARGAASLTRIGLSTSKTPLQLIHRRGLADHHGPPKVACWKDPMSPSKWKEEHFVIVSLTGWGLLIYGGYKLATGGKGKKEEELAKA

SEQ ID NO: 9604 - protein, 508 aa, Bifidobacterium longum
MKNKVQLITYADRLGDGTLSSMADILRTRFDGVYDGVHILPFFTPFDGADAGFDPIDHTKVDERLGSWDDVAELSKTHNIMVDAIVNHMSWESKQFQDVLEKGEESEYYPMFLTMSSVFPNGATEEDLAGIYRPRPGLPFTHYKFAGKTRLVWVSFTPQQVDIDTDSDKGWEYLMSIFDQMAASHVSYIRLDAVGYGAKEAGTSCFMTPKTFKLISRLREEGVKRGLEILIEVHSYYKKQVEIASKVDRVYDFALPPLLLHSLFTGHVEPVAHWTEIRPNNAVTVLDTHDGIGVIDIGSDQLDRSLKGLVPDEDVDNLVNTIHANTHGESQAATGAAASNLDLYQVNSTYYSALGCNDQHYLAARAVQFFLPGVPQVYYVGALAGRNDMELLRRTNNGRDINRHYYSTAEIDENLERPVVKALNALAKFRNELPAFDGEFSYEVDGDTSITFRWTAADGTSTAALTFEPGRGLGTDNATPVASLAWSDAAGDHETRDLLANPPIADID

SEQ ID NO: 9605 - protein, 273 aa, Glycine max
MSILPKGDSVQIREVWNDNLEEEFALIREIVDEYNYVAMDTEFPGVVLRPVGNFKNINDYNYQTLKDNVDMLKLIQLGLTFSDENGNLPTCGTESTCIWQFNFREFNISEDIFASDSIELLRQCGIDFKKNSEKGIDVNRFGELLMSSGIVLNDAVHWVTFHSGYDFGYLLKLLTCRSLPETQAGFFDLIKMYFPMVYDIKHLMKFCNSLHGGLNKLAELLEVERVGVCHQAGSDSLLTSCTFRKLRDAFFSGSTEKYAGVLYGLGVESGQTN

SEQ ID NO: 9606 - protein, 188 aa, Zea mays
  misc_feature (82)..(82): Xaa can be any naturally occurring amino acid
  misc_feature (104)..(104): Xaa can be any naturally occurring amino acid
  misc_feature (118)..(118): Xaa can be any naturally occurring amino acid
  misc_feature (132)..(132): Xaa can be any naturally occurring amino acid
  misc_feature (149)..(149): Xaa can be any naturally occurring amino acid
MASSMLSSAAVVTSPAQATMVAPFTGLKSSAAFPVTRKANNDITSIASNGGRVSCMKVWPPVGKKKFETLSYLPDLTEVELXKEVDYLLRNKWIPCVEFELEQXDFVYREHGSTPGYXIDGRYWTMWKLPLXFGCTDSAPRGLKEVQEXKTEYPNAFIRDSSIEQTGPGSKGASFSSPTNHKGFPGGV

SEQ ID NO: 9607 - protein, 362 aa, Zea mays
  misc_feature (31)..(31): Xaa can be any naturally occurring amino acid
MGSTAADVAAVVDEEACMYAMQLASSSILPXKNAIELGLLEVLQKEAGGGKAALAPEEVVARMPAAPSDPAAAAPLVDRMLRLLASYDVVRCQMEDRDGRYERRYSAAPVCKWLTPNEDGVSMAALALMNQDKVLMESWYYLKDAVLDGGIPFNKAYGMTAFEYHGTDARFNRVFNEGMKNHSVIITKKLLDFYTGFEGVSTLVDVGGGVGATLHAITSRHPHISGVNFDLPHVISEAPPFPGVRHVGGDMFASVPAGDAILMKWILHDWSDAHCATLLKNCYDALPENGKVIVVECVLPVNTEATPKAQGVFHVDMIMLAHNPGGKERYEREFRELAKGAGFSGFKATYIYANAWAIEFIK

SEQ ID NO: 9608 - protein, 412 aa, Zea mays
INTGRVTFLRSIGLREYSRYLTFNHPCSHEKPLLSHLRFFPWVVNEVYFKVWRQGRTGYPLVDAGMRELWATGCPRARIRVVVSSFFVKVLQLPWRWGMKYFWDTLLDADLESDALGWQYISGSLPDGRELDRIDNPQFEGYKFDPHGEYVRRWLPELARLPTEWIHHPWDAPESVLQAAGVELGSNYPRPIVELDAANSRLQDALSEMWELEAASRAAMENGMEEGLGDSTDERPIDFPQELRMEVDRQPVQPAIHAQGVTGRRREDQMVPSMTSSFIRAETELTADFGHTSEDSRPEVPSNIHHLQARPEREETVDGGTGNAVRVHGNHHQQNLQNNIHRVLGIAPSISEASSSWTGRDGGVVPVWSPPAASGNSDPYAADEADISSRGYLDRHPQSHTMMNWSQLSQSL

SEQ ID NO: 9609 - protein, 355 aa, Azoarcus evansii
MIPEFIDTWQMTEPGKLQKTRVPMPELGPGDVVVKIAGCGVCHTDLSYFYMGVPTVQKPPLSLGHEISGTVIGGEASMIGKEVIVPAVIPCGECELCNTGRGNRCLSQKMPGNSMGIYGGYSSHIVAQSKYLCVVENRGGTPLEHLAVVADAVTTPYQAAVRADLKKDDLVIVIGAAGGVGSFMVQTAKGMGAKAVIGIDINEEKLVMMKDFGADFVINPKDKSAKDIKELFKGFCKERGLPSNYGWKIFEVTGSKPGQELALSLLSFTGKLVIVGYGTAETTYMLSKLMAFDAEIIGTWGCPPDPYAAVRDMCLDGRIKLGPFVETRPMSQIEQVFDEAHHGKLKRPVILTPDF

SEQ ID NO: 9610 - protein, 115 aa, Triticum aestivum
  misc_feature (5)..(5): Xaa can be any naturally occurring amino acid
  misc_feature (7)..(7): Xaa can be any naturally occurring amino acid
  misc_feature (16)..(16): Xaa can be any naturally occurring amino acid
  misc_feature (27)..(28): Xaa can be any naturally occurring amino acid
  misc_feature (45)..(45): Xaa can be any naturally occurring amino acid
  misc_feature (56)..(56): Xaa can be any naturally occurring amino acid
  misc_feature (66)..(67): Xaa can be any naturally occurring amino acid
  misc_feature (70)..(70): Xaa can be any naturally occurring amino acid
  misc_feature (73)..(73): Xaa can be any naturally occurring amino acid
  misc_feature (83)..(83): Xaa can be any naturally occurring amino acid
  misc_feature (87)..(87): Xaa can be any naturally occurring amino acid
MAAQXGXMRLVSHPIXAHDGRLPRQYXXDGQGAKKDMSPPLEWYXLPDGARSLALXVQDIDPTQLXXTHXVVXNIPPATKGSXRGLXRRGGLQLRRQEGSTGHRLGPPHDHLPYK

SEQ ID NO: 9611 - protein, 300 aa, Erwinia carotovora subsp. atroseptica SCRI1043
MSLSQEFQNFIAQLRANPVPFEQLTDIGELRGAFNALGSDLPPLLDVLFRQVDAAGVPAEWVDPAGSDPSRVIFYLHGGGYVAGDPIIYRNFVTALCRASDCRALIVDYRLAPESPFPAALEDAQRSYAWLLTQGISADQIVIIGDSAGGGLALSTLVSLRDSCQPLPGAAVLLSPWTDLTLESESHLTKVKDDPIITHKFLDQSRQRYIGTGASDTDALVSPLHADLTGLPPLLVLVGTAEVLLDDSTALAHKAREAGVDVDLIEGDGMIHTWPFFIDSFPEAEKAVQSIGTFIHSRIR

SEQ ID NO: 9612 - protein, 335 aa, Naumovia castellii
MSEPAQKKQKTTGSSLEQLKASGTVVVADTGDFASIAKFTPQDSTTNPSLILAAAKQPAYAKLIDVAVSYGKKNGKTTDEKVELAVDRLLVEFGKEILKIVPGRVSTEVDARLSFDKEATIAKALEIIKLYEDLGISRERVLIKIASTWEGIQAARELESKHKIHCNLTLLFSFSQAVACAEAKVTLISPFVGRIMDWYKAKTGETYNGRNDPGVLSVHKIYNYYKKHGYKTIVMGASFRNVDEIKNLAGVDYLTISPNLLDELLNSNDHVPRVLDVATAKKEGAEKISYIDDEATFRFSLNEDAMGTEKLAEGIRKFSADIVTLFDMIEKKVTA

SEQ ID NO: 9613 - protein, 279 aa, Pediococcus pentosaceus ATCC 25745
MINSLNDRIMLNNGTAIPGLGLGVFQIPDADTAQVVANGIKNGYRLIDTAQIYGNEAGTGAGIKAGLTATGLKRADLFVTSKVWNDHLSYDETIAAFESSLKKLGLDYLDLYLIHWPGDNAFQDAWRALETLYKQGKIKAIGVSNFQIHHLQALAEFAEITPVINQIETHPQLSQLEMREYAAKHDIKVQAWSPLMQGKILDNAVLAKIAQKYNKSVAQIVLRWDVQQNILLVVKSVRAERMLSNAQIFDFELAPEDMDQINALNENLRVGPNPDEFDF

SEQ ID NO: 9614 - protein, 346 aa, Sinorhizobium meliloti
MAKALVLEKKGQLSLRDIPVRRDLSPTDVLIGIRTVGVCGSDVHYYTHGKIGPFVVNEPMILGHEAAGVVLEVGSQVRHLKKGDRVCMEPGIPDLSSRSSKLGIYNVDPSVRFWATPPVHGCLTPEVVHPAAFTYRLPDHVSFAEGAMVEPFAIGVQAALRAGIRPGDVGAVMGAGPIGMMTALAALAGGCSKVYVADLAQPKLDVIGAYEGIETINVRQQAVSEALAGATGGWGADVVFECSGAAPAILALPSLARPGGTVVLVGMPVEPVPFDIVGMQAKELRIETVFRYANVYDRAIELIASGKVDLKPLISATIPFDESIAAFDRAVEARPTDVKIQIEMPA

SEQ ID NO: 9615 - protein, 425 aa, Burkholderia cepacia R1808
MKIHIKGGTVVDPAAGTERQADVFVADGKIAALGTAPAGFNADNTIDASGLIVAPGLVDLCARLREPGYEHKATLASEMAAAVAGGVTTLVCPPDTDPVLDEPGLVEMLKFRARNLKQANVHPLGALTVGLKGEVITEMVALTESGCVGFTHANVPVRDTQVLLRALQYASTYGYTTWLRPQDAFIGRGGVAASGALASRLGLSGVPVAAETIALHTIFELMRVTGARVHLARLSSAAGLALVRAAKAEGLPVTCDVSANHLHLIDVDIGYFDSQFRLDPPLRGERDREAIRAALADGTIDAICSDHTPVDDDEKLLPFAEATPGATGLELLLSLTVKWADETNTPLAQALRRITAAPADVLQLPAGRLAEGGAADLCVFDPRAHWRVEPRALKSQGHNSPFLGYELPACVRATLVAGHVAFERH

SEQ ID NO: 9616 - protein, 377 aa, Thermus aquaticus
MEVARGLEGVLFTETRMCFIDGEAGRLYYYGIPIQELAEKSTFEETTYLLLHGRLPQRGELEAFKKDLAARRALPSHLLESFRRYPASAHPMSFLRTAVSELGMLDPTEGDISREALYQKGLDLIAKFATIVAANKRLKEGKEPLPPREDLSHAANFLYMANGVEPSPEQERLMDAALILHAEHGFNASTFTAIAAFSTETDLYSAITAAVASLKGPRHGGANEAVMKMIQEIGAPERAREWVREKLSKKERIMGMGHRVYKAFDPRAGVLEKLARRVAEKHGHSPEYQILKIVEEEAGKVLNPRGIYPNVDFYSGVVYSDLGFGLEFFTPIFAVARISGWVGHILEYKEQDNRLLRPDAKYIGELDRPYVPLEARG

SEQ ID NO: 9617 - protein, 47 aa, Glycine max
QGSNEMFGGELCFHKAPTNEEFPQQTCRQITALHKYDCLPANISTNA

SEQ ID NO: 9618 - protein, 115 aa, Hordeum vulgare
MARAAASQLVLVALVAAMLLVATDAAISCGQVSSALSPCISYARGNGAKPPAACCSGVKRLAGAAQSTADKQAACKCIKSAAGGLNSGKAAGIPSMCGVSVPYAISASVDCSKIR

SEQ ID NO: 9619 - protein, 115 aa, Hordeum vulgare
MARSAATQLVLVAMVTAMLLIAADAAISCGQVSSALSPCISYARGKGAKPPAACCSGVRSLAGAARSTADKQAACRCIKRAAGALNAGKAAGIPNKCGVRVPYAISASVDCSKIR

SEQ ID NO: 9620 - protein, 432 aa, Tropheryma whipplei TW08/27
MSKIKLVTAIPGPESERLHRIRQATVARGVSSTFPIYIKESHGSILIDEDGNHLIDMGCGIGVTTLGHSHPAVVDAARAQINSVWHTLFSITPYESYVEVCKLLAKNTPGDFPKKSLLLNSGAEAVENAVKISRAYTGRPTVAVLDRSFHGRTNLTSSMTYRGSLYSSDFGPTASNIVSAPNSYPLHDRLSGKEAAARTISYLETRVAARNIACLFYEPIQGEGGVIVPADGFLPALQDWCRENDIVFVADEIQSGFGRTGCFFASETDGLEPDIVCSAKGIANGLPLSAVTGRSDIVDAARPGTLGGTFTGNHVSCAAALEVFEQYKDNAPLDSASRLGDILKELLLNLQSKHPQIAEVRGRGAMFGAEFSGNHAGEMVSRVITRAAELGVIFLSSGVEGNVVRFLPNVFMDKETIEEAIGVLDSAISSVV

SEQ ID NO: 9621 - protein, 617 aa, Triticum aestivum
  misc_feature (103)..(103): Xaa can be any naturally occurring amino acid
  misc_feature (131)..(131): Xaa can be any naturally occurring amino acid
  misc_feature (147)..(147): Xaa can be any naturally occurring amino acid
  misc_feature (173)..(173): Xaa can be any naturally occurring amino acid
  misc_feature (180)..(180): Xaa can be any naturally occurring amino acid
MWRHAAARRSAQIRRLLSTSAPSSGAGSAVRGPCIVHKRGTDILHDPWYNKDTAFPLTERDRLGLRGLLPPRVMSFEQQYERFINSYHSLEHDSPGDPDSAVXLAKGRGRTRLDDRNETWYSRALIDNFMXLHDLIPFFYSRLQRQXCSRKHTRNRRIRHIQFVMSSRILCYXAELLYLXSISADTAATSTGYIVASFVYVDRFIKHCLDVYVAAAGINPQKVLPIMLDVGTNNEELLEDKLYLGLRQPRLEGEEYLAVVDEFMEAVHARWPKAIVQFEDFQMKWAFETLQRYRSRFCMFNDDVQGTAGVALAGLLGAVRAQGRPLADFTKQKIVVVGAGSAGIGVLNMAKHAMLRMPGTHKIGELGEGHNQFWVLDKDGLITKSRKDLDPAVARFARGYGPEEVEDLHEGASLVEVVKKVKPHVLLGLSGVGGIFNEEVLKAMKESDSPCPAIFAMSNPTTKAECTPEDVFKHVGENAVFASGSPFSNVTLSNGRKGYANQANNMYLFPGIGLGALLSGARHISDGMLHAAAECLASYITDDAIRKGILFPSISSIRHITARVGAAVARAAVDEDLAEGCPDLDPRDLRSMSESDTVDYVARKMWYPVYSPLVNDK

SEQ ID NO: 9622 - protein, 241 aa, Triticum aestivum
MKTLLILTIIAVALTTTTANIQVDPSGQVQWPQQQQPFPQPQQPFSQQPQQIFPQPQQTFPHQPQQAFPQPQQTFPHQPQQQFPQPQQPQQPFPQQPQQQFPQPQQPQQPFPQQPQQQFPQPQQPQQPFPQPQQPQLPFPQQPQQPFPQPQQPQQPFPQLQQPQQPLPQPQQPQQPFPQQQQPLIQPYLQQQMNPCKNYLLQQCNPVSLVSSLVSMILPRSDCKVMRQQCCQQLARIPQQL

SEQ ID NO: 9623 - protein, 460 aa, Schizosaccharomyces pombe
TGALLHHTLGDGDFRTFMDMFKKVSAYSIMIDNGNDAAEKIDEALSICYKKARPVYIGIPSDAGYFKASSSNLGKRLKLEEDTNDPAVEQEVINHISEMVVNAKKPVILIDACAVRHRVVPEVHELIKLTHFPTYVTPMGKSAIDETSQFFDGVYVGSISDPEVKDRIESTDLLLSIGALKSDFNTGSFSYHLSQKNAVEFHSDHMRIRYALYPNVAMKYILRKLLKVLDASMCHSKAAPTIGYNIKPKHAEGYSSNEITHCWFWPKFSEFLKPRDVLITETGTANFGVLDCRFPKDVTAISQVLWGSIGYSVGAMFGAVLAVHDSKEPDRRTILVVGDGSLQLTITEISTCIRHNLKPIIFIINNDGYTIERLIHGLHASYNEINTKWGYQQIPKFFGAAENHFRTYCVKTPTDVEKLFSDKEFANADVIQVVELVMPMLDAPRVLVEQAKLTSKINKQ

SEQ ID NO: 9624 - protein, 422 aa, Halobacterium sp. NRC-1
MRVIRDAVLADGRVRDIRLDGERIDAVGTALDGELFVDANADYRVLPGMIDAHVHFRQPGFEHKETWASGSRSAAAGGVTTVVDQPNTAPPTVTGDAVDEKAAHAAADSVVDWGVNGGVTGEWDPASLFDRSLFALGEVFLADSTGDMGIDAALFRDACQRAASEDVVVTVHAEDADRFDTAAKSRSDADAWSAYRTPEAEAAAVERAVEVGTEAGATIHIAHTSTPEGVDAAAAGGATCEATPHHLFLSRDDLDDLGTFGRMNPPLRSDPRREALFERLADGRIDVVATDHAPHTRAEKAADIWDAPSGVPGVETALPLLLGAAHRGELSYERVRDVTAANPADVFGLERKGHIAAGRDADLVLVDPDDAREIHGDDLHSNCEWTPFEGHVGVFPAMTLVRGTTVWDGDTVSAFDGRNVRQ

SEQ ID NO: 9625 - protein, 448 aa, Zea mays
MSHYHSADFEEMEDEYDMNEPVDDMEGEDEYQELVIRDSDAEDEDDADQLHKLSDTSAADARSGKDIQGIPWETIEVTRETYRQARLEQYKNYENIPNSGVAAMMACKSTEKGRTYYEFRRNTRSVKSTISHFQLRNLVWATSKHDVYLLLHYSVLHWSALNGVDTEIMDVHGHVAPSEKHPGSLLEGFLHTQISTMAVKDNLLVAGGFQGELICKHLDREGISFCCRTTYDDNAITNALEIFNTSSGALHFIASNNDCGVREYDMERYQLFKHFRFDWPVNHTSLSPDGKLVIIVGDDTDALLIDSNSGKTIHSMKGHLDFSFASAWSPDGLTFATGNQDKTCRIWDARNLTESVHVLRGNVGAIRSIRFTSDGHFLSMAEAADFVHIFDIKSDYNKRQELDFFGEVSGMSFSPDTDTLYVGISDRTYGSLLQFGRLYNYSYLDSLL

SEQ ID NO: 9626 - protein, 496 aa, Lesquerella fendleri
MTSLNIKLLYHYILTNLFNLCLFPLTAFLAGKASHLTKSDLLMFLSHLQDNLITVIVLFTFTIFCLVLYIVTKPKQIYLVDYSCYLPPDHLKVSISSVMDIFYELRKVDPLCEVGCDDSSLEFMRKVLERSGLGDETYVPLGLHQVPPQKTFAAIKDETEQVIKGALENLFENTKVNPREIGILVINSSMFNPTPSLSAMVINTFKLRSNIKSFNLGGMGCSAGVIAIDLAKDLLHVHKNTYALVISTENITITAYAGENRSMNVSNCLFRIGGAAILLSNKPRDKRRSKYKLAHTVRTHTGADDMSYRCVQQEEDEMGKVGVRLSKDITTVAGTAVKKNISTLGPLILPLSEKLLYFVSFIAKKLLKEKIKNYYVPDLKLAINHFCIHAGGRGVLDVLEKNLRLSPIDVEASRSTLHRFGNTSSSSIWYELAYIEAKGRMKKGDKAWQIALGSGFKCNSAVWVALRNVKASANSPWEHCIDRYPVPDTCVENGKS

SEQ ID NO: 9627 - protein, 316 aa, Shigella flexneri 2a str. 2457T
MNELDGIKQFTTVVADSCDIESIRHYHPQDATTNPSLLLKAAGLSQYEHLIDDAIAWGKKNGKTQEQQVVAACDKLAVNFGAEILKIVPGCVSTEVDARLSFDKEKSIEKARHLVDLYQQQGVEKSRILIKLASTWEGIRAAEELEKEGINCNLTLLFSFTQARACAEAGVFLISPFVGRIYDWYQARKPMDPYVVEEDPGVKSVRNIYDYYKQHHYETIVMGASFRRTEQILALTGCDRLTIAPNLLKELQEKVSPVVRKLIPPSQTFPRPAPMSEAEFRWEHNQDAMAVEKLSEGIRLFAVDQRKLEDLLAAKL

SEQ ID NO: 9628 - protein, 1862 aa, Oryza sativa (japonica cultivar-group)
MPDIRSAPGRGKSDEDERRPIGSLFKLKRKRRAPGSAEAKGDSNPSVESEAPDGVVPGEMDDTLAIIKRKLRKPKKGKEGGDAVVVGSGAEGELLVEEEDVQGGVNVGDGVAEDKSNLEGVKVEVDEVIGGELKDSGGLGLEDSLSTLFKRSGRKSRQVSVKEEEGVEVAGSHGEEILEKGSGLVSDRVAKGTKRRRRRTKEEMKNAAAKSESAMAHEGSPNRKVGTSLPRKAKAEAKVKISNSNRRSKKSDEKPKASDDVLCHRSLGETIEQDAETRTVLDDGSRNSSDGASHRIEVSACLSNQPCLKPCSGELAEEVSLSAANAATDGVSNEHTYSETLLKERNDDAGCSHGKPPTLAIKSIPGKKPIEMPKKPVRQKDQLLSTDVDNKCVVGSGDTKDVNIENQPAFGIPESHVTGKGLHPHKMATSVKELDVVDVVAPTDFEDMENASKSKRVTRSSRKRKHGDMAYEGDIDWETLMQEQGLFSNLSAALVDYPLKSKDKIKISEVLDNGDGSGVAAVRAGLKAKAVTPIEKIKFKDILKRRGGLQEYLECRNMILSRWCKDVKHILDLAECGVSDVCLDDESPRQTLIRDVYLFLDQNGYINAGIASDKVKTDHESPPEDVEVSKLNESHERKSVSIQDCIVTEAVQDKKAVVKQTDCVLTEASNEESSSAAIHCDAQDLLPPLKSEELIFKEKNQGVLTEVEGGSLHQAEAADIEHSENKHEASDRVESGGYGKKIIVVGAGPAGLTAARHLQRQGFSVTVLEARNRIGGRVYTDRVSLSVPVDLGASIITGVEADIATERRADPSSLICSQLGLELTVLNSACPLYDVVTGDKVPDDLDTDLESEYNGLLDEMAQLFAQNGESAVGLSLEDGLEYALRKNRVTRSEQDDQLRNVSSAGAVDISESASTEKEIAHCGKEDKTDVLSPLERRVMNWHFAHLEYGCAAMLKSVSLPYWNQDDVYGGFGGAHCMIKGGYDTVLESLAKGLDVQLNHVVTEVLYGSEELGASGNSRKFVKISTSNGNEFVGDAVLITVPLGCLKAQTIKFSPSLPDWKLSSIDRLGFGLLNKIVLEFPEVFWDDNVDYFGATAEQTDLRGQCFMFWNLKKTVGVPVLIALLVGKAAIDGQSISSDDHVKNAIVVLRKLFKDASVPDPVASVVTNWGLDPFSRGAYSYVAVGASGRDYDILGRPVSDCLFFAGEATCKEHPDTVGGAILSGLREAVRIIDLVHSGKDYVAEVEALQTYQMQSDSERNEVKDMSNKLDACELSTALCKTSSDASYPLFSKETLLQEMFFSAKTTSGRLHLAKELLKLPPDVLKSFAGSKDGLSTLNSWILDSLGKNATQLLRHCVRLLLLVSTDLLAVRLSGIGRTVKEKVCVHTSRDIRAIARQLVSVWVEVFRKEKASNGGLKLLRRMPSTESSKPRSKDLLSGKPIVRAPNQVSFNPKVASKNARSAGNHSPHTAIKKPENKAAKLEAMTATRSDGSSLRSQKQQHALEPKVDNGLAMSEEEAAAFAAAEAARAAAIAAAQAYASVEAEINAPRELPKIPSFHTFAMRDHYLDESDTRKKVLSDNLVRLECISEIDSRNDKAKNPSVDHANCADVDSSKMTGDNCTQRSYSNENACLINIRDHSTDSGAVDSRFTRAWVDTDTIFIDGVKDPLAIERWQQQAMEADKEFYSRIRIPDEEDSSSQKQTCRSSASQVAESKPASDGQSRGVEHLRQGLINFISTVLMPLYRNKKVDREGYKGIMRKAVTKIIETCTEGEKMMTVHEFLDSKRKNKVRLLSSTCKSHDVHFGIQQVSVRSIGVIKFLDLRIGADTSGLSIHDSCAKPNDYPKFPTAWQGTDYPNSMARISLI

SEQ ID NO: 9629 - protein, 209 aa, Arabidopsis thaliana
MSQLGVETSQAQPETPQSTTFLDLLRLQMDGLDRSRRRKRTLKERLGFKRIGCCGPTWGLRLTSNTGEDDDEPFENRLVSGSDHVTGPLNQGMNLATALAAERNYRTEETEASGSLTPLKVSLMRLLEETAERVVVEENETERVTASASSTVRGVNNDSVCCVCMGRKKGAAFIPCGHTFCRVCSREVWLNRGSCPLCNRPIIEILDIY

SEQ ID NO: 9630 - protein, 178 aa, Glycine max
  misc_feature (53)..(53): Xaa can be any naturally occurring amino acid
  misc_feature (101)..(101): Xaa can be any naturally occurring amino acid
  misc_feature (125)..(125): Xaa can be any naturally occurring amino acid
MASSTISSPTVTTVNRAGAGMDAPFTGLKAMAGFLTTKTNNDITSIASTGGRXHCMQVWPPPGNKNIETLSYLPHLDDAQLAKEGQHLLKKGWIPCLELQXEHSCRYREHNRSPRYYDGRYCTMXNLPMFGCTDAYHALNELRDADTAYPNGFIRIIRCNIVEQVQCINFIAYKPPDF

SEQ ID NO: 9631 - protein, 446 aa, Arabidopsis thaliana
MTKKMRRVGKYEVGRTIGEGTFAKVKFARNTDTGDNVAIKIMAKSTILKNRMVDQIKREISIMKIVRHPNIVRLYEVLASPSKIYIVLEFVTGGELFDRIVHKGRLEESESRKYFQQLVDAVAHCHCKGVYHRDLKPENLLLDTNGNLKVSDFGLSALPQEGVELLRTTCGTPNYVAPEVLSGQGYDGSAADIWSCGVILFVILAGYLPFSETDLPGLYRKINAAEFSCPPWFSAEVKFLIHRILDPNPKTRIQIQGIKKDPWFRLNYVPIRAREEEEVNLDDIRAVFDGIEGSYVAENVERNDEGPLMMNAFEMITLSQGLNLSALFDRRQDFVKRQTRFVSRREPSEIIANIEAVANSMGFKSHTRNFKTRLEGLSSIKAGQLAVVIEIYEVAPSLFMVDVRKAAGETLEYHKFYKKLCSKLENIIWRATEGIPKSEILRTITF

SEQ ID NO: 9632 - protein, 259 aa, Zea mays
MASKSTMRSLVLIMGLLLLSCSGMSSAARLLEEMAPKEEYPHPEVPELPKPELPPHPTVPELPKPDELPPHPVVPELPKPEVPVHPAVPELPKPEIPPHSTVPELPKPEVPELPKPEVPEHPAVPELPKPELPPHPTVPELPKPEVPELPKPEVPEHPAVPELPKPELPPHPTVPELPKPEVPELPKPEVPEHPAVPELPHPDVPEHPASVPELPKPEVPEHPTVPELPKHELPPLPEPELPLPPKAESHYPEPGMAKP

SEQ ID NO: 9633 - protein, 355 aa, Fusarium solani
MSRSNPPNPTGSRKISFNVSEQYDIQDVVGEGAYGVVCSAIHKPSGQKVAIKKITPFDHSMFCLRTLREMKLLRYFNHENIISILDIQKPRNYESFNEVYLIQELMETDMHRAIRTQDLSDDHCQYFIYQTLRALKAMHSANVLHRDLKPSNLLLNANCDLKVCDFGLARSAASQEDNSGFMTEYVATRWYRAPEIMLTFKEYTKAIDVWSVGCILAEMLSGKPLFPGKDYHHQLTLILDVLGTPTMEDYYGIKSRRAREYIRSLPFKKKVPFRTLFPKTSDLALDLLEKLLAFNPVKRITVEEALKHPYLEPYHDPEDEPTAPPIPEEFFDFDKHKDNLSKEQLKQLIYQEIMR

SEQ ID NO: 9634 - protein, 434 aa, Yersinia pestis KIM
MTRILQSINKIALKERLMESKVVVPAEGKKITVDAQGKLVVPHNPIIPFIEGDGIGVDVTPAMINVVDAAVKKAYNGERKISWMEIYTGEKSTHVYGKDVWLPEETLDLIRDYRVAIKGPLTTPVGGGIRSLNVALRQQLDLYVCLRPVRYYEGTPSPVKHPELTNMVIFRENAEDIYAGIEWKAGSPEAEKVIKFLREEMGVKKIRFPEQCGIGVKPCSEEGTKRLVRAAIEYAITNDRESVTLVHKGNIMKFTEGAFKDWGYQLAREEFGGELIDGGPWVKIKNPNNGKEIIVKDVIADAFLQQILLRPAEYDVIACMNLNGDYISDALAAQVGGIGIAPGANIGDDCALFEATHGTAPKYAGQDKVNPGSIILSAEMMLRHMGWFEAADLIIKGTEGAIQAKTVTYDFERLMEGAKLLKCSEFGDAIIKHM

SEQ ID NO: 9635 - protein, 402 aa, Pseudomonas fluorescens PfO-1
MENLQSAVDTLVHSSNTLFILIGAVMVLAMHAGFAFLEVGTVRQKNQVNALSKILSDFAVSTLAYFFIGYWLSYGVTFLHPAAVLSADHGYGLVKFFFLLTFAAAIPAIISGGIAERARFVPQLCATALIVAFIYPFFEGMIWNGNYGLQAWLTAQFGAPFHDFAGSVVVHAMGGWLALAAVLLLGPRTGRYRDGKLVAFAPSSIPFLALGSWILIVGWFGFNVMSAQTLQGVSGLVAVNSLMAMVGGTVAALIVGRNDPGFLHNGPLAGLVAVCAGSDLMHPVGALVNGAIAGALFVWCFTAAQVKWRIDDVLGVWPLHGLCGVWGGIACGIFGSTTLGGLGGVSLISQLIGTALGVAVALIGGFAVYGSIKALHGLRLSQEQEYYGADLSLHKIGAVSQD

SEQ ID NO: 9636 - protein, 492 aa, uncultured bacterium 560
MIKMPDGKLFIGGEWETGTGKEIVSIFPADGSINCSLYGASKNDVLRAVKLAKSAQSQPSWRSLKPHERARYLYAIADGIEANIDRISQIQTRDTGKTLRETAILASSASGTFRYFGALLESSDDLLTAQRNDSLTMSVYEPLGLVSAITPWNSPIASDAQKIAPALAAGNAVLLKPSSWSPLVSLELAKLVESSGLPKGLFSVLPGSGEEVGNLLVEHPDISKVTFTGSTKTGRSLAIKAAKKLMPISLELGGKSPVIVFKDSDIDIAIAGVMFGIFSSTGQSCIAGSRLFVQKDIYNEFVERLVKATKKLKVGSPYNLDTQVSTMIHPQHRDSVAAYVDLARNEGAKILCGGKSPSGAEYKKGAYYLPTIITQVDNSAQICREEVFGPVLVVMPFDDEADVIEQANENEYGLACGIWTSDFPKAWRVGRAINAGTVWVNTYKQFSISTPFGGEKNSGMGREKGRNGIRAFMSQKSLYFDLTGNSHPWAET

SEQ ID NO: 9637 - protein, 118 aa, Brassica napus
MIRKTPNLQNDIINIQERYSNNPVMDAGGGRNNRKNVNFRRPPAMTSENSKHELRRTFSSQKRLMIPANYFSLESLVILVGLTASLLILPLVLPPLPPPPFMLLLIPIGIMVLLIFLA

SEQ ID NO: 9638 - protein, 365 aa, Zea mays
GGPIGYLEAGLCPTVGVGGHFSGGGFGMLLRKYGLAIDNVVDAVLVDARGRLLSKNTMGSDVFWAIRGGGGESFGVVLSWQVRLVPVPATVAVFNVPVPASQGAVDVVTRWQQVAPALPDDLFIRVVVQQQTANFESLFLGTCDALLPVMGSRFPELGLNRSSCKEMTWIQSVPYIYLGSGSTVEDLLNRTTSASVFSGGYKATSDYVRQAIPRDVWANIFSRLAQPNAGLMILDPYGAQISTVPESATPFPHRAGVLYNIQYMNFWPMAGGGDGAVQTKWVRDLYAFMAPYVSSNPREAYFNYRDLDLGENVVVGNVSSYQAGMVWGHKYFKDNYQRLAVAKSQIDPDDYFRNEQSIPPLANSN

SEQ ID NO: 9639 - protein, 305 aa, Lactobacillus gasseri
  misc_feature (289)..(305): Xaa can be any naturally occurring amino acid
MKRIGILTSGGDAPGMNAAIRAVTRTALANGIEVCGIRYGYAGLVAGDIFQMTSETVADKINRGGTFLYSARFPEFKEEEVQLKGIEQLKKHGIDALVVIGGDGSYHGALKLTRHGYNAVGLPGSIDNDIPYTDFTIGFDTACNTAMEAIDKIRDTATSHQRVFVVNVMGRDCGDIAMHVGVATGADAIVIPEEPYDIKEIAENLKQGFANGKKHGIVVLAEGVMDANKFKDELLKYGDFDARANILGHMQRGGSPTTRDRVLASEMGAYAVKLLLEGKGGLAVGIENXXXXXXXXXXXXXXXXX

SEQ ID NO: 9640 - protein, 436 aa, Bordetella parapertussis 12822
MNLSDKKATLSFSDGSAPIEFPVYKGTVGPDVIDIRKLYGQTGMFTFDPGFMSTAACASGITYIDGDKGELLYRGYPIEQLAVNCDFLDICYLILNGELPNGGQKQDFDSQVTHHTMVNEQLHFFLRGFRRDAHPMAVLTGLVGALSAFYHDSTDITNPHHRHVSAIRLIAKMPTLVAMAYKYSQGQPFIYPQNDLSYTGNFLRMMFATPCEEYKVNDVVERALDRIFILHADHEQNASTSTVRLCGSSGTNPFAAIAAGVACLWGPAHGGANEACLQMLEELQANGGVAKVGEFMEKVKDKNSGVRLMGFGHRVYKNYDPRAKLMQETCKEVLVALGLENDPLFKLAMELERIALEDDYFVQRKLYPNVDFYSGIVQRAIGIPTSLFTAIFALARTVGWIAQWNEMLSDPDYKIGRPRQLFTGSVTRDVPGMDKR

SEQ ID NO: 9641 - protein, 339 aa, Naumovia castellii
MVGPKTKKQKVANAGGSTSLDLLKKTGTTVVADTGDFATIDKYKPQDATTNPSLILAASKKEDYSSLVDNAVAYGKENGETIDEQVECAIDKLLVEFGTEILKIVPGKVSTEVDARLSFDKDATIKKALQLIHLYEKAGISKDRVYIKVASTWEGIQAAKVLEQEHGITTNLTLLFSFTQAVACAEAGVSLISPFVARITDYYKAQTGKDYSPEDDPGIHSVKKIYNYYKKHGYHTIIMAASLRTTGQVKQLAGIDNLTLSPKVLDELVASTDEVPKLLDPKKAAKQGDEKISFLDDEPKFRYSLNDDAMATEKLADGIRKFAADAITLSNAIKEKLQK

SEQ ID NO: 9642 - protein, 1040 aa, Cryptococcus neoformans var. grubii
MSRVPSGSQQPQYTQQPLYHPSSVHSQSASVQQTHQQYHPHAGQPMAFQGDPHAYSYDRQSQINTWQANPGAAGSMEYHSAVAGSSRGADPYQPYSQPHRSSPSQPVTAGRTQPASAQQYTPWAPVQASATTTPSSRGGGVKLEDLMSNDSRADGKSQPLSSIPLSVSASFDTRSQFSAGPQGASTEKEKDKERDKATQQQGPSEFIKKLYKMLEEEQAQYGSSRAKKGEKGKRGSVGWGANGTSFVVWDMNDFTTKILPQTFRHSNFSSFVRQLNKYGFSKIKHVDAGTGSIKENIWEFQHPNFQAGGKSDLESIKRKPVAPKKTNNQEGDENSPRYVGLSNEDQSRMHLMEDRINILEDALAKSRSEADEARMREMAMMGLVRDMIGHIAASESEAIGSPAATTGHSPRVLHLLKSLDNLARAYPPEMYHSNIARQPTTMPYTPAQPQSHQSFLNAAYNPAFSGSSVGGAAQAQASPHTDGTGSRGSLSGPSTGEIKPPASSSRLRAASNAGVVPPGSVNASVPVASQPSGNPPAGPVAHVEDPAEDVIEIPNQMQDMYGGESVSIAPLFVETPAWLTEGTTIPLTMYRKQSDGQALKAVYQAFAAGGKLPAGEGQDEDGNAIASGSSTSAAEIMAGSSQMGLQQSYDAGPSTSTGIPLPMDGSPSSESSSRKGKGKKSRGTSLKEQRESKLKPHWAQTPRILVVEDDIVYRTLSKKFLQKFGCETETVENAQGAVDKMNGTKYDLVLMDIFFGPNMDGRKATSLIRQFNNYTPIISMTSNAQPQDVDSYYQSGMNDILAKPFTKNHLFTILDKHLVHLRHAQLYERLIPLGVGVPPLSDQHVQEALAVSAATLQNTNGQLQLENGQTAEAQNEQQDSNGELELGIRNPLAGSGWSDEAYQLVLAQFLQTGVMPDITTISAVSSSPNPNGFDGTIGTSIVFGESSGFSRKRSIEAINDDNWDGQAQTPASAQAQVQAQTQNTIMQGDQQQGMSLQMPTNVGMGMDVNMGNMPESGMMNQDMSNDSDGRETKRARGMAG

SEQ ID NO: 9643 - protein, 367 aa, Aeromicrobium erythreum
MTEKQTTHRPLSDRVARRVVRTLGRLPQPLKRAIAGKPISIDGQTLDVEAQVGVRLLNLAVGETFETLPVEEGRRQIDGEAWVFGYEHPVHDVRDLVLPGPGGDLPARIYRPAGLPALSAGLVYFHGGGWVLGNLGSADSVCRYLADTAGITVVSVDYRLAPEHPFPAGVDDAVAAFRHVVAHASELGIDPSAVAVGGESAGGNLTAVASLVSTLEARTDPSVPVPAFQLMFMPVTDLTTKHRSYELFSDGFFLSDAQMDWYKAHYLTDPAQAHDPRVSPLLAPDLEGQPPAHVVVAGFDVLRDEGEAYATRLLEAGVPTTLTRQEGIVHGLVNATGVGTVARRVLDEAAGQLRKRLVPLASGETVR

SEQ ID NO: 9644 - protein, 428 aa, Arabidopsis thaliana
MTNTLCLSLITLITLFISLTPTLIKSDEGIDVFLPISLNLTVLTDPFSISAASHDFGNITDENPGAVLCPSSTTEVARLLRFANGGFSYNKGSTSPASTFKVAARGQGHSLRGQASAPGGVVVNMTCLAMAAKPAAVVISADGTYADVAAGTMWVDVLKAAVDRGVSPVTWTDYLYLSVGGTLSNAGIGGQTFRHGPQISNVHELDVITGKGEMMTCSPKLNPELFYGVLGGLGQFGIITRARIALDHAPTRVKWSRILYSDFSAFKRDQERLISMTNDLGVDFLEGQLMMSNGFVDTSFFPLSDQTRVASLVNDHRIIYVLEVAKYYDRTTLPIIDQVIDTLSRTLGFAPGFMFVQDVPYFDFLNRVRNEEDKLRSLGLWEVPHPWLNIFVPGSRIQDFHDGVINGLLLNQTSTSGVTLFYPTNRNK

SEQ ID NO: 9645 - protein, 439 aa, Chlorobium tepidum TLS
MSTLFLNARLLNPAENLDTVGSIKIGDDGLIEAVATGGESIPAKAEDNVIDLAGKVLAPGLFDMHCHFREPGQEYKETLETGSAAAVAGGFTGVALMPNTRPVIDSPLGVAYIRHHSAGLPIDLEVIGAMTVESRGEALAPYGKYASYSVKAVSDDGTAIQSSQIMRLAIEYAANFDLLLIQHAEDKHLTAGGIMNDGAVSAMLGLKGIPEVAEPIMIARDLQLIAWLKKHKLNGAVAEPRYHVAHISTAESVALVRKAKAAGLKVTCEVTPHHFTLTEHDLSSSIEKGNFIMKPPLASVENRDALIEGLRDGTIDAIATDHAPHAKHEKECPPDQAAFGIIGLETSLGLTITELVDKGVITLSQAIELLSTNPRRIMGLETILFRAGRKANLTIIDPDCEWIVSESDFGSKSRNTPFMGRKLKGRALGIYHNSKLIMR

SEQ ID NO: 9646 - protein, 129 aa, Streptococcus agalactiae
LETNTPETPDTPKIPELPQAPDTPQAPDTPHVPEAPHVPESPKAPEAPRVPESPKTPESPKAPEAPRVPESPKTPEAPHVPESPKTPEAPKIPEPPKTPDVPKLPDVPKLPDAPKLPDGLNKVGQAVFT

SEQ ID NO: 9647 - protein, 228 aa, Chloroflexus aurantiacus
MAAAAAVALVRPGMVIGLGFGSTAAYATRMIAERLHQGDLNDIVGVPCAEGTAQLARELGIPLTTLDEVAAVDLTIDGADEVDPQLSLIKGGGGALLREKMVAQASRRVAIIVDDSKLSPALGTRFALPLEVVDFGWRATARWLEAQGGTVQLRLRADGQPFRTDQGNLILDWKCGPLNDPAALAAQLSARAGIVEHGLFIGLATDLFVAGPDGVQHVTTSDCGTIAW

SEQ ID NO: 9648 - protein, 75 aa, Glycine max
  misc_feature (34)..(34): Xaa can be any naturally occurring amino acid
  misc_feature (47)..(47): Xaa can be any naturally occurring amino acid
  misc_feature (60)..(60): Xaa can be any naturally occurring amino acid
SISWPGDTTVNRAGAGMDAPFTGLKSMAGLPTRXTYNDITSIGCNCXRVQCMQVWPPIGXKKYETLSYLPDLDDA

SEQ ID NO: 9649 - protein, 670 aa, Triticum aestivum
RRGIPGDPDQQGVKDSYFPLRHGGKVTLYQDAHVNEGDLPDVQLERGKKFEHNQCWEDICHAILEAHHMIYIVGWSIYDKVKLVREPSSSRALPEGGELTLGELLKFKSQEGVRVCLLVWDDKTSHDKLFIKTGGVMGTHDEETRKFFKHSSVICVLSPRYASSKLSIFKQQVVGTLFTHHQKCVLVDTQASGNKRKVTAFVGGLDLCDGRYDTPQHRLFKDLDTVFENDFHNPTFSAGAKGPRQPWHDLHCKIDGPAAYDVLKNFEQRWRKASKFRDRFRKVSRWKDDALIKLERISWILSPSPNVPNDHVSLRVSKEEDPENWHVQVFRSIDSGSLKGFPSDCKEASKQNLVCRKNLIIDKSIHTAYVRAIRSAQHFIYIENQYFLGSSYEWPSYVNSGADNLIPMELALKIATKIRAGERFAVYIVIPMWPEGVPTSASVQEILFFQAQTMEMMYGVIARELKAMNIEDAHLQDYLNFYCLGNREEPSTDGSPESDKSTDKSAAGLARKHRRFMIYVHAKGMIVDDEYVILGSANINQRSLAGSRDTEIAMGAYQPHHAWSSKKGHPHGQVYGYRNSLWAEHLGMVDDHFKEPSSLDCVRLVNQIAEENWERFASEEMKTLQGHLLRYPVKVEPDGKIVPLPDQECFPDVGGKICGAPTSLPDSLTM

SEQ ID NO: 9650 - protein, 263 aa, Magnaporthe grisea 70-15
MQPLSNEQVQKLSNYDTLAQADDAQPAIVTSIPEVPITEARKPWQPEDEDRLPRPGVGRANIAATYDQPEGTTEGDYAAKHSDQTVLQQHLEFFDRDRDGIIWPRDTFIGFYRLGFGAVLSFLSIFVIHSNFSYATGDSWIPDPMFRINLSNIHKDKHGSASGAYDAEGRFVPQRFEDLFAKHAQGRDYMTARDVVNLLKGQRMIADPVGWFHAFIEWTATYYMLWPEDGRMKKEDVRGVFDGSIFYTIAARREEKMDEAKRR

SEQ ID NO: 9651 - protein, 400 aa, Bordetella parapertussis 12822
MSTSQKKPTVQQKKPAAQPAEKAAFKPKKSVALSGVVAGNTALCTVGRTGNDLHYRGYDILDFAGSAEFEEIAHLLVHGKLPNKAELKAYKEKLRALRGLPAQLQNVLECLPASSHPMDVMRTAVSVLGCVLPEKDDHNTPGARDIADRLMANLGSALLYWYHYSHNGRVIDVQTDDDSIGGHFLHLLHGAKPSDEWVRAMHTSLILYAEHEFNASTFTGRVIAGTGSDMYSSITGAIGALRGPKHGGANEVAFEVQKRYETPDEAEADTRQRVENKEVIIGFGHPVYTVSDPRNKVIKDVAKKLSRKAGSTKMFDIAERLETVMWDIKKMFPNLDWFSAVSYHMMGVPTAMFTPLFVIARTAGWSAHIIEQRIDNKIIRPTANYVGPEDQTYVPISKRA

SEQ ID NO: 9652 - protein, 430 aa, Deinococcus radiodurans R1
MVGRPAGVGVEWASMSKHIKVPEQGEKITMQNGKLTVPNRPIIPFVEGDGTGPDIWAASVRVFDAAVEKAYGSERKLEWMEVYAGEKSLEVYGANEWLPQETLTAFRDYLFGIKGPLTTPVGTGIRSINVALRQELDLYACVRPVQYFNGVPSPVKRPEDIDMVIFRENTEDIYAGIEWKAGTDEAEKVRGFLMREMNVTKIRFPDTSSFGVKPVSKEGTERLVRAAIEYAIENGRKSVSLVHKGNIMKFTEGGFRDWGYELAKREFGAVEIDGGPWCQLPNGIVIKDVIADNFLQQILLRPTEYDVIATLNLNGDYISDALAAQVGGIGIAPGANINYVTGHAIFEATHGTAPKYAGKNVINPSSVILSGEMMLRYMGWTEAADLILKGLDATIQQRVVTYDFARGMDDATEVKTSEFADKIIENMRNA

SEQ ID NO: 9653 - protein, 474 aa, Pseudomonas aeruginosa UCBPP-PA14
MQTKLLINGALVAGESESHAVYNPSQGNVLVRITEASGAQVHAAVQSADAAFDAWSQTPPKDRAALLLKLAERIDAQAHVFARLEADNCGKPFNAVLLDELPAVSDVFRFFAGAVRCLQGSAAGEYVAGHTSMIRRDAVGVVASIAPWNYPLLMAAWKLGPALAGGNTVVLKPSEHTPLSTLKLGELLAEIFPAGVVNIVHGRGASVGEPLTSHAQVRMVSLTGSVRTGSRIIEGTAESVKRMHMELGGKAPVLIFDDADIDAAVEGIRAFGFYNAGQDCTAACRLYVQKGVYQEFVRKLGEAVSSIRCGLPDDPATEMGPLITKEHLERVEGFVNRARELPHIEVVTGGKRAEGAGFFFEPTVLAGATQEDEVVRREIFGPVVTVSSFEDEAQALAWANDSDYGLASSVWTADVGRAHRLAARLQYGCTWVNTHFMLVSEMPHGGVKLSGYGKDLSMYGLEDYTVVRHVMFKH

SEQ ID NO: 9654 - protein, 435 aa, Saccharomyces cerevisiae
MTTNEEFIRTQIFGTVFEITNRYNDLNPVGMGAFGLVCSATDTLTSQPVAIKKIMKPFSTAVLAKRTYRELKLLKHLRHENLICLQDIFLSPLEDIYFVTELQGTDLHRLLQTRPLEKQFVQYFLYQILRGLKYVHSAGVIHRDLKPSNILINENCDLKICDFGLARIQDPQMTGYVSTRYYRAPEIMLTWQKYDVEVDIWSAGCIFAEMIEGKPLFPGKDHVHQFSIITDLLGSPPKDVINTICSENTLKFVTSLPHRDPIPFSERFKTVEPDAVDLLEKMLVFDPKKRITAADALAHPYSAPYHDPTDEPVADAKFDWHFNDADLPVDTWRVMMYSEILDFHKIGGSDGQIDISATFDDQVAAATAAAAQAQAQAQAQVQLNMAAHSHNGAGTTGNDHSDIAGGNKVSDHVAANDTITDYGNQAIQYANEFQQ

SEQ ID NO: 9655 - protein, 269 aa, Populus alba x Populus tremula
MRPQSVILALSLIFFFLHCTKTLCQSPAAAPAMAPPKTPVKAPPADSSQAPSAQVATSPGPVDINKILQKAGHFTVFARLMQATTEDTELNKELNNTNNGITILAPTDSAFSTLKAGFLNSLSDEDKTELVKFHVLPAFISTSQFQTVSNPVRTQAGTGPRVTLNVTTTGNFVNISSGLTNASISGTVYTDSQLAIYQLDKGLFPLEVFSPKPPAPGPEPALGKPRKAAPEAESPIAPKEIFGAPALLFLLNNPLLFAVSWAFGAIKYS

SEQ ID NO: 9656 - protein, 499 aa, Azotobacter vinelandii
MQASNDTRSNYAPDSSYGLFIDNQWVAGENGETITILNPANGKTLTGIPNATAVDVDRAVQAAQRAFEAWRSTTPIERANALLKIADLLEADAERFAALESLDVGKPIRESSSVDIPLAIDHFRYFAGVIRSHSDEAVMLDEQTLSIVLSEPLGVVGQVIPWNFPLLMAAWKIAPAIAIGNTVVIKPSELTPVSILELAKIFAQVLPAGVVNIVTGTGASAGQALLDHPDVRKLAFTGSTSVGHRVADAAAKKLIPATLELGGKSANIVFPDANWDKAVEGAALAILWNQGQVCESGARLFVHESIYERFLDEVKQKFEAVRVGDPLHPDTMMGAQVSKTQMERILGYVDIAKQEGAKVLLGGGRLTGADYDAGFFIQPTILVDVRNDMRVAYEEIFGPVLCVIPFKDEADVIAMANDSEYGLAGAVWTQDINRALRVARAVETGRMWVNTYHEIPAHAPFGGYKKSGLGRETHKSILEAYSQKKNIYVSLNEAPLGLF

SEQ ID NO: 9657 - protein, 302 aa, Triticum aestivum
MKTLLILTILAMATTIATANMQVDPSGQVQWPQQQPFPQPQQPFCQQPQQTIPQPHQTFHHQPQQTFPQPQQTYPHQPQQQFPQTQQPQQPFPQPQQTFPQQPQLPFPQQPQQPFPQPQQPQQPFPQSQQPQQPFPQPQQQFPQPQQPQQSFPQQQQPAIQSFLQQQMNPCKNFLLQQCNHVSLVSSLVSIILPRSDCQVMQQQCCQQLAQIPQQLQCAAIHSVAHSIIMQQEQQQGVPILRPLFQLAQGLGIIQPQQPAQLEGIRSLVLKTLPTMCNVYVPPDCSTINIPYANIDAGIGGQ

SEQ ID NO: 9658 - protein, 278 aa, Corynebacterium sp.
MTVPSIVLNDGNSIPQLGYGVYKVPPADTQRAVEEALEVGYRHIDTAAIYGNEEGVGAAIAASGIARDDLFITTKLWNDRHDGDEPAAAIAESLAKLALDQVDLYLVHWPTPAADNYVHAWEKMIELRAAGLTRSIGVSNHLVPHLERIVAATGVVPAVNQIELHPAYQQREITDWAAAHDVKIESWGPLGQGKYDLFGAEPVTAAAAAHGKTPAQAVLRWHLQKGFVVFPGSVRREHLEENLDVFDFDLTDTEIAAIDAMDPGDGSGRVSGHPDEVD

SEQ ID NO: 9659 - protein, 180 aa, Triticum aestivum
  misc_feature (54)..(54): Xaa can be any naturally occurring amino acid
  misc_feature (73)..(73): Xaa can be any naturally occurring amino acid
  misc_feature (92)..(92): Xaa can be any naturally occurring amino acid
  misc_feature (96)..(96): Xaa can be any naturally occurring amino acid
  misc_feature (108)..(108): Xaa can be any naturally occurring amino acid
  misc_feature (116)..(116): Xaa can be any naturally occurring amino acid
  misc_feature (120)..(120): Xaa can be any naturally occurring amino acid
  misc_feature (126)..(126): Xaa can be any naturally occurring amino acid
  misc_feature (129)..(129): Xaa can be any naturally occurring amino acid
  misc_feature (137)..(137): Xaa can be any naturally occurring amino acid
  misc_feature (143)..(143): Xaa can be any naturally occurring amino acid
  misc_feature (150)..(150): Xaa can be any naturally occurring amino acid
MAPTVMASSATSVAPFQGLKSTAGLPVSRRSNGASLGSVSNGGRIRCMQVWPIXEGIKNSETLSYLPPLSTEXLLKQVDYLDPSKWVPCLRXSKVXSSSVEHNASPGXYYDGRYWXTMWXLPISGXTDXTQVINEVXKRSRRXPDAYSAXRFDNMRKCMRNSSPTTGSRIRKANSHHTGN

SEQ ID NO: 9660 - protein, 503 aa, Glycine max
  misc_feature (320)..(320): Xaa can be any naturally occurring amino acid
MVLSKTASETDVSVHSTFASRYVRTSLPRFKMAEESIPKEAAYQIIHDELMLDGNPRLNLASFVTTWMEPECDKLIMAAINKNYVDMDEYPVTTELQNRCVNMIAHLFNAPLEESETAVGVGTVGSSEAIMLAGLAFKRRWQNRRKLEGKPYDNPNIVTGANVQVCWEKFARYFEVELKEVKLRDGYYVMDPEKAVEMVDENTICVAAILGSTLNGEFEDVKLLNDLLVEKNKETGWDTPIHVDAASGGFIAPFLYPELEWDFRLPLVKSINVSGHKYGLVYAGIGWVIWRSKEDLPEELIFHINYLGADQPTFTLNFSXGSSQVIAQYYQLIRLGYEGYKMVMENCNDNMAVLKEGLEKTGRFEIISKDIGVPLVAFTLKDHTHFNEFQISDMLRRYGWIVPAYTMPPDAQHVTVLRVVIREDFSRTLAERLVIDVTKVVHELDLLPARVISTNTIMVTGEAGEENDEKVLFAKKSEIETQREITKAWKKFVMDRKKMNGVC

SEQ ID NO: 9661 - protein, 388 aa, Streptococcus pyogenes M1 GAS
MKNQLGQLALEQAKTFGGKLEVQPKVDIKTKHDLSIAYTPGVASVSSAIAKDKTLAYDLTTKKNTVAVISDGTAVLGLGDIGPEAAMPVMEGKAALFKAFAGVDAIPIVLDTKDTEEIISIVKALAPTFGGINLEDISAPRCFEIEQRLIKECHIPVFHDDQHGTAIVVLAAIFNSLKLLKKSLDEVSIVVNGGGSAGLSITRKLLAAGATKVTVVDKFGIINEQEAAQLAPHHLDIAKVTNREFKSGTLEDALEGADIFIGVSAPGVLKAEWISKMAARPVIFAMANPIPEIYPDEALEAGAYIVGTGRSDFPNQINNVLAFPGIFRGALDARAKTITVEMQIAAAKGIASLVPDDALSTTNIIPDAFKEGVAEIVAKSVRSVVLKS

SEQ ID NO: 9662 - protein, 135 aa, Zea mays
  misc_feature (31)..(31): Xaa can be any naturally occurring amino acid
PHPCARNASTLLLSPYMHFGELSVRKVFHQXNDSNHAGEESCTLFLCSIGLREYSRYLTFNHPCSHEKPLLSHLRFFPWVVNEVYFKVWRQGRTNYPLVDAGMRELRATGWVHDRIRVVVSSFFVKVLQGESCRV

SEQ ID NO: 9663 - protein, 165 aa, Streptococcus agalactiae
LETNTPETPDTPKIPELPQAPDTPQAPDTPHVPESPKAPEAPRVPESPKTPEAPHVPESPKAPEAPRVPESPKTPEAPHVPESPKAPEAPRVPESPKAPEAPRVPESPKTPEAPHVPESPKTPEAPKIPEPPKTPDVPKLPDVPKLPDAPKLPDGLNKVGQAVFT

SEQ ID NO: 9664 - protein, 197 aa, Nicotiana tabacum
MSAPRFIKCVTVGDGAVGKTCLLISYTSNTFPMDYVPTVFDNFSANVVVNGSTVNLGLWDTAGQEDYNRLRPLSYRGADVFILAFSLISKASYENVSKKWIPELKHYAPGVPIVLVGTKLDLRDDKQFFIDHPGAVPITTAQGEELRKTIGAPAYIECSSKTQQNVKAVFDAAIKVVLQPPKTKKKKGKSQKSCSIL

SEQ ID NO: 9665 - protein, 386 aa, Aspergillus nidulans FGSC A4
MATATVLEKPNIGVFTNPKHDLWVAESKPTLEEVKSGESLKPGEVTIEVRSTGICGSDVHFWHAGCIGPMIVTGDHILGHESAGDVIAVAPDVTSLKVGDRVAIEPNVICNACEPCLTGRYNGCEKVAFLSTPPVDGLLRRYVNHPAVWCHKIGDMSYEDGALLEPLSVSLAAVERSGLRLGDPCLITGAGPIGLITLLSARAAGATPLVITDIDEGRLKFAKELVPEVRTYKVEIGFSAEETAEGIINAFNDGQGAGPDALRPRIALECTGVESSVASAIWSVKFGGKVFVIGVGKNEMKIPFMRLSTQEIDLQYQYRYCNTWPRAIRLVKNGVINLQKLVTHRYALEDALKAFETAANPKTGAIKVQIMSSTADVEAASAGQKN

SEQ ID NO: 9666 - protein, 320 aa, Erwinia carotovora subsp. atroseptica SCRI1043
MIRRIGVLTSGGDAPGMNAAIRGVVRAALSEGLEIYGIYDGYQGLYEDRMEQLDRYSVSDVINRGGTFLGSARFPQFRDEAVRQVCVENMQRRGLDALVVIGGDGSYMGAKRLTEMGFPCIGLPGTIDNDVAGTDYTIGYFTALETVLEAIDRLRDTSSSHQRISIVEVMGRHCGDLTLAAAIAGGCEFIVLPEVPFSPEDLVSEIKAGIEKGKKHAIVAITELVCDVDELAKYIEKETGRETRSTVLGHIQRGGSPVAYDRILASRMGAYSIELLQQGYGGRCVGIQNEKMVHHDIVDAIENMKRPFKGDWLETAKKLF

SEQ ID NO: 9667 - protein, 129 aa, Streptococcus agalactiae
LETNTPETPDTPKIPELPQAPDTPQAPDTPHVPESPKAPEAPRVPESPKTPEAPHVPESPKAPEAPRVPESPKTPEAPHVPESPKTPEAPKIPEPPKTPDVPKLPDVPKLPDAPKLPDGLNKVGQAVFT

SEQ ID NO: 9668 - protein, 459 aa, Amycolatopsis methanolica
MTLHLDDLRVRLLGECRYDSPFAEVLSTKRTSPHYVAEGDRVLLEDTVAMLAEHSLPSVQAPSFEAAGPRRKIYFDPARVTAGIVTCGGLCPGLNNVIRGLVQELSVHYRVKRIVGFRNGPGLTAAHRDDTVELTPEVVRDIHNLGGTILGSSRGGQDADEMVETLALHGVDVMFVIGGDGGMRAATFLSGAIRARGLDIAVIGVPKTIDNDLPFTDQSFGFQSAFARATDFISAVSVEAAASPNGVGIVKLMGRHSGFIAAYAALAANSADVVLIPEVPFALDGDDGLLAHVERLVRAKGFAVVVVAEGAGQDLFDAHGLPQLNGRGTDASGNVKLGNIGELLRTSIEAHLTAAGLAPTMRYIDPSYAIRSIPANAYDSVYCLRLAHAAVHAAMAGRTEAAVARWRRRFVHVPFSLMTRRRNQVDPDGDLWMSVLETTCQPAEFGAVAARERISSGFC

SEQ ID NO: 9669 - protein, 372 aa, Bacillus cereus G9241
MKAEEKFSPGLDGVVAAETKISFLDTVKGEIVIQGYDLIELSKTKEYLDIVHLLLEEHLPNEDEKATLERKLKEEYAVPEGVFNVLKALPKETHPMDGLRTGVSALAGYDNDIENRSLEVNKSRGYKLLSKVPNIVANSYHILNNEEPIEPLKELSYSANFFYMLTGKKPTELEEKIFDRSLVLYSEHEMPNSTFTARVIASTQSDLYGALTGAVASLKGSLHGGANEAVMYMLLEAGNVEKFEELLQKKLYNKEKIMGFGHRVYMKKMDPRALMMKEALKQLCDVKGDYTLYEMCEAGEKIMEKEKGIYPNLDYYAAPVYWMLGIPIQLYTPIFFSSRTVGLCAHVIEQHTNNRLFRPRVNYIGERHVLSQ

SEQ ID NO: 9670 - protein, 365 aa, Saccharomyces exiguus
MAQTTKHIVVLPGDHVGQEITEEAIKVLNAISSVRPNVNFDFQHHLIGGAAIDATGVPLPDEALEASKKADAVLLGAVGGPKWGTGSVRPEQGLLKIRKELQLYANLRPCNFASDSLLDLSPLKPEIVKGTDICIVRELVGGIYFGERKEDEGDGVAWDSEKYSVSEVQRITRMAGFLALQHNPPLPVWSLDKANVLASSRLWRKTVEETIKNEFPTLTVQHQLIDSAAMILVKNPTHLNGVVIANNMFGDIISDEASVIPGSLGLLPSASLASLPDTNTAFGLYEPCHGSAPDLPKGKVNPVATILSVAMMLKLSLNMTEEGIAVEKAVKQVLDSGVRTADLRGSNSTSEVGDAIAKAVKEILA

SEQ ID NO: 9671 - protein, 319 aa, Escherichia coli K12
MKPENKLPVLDLISAEMKTVVNTLQPDLPPWPATGTIAEQRQYYTLERRFWNAGAPEMATRAYMVPTKYGQVETRLFCPQPDSPATLFYLHGGGFILGNLDTHDRIMRLLASYSQCTVIGIDYTLSPEARFPQAIEEIVAACCYFHQQAEDYQINMSRIGFAGDSAGAMLALASALWLRDKQIDCGKVAGVLLWYGLYGLRDSVTRRLLGGVWDGLTQQDLQMYEEAYLSNDADRESPYYCLFNNDLTREVPPCFIAGAEFDPLLDDSRLLYQTLAAHQQPCEFKLYPGTLHAFLHYSRMMKTADEALRDGAQFFTAQL

SEQ ID NO: 9672 - protein, 183 aa, Triticum aestivum
  misc_feature (92)..(92): Xaa can be any naturally occurring amino acid
MSDEAASPPGGGGGGGGGGSDDGGGGGGFGGVREQDRFLPIANISRIMKKAIPANGKIAKDAKETVQECVSEFISFITSEASDKCQREKRKXTINGDDLLWAMATLGFEEYIEPLKVYLQKYRETEGDSKLAGKSGDVSVKKDALGPHGGASGTSAQGMGQQVAYNPGMVYMQPQYHNGDMSN

SEQ ID NO: 9673 - protein, 202 aa, Saccharomyces bayanus
MATNITWHPNLTYDERKELRKQDGCTVWLTGLSASGKSTIACALEQLLLQKNLSAYRLDGDNIRFGLNKDLGFSEQDRNENIRRISEVSKLFADSCAVSITSFISPYRVDRDRARDLHKEAGLKFIEIFVDVPLEVAEQRDPKGLYKKAREGVIKEFTGISAPYEAPKAPELHLRTDQKTVEECAAIIYEYLVNEKIIRKHL

SEQ ID NO: 9674 - protein, 268 aa, Populus alba x Populus tremula
MGQQSLSLLFSLILFFLHCTKTLGQSPAAAPVMPPPTTPVKAPPTAPSQAPSAQVATSPGPVDVIKILQKAGHFTVFVRLMQATTEDTELNKELNKTNNGITIFAPSDNAFSSLKAGFLNALSDEDKTELVKFHVLPAFISSSQFQTVSNPVRTQAGTGPRVTLNVTTTGNFVNITTGLTNASISGTVYTDSQLAIYQIDKVLFPLDIFTPKPPAPAPAPELGKPRKAAPGVESPTAPKDTSDALTPLILHNNALLLAVSCMVAAIFS

SEQ ID NO: 9675 - protein, 812 aa, Zea mays
MAQILLHGTLHATIFEAESLSNPHRATGGAPKFIRKLVEGIEDTVGIGKGTTKIYATVDLEKARVGRTRMVSNEPVNPRWYESFHIYCAHMAADVVFTVKIDNPIGASLIGRAYLPVEDILGGDEIDKWLEICDEKREPIGDSKIHVKLQYFDVGKDRNWARGVRSTKYPGVPYTFFSQRQGCKVTLYQDAHVPDNFVPRIPLADGKNYEPHRCWEDIFDAISKAQHLIYITGWSVYTEITLVRDTSRPKPGGDVTLGELLKRKASEGVRVLMLVWDDRTSVGLLKKDGLMATHDEETANYFHGTDVNCVLCPRNPDDSGSFVQDLQISTMFTHHQKIVVVDHELPNEGSQQRRIVSFVGGIDLCDGRYDTQYHSLFRTLDTVHHDDFHQPNFEGGSIKKGGPREPWHDIHSRLEGPIAWDVLYNFEQRWRKQGGKDLLVRLRDLSDIIIPPSPVMFPEDRDTWNVQLFRSIDGGAAFGFPETPDEAARAGLVSGKDQIIDRSIQDAYINAIRRAKNFIYIENQYFLGSSYDWKPEGIKPEDIDCLHLIPKELSLKIVSKIEAGERFTVYVVVPMWPEGVPESASVQAILDWQRRTMDMMYTDITQALEANGIQANPKDYLTFFCLGNREVKQEGEYQPEEHPEPGTDYIRAQEARRFMIYVHAKMMIVDDEYIIIGSANINQRSMDGARDSEIAMGAYQPYHLATRQPARGQIHGFRMSLWYEHLGMLDDVFQRPESVECVQKVNKIAEKYWDLYSSDDLEQDLPGHLLSYPIGVTADGTVTELPGMENFPDTRARVLGNKSDYLPPILTT

SEQ ID NO: 9676 - protein, 445 aa, Triticum aestivum
MAAAGGKGGPRRTTRVGPYELGKTVGEGSFAKVKIAKDTRNAATCAIKVLDRNHVLRHKMVEQIKREIATMKLIRHPNVVQLHEVMASKSKIYMVLEFVEGGELFDKIVNSGKLGEDEARRYFHQLINAVDYCHSRGVYHRDLKPENLLLDSYGALKVSDFGLSAFSPQTKEDGLLHTACGTPNYVAPEVLADKGYDGMAADVWSCGIILFVLMAGYLPFDDPNLMTLYKLITRANVSCPPWFSTGARNLIKRILDPNPHTRITISQILEDEWFKKDYKPPHSEHNEDVSLEDVDAAFDSSEEHLVAERREKPESMNAFALISRSEGFNLGNLFEKEMMGMVKRETSFASQRTPQEIMSKIEEACGPLGFNVRKQNYKMKLKGDKTGRKGHLSVATEVFEVAPTLHMVELRKTGGDTLEFHSFYKNFSSELKDIVWKTESNTIAK

SEQ ID NO: 9677 - protein, 132 aa, Methanocaldococcus jannaschii DSM 2661
MPGTKQVNVGSLKVGQYVMIDGVPCEIVDISVSKPGKHGGAKARVVGIGIFEKVKKEFVAPTSSKVEVPIIDRRKGQVLAIMGDMVQIMDLQTYETLELPIPEGIEGLEPGGEVEYIEAVGQYKITRVIGGK

SEQ ID NO: 9678 - protein, 262 aa, Populus alba x Populus tremula
MEFSMIIVLCSTLLFSCTPLAYAQKVASPPAPTPTPSPAPAPSPPYVNLTDLLSVAGPFQNFLNYLESTKVIDTFQNQANNTDEGITIFVPKDDAFKNLKKPSLSNLTQDQLKQLILFHALPHYYSLSDFKNLSQVSPVSTFAGAGRYALNFTDTSGTVQLDSGWSKTKVSSSVHSTDPVAVYQVDKVLLPEAIFGTDIPPTPAPAPAPDTSPAADSPTSDDSAGAGSAPGKSTPNSSYRINGVGIWSQLVLAIAGVLVLFL

SEQ ID NO: 9679 - protein, 349 aa, Streptococcus pyogenes M1 GAS
MKAATYLSTGNLQLIDKPKPVIIKPTDAIVQLVKTTICGTDLHILGGDVPACKEGTILGHEGIGIVKEVGDAVTNFKIGDKVIISCVTSCHTCYYCKRGLSSHCQDGGWILGHLINGTQAEYVHIPHADGSLYHAPDTIDDEALVMLSDILPTSYEIGVLPSHVKPGDNVCIVGAGPVGLAALLTVQFFSPANIIMVDLSQNRLEAAKTFGATHTICSGSSEEVKAIIDDITNGRGVDISMECVGYPATFDICQKIISVGGHIANVGVHGKPVDFNLDELWIKNITLNTGLVNANTTEMLLNVLKTGKIDATRLITHHFKLSEVEKAYETFKHAGANNALKVIIDNDIS

SEQ ID NO: 9680 - protein, 373 aa, Arabidopsis thaliana
MWLPKLKYGHRDSSECKRLECFLDKNLPLHRAPVIESFRLYLIDSKCTPENIKMWVVIAVSHCLRELEVIYSSYPEKPNILPSNLYTCKSLVILELCGEIRLDVPRMAFLPSLKTLQLHSVRYLNEDSLHRLLSNCPVLEDLLVDLLLSDSMEKLTVVVPSLQILSLFIPHSYEIDGIVIETPSLKYFKLIDHNSKSHYCLVKNMPNLIEADIDVELHSIKSLIGSITSVKRLSICSQAMYDGGFVFNQLKHLKLCRCKGHSSDLLVRLLKDSSNLQALDLSEMDYHENHDILYWHQPSTVPECMLLSLQTLNLSAYRGTPEERDLAVYFLKNAVHLKTTTIKSCVFDDERFDMLKELALSSRASTTCQLVFD

SEQ ID NO: 9681 - protein, 452 aa, Zea mays
  misc_feature (136)..(136): Xaa can be any naturally occurring amino acid
  misc_feature (152)..(152): Xaa can be any naturally occurring amino acid
  misc_feature (164)..(164): Xaa can be any naturally occurring amino acid
MGEGEAEVKGGVLQGRYELGRVLGHGNFGRVHAARDLRTGRAVAVKVLDKDKMLRTGMMEQIKREIAVMKRVSHPNIVELHEVMATRSKIYLALELVRGGELFARIVRAGRVKEDVARRYFRQLIHAVDFCHARGXVYHRDLKLENLLLDDXGTLKVVDFGLSXWADHARSDGLLHTLCGTPGYVAPEVFRNKGYDGAKADIWSCGVILYVLLAGSLPFPDDNVAAMFRKMSRGDYRCPPWLSTEARRLIPKLLDPDPDTRITIAQLVETPWFNKPSVSRSVRAAAAASGATEPPAEPASSAKDGGDKDEPPETMNAFHLISLSAGFDLSPLFDVEGGPARGPREGGMRFATREPASGVVSRLEEVAARGGGRMRVTKSGARGVRLEGAERGGRKGRLAVAADIFCVAPSVLVVDVKKDGGDSLEYRSFCSEELRPALKDIVWAADPQPAVV

SEQ ID NO: 9682 - protein, 472 aa, Zea mays
ATVGPRVIVVGAGMSGISAAKRLSEAGITDLLILEATDHIGGRMHKTNFAGINVELGANWVEGVNGGKMNPIWPIVNSTLKLRNFRSDFDYLAQNVYKEDGGVYDEDYVQKRIELADSVEEMGEKLSATLHASGRDDMSILAMQRLNEHQPNGPATPVDMVVDYYKFDYEFAEPPRVTSLQNTVPLATFSDFGDDVYFVADQRGYEAVVYYLAGQYLKTDDKSGKIVDPRLQLNKVVREIKYSPGGVTVKTEDNSVYSADYVMVSASLGVLQSDLIQFKPKLPTWKVRAIYQFDMAVYTKIFLKFPRKFWPEGKGREFFLYASSRRGYYGVWQEFEKQYPDANVLLVTVTDEESRRIEQQSDEQTKAEIMQVLRKMFPGKDVPDATDILVPRWWSDRFYKGTFSNWPVGVNRYEYDQLRAPVGRVYFTGEHTSEHYNGYVHGAYLSGIDSAEILINCAQKKMCKYHVQGKYD

SEQ ID NO: 9683 - protein, 387 aa, Zea mays
  misc_feature (237)..(237): Xaa can be any naturally occurring amino acid
  misc_feature (269)..(269): Xaa can be any naturally occurring amino acid
  misc_feature (288)..(288): Xaa can be any naturally occurring amino acid
IKREISTLKLIKLPNVVQLHEVMASRTKIYMVLEFVDGGELFDKIVNSGRLGEDEARIYFHQLINAVDYCHSRGVYHRDLKPENLLLDSHGTLKVSDFGLSAFAPQTKEDGLLHTACGTPNYVAPEVLADKGYNGMAADVWSCGIILFVLMAGYLPFDDANLMRLYKLICHATFSCPPWFSSGAKKFIKRILDPNPDTRITIAEILEDEWFKKDYKPPRFEQGEGVSLDDIDAAFKXSEDRLVAEKREKPGCMNAFALISRSQGFNLGXNLFEKEMMGMVKRETFFTXQCTAQEIMTKIEDACGPLGFNVRKQNYKMKLKGDKSGRKGHLSVATEVFEVAPSLHMVELRKTGGDTLEFHSFYKNFSSELKDIVWKAESDANNKQTNK

SEQ ID NO: 9684 - protein, 161 aa, Pseudomonas fluorescens PfO-1
MSDNLLNIPCTTIKGEQKTLADFAGKAVLVVNTASKCGFTPQYKGLEELWQTYKDQGLVVLGFPCNQFGKQEPGNEGAISEFCELNYGVSFPLFKKIEVNGTGAHPLFVQLKKRAPGVLGSQGIKWNFTKFLIGKDGQLVKRFAPATKPQDLSREIEALLK

SEQ ID NO: 9685 - protein, 475 aa, Staphylococcus aureus subsp. aureus COL
MRDYTKQYINGEWVESNSNETIEVINPATEEVIGKVAKGNKADVDKAVEAADDVYLEFRHTSVKERQALLDKIVKEYENRKDDIVQAITDELGAPLSLSERVHYQMGLNHFVAARDALDNYEFEERRGDDLVVKEAIGVSGLITPWNFPTNQTSLKLAAAFAAGSPVVLKPSEETPFAAVILAEIFDKVGVPKGVFNLVNGDGAGVGNPLSEHPKVRMMSFTGSGPTGSKIMEKAAKDFKKVSLELGGKSPYIVLDDVDIKEAAKATTGKVVNNTGQVCTAGTRVLVPNKIKDAFLAELKEQFSQVRVGNPREDGTQVGPIISKKQFDQVQNYINKGIEEGAELFYGGPGKPEGLEKGYFARPTIFINVDNQMTIAQEEIFGPVMSVITYNDLDEAIQIANDTKYGLAGYVIGKDKETLHKVARSIEAGTVEINEAGRKPDLPFGGYKQSGLGREWGDYGIEEFLEVKSIAGYFK

SEQ ID NO: 9686 - protein, 356 aa, Triticum aestivum
  misc_feature (60)..(60): Xaa can be any naturally occurring amino acid
  misc_feature (117)..(117): Xaa can be any naturally occurring amino acid
  misc_feature (159)..(159): Xaa can be any naturally occurring amino acid
  misc_feature (291)..(291): Xaa can be any naturally occurring amino acid
MKTLLILTILAMAITIGTANIQVDPSGQVQWPQQQLVPQPQQPLSQQPQQAFPQPQQTFXPHQPQQQVPQPQQPQQPFLQPQQPFPQQPQQPFPQTQQPQQPFPQQPQQPFPQTQQXQQPFPQQPQQPFPQTQQPQQPFPQQPQQPFPQPQQPQQPFPXLQQPQQPFPQPQQQFPQPQQPQRSFPQQQRPSFQPSLQQRLNPCKNILLQQCKPASLVSSLWSIIWPQSDCQVMRQQCCQQLAQIPQQLQCAAIHSVVHSIIMQQQEQEQEQEQEQEQQQQQGMRIFFPLSXQQQVGQGTLFQGQGIIQPQQPAQFGGDQVIGVGKTLPSICNVYVPPECSIIRAPFASIVAGIGGQ

SEQ ID NO: 9687 - protein, 135 aa, Streptococcus agalactiae
LETNTPETPDTPKIPELPQAPDTPQAPDTPHVPESPKAPEAPRVPESPKTPEAPHVPESPKAPEAPRVPESPKTPEAPHVPESPKTPEAPKIPEPPKTPDVPKLPDVPKLPDVPKLPDAPKLPDGLNKVGQAVFT

SEQ ID NO: 9688 - protein, 471 aa, Oryza sativa (japonica cultivar-group)
MAAAAPPTGKKRRFERSSSQEPPGSGGLDLISGLPDAILGEIISLLPTKYGARTQLVSRRWRPLWRSAPLNLDVYDLSGQERKRVALASKILAEHPGPARRFSLHCFRLRGRHAKLDGWLRSRALADLRELSFSYEVEREAQAQAYPLPPSALRFAPTLVVLYLSSCGFPDEMPPTLHFPRLKQLTLCSVAISEDAIHGVLSRCPALESLLLQGNFGVRRLRINSASLRSFGFYSKSWGFSSASWNGFAGAELQEVVIEDAPCLERLLPLCPNDGVAAIRVIAAPKLEIMGPLSDGISQLHLGTTIFQEMTAVSLTTSMRSVKVLVLDSDGPNLDAVVDFLSCFPCLERLYIASQPFKVIKNTRRYDPLNPIECIQFHLKKVVIRNYGGRRSDVDFAKFFVLNAKALREMELAGLNNCNQKWLANQHRRLQLEKKASQNAQFTFKTTHTSDFSMNKHTHDLSISDPFDRSL

SEQ ID NO: 9689 - protein, 355 aa, Oryza sativa
MRGKKPHKELKLSVPAQETPVDKFLTASGTFKDGELRLNQRGLQLISEETADEPQSTNLKVEDVQLSMDDLEMIQVIGKGSGGIVQLVRHKWVGTLYALKGIQMNIQEAVRKQIVQELKINQATQNAHIVLCHQSFYHNGVIYLVLEYMDRGSLADIIKQVKTILEPYLAVLCKQVLEGLLYLHHERHVIHRDIKPSNLLVNRKGEVKITDFGVSAVLASSMGQRDTFVGTYNYMAPERISGSSYDYKSDIWSLGLVILECAIGRFPYIPSEGEGWLSFYELLEAIVDQPPPSAPADQFSPEFCAFISSCIQKDPAERMSASELLNHPFIKKFEDKDLDLRILVESLEPPMNISE

SEQ ID NO: 9690 - protein, 141 aa, Streptococcus agalactiae
LETNTPETPDTPKIPELPQAPDTPQAPDTPHVPESPKAPEAPRVPESPKTPEAPHVPESPKAPEAPRVPESPKTPEAPHVPESPKTPEAPKIPEPPKTPDVPKLPDVPKLPDVPKLPDVPKLPDAPKLPDGLNKVGQAVFT

SEQ ID NO: 9691 - protein, 245 aa, Arabidopsis thaliana
MENEREKLIYLAKLGCQAGRYDDVMKSMRKVCELDIELSEEERDLLTTGYKNVMEAKRVSLRVISSIEKMEDSKGNDQNVKLIKGQQEMVKYEFFNVCNDILSLIDSHLIPSTTTNVESIVLFNRVKGDYFRYMAEFGSDAERKENADNSLDAYKVAMEMAENSLVPTNMVRLGLALNFSIFNYEIHKSIESACKLVKKAYDEAITELDGLDKNICEESMYIIEMLKFNLSTWTSGDGNGNKTDG

SEQ ID NO: 9692 - protein, 145 aa, Sesbania rostrata
EIATIPPAVNQVEMNPSWQQGNLREFCKQKGIHVSAWSPLGAYKIFWGSGAVMENQILQDIATAKGKTIAQVALRWVYQQGSSAMAKSFNKERMKQNLEIFDFELSEEELEKIKQIPQRRQYTGDMWLSENGSCKTLEELWDGDV

SEQ ID NO: 9693 - protein, 443 aa, Ralstonia solanacearum
MDRSHKERVMSREPEVKALQQEWDTNPRWKGIKRGYTAQDVVRLRGSLQIEHTLARRGAEKLWTLMNSEPFVNALGALTGNQAMQQVKAGLKAIYLSGWQVAGDANSNGEMYPDQSLYSVDSVPKVVKRINNTFQRADQIQWSEGKDDVDFFAPIVADAEAGFGGVLNAFELMKAMIEAGAAGVHFEDQLAAVKKCGHMGGKVLVPTREAVSKLVAARLAADVMGVPTVLIARTDAEAADLLTADVDDNDRPFCTGERTVEGFYRTKPGLQQAIARGLAYADYADLVWCETGKPDLEYAKKFAEAIHAKFPGKMLAYNCSPSFNWKKNLDDATIAKFQKELGAMGYKFQFITLAGFHALNYSMFNLAHGYARNQMSAFVELQEAEFAAAEKGFTAVKHQREVGTGYFDAVTQTIERDASTTALKGSTEDEQFFEEKAHAKKVA

SEQ ID NO: 9694 - protein, 290 aa, Pyrobaculum aerophilum str. IM2
MEIKMAEAGDVALRKYGTAMPQEALRLADAADVIFKGPIGESAYDVTSLIRMRYTLYANIRPVKNLPGVPAVREIDCVFVRENVEDVYVGAEYKVGDVAIALKVITEKGTRRVARMARKYAEMRRRRVTIVHKANVLRVVDGFFRDIALEELKGLEVDQMYVDAAAMELVRNPKRFDVVLTMNQYGDILTDLAAQVAGGIGLAPSGNIGDAKAMFEPVHGAAFDIAGKGVANPIATILSAAMMFEWMGRGDVAEKIRGAVEKSIEAGVKTPDIGGDKSTIEVGKFIASIL

SEQ ID NO: 9695 - protein, 254 aa, Glycine max
MTMHRESWAFVFGVMGNIISFGVFLAPLPTFYQIYKKKSTEGFQSLPYVVALFSAMLWIYYAFVKRETALLLITINTFGIVVESIYLSIFLIYAPRKPRLTTIKLLLLLNVFGFGAMLLSTLYLSKGAKRLAIIGWICLVFNISVFAAPLFIIRRVIKTRSVEYMPFTLSMFLTINAVMWFFYGLLLRDYYVALPNTLGFVFGIIQMVMYLMYRNATPVALEEPVKAQELNGHIIDVVKIGTMEPNHGGAVGKV

SEQ ID NO: 9696 - protein, 506 aa, Caulobacter crescentus CB15
MTKPEFIESLSRPPFKARYDNFIGGQWVAPADGRYFDNSSPIHGRKICEIARSQAIDIERALDAAHAAKAGWARTSAADRSRILLRIADRMEENLAALATAETWDNGKPIRETLAADIPLAIDHFRYFAGCLRSQEGSISEIDHDTIAYHFHEPLGVVGQIIPWNFPLLMACWKLAPALAAGNCVVLKPAEQTPASIMVWAEMIGDLLPAGVLNIVNGFGLEAGKPLASSPRIAKIAFTGETSTGRLIMQYAAQNLIPVTLELGGKSPNIFFDDVAREDDDYLDKALEGFTMFALNQGEVCTCPSRALVQESIYEKFMERALKRVNAVVQGSPLDPATMIGAQASEEQLNKILGYMDIGRNEGAKLLAGGQRKILPGQLADGYYVEPTVFEGHNKMRIFQEEIFGPVLAVTTFKTEEEALEIANDTAFGLGAGVWSRDANRCYRFGRGIEAGRVWTNCYHAYPAHAAFGGYKQSGVGRETHKMMLDHYQQTKNMLVSYSPKALGFF

SEQ ID NO: 9697 - protein, 161 aa, Escherichia coli
MKNKSGNSYYREAVDIHSSLELSFILHKYHLRVDEKKSRNVFSAIRDELILDGDSRQNLATFCQTWIDDEIRELLNLSIDRNMIYKDEYPQMAEPEGRCVRMLSDSWSFPDSRHTLGCSTIGSSEAAMLGRLALKWQWCKKREVQGKSTEPDLRSCANMLA

SEQ ID NO: 9698 - protein, 188 aa, Chloroflexus aurantiacus
MFVSTIPTTRSGLVVWFTGLSGAGKTTLARALATLLQEAGYPVEQLDGDVVREHLSKGLGFSREDRDTNIRRIGFVANLLAKHGVIVLVSAISPYRETRAEVLAAAPRKLEVFVEAPLDVLIQRDVKGLYAKALRGEIAQFTGISDPYEPPLHPDVHLRTDLMSLPECLDHLLAALERLDIVVKVSHQ

SEQ ID NO: 9699 - protein, 303 aa, Zea mays
  misc_feature (106)..(106): Xaa can be any naturally occurring amino acid
  misc_feature (118)..(118): Xaa can be any naturally occurring amino acid
  misc_feature (169)..(169): Xaa can be any naturally occurring amino acid
FAGLGSDRFLDPPSGRASTDFIIHSPAKPICFVCRSIRRSCEFNPRVSMSSYSPPPPLPPRDQSMDTEAPNAPITRERRLNPDLQEQLPKPYLARALEAVDPSHPXGTQRGRDPRGMXSVLQQHAAFFDRNGDGVIYPWETFQGDRWCSFLSGLRAIGCGLTVSFACCXLINLFLSYPTQPGWLPSPLLSIRIDNIHKGKHGSDSETYDTEGRFDPSKFDAIFSKYGRTHPNALTKDELSSMLQGNRNTYDFLGWLAAAGEWLLLYSLAKDKDGLLQRETVRGLFDGSLFERLEDDNNKKKSS

SEQ ID NO: 9700 - protein, 183 aa, Halobacterium sp. NRC-1
MATGPRYKVPMRRRREVRTDYHQRLRLLKSGKPRLVARKSNKHVTAQLVTTGPDGDETVASAHSSDLDAYGWAAPTGNLPAAYLTGLLAGQRAVDAGVEEAVLDIGLNTATPGSKVFAIQEGAIDAGLDVPHNDSVLADWSRTRGEHIAEYAESLDEPLYSGDFDATALPAHFDETREAIMED

SEQ ID NO: 9701 - protein, 161 aa, Oryza sativa
MSDSEEHHFESKADAGASKTYPQQAGTIRKTGHIVIKNRPCKVVEVSTSKTGKHGHAKCHFVAIDIFNGKKLEDIVPSSHNCDVPHVNRTDYQLIDISEDGFVSLLTESGGTKDDLRLPSDEALLTQIKDGFAEGKDLIVTVMSAMGEEQICALKDIGPKN

SEQ ID NO: 9702 - protein, 279 aa, Pyrobaculum aerophilum str. IM2
MASVDDIVDLLARVRERSRGLLINLEGKYTAVGDLHGDLATLELVLKEWEGPYLFLGDYVDRGDKGLEVVTTVFQLYLEGKAAVLRGNHESPIMNIEGGFLDELCEKLGRKCGYVYKEFEKTFATLPLAAVVNRKIVALHGGIPLREDMTPATLAELEKIEGDLTAPQNPLAFQTLWNDPCPCDKYSPSPRGPGIWLFGRDVTREFHKLHNTAVVIRGHTYVPQGCAVHHGGGVVTVFSSSAGPYQKTKPKVALVKNGVEVYDAATKNSAKCPEDVDVF

SEQ ID NO: 9703 - protein, 240 aa, Populus alba x Populus tremula
MVPKFLFSASFVLFFLLHCPPALAQSPAAAPAPPGPINVTKVLEKGGQFSVFIRLLKATQEDVTLNGQLNNTNNAITIFAPSDSAFSSLKSGTLNSLSDQEKAELVQFHIIPQFLSSSLFQTVSNPLTTQAGSGGRLELNVTTTGNSVNITTGLTNTSVSGTIYTDNQLAVYQVDKVLLPLDIFTPKPPTPAPAPEKPKKRSKAAASPESPADTSGAVSFTVLNNVVFFGVCMVAAIYSL

SEQ ID NO: 9704 - protein, 199 aa, Triticum aestivum
KLVGGSLSEHSYLFLGAGEAGTGIAELIALEISRQTKAPIEECRKKIWLVDSKGLIVSSRKETLQHFKKPWAHEHEPVGNLLDAVKTIKPTVLIGTSGKGQTFTQEVVEAISSFNERPVIFALSNPTSQSECTAEQAYTWSKGRAVFASGSPFDPVEYDGKIYVPGQANNAYIFPGFGLGVVMSGAIRVHDDMLLAASE

SEQ ID NO: 9705 - protein, 337 aa, Magnaporthe grisea 70-15
MSPSTESNPVPPYPLHPSVASRINPEYAAFYNAHIADKQQVHLQPIAASRSSGVLIPGAGPLLPVGSTQDYTIPRTASSGPDVRVRVFTPPGARPASGWPGCVYFHGGGWVLGTIDTENVVCSNLCARGGAVVVTVDYRLAPEDPFPAAVDDCWEAVRWVVARGPELLGLDLGRLATGGSSAGGNLAAVMCQRAAVVADHPPFRLQLLSVPVADNTATAETTPSWRENEHTPALPAPKMLWYRRHYLPRESDWAHPEASPLLWDGDWSRLPRAVIVCGELDVLRDEGVAFGDRLNKAGVRADVHVLEGQPHPFLAMDGVLEDGRRAITYFCEALKEL

SEQ ID NO: 9706 - protein, 175 aa, Triticum aestivum
  misc_feature (90)..(90): Xaa can be any naturally occurring amino acid
MGPTVMASSVTSVAPFQGFKSTAGLPVSRRSNGASLGSVSNGGRIRCMQVWPIKGIKKFEILSYLPPVSTEALLKQVDYLIRSKWVPCLXFSKVGFIFREHNASPGYYDGRYWTMWKLPMFGCTDATQVINEVEEVKKEYPDAYVRIIGFDNMRQVQCVRFIAFKPPGCKESGKA

SEQ ID NO: 9707 - protein, 125 aa, Glycine max
ACSMISSPSVTTVNRACAGMFAPFTGLNSIAGFPIMNTNTDITSIASNGGRVQCMQVWPPVCKKKCETLSYLPDLDDAQSAYEVQHHLMNGWITCLECQLEHCFVYRVHYMSPVYYDGLYWTIWN

SEQ ID NO: 9708 - protein, 286 aa, Zea mays
MAALPPAAEDPDAVEIREVWASNLEEEFAVIRAVVDVYPYVAMDTEFPGFVVTPSAEYRFTCDRNYAALEGNVNVLKLIQLGLTLSNGAGALPPCGTGGRRCIWQFNFRGFDPHTDPSSSDSIDLLRRSGIDFDLFAAEGVDSTRFAELMMSSGVVLNDDVQWVTFHSGHDFGYLLKLLTGREMPNTLDEFLKLTKTFFPVMYDIKHLMKFCGGGLYGGLSKLGELLKIERVGISHQAGSDSLLTLQCFMKLKQLYLKESVKLYDGVLFGLIPGEVEIKPVAPPIE

SEQ ID NO: 9709 - protein, 127 aa, Thermobifida fusca
MPTGKVKWYDAGKGFGFLTKDDGGEVFLHASALPPGTTTLRPGQRVEFGIVEGRKGTQALQVRLLDTPPSVAKALRKKPDEMVVIIEDLIKLLDNVSNTYRRNKYPDRREATKIAKVLRALADDIEL

SEQ ID NO: 9710 - protein, 163 aa, Agrobacterium tumefaciens str. C58
MSVSFKNPAHLLPRRVFAFLAIWLSFYPSSLRRCAVQRNLTLRPFQPTYFAIDICLTTRASASFQTLTTIFSFKFDPSPHCLQCKYNCQRKEIVMATGTVKWFNATKGYGFIQPDDGSQDVFVHISAVERAGLTALNDGQKLSYELMQDRRSGKMSAGELVAS

SEQ ID NO: 9711 - protein, 336 aa, Thermoplasma acidophilum
MKAALLEKLNQPLSIVDREIPEPGENEVVIKQDYAGLCYRDILSATGFFPRIQLPIIPGHEIGGTVVKTGSEVRNFHVGDHVASLIYIPCGKCEYCRSGNENLCPYKKSIGEEVQGGFREYVNVPEISLISAPKEVDTRYLPIASCVTGMIYHALFKLAKVKEGQRVLITGAGGGVGSNAVQMAKAFGATVIAETTSESKKEMLEKIGADYIVDGNGKFNEDVKKIGGADIVLECVGIHTFERSLRSLNNGGKMIVIGNIKPDPVNLPLGLIILKGNTIRGSISSTRKDVSDALKMVAENRIKPVIGSEVSIDRINEAMEMMKNKQTEGRVLIKFS

SEQ ID NO: 9712 - protein, 306 aa, Triticum aestivum
VRKATSGRSNPSGRRRGEGGTSRLACGRVRLSARHAETARAPMPPPRRAGAGDTSAFFAATLVLWAVSVGFEIGARGRRELAAVAAGFAFFQAANTAVRAAVSRDPLFVNTAVSLLHSSLTSASVIFVLLCQWRTKGLENMFQHEELVGSSWIGAYSALCFSCGYFAYDQLDTLRYRLYSGWIPGILMLHLFLLICFTLALYRNETINYLILTLLKLRRMAGFRDFNRKLVKLEWVLNWTTFVTARVICHILITYRLITDAHKFDKGIELPLALSGMAGMNVLNVSLGLDLFKAFARERNQQTHQD

SEQ ID NO: 9713 - protein, 257 aa, Triticum aestivum
MSSGVGGNRRRRGRRWAQVDPGVHITAHGLAQGGNDLKRIRFSREMFNKWQAQRWWAENYDKVMELYNVQRFNHQSVPLPTTPKSEDESSKEDSPVTPPLDKERVPRSLQRPTSGGGAMGYSSSDSLEHHSNHYCNGLHPHHGHQCYDSVGLASTPKLSSISGAKTETSSMDASMRTSSSPEEVDRSGELSVSISNASDQEREWVEEDQPGVYITIRALPGGIRELRRVRFSREKFSEMHARLWWEENRARIHEQYL

SEQ ID NO: 9714 - protein, 47 aa, Zea mays
YEEYGEEFVNMLDGMFSFVLLDTRDKSFIAARDAIGICPLYMGWGLD

SEQ ID NO: 9715 - protein, 70 aa, Glycine max
  misc_feature (25)..(26): Xaa can be any naturally occurring amino acid
MHAATGEVVNCSAENNGDLFHSVLXXLGQFGIITRARIVLEPAPAMVKWIRVLYSDFTAFTRDQERLNRR

SEQ ID NO: 9716 - protein, 122 aa, Rickettsia conorii str. Malish 7
MIQMQSILEVADNSGAKKVMCIKVLGGSHHMVAKLGDVIVVSVKDAIPGGKVKKGDVYKGVIVRTKTGVVRPDGSTIKFDQNALVLLNKQDEPIGTRVFGPVTRELRAKKYVRIMSLAEEVL

SEQ ID NO: 9717 - protein, 423 aa, Aspergillus oryzae
MADLRGRKIFKVFNQDFIVDERYNVTKELGQGAYGIVCAATNIQTGEGVAIKKVTNVFSKKILAKRALREIKLLQHFRGHRNITCLYDMDIPRPDNFNETYLYEELMECDLAAIIRSGQPLTDAHFQSFIYQILCGLKYIHSANVLHRDLKPGNLLVNADCELKICDFGLARGFSIDPEENAGYMTEYVATRWYRAPEIMLSFQSYTKAIDVWSVGCILAELLGGRPFFKGRDYVDQLNQILHYLGTPNEETLSRIGSPRAQEYVRNLPFMPKIPFQRLFPSANPDALDLLDRMLAFDPSSRISVEEALEHPYLHIWHDASDEPTCPTTFDFHFEVVDDVQEMRRMIYEEVVRFRAAVRQQSQAQAAAAAQQQQIAQQTNVPIPENQQGVWKQEEPKPQEALAAGGGVHNDLESSLQRGMDVQ

SEQ ID NO: 9718 - protein, 475 aa, Oryza sativa (japonica cultivar-group)
MEAAAAAAKKRRFGRSTGKGSLGSDGLDHISCLPEAILGEIISLLPTKDAARTQAVSRRWRPLWRSTPLNLDVDSLSTQERKRTMFVSRILASHPGPARRLSLPFFRLRDRYAKLDGWLRSPALADLQELDFSYDIEDEEALYPLPPSALRFAPTLRVVELRTCHFPNGMAPALHFPRLARLTLYRVTISEDTLHGLLSRCSALESLLLVGNFGIRRLRINSPFLRSLGFSASSWEGYRDANFQEVVIEDAPCLERLMPLYPNHGPATIRVIAAPKLEVLGVLSDGISQLHLGTTFFQKMIAVNLTTSIRTVKVLVLDSNGPNLDVVVDFLKCFPCLERLYVVSRPHKVIKNIRSYDPLHPIECMELHLRKVVIRYYEGKRPDVDFAKFFVLNAKVLREMDFCSPSNRNLKWQDNQHRRLSLENKASQVAQFTFKTTSRTRNELTRNRHTHELSMSDPFDFSSCLCSSCRFFFQL

SEQ ID NO: 9719 - protein, 332 aa, Saccharomyces kluyveri
ELHVVESVLLPKDMHPNLQLAIGLASMNKSSLFSAMYQEGTIGKGDYWEFVYEDALNLISALPLLTGKIYSNIVNDGEPLGQFNPDRDWSYNIASLLGMTFRDSVNKQHMTADQCEDFTNLVRLYCGIHVDHEGGNVSAHTTHLVGSALSDPYLSYSSGIMGLAGPLHGLAAQEVVRFLVEMNSEIESPENEKQVEEYLWKILKSNRVIPGYGHAVLRKPDPRFEAMLRFVEDRQQEFAQDKNVQLMKKMSQVAPKVLAKHGKTKNPFPNVDSASGILFHHYGIQELLFFTVIFGCSRSIGPLTQLVWDRALGLPIERPKSVDLNTIRSLCK

SEQ ID NO: 9720 - protein, 373 aa, Oryza sativa (japonica cultivar-group)
MVGGGALRRVGKYEVGRTIGEGTFAKVKFAQNTESGESVAMKVVDRSSILKHKMADQIKREISIMKLVRHPNVVLASRKKIFIILEFITGGELFDKIIRHGRLNEADARRYFQQLIDGVDFCHSKGVYHRDLKPENLLLDSQGNLKISDFGLSAWPAQGGALLRTTCGTPNYVAPEVLSHKGYDGALADTWSCGVILYVLLAGYLPFDEVDLTTLYGKIESAEYSFPAWFPNGAKSLIHRILDPNPDKRIRIEEIRNDEWFKKNYEPTREIESEEVNLDDVNAAFDDPEEDADHTLDDEAGPLTLNAFDLIILSQGLNLAALFDRRQDYDKLQNRFLSRKPAKVIMSSMEVVAQSMGYKTHIRNYKTYRHEDL

SEQ ID NO: 9721 - protein, 404 aa, Prochlorococcus marinus str. MIT 9313
MPRSCRDAVGQEQVGEIRHDRSGISFRPGLEGVPVTQSAICDIDGLQGRLAYRGYPIAELSAHSSFLETTYLLIWGDLPSPQQLRDFEAEVQMHRRVSFRVRDMMKCFPASGHPMDALQSSAASLGLFYSRRAIDDPKYVYNAVVRLIAKIPTMVAAFKLIRKGQDPIQPRDDLAYSANFLYMLTEREPDPLAARVLDRCLILHAEHSLNASTFSARVTASTLTDPYAVVASAVGTLAGPLHGGANEDVLAMLEEIGSPEHAGDYLDEAIASKRKVMGFGHREYRVKDPRAVILQGLAEELFARFGTDEMYDVAKALEQAAATRLGPKGIYPNVDFYSGLVYRKLGIPRDLFTPVFAISRVAGWLAHWREQLGANRIFRPSQIYTGPQNRTWIPSDERFSSTGA

SEQ ID NO: 9722 - protein, 341 aa, Mycobacterium avium subsp. paratuberculosis str. k10
MRTVVVDGPRSIRVDTRPDPVLPGPDGAIVEVSAAGICGSDLHFYEADFPMPDPIALGHEAIGTVVEAGPQVRNVKVGDQVMVSSVAGCGSCAGCATRDPVLCHSGFQIFGGGVLGGAQADLLAVPAADFQLLKIPEGISTEQALLLTDNLATGWAAAQRADIPFGGTVAVIGLGAVGLCALRSALFQGAATVFAVDQVDGRLARAARWGATPVKAPALEAILAATGGRGADAVIDAVATDASLTEALNAVRPGGTVSVVGVHDMNPFPLNALGCLIRSITLRMTTAPVQRTWPELIPLLQSGRLDVDGIFTTTMPLDEAAIGYATAGSRSGDDVKILLKP

SEQ ID NO: 9723 - protein, 295 aa, Triticum aestivum
  misc_feature (193)..(193): Xaa can be any naturally occurring amino acid
  misc_feature (202)..(202): Xaa can be any naturally occurring amino acid
  misc_feature (207)..(207): Xaa can be any naturally occurring amino acid
  misc_feature (218)..(218): Xaa can be any naturally occurring amino acid
  misc_feature (228)..(228): Xaa can be any naturally occurring amino acid
  misc_feature (237)..(237): Xaa can be any naturally occurring amino acid
YRRPTRPEIGQAIALDTRIPLVSFTGSTKVGQMVQQQVSARFGKCLLELSGNNAIIVMDDADIPLAVRSVLFAAVGTAGQRCTTCRRLLLHESIYQTFLDQLVEVYKQVRIGDPMEKGTLLGPLHTTTSKESFLKGIQTIKSQGGKILLGGSAIESEGNFVQPTIVEISPDVPVVREELFGPVLYAMKFLTLXKEAIEINNXSVPQXLSSSIFTRKPXDAIFKWIGPXHGSDCGYSXIVNIPTNGAEIGGAFGGEKATGGGREAGSDSWKQYMRRATCTINYGSELPLAQGINFG

SEQ ID NO: 9724 - protein, 191 aa, Saccharomyces kluyveri
IENSPTNGSNHSPLSEPQIAYIVRETCRGLKFLHDKHIIHRDIKSDNVLLDRSARVKITDFGFCAKLTDKRSKRATMVGTPYWMAPEVVKQREYDEKVDVWSLGIMTIEMLEGEPPYLNEDPLKALYLIATNGTPKLKHPELLSLEIKRFLSVCLCVDVRYRASTEELLHHSFFDMSCEPKDLTTLLEWKK

SEQ ID NO: 9725 - protein, 313 aa, Glycine max
  misc_feature (105)..(105): Xaa can be any naturally occurring amino acid
  misc_feature (123)..(123): Xaa can be any naturally occurring amino acid
  misc_feature (157)..(157): Xaa can be any naturally occurring amino acid
  misc_feature (225)..(225): Xaa can be any naturally occurring amino acid
VVPYFASNSKALWFAKYGTTHLVFNDDIQGTASVVLAGVVAALKLIGGTLADHTFLFLGAGEAGTGIAELIALEMSKQTKTPIEETRKKIWLVDSKGLIVGSRKXSLQHFKQPWAHEHEPVGXLLEAVKVIKPTVLIGSSGVGKTFTKEVIEAVTSXNKKPLVLALSNPTSQSECTAEEAYQWSEGRAIFASGSPFDPVEYKGKVYYSGQANNAYIFPGFGLGLXVISGAIRVHDDMLLAASEALAKLVSDENYEKGLIYPPFSNIREISANIAASVAGKAYELGLATRLPRPQNLVKYAESCMYSPVYRNYR

SEQ ID NO: 9726 - protein, 130 aa, Thermotoga maritima MSB8
MKMTIDEIIEAIEKLTVSELAELVKKLEDKFGVTAAAPVAVAAAPVAGAAAGAAQEEKTEFDVVLKSFGQNKIQVIKVVREITGLGLKEAKDLVEKAGSPDAVIKSGVSKEEAEEIKKKLEEAGAEVELK

SEQ ID NO: 9727 - protein, 274 aa, Bacillus sp. KSM-K16
MKMVTLNNGVNMPQLGFGVWQVPDEEATPAVAKALEVGYTSIDTAMIYKNEAGVGKAIKESGIDREKLFITTKVWNADQGYEQTLKAFDASLERLGLDYIDLYLIHWPTPHYDQYIETYKALEKLYNDGRVRAIGVCNFDIDHLERLLDECDITPVLNQVECHPYFAQNELKDFCAKHNIYVEAWSPLDQGGEVLTDEVVEKIAKAHNKTTAQVVLRWHLQNNTIVIPKSVTPSRIEENFDVFDFELSDEEMDAINRLDRNQRRGAKPSEMNTR

SEQ ID NO: 9728 - protein, 176 aa, Glycine max
MAETRRSTGTVKWFNAHKGFGFITPQDGTDDLFVHFTSIRSDGYRSLSDGQSVEFLLDYGDDGRTMAVDVTSAVRSRLPGGFRGGGGGRGRGGGRYGGGEGRGRGFGRRGGGPECYNCGRIGHLARDCYHGQGGGGGDDGRNRRRGGGGGGGGGCFNCGEEGHFARECPNVGKGNE

SEQ ID NO: 9729 - protein, 282 aa, Staphylococcus aureus subsp. aureus MRSA252
MNHIEISKDVKIPVLGFGVFQIPQEQTAEAVKEAIKAGYRHIDTAQSYLNETEVGQGIEASGIDRSELFITTKVWIENVNYEDTIKSIERSLQRLNLDYIDLVLIHQPYNDVYGSWRALEELKETGKIKAIGVSNFGVDRIVDLGIHNQIQPQVNQIEINPFHQQEEQVAALQQENVVVEAWAPFAEGKNQLFQNQLLQAIADKYNKSIAQVILRWLVERDIVVLAKSVNPERMAQNLDIFDFELTEEDKQQIATLEESNSQFFSHADPEMIKALTSRELDV

SEQ ID NO: 9730 - protein, 497 aa, Aspergillus nidulans FGSC A4
MSDLFTTIETPVIKYEQPLGLFINNEFVKGVEGKTFQVINPSNEKVITSVHEATEKDVDVAVAAARAAFEGPWRQVTPSERGILINKLADLMERDIDTLAAIESLDNGKAFTMAKVDLANSIGCLRYYAGWADKIHGQTIDTNPETLTYTRHEPVGVCGQIIPWNFPLLMWSWKIGPAVAAGNTVVLKTAEQTPLSALYAAKLIKEAGFPAGVINVISGFGRTAGAAISSHMDIDKVAFTGSTLVGRTILQAAAKSNLKKVTLELGGKSPNIVFDDADIDNAISWANFGIFFNHGQCCCAGSRILVQEGIYDKFVARFKERAQKNKVGNPFEQDTFQGPQVSQLQFDRIMEYINHGKKAGATVATGGDRHGNEGYFIQPTVFTDVTSDMKIAQEEIFGPVVTIQKFKDEAEAIKIGNSTDYGLAAAVHTKNVNTAIRVSNALKAGTVWINNYNMISYQAPFGGFKQSGLGRELGSYALENYTQIKTVHYRLGDALFA

SEQ ID NO: 9731 - protein, 163 aa, Kineococcus radiotolerans SRS30216
MTSPLDVPLTALTGGPLDPAQLTGRAVLVVNVASRCGSTPQYAGLQELQEEYGERGFTVLGVPCDQFGGQEPGTEEEIAEYCSATWGTTFPMTAKVEVNGPGRHPLYGALTATPDADGTAGDVAWNFEKFLVSPAGEVVARFRTRTTPQDPALRAAIEARLPA

SEQ ID NO: 9732 - protein, 278 aa, Arabidopsis thaliana
MSGEVWRWNKQAEMNSIRDCLKHCNSIAIDTEFPGCLKETPMDASDEIRYRDMKFNVDNTHLIQLGLTLFGKGITKTWEINLSDFNESKSLKNDKSIAFLKNNGLDLDKIREEGIGIEEFFMEFSQILNEKHGKMRWVTFQGSYDKAYLLKGLTRKPLPETSKEFDETVQQLLGRFVYDVKKMAGLCSGLSSRFGLQRIADVLQMRRVGKAHHAGSDSELTARVFTKLIFDLVNSRKESTGRRADDQQYQLEQQQHQQQLMMTRCYIPIPVQGRNYVL

SEQ ID NO: 9733 - protein, 372 aa, Oryza sativa (japonica cultivar-group)
MDDPMLNAVKEEESHGDGGGLEVVAGEDGAAAVAAGVAPRPMEGLHDAGPPPFLTKTYDMVDDAGTDAAVSWSATSNSFVVWDPHAFATVLLPRFFKHNNFSSFVRQLNTYGFRKVDPDRWEFANENFLRGQRHLLKNIKRRKPPSHTASNQQSLGPYLEVGHFGYDAEIDRLKRDKQLLMAEVVKLRQEQQNTKANLKAMEDRLQGTEQRQQQMMAFLARVMKNPEFLKQLMSQNEMRKELQDAISKKRRRRIDQGPEVDDVGTSSSIEQESPALFDPQESVEFLIDGIPSDLENSAMDAGGLVEPQDFDVGASEQQQIGPQGELNDNFWEELLNEGLVGEENDNPVVEDDMNVLSEKMGYLNSNGPTAGE

SEQ ID NO: 9734 - protein, 437 aa, Glycine max
MTVTTEFAAATNDEEVPSGVVLFGKYELRRLLGAGAFAKVYHATSVDDTRQSVAVKAVSKNKVLNGGFAANVEREISIMRRLHHPNIINLFEVLATKTKIYFVMEFAAGGELFHEVAGKVRLTEETARFYFRQLISAVKHCHSRGVFHRDLKLDNLLLDENGNLKVSDFGLSAVTGQIRPDWLLHTVCGTPTYVAPEILAKRGYDGAKVDLWSCGVVLFALIAGYLPFNDYNPSVLYRKIYRGQFRFPRWISHDLRFLLSRLLDTNPKTRITVDEIYKDTWFNADGEYRFNRVLVKESECEKQLGRTGFKSLNAFDLISFSTGLDMSGLFEDPTGSNSVERVVSTVVPEKIMERVEAMTEEGRVVVRREKNGGGAKLEGQDGNLIGIVVVYQLTDELVVVEMKRSEKGGGFGGQFWKDKLRPLLLELASELEEPVSR

SEQ ID NO: 9735 - protein, 358 aa, Oryza sativa (japonica cultivar-group)
MDPAAAGIVKEEMLESQQQQRQEDGGAAPRPMEGLHEVGPPPFLTKTYDLVEDPATDGVVSWSRAGNSFVVWDPHVFADLLLPRLFKHNNFSSFVRQLNTYGFRKVDPDRWEFANEGFLRGQRHLLKTIKRRKPPSNAPPSQQQSLTSCLEVGEFGFEEEIDRLKRDKNILITEVVKLRQEQQATKDHVKAMEDRLRAAEQKQVQMMGFLARAMRNPEFFQQLAQQKEKRKELEDAISKKRRRPIDNVPFYDPGETSQTEQLDSPYLFDSGVLNELSEPGIPELENLAVNIQDLGKGKVDEERQNQTNGQAELGDDFWAELLVEDFTGKEEQSELDGKIDGIDELAQQLGYLSSTSPK

SEQ ID NO: 9736 - protein, 379 aa, Oryza sativa (japonica cultivar-group)
MEKMMPGMVKEEWPPSSPEEGEAPRPMEGLHEVGPPPFLTKTFDLVADPATDGVVSWGRAGSSFVVWDPHVFAAVFLPRFFKHNNFSSFVRQLNTYFLVRTNYLNKRSHFYSLRFQGFRKIDPDRWEFANDGFLRGQRHLLKMIKRRRPLSYLPGSQQALGTCLEVGQFGLDEEIDRLKRDKNILLAEVVKLRHKQQSTKANMRAMEERLQHAEQKQVQMMGFLARAMQNPDFFHQLIHQQDKMKGLEDTFSKKRTRSIDIVPFLNPGEVSQGDQLESTLLFDPRPFAELNDEPAKSELENLALNIQGLGKGKQDVNRTRNQPRNQASNETELTDDFWEELLNEGARDDAGIPGMERRRPRYVDALAQKLGYLSNSSQK

SEQ ID NO: 9737 - protein, 368 aa, Thermobifida fusca
MSDFKPGLEGVVAFETEIAEPDKEGGALRYRGVDIEQLVGHVTFGRVWGLLVDNSFNPGLPFADPIDLPVSTGDVRVDVQSALATLAPRWGFKPLLDIDEAEARDNVARAASAALSIIAQSARGDQPKVPQSRVDEGKTIVERFMIQLRGEPDPLHVKAVDAYWTSAAEHGMNASTFTARVIASTGADVAAALSGAVGAMSGPLHGGAPARVLHMLDETERLGDARKYVTQALDRGERLMGFGHRVYRAEDPRARVLRRTAKELNAPRFEVASALEKAALEELQARKPDRVLATNVEYWAAVVLDFAQIPASMFTSMFTCARTAGWSAHILEQKRTGRLVRPSARYVGPAVRDIKSVEGADEALAQGI

SEQ ID NO: 9738 - protein, 152 aa, Zea mays
ATRPGHPVLVYMPAGRLARDIEKTSDEAAAQFAFSQLKKILPNAAEPINYLVSRWGSDENTLGSYTFDGVNKPRDLYEKLRIPVDNLFFAGEATSVKYTGTVHGAFSTGVMAAEECKMRVLERFRELDMLEMCHPAMGDDSPVSVPLLISRL

SEQ ID NO: 9739 - protein, 443 aa, Gloeobacter violaceus PCC 7421
MVLMGSLLLRDMRMVLDDGSLYVGDLLCRDGLIAAVDRTVNAPADRVIDGGGRVLLPGVIDPQVHFREPGKEYKEDLQTGSWACARGGVTSFLEMPNTSPPTTTVERLEDKLARAASKCVVNYGFFVGATADNIEQLQQAAGLSCGVKIFMGASTGDLLVDDPVALERIFKEVPRLIAVHAEDEARIRERTRLFAGRSDPHVHSQLRDNECARLATAQALELSRRYRRRLHILHLSAAEELELLRADKPAWVTAEVIPQHLFLSTAAYDTIGMRAKQNPPLRSEADREAMWAGLRSGLIDFVATDHAPHLLSEKDRDYAEAPAGMPGVETSLPLMLTALARGEVNFEQIVRWMSRGAAKAYGIPNKGSLRPGFDADLVLVDLERYEPVRAERMASKCGWSPFEGWSLTGWPVLTVVGGRVAFEAGEVQTDTRGNALNFRPLEF

SEQ ID NO: 9740 - protein, 432 aa, Arabidopsis thaliana
MVIKGMRVGKYELGRTLGEGNSAKVKFAIDTLTGESFAIKIIEKSCITRLNVSFQIKREIRTLKVLKHPNIVRLHEVLASKTKIYMVLECVTGGDLFDRIVSKGKLSETQGRKMFQQLIDGVSYCHNKGVFHRDLKLENVLLDAKGHIKITDFGLSALSQHYREDGLLHTTCGSPNYVAPEVLANEGYDGAASDIWSCGVILYVILTGCLPFDDANLAVICRKIFKGDPPIPRWISLGAKTMIKRMLDPNPVTRVTIAGIKAHDWFKHDYTPSNYDDDDDVYLIQEDVFMMKEYEEEKSPDSPTIINAFQLIGMSSFLDLSGFFETEKLSERQIRFTSNSLAKDLLENIETIFTEMGFCLQKKHAKLKAIKEESTQKRQCGLSVTAEVFEISPSLNVVELRKSHGDSSLYKQLYERLLNELGSSSQVQELLA

SEQ ID NO: 9741 - protein, 439 aa, Anabaena variabilis ATCC 29413
MSSPQSLLIRGARILLPNGEFLLGDVLIRDRHIIEVGTEIVNTTPATEIDAKGLTLLPGVIDPQVHFREPGLEHKEDLFTASCACAKGGVTSFLEMPNTRPLTTSQQALDDKLQRAASKCLVNYGFFIGATGENTPELLAANPTPGIKIFMGSMHGQLLVDQDAVLESIFAQGQRLIAVHAEDQARINQRRQEFAGIQDPAIHSQIQDNQAALLATQLALKLSKKYQRRLHILHMSTADEAELLRQDKPIWVTAEVTPQHLVLNTGDYERIGTLAQMNPPLRSPHDNEVLWQALRDGVIDFIATDHAPHTLEEKAQPYPNSPSGMPGVETSLAVMLTAAMEGKCTIAQVANWMSKAVAVAYGIPNKGAIAPGYDADLVLVDLNTYRPVLREELLTKCRWSPFEGWNLTGWADTTIVGGQIVYHKGKLNTEARGQALSFV

SEQ ID NO: 9742 - protein, 339 aa, Oenococcus oeni PSU-1
MKQVQVTAVGENSFVDVDQPQVGRQDVLIKIKANGICGSDTFYTSIGGIPPRQGHTPLGHEAAGIVADIGSDVDDVSIGDHVVINPMSAEDGIIGNGGAQGALSDYVNLINAKANRNFRIIPKNIPWEVAALNEPMAVAQHAVNRSKAKADSKVAVFGAGPIGLGAIISLKALGVKNVVAIDIIPERLQKALDVGADSIIDSGKEDVLEQLIKFHGQGLEKVPSGNKRSATDIYIDAAGASIVPKTVFKIAQYRAVYTIVAVHKKEVPVNFGDLLDRELDIRLSVGYPTEIFQVTDNIIKYPELYAKIISNVFPFSDALKALKTAATPGAADKVVVSFD

SEQ ID NO: 9743 - protein, 303 aa, Acinetobacter lwoffii
MKFGTVWKYYFTESLLKATIRTPSQLNLAPNALRPVLDQLCRLFPQNPTVQIRPIRLAGVRGEEIKAQASATQLIFHIHGGAFFLGSLNTHRALMTDLAARTQMQVIHVDYPLAPEHPYPEAIDAIFDVYQALLVQGIKPKDIIISGDSCGANLALALCLRLKQQPELMPSGLILMSPYLDLTLTSESLRFNQKHDALLSIEALQAGIKHYLTDDIQPGDPRVSPLFDDLDGLPPTLVQVGSKEILLDDSKRFREKAEQADVKVHFKLYTGMWHNFQMFNAWFPEAKQALADIAEFAHSLDLD

SEQ ID NO: 9744 - protein, 477 aa, Populus tomentosa
MLSQKQAEEAIVPNYSETDQHEGKEEETEENHSLFSIKSALWHGGSVWDAWFSCASNQVAQVLLTLPYSFSRLGMLSGILFQIFYGIVGSWTAYLISVLYIEYRSRKGKENVNFKNHVIQWFEVLDGLLGPYWKAVGLAFNCTFLLFGSVIQLIACASNIYYINDHMDKRTWTYVFGACCATTVFIPSFHNYRIWSFLGLGMTTYTAWYMAIAALIHGQKGVVTHSAPTKLVLYFTGATNILYTFGGHADTVEIMHAMWKPQKFKYIYLMATLYVFTLTIPSATAVYWAFGDDLLNHSNAFALLPKNGFRDAAVILMLIHQFITFGFACTPLYFVWEKVIGMHDTKSICLRALARLPVVIPIWFLAIIFPFFGPINSAVGALLVSFTVYIIPSLAHMLTYRKSSARQNAAEKPPFFLPSWTAMYVVNTFVVVWVLVVGFGFGGWASMTNFVRQVDTFGLFAKCYQCKPAGAAPPRPH

SEQ ID NO: 9745 - protein, 203 aa, Arabidopsis thaliana
MSGDNGGGERRKGSVKWFDTQKGFGFITPDDGGDDLFVHQSSIRSEGFRSLAAEEAVEFEVEIDNNNRPKAIDVSGPDGAPVQGNSGGGSSGGRGGFGGGRGGGRGSGGGYGGGGGGYGGRGGGGRGGSDCYKCGEPGHMARDCSEGGGGYGGGGGGYGGGGGYGGGGGGYGGGGRGGGGGGGSCYSCGESGHFARDCTSGGR

SEQ ID NO: 9746 - protein, 70 aa, Brassica napus
MSALFNFHSFLTVVLLVICTCTYLKMQFPAILEQKTGFRGFFWKAARIGERLSPWMSVGCFMMGVSIIFF

SEQ ID NO: 9747 - protein, 461 aa, Oryza sativa (japonica cultivar-group)
MVNGEAEAECTRASLLGRYEIGRTLGEGNFGKVKYARHLATGAHFAIKILDRNKILSLRFDDQIRREIGTLKLLKHPNVVRLHEVAASKTKIYMVLEYVNGGELFDKIAVKGKLSEHEGRRLFQQLIDAVSYCHDKGVYHRDLKPENVLVDRRGNIKISDFGLSALPQHLGNDGLLHTTCGSPNYIAPEVLQNRGYDGSLSDIWSCGVILYVMLVGYLPFDDRNLVVLYQKIFKGDTQIPKWLSPSARDLLRRILEPNPMKRINIAGIKEHEWFQKDYTPVVPYDDDDDNYLDSVLPIKEQIDEAKQEKPTHINAFQLIGMASALDLSGFFEEEDASQRKIRFTSTHSPKDLFDKIENVVTEMGFQVQRGNSKLKVMKNGRGSKNLRNPSSFLVCTEVVELGPSLYVVELKKSHGDPILYRQLCERLSDELGVCKTEQIQRTESLEDDLESFDSGSSLPGF

SEQ ID NO: 9748 - protein, 323 aa, Arabidopsis thaliana
MGEEVQMSDYDVSGDGDRVSEWEMGLPSDEDLASLSYSLIPPNLAMAFSITPERSRTIQDVNRASETTLSSLRGGSSGPNTSSSNNNVEEEDRVGSSSPGSDSKKQKTSNGDGDDGGGVDPDSAMAAEEGDSGTEDLSGKTLKRPRLVWTPQLHKRFVDVVAHLGIKNAVPKTIMQLMNVEGLTRENVASHLQKYRLYLKRMQGLTNEGPSASDKLFSSTPVPPQSFQDIGGGGGSSGNVGVPIPGAYGTQQMMQMPVYAHHMGMQGYHHQNHNHDPYHQNHRHHHGAGGNGAFESNPYMMQQNKFGSMASYPSVGGGSANEN

SEQ ID NO: 9749 - protein, 166 aa, Oryza sativa (japonica cultivar-group)
MESAMFGLETPLMTALQHLLDIPDGEGGAAGKQGATGGPTRAYVRDARAMAATPADVKDLPGAYAFVVDMPGLKSSDIKVQVEEERLLVISGERRRGGGEEEKEESCKYLRMERRMGKFMRKFVLPDNADVDKISAVCQDGVLTVTVEKLPPPEPKKPKTIEVKVA

SEQ ID NO: 9750 - protein, 425 aa, Pediococcus pentosaceus ATCC 25745
MKVLLKNARVIKSHQVQKTDVLVENDRITQIQPEINVEAEQIIDVKNQLLMPGLVDIHVHFRDPGQTDKEDVVSGSAAAVKGGFTTVLTMPNVDPVPDTPEKMTAMVKHNQTAGSLHIGQYGSITKKRTSEELVDFKALKEAGAVAFSNDGNGIQTAETMYQAMLQIKEVGLPLAAHVEDESLMQHGVMNQGTVAEKLGLPGISELAETAQLARDLEIARNTGAHYHVCHVSKARSVELIRRAQRDGVHVTAEVAPHHLFLDETMISMDNPMMKMNPPLRTLEDRQALLGGLLDGTIGMIATDHAPHTVKDKAGSMKTASFGITGLETAFPLLYTKLVKPGLCTVEQLVEWMSIQPAEIFNLKAAGQLEVGDVADLTVMNVEDEYEIKEADFASKGINSPFIGQKVYGQTQLTMVAGKIVYQREG

SEQ ID NO: 9751 - protein, 354 aa, Bacillus thuringiensis serovar konkukian str. 97-27
MEKRIVCLAGDGVGPEVMESAKGVLHMVERLYGHHFHLQDEHFGGVAIDLTGQPLPQRTLAACLASDAVLLGAVGGPRWDGAKERPEKGLLALRKGLGVFANVRPVTVESATAHLSPLKKADEIDFVVVRELTGGIYFSYPKKRTDEVATDTLTYHRHEIERIVSYAFQLASKRKKKVTSIDKANVLESSKLWRTVTEEVALRYPDVELEHILVDAAAMELIRNPGRFDVIVTENLFGDILSDEASVLAGSLGMLPSASHAEKGPSLYEPIHGSAPDIAGKNKANPIAMMRSVAMMLGQSFGLTREGCAIEEAISAVLKSGKCTADIGGAETTTSFTKAVMQEMEEQALVGRGR

SEQ ID NO: 9752 - protein, 199 aa, Triticum aestivum
  misc_feature (135)..(135): Xaa can be any naturally occurring amino acid
MKTFLIFVLLAMAMKIATAARELNPSNKELQSPQQSFSYQQQPFPQQPYPQQPYPSQQPYPSQQPFPTPQQQFPEQSQQPFTQPQQPTPVQPQQPFPQQPQQPQQPFPQPQQPFPWQPQQPFPQTQQSFPLQPQXKPFPQQPQQPFPQPQLPFPQQSEQIIAQQLQQPFPLQPQQPFPQQPQQPFPQPQQPIPVQPQQS

SEQ ID NO: 9753 - protein, 453 aa, Zea mays
MEKKPTILMNRYELGRTLGQGTFAKVYHGRNLASGESVAIKVIDKEKVMRVGMIDQIKREISVMRLVRHPNVVQLHEVMASKSKIYFAMEYVRGGELFARVARGRLKEDAARRYFHQLVGAVDFCHSRGVYHRDLKPENLLVDEHGNLKVSDFGLSALRECQKQDGLLHTTCGTPAYVAPEIINKKGYDGAKADIWSCGVILFVLLAGYLPFHDANLVEMYRKISRADVKYPQWFSPELRRLMPKLLEPNPNNRITIEKLVEHPWFKKGYRPAVMLAQPHGSSSLKDVQVAFSNADHKDSSSKVEQPADSSLKPASLNAFDIISHSRGFDLSSLFEVDQEQKASNSRFMTQKPASAIVSKLEQIAETERFMVKKQDGLVKLQGSKQGRKGQLAIDAEIFEVTPAFHVVEVKKSAGDTLEYEMFCSKGLRPSLSDICWSSRSEENMAPSVVQPS

SEQ ID NO: 9754 - protein, 453 aa, Escherichia coli K12
MSFDLIIKNGTVILENEARVVDIAVKGGKIAAIGQDLGDAKEVMDASGLVVSPGMVDAHTHISEPGRSHWEGYETGTRAAAKGGITTMIEMPLNQLPATVDRASIELKFDAAKGKLTIDAAQLGGLVSYNIDRLHELDEVGVVGFKCFVATCGDRGIDNDFRDVNDWQFFKGAQKLGELGQPVLVHCENALICDELGEEAKREGRVTAHDYVASRPVFTEVEAIRRVLYLAKVAGCRLHVCHVSSPEGVEEVTRARQEGQDVTCESCPHYFVLDTDQFEEIGTLAKCSPPIRDLENQKGMWEKLFNGEIDCLVSDHSPCPPEMKAGNIMKAWGGIAGLQSCMDVMFDEAVQKRGMSLPMFGKLMATNAADIFGLQQKGRIAPGKDADFVFIQPNSSYVLTNDDLEYRHKVSPYVGRTIGARITKTILRGDVIYDIEQGFPVAPKGQFILKHQQ

SEQ ID NO: 9755 - protein, 462 aa, Halobacterium sp. NRC-1
MHLYWHQRDLRVPDNRGLHAATDGDTVVPVYVFDDTVLSQVGRPKRAFLAAGVRALRAAYRERGSDLLVREGDAESVLPALADEFDADTVFHAAHYDAARRNRRTRVADALAAAGVDTAGHVDHTLVDPATLDDAYPSHSQFYDDWQQAPKPDPVPAPDADALADVHDDHTLSVPAPEPPLPDAGHAAATDRLAAFLDDGIASYNDTRDDLAAAVDAPASAVSRLSPYLAAGNIGVREVWAAVADAYDDATGNAARNIGKYRYELSWREQNYHLLYHTPRLQTENYVSFDAPIAWQNSDDHFEAWTRGETGYPLVDAGMRQLRAEGYVHNRPRQVVASFLTKHLLVDWRRGERHFADRLVDYDPANNAANWQWTASTGTDTVAVRIFDPVSQMAKYDSDAAFVTEYVPELRGVDPETIVDWPTLRHSQRERLAPDYHHPIVDRDHAYERAQRVFEAALDGDA

SEQ ID NO: 9756 - protein, 491 aa, Synechococcus elongatus PCC 7942
MPRGVAPAFAGRKPKGWAWASTAVPDFQGGFKRLINRFQGSKLWLACVPLAATIAVFWGVAANAQGSADPVPSAQFLVNNLWLMVATVLVIFMNAGFAMVETGLCRQKNAVNVLAKNLIVFTLAATAYWFIGYSLMYGSPVVDGFLYFGKGGPLGFFFDPTVSAETIKNDGLISSLDFLFQAAFAGTAATIVSGSVAERIKFVDFIIFSLILTAVIYPIAGSWQWNVGSGWLNKAGFIDFAGSTVVHSVGGWAALIGAITLGPRMGKFQDGPPGALTGHNLAIATLGALILWIGWYGFNGGSVLAFNTAVPYVAVTTTLGGAAGGISATITSWSTSGKPDLSMVINGILAGLVGVTAGCDGFGMGGSFIVGLIAGVLVVFSVYTFENLKIDDPVGACSVHLVCGIWGTLAVGLFNLEKGLFYGGGFGQLGSQILGIISYGVWTVVASVIIWNILKALLGLRVSLKKSYKAWILANTGWKPTLALPRMHLTP

SEQ ID NO: 9757 - protein, 491 aa, Methylococcus capsulatus str. Bath
MSHELRLDQPGLLRTRCLIDGQWVDADHSKTFSVTDPATGRALADVPAMGAAETMRAIAAAEHAWTGWRGKTAKERAAVLRRWYELILSHTEDLARILTAEQGKPLTEARNEIGYAAGFVEWFAEEAGRAYGETIPSPVPDKRLLVIRQPIGVCAAITPWNFPAAMITRKIAPALAAGCTVVVKPAEQTPLTALALADLAVQAGFPPGVINVVTGDPEAIGGELTSNPLIRKLSFTGSTEVGRLLMAQCAATVKKISLELGGNAPFIVFEDADLDAAVEGALLSKYRNTGQTCVCTNRFLIQDSIYDAFAERLAAKVRRLEVGNGLDEGVVQGPLIDEQALAKVERHIADALDRGARVLAGGGRHPLGGRFFQPTVLVDVTPEMLCTREETFGPVAPLLRFGSEEEALAIANATEYGLAAYFYTRDLARAFRVGEALEYGMVGINTGMLSYDVAPFGGVKQSGIGREGSHHGMDEYLELKYLCLGGMAPSA

SEQ ID NO: 9758 - protein, 156 aa, Arabidopsis thaliana
MDLEFGRFPIFSILEDMLEAPEEQTEKTRNNPSRAYMRDAKAMAATPADVIEHPDAYVFAVDMPGIKGDEIQVQIENENVLVVSGKRQRDNKENEGVKFVRMERRMGKFMRKFQLPDNADLEKISAACNDGVLKVTIPKLPPPEPKKPKTIQVQVA

SEQ ID NO: 9759 - protein, 221 aa, Triticum aestivum
  misc_feature (80)..(80): Xaa can be any naturally occurring amino acid
  misc_feature (132)..(132): Xaa can be any naturally occurring amino acid
HASGEIDCASLLIQAKLEANQQSSVGVVLIGGSQVQILCTLTSDSVKANSFLFGVKCSGELHFTQAIQIGALSLKHRSNXTQKQRMVCFIGSTVVEDVETLKILAKKLKKNAVAVDVICFGDTSEEQIAKLXAFVATLQTEDNSHCVVIRPGENISDKVINSPIIGGQAGNAPGIGGNIEEDDPELAAAIRMSLEESQRAAPPQVAQPAPAQSISQAQPSR

SEQ ID NO: 9760 - protein, 414 aa, Bacillus anthracis str. Ames 0581
MSLLRDEALKMHKEKQGKIGVYSKVKVQNSTDLSLAYSPGVAEPCLEIYKDESKVYDYTMKGNLVGVISDGTAVLGLGNIGPKAAMPVMEGKALLFKSFAEIDAFPICLNTNNPDKIVEVVKLLEPNFGGINLEDIAAPQCFEIEERLRKSCDIPVFHDDQHGTAIVTIAGLINALKLTNKKIEDVQIVVNGAGAAGIAIVKLLLHMHVKNVILCDTKGIIYEQRPIGMNALKEEIARITNIEQKRGTLAEALIDADVFIGVSAADVVDEDMIRSMNHNPIIFALANPTPEIMPNKAKIAGALVVGTGRSDFPNQVNNVLAFPGVFRGALDVQAKEINEEMKLAAVYAIAELISEEELHVNYVIPNPFDPRVVPHVAYAVARAAVETGVSRKNISMSEIKNNLFRLTKEVNILK

SEQ ID NO: 9761 - protein, 132 aa, Zea mays
  misc_feature (42)..(42): Xaa can be any naturally occurring amino acid
  misc_feature (48)..(48): Xaa can be any naturally occurring amino acid
  misc_feature (85)..(85): Xaa can be any naturally occurring amino acid
  misc_feature (100)..(100): Xaa can be any naturally occurring amino acid
  misc_feature (122)..(122): Xaa can be any naturally occurring amino acid
PVRKLEALIAAANIIYIFHILHTPPGENALFDVLLITPIFTXNKFKTXGPASAGAGSETGPSLFQLIFYPNLYPELALALQLSMXEERSRQQAIANKAAXDTFNTEHNNVPSSNSDSVMAEXEPASNAAAVD

SEQ ID NO: 9762 - protein, 304 aa, Triticum aestivum
  misc_feature (223)..(223): Xaa can be any naturally occurring amino acid
NRKKTVLVAKIFRGFPPRAGRLHPIRTRGFEGYRFTPCGEYVRRWLPELARLPTEWIHHPWDAPESVLQAAGIELGSNYPLPNCELDEAKSRLQDALSEMWELEAASRAEIENGMEEGLGDSSDEPPIAFPQELQHMEVDLDRATIHTPATAGRRRADQMVPSITSSLVRAETETELSAAFESEVTRPEVPSQVHFQPQTRMEVRDEGVSDGTAARYNGVQQXSSYTLHRHRVQGGIAPSTSEASSSWTGVVAAEVPVWSPPAASGHSDPYAADETDISSRSYLDRHPQQSHRLMNWNQLSQSS

SEQ ID NO: 9763 - protein, 475 aa, Azoarcus sp. EbN1
MTLVRDKLFIDGRWVAAQGGGFIDVIDPSDASVYARIPEGVPADAEAAIAAARGAFDSWSRTSPAERAQYLERIAAGFQARSDELADAIAHEVGMPLKMASRIQVGGPLWSWQHYAKLAREFEWEARVGNSLVVREPVGVVGAITPWNFPLNQITLKVAPALAAGCTVVLKPSEVAPINAFILAEIIEAAGLPAGVFNLVTGYGPVVGEVLASDPRVDMVSFTGSTHAGRRVAELAAATVKKVALELGGKSAAIVLDDADLAAAVKGTVSNCLLNSGQTCSAHTRMIVPRAKVDEAATLAAAAASSFKVGPALAEGSRLGPLVSQAQRDRVVGYIRRGLDEGARLACGGVDAAPAGAGFFVAPTVLVVEDPKATVAQEEIFGPVLVIVPHDGDEDAILLANDSIYGLAGSVWAGTDEHALAVARRIRTGQVDVNGAPWNPLAPFGGYRQSGLGRENGVYGLEEFLEYKAIQLRPR

SEQ ID NO: 9764 - protein, 504 aa, Azoarcus sp. EbN1
MNKLDPARYGLNLKGRYGNYIGGQWLPPVAGRHFDNITPITGKPLCEIPRSDEQDVELALDAAHKAKAAWGRTSAAERAGVLNRIADRMEANLETLAQVETWDNGKPIRETRAADIPLAIDHFRYFAACVRAQEGSLGEIDHTTVAYHFHEPLGVVGQIIPWNFPLLMAAWKLAPALAAGNCVVLKPAEQTPLSILVFAELVGDLLPPGVLNIVNGFGVEAGKPLASSKRIAKIAFTGETGTGRLIMGYASQNLIPVTLELGGKSPNIFFDDVAAQDDAFFDKAIEGFVMFALNQGEVCTCPSRALIHESIYERFIERALKRVAEIRQGNPLDPATMIGAQASREQMDKIQSYLAIGRDEGAELLAGGERAHLDGELEGGFYIQPTVFRGHNKMRIFQEEIFGPVVSVTTFKDRDEALAIANDTPFGLGAGVWTRNINTAFHMGRHIEAGRVWTNCYHAYPAHAAFGGYKQSGMGRETHKMMLDHYQQTKNLLVSYSEDKLGFF

SEQ ID NO: 9765 - protein, 485 aa, Arabidopsis thaliana
MSSPRSNKPKIVNGPGGYILQDVPHLIDYLPDLPTYPNPLQDNPAYSVVKQYFVHADDSVPEKVVVHKDGPRGVHFRRAGPRQKVYFESDEVHACIVTCGGLCPGLNTVIREVVSSLSYMYGVKRILGIDGGYRGFYAKNTIPLNSKVVNDIHKRGGTIIGTSRGGHDTNKIVDSIQDRGINQVYIIGGDGTQRGASVIFEEIRRRRLKVAVVGIPKTIDNDIPVIDKSFGFDTAVEEAQRAINAAHVEAESNENGIGFVKLMGRYSGYIAMYATLASRDVDCCLIPESPFYLEGEGGLFEFIERRLKDHGHMVIVLAEGAGQDLMCKSMESTPMDASGNKLLKDVGLWLSQSIKDHFKKNKMVMNLKYIDPTYMIRAVPSNASDNVYCTLLAQSAVHGAMAGYTGYTSGLVNGRQTYIPFYRITETQNNVVITDRMWARLLSSTNQPSFLGPKDTSEEKKELPETPLLDDGAVDIPPVTKEVTK

SEQ ID NO: 9766 - protein, 388 aa, Lactobacillus gasseri
MAQRDYYDVLGVDKNASESDINKAYRKLAKKYHPDLNHEPGAEEKYKEVNEAYEVLHDKQKKAQYDQFGQAGVNGQAGFGGQGYGGFGGQGGYSSQGFGDFGDIFGDIFGSAFGGGRSRVDPTAPQKGQDLDYTMTIDFMDAIKGKKTDITYTRSEVCPTCDGSGAEKGTHPITCDKCHGTGVMTVTRQTPLGVIQQQTTCDKCGGRGTIIKHPCQTCHGKGTIDKKQTLEVKVPAGIDNGQQIRLSGQGEAGKNGGPYGDLYIVFRVKPSKEFRRNGTTIYSEAPISFAQAALGDKIRVNTVHGPVDLTIPAGTQPNTNFKLRGQGVPKINGTGNGDQEVTVKVVIPKKINDKQKEALVDYVKAGGGNISPQEKNFFERLKDKLNGE

SEQ ID NO: 9767 - protein, 65 aa, Glycine max
  misc_feature (38)..(38): Xaa can be any naturally occurring amino acid
  misc_feature (43)..(43): Xaa can be any naturally occurring amino acid
QLAPMSCLCKGYLDALLIRNGFKDAEYISLALGGTNLXINTVXSVDHAEAVDLSFEMRTKLYFKP

SEQ ID NO: 9768 - protein, 217 aa, Caulobacter crescentus CB15
MQIFLDSTDTKVIADLASTGLIDGVTTNPTLIAKSGRPMLEVIAEICDIVPGPISAEVAATTADAMIAEGQKLAKIAPNVVVKIPLTRDGLIACAAFADEEIKTNVTLCFSPTQALLAAKAGATYISPFIGRLDDYGFDGMDLIRDIRAIYDNYGYETEILAASVRNAAHVKEAAIVGADVVTIPPAVFSDLYKHPLTDKGLEQFLKDWASTGQSIL

SEQ ID NO: 9769 - protein, 322 aa, Glycine max
MADAKAEAARQAPQSSQEEEEDWKEAEGDVEVADRSTSNGGGAGEGITDRPIRVYADGIYDLFHFGHARSLEQAKKSFPNAYLLVGCCNDELTHQYKGRTVMTEDERYESLRHCKWVDEVIPDAPWVVTEEFLNKHNIDFVAHDSLPYHDASGASNDVYEFVKKLGKFKETKRTEGISTSDIIMRIVKDYNEYVMRNLARGYSRNDLGVSYVKEKRLRVNMGLKTLRDKVKQHQEKVGEKWSTVAKLQEEWVENADRWVVGFLEKFEEGCHSMGTAIKERIQERLKEAQSRDFSLLQYDSDDFDDFEEEDDEVAKDAKYVKE

SEQ ID NO: 9770 - protein, 301 aa, Rubrivivax gelatinosus PM1
MLDAFKAQGLKSFEQMTVPESRETAMAFVGLEGDEEAVADVSNHRVPVKGGDIAVRIYRPAGNAPHPMLVYFHGGGFVFGNLDLVDKVARSLCNASNAAVVSVDYRKAPEHPYPTAPEDAYAGLVWARENAAKLGLDPARIAVAGDSAGGNLAAVVSQMARDRKGPKIAHQVLVYPVTDAAGDYPSRKENAEGYLLTQGAMNWFFGHYLTSPGLASDAYVSPIKGDLKGLPAATVITAGYDPLRDEGDAYAKALAKAGVAVDHVPNPTMIHGFFWMKGVIGHTQSIYDRVGRNLKAAFGTA

SEQ ID NO: 9771 - protein, 477 aa, Candida albicans SC5314
MPHKKVVIVGGGISGIKAAADLYKSGIKSTVILEAQPRLGGRLFTVESTQNKGTTYDYGASWFHDCLNNPLFDKAQQLENVKYYFDDGKSLYFNKFEGQIEKWRFETVLEEMMTYFQWVYKQDPDKLDISVKQLAQEYVDKYRNVLTKEQIELSLSAVRMWSELWHGESWDLLSGKYTFADDGHLGRNAFVKNGYSTVFINELKELPRAYRDSAIKLNAQVIKIDYTNKKKILVYLKDGRTYSCDYIIVTIPQTILKITNAKDENYVEWVPELPPNIQKVLPDVHFGSLGKVVLEFDDCFWPRDVDRFYGLTSNTPSQDTISVDAWDYPTILINYQAVNNVPSLVALTQNPLSKYIENLQPHEKQQRIWSIFKPLIAKICESKGIQDIPEPHSIYHTPWNNESLFRGSYGTSLVGTQDPSSVIKAFVDGYQDRIKFAGAETMDDTSNGCAHGGWFSGQREAKFIVQQEAKKKVDSKL

SEQ ID NO: 9772 - protein, 227 aa, Paulownia kawakamii
MAREKIQIKKIDNATARQVTFSKRRRGIFKKAEELSVLCDADVGLIIFSSTGKLFEYASSSMKEILGRHNLHSKNLDKLEQPSLELQLVEDSNYSRLSKEVAERSHQLRRMRGEELQGLSIEKLQHLKKSLESGLSRVIEKKGEKIMKGDQSTSRKGKQLMEENERLRQQVADISNDCKNNAASDSENIVYDEGQSSESVNACNSVGPPQDYDSSDTSLKLGLPYSG

SEQ ID NO: 9773 - protein, 232 aa, Zea mays
  misc_feature (194)..(194): Xaa can be any naturally occurring amino acid
  misc_feature (200)..(200): Xaa can be any naturally occurring amino acid
  misc_feature (202)..(202): Xaa can be any naturally occurring amino acid
  misc_feature (224)..(224): Xaa can be any naturally occurring amino acid
MESTLKGIRGSDAPCVLDLDDAATVAGGVEDTYGEDRATEEQLVTPWTVSVASGYNLLRDPRYNKGLAFTERERETHYLRGLLPPAIVSQELQERKIMNNIRQYQLPLQRYMALMDLQEGNERLFYKLLIDNVEELLPIVYTPTVGEACQKGKILEVLKNWPERSIQVIVVTDGERILGLGDLGCQGMGIPVGXLSLYTXLXGVRPSACLPITLDVGTNNEELXYGRIYIGL

SEQ ID NO: 9774 - protein, 349 aa, Pseudomonas aeruginosa PAO1
MPAEVAAGLPPLPPNHFYFYPPDPLLEGDGAITAIEDSDPFDQYVYRLRRVLYQGRTRWQNVLIADTYNYDRVLMLDGAIQSAESDESLYHELLVQPAMLAHDEPRDVLIIGGGEGATLREVLSHASVRRAVMVDLDRELVELCREHLFQWHQGAFDDPRCELLAEDGRAYLERDPSLYDVVIIDVVDMLDNGPAQALYTRQFYELLHSRLRPGGVVAVQGLEFSHSDDKPHAALARTLRSVFSQVHSYRATVPSFLSSWGFLLASDWLDTNHWQAEDIDRRIERKLGPLWLDHLDGDYLKACFVMDRETRFLLAQPGPVLEDGVPFVAPPDIEEIEFGPAQLPALART

SEQ ID NO: 9775 - protein, 327 aa, Chlamydophila caviae GPIC
MSSQFEQLKLLSVLVCDTGDPELVKTSGSQDATTNPSLILKVAQEPKYQELLTEAIAWGIRQNGDDIQTLTFVLDKIQVNFGLEILKCIPGRVSLEIDARLSFNTEAMIQRAIFLSELFAATGGDKKRLLVKIPGTWEGIRAVEVLEKQGIACNVTLIFNLIQAIAAAKANATLISPFVGRIYDWWIAAYGDEGYSIDADPGVASVSNIYTYYKKFDIPTQIMAASFRSKEQVLALAGCDLLTVSPKLLDELKKDQSPVAKKLDVAAAKKLDVQPVELTESVFRFLMNEDAMATEKLAEGIRIFSGDTQILEAAVTEFIKQIAAQDA

SEQ ID NO: 9776 - protein, 277 aa, Mycoplasma mobile 163K
MFQWFPGHMAKALRQIKEKEKFVDFFIIVLDSRAPISTYNKEFDKISPKKPRLFIINKIDYGDVKKYQKLERYFRTENSDVLFTNLKKQNTRSIIIKSVDKLLFKKTEYDKKRGLLNPFTVGMILGLPNTGKSTLINLLANKSKTKVANTPGVTRGQQLVITERFKLFDTPGILFPKIEYELDAIKIAMIGSIKWEIINQKELFFGSYKLLSEYYPEEIEKLGLQPSFDDNQIFISLEQIGKKHNFYLKDKQIDENRTIIFFNNYVKNLKNVTYDRL

SEQ ID NO: 9777 - protein, 427 aa, Oryza sativa (japonica cultivar-group)
MGNICGGSGKAHVSGDCRPPSSGTMTPKTSSSVTTSNSTTGKLSSVGSSFMASSGSGGTSSGFDDGVYPEGQILEAPNLRTFTFIELRTATKNFRPDSVLGEGGFGRVYKGWVDEKTMNPVKGGTGMVVAVKKLNSESMQGYEEWQSEINFLGRLSHPNLVKLLGYCFEDKELLLVYEFMAKGSLENHLFKKGCPPLSWELRLKIAIGAARGLAFLHASEKQVIYRDFKASNILLDANYNAKLSDFGLAKLGPTGSNSHITTRVMGTYGYAAPEYVATGHLYVKSDVYGFGVVMLEMMSGQRALDPNRPNGQLSLVDWAKPYLADRRKLARLMDPRFEGQYNSKQAVQAAQLTLNCLAGEPRSRPSMKEVLETLERIESMKSRARDARGSGSSRDHSHGRTTAHQRSSPRPDGRRGSRTNGHATKAR

SEQ ID NO: 9778 - protein, 358 aa, Neurospora crassa
MAASRTATRTLRALRTSTRPALTAAPRAAFRQGGRRLYSSEPAKSGGSNIWAWAIGAGALGAGGLWYLNQDGASATPKVFAPKFDDYQAVYNEIASRLEEKDDYDDGSYGPVLVRLAWHASGTYDKETGTGGSNGATMRFAPESDHGANAGLKAARDFLEPVKAKFPWITYSDLWILGGVCAIQEMLGPQIPYRPGRQDRDAAGCTPDGRLPDASQAQDHLRNIFYRMGFNDQEIVALSGAHALGRCHADRSGFDGPWTFSPTVLTNDYYKLLLDEKWQWKKWNGPKQYEDKKTKSLMMLPADMALIQDKKFKQWVEKYAADNELFFKDFSNVIVKLFELGVPFAENSERWVFKTVNA

SEQ ID NO: 9779 - protein, 472 aa, Trichodesmium erythraeum IMS101
MVLIGCQVALANGGSDDFVKVDNIWLLLAGALVFFMNAGFALLEAGFCRSDNSVNVLAKNLIVFCVAAIAFWMFGFGLMFGDSSYHLPCRGNFEQKNEKVQSYHGHFSPTMEYNEFEQKSQFILPPKNDTPLGYPSKGFSCLQRQFPKRSIASIFFFQLAFAGTAATIVSRAVAEKMKLWVFFCFSFILVGFLYPIVGHWVWSEYGWLKQGLNFIDFAGSTVVHTVGGTAALAVAILLKPRWSWLGYDPWEDLETDEGSEALSPQGQKESYDQRNLTSATLGCLILWLGWLGFNGGSTTELKEVGHIIITTIMSAATGGIIAILLSPLFSQRSSNNSEIGKLDLSSLINGILGGLVGITASAAYVDIPIAIFIGAVSGVVVVLTRKLLKWIKLEDPLGAIPVHLFCGCWGTIAVSFSLRGTIVYEKTYNFLERLEWQFSGWGVVFITTFLVSCIIWIFIGLTLYLFEKILRK

SEQ ID NO: 9780 - protein, 282 aa, Streptococcus pyogenes M1 GAS
MAMIQWFPGHMSKARRQVQENVKHVDFVTILVDARLPLSSQNPMLTKIVGDKPKLMILNKADLADATRTKEWKAYYESQGIKTLAINSKEQSTVKKVTEAAKELMADKIQRLRERGIQKETLRTMIIGIPNAGKSTLMNRLAGKKIAVVGNKPGVTKGQQWLKSNKELEILDTPGILWPKFEDELVGLKLALTGAIKDQLLPMDEVTIFGLNYFREYYPNRLTKRFKNIPLEEEAPEIIMTLTRQLGFKDDYDRFYTLFVKEVRDGKLGQYTLDQVGDMDAD

SEQ ID NO: 9781 - protein, 186 aa, Arabidopsis thaliana
MKLISLVRNVRSRQCQPEVIWSVQVRFLQQDSVSKAKPKKYKYPSVYDPYGPRPQPSSKIMELAERIAALSPEERKQIGPALNEHLRLPKQQMISSDGIGAKQDTGAGNVEEKKEKTAFDVKLEKFNASDKIKVIKEVRTFTSLGLKEAKELVEKVPAILKQGVTKEEANEIIAKIKAVGGIAVME

SEQ ID NO: 9782 - protein, 356 aa, Gaeumannomyces graminis
MSRAANPPSNSGSRKISFNVSEQYDIQDVVGEGAYGVVCSAIHKPSGQKVAIKKITPFDHSMFCLRTLREMKLLRYFNHENIISILDIQKPRSYETFNEVYLIQELMETDMHRVIRTQDLSDDHCQYFIYQTLRALKAMHSANVLHRDLKPSNLLLNANCDLKVCDFGLARSAASQEDNSGFMTEYVATRWYRAPEIMLTFKEYTKAIDVWSVGCILAEMLSGKPLFPGKDYHHQLTLILDVLGTPTMEDYYGIKSRRAREYIRSLPFKKKVPFRTLFPQDVGSRLDLLEKLLAFNPVKRITVEEALKHPYLEPYHDPDDEPTAPPIPEEFFDFDKHKDNLSKEQLKQFIYQEIMR

SEQ ID NO: 9783 - protein, 585 aa, Triticum aestivum
  misc_feature (211)..(211): Xaa can be any naturally occurring amino acid
MLRLNPGRLPSEVLGSGMRRLEAWFATDVDIISSTDWDQEHGLTGWPWADGEWLRPCYLTLSPGFSGIASARALSNASFKVTLLESRERLGGRVHTDYSFGCPIASGASWLHGVCNEISLAPLIRLLGLRLYRSSGDHSVLYDHDWETHALFAKDGRQIPQEITTKVGEIFEQILKETVKVRDEYANDMPLVQAISMVLDRNPHLKLEGLXQYEVLQWCICRLEAWFATDVDNISLKNWDQEHVLTGGHGLMVNGYDPVIKALSRDLDVHLNHRVTKIIQRYNKVIVCVEDGTSFVADAAIITVPLGVLKANIIKFEPELPDWKLSAISDLGVGLENKIALRFNTIFWPNVEVLGRVAQTSNACGYFLNLHKATGHPVLVCMVAGRFAYEMEKLSDEESVNFVMSQLRRMLPGATEPVQYLVSRWGTDPNSLGSYSCDLVGKPADLYERFCARVGNLFFAGEAACMDHSGSVHGAYWSGIDAAEDCRRRLSTQLGIADLFQVWCIAVGEEFLGGVAPLLGPSGSVHGGKTAPIDDAKDGLVPLPTYLLLTDGRTNLSTVISIVLFCLNRSLNLPPQLYNFAASDP

SEQ ID NO: 9784 - protein, 208 aa, Brassica napus
MEKMLRSSSLIPLFCLVLLLISNFHGSVETGKRRIEITDDLDDVEDSEEDESWKQWGSKAATPEFDPPPDFSNMGFDQIQEEMAKRTFASVVGFVKLRLGVKRTKDMVVDIAMKWTKVLRTGGLGVRFMAVDRSTVMFNMQNGKEVTELREFVLSQEEAYEVKIGKQEFRRPGDPPLDDVVEKLQAKQSKGGEDGDSNNKNDVTKDEL

SEQ ID NO: 9785 - protein, 190 aa, Magnaporthe grisea
MGKSQSKLSQEQLAELQKSTHFDKKELQQWYKGFLKDCPSGTLTKEEFQKIYRQFFPFGDPSSFADYVFNVFDSDKSGTIDFKEFIVALSVTSRGKMEDKLDWAFQLYDIDGDGKISYDEMLQIVEAIYKMVGSMVKLPEDEDTPEKRVRKIFRMMDKDENGSLDMQEFKEGSKRGETIVSALSLYDGLV

SEQ ID NO: 9786 - protein, 448 aa, Halobacterium sp. NRC-1
MEIEIATIGGYEEVGRQMTAVRAGDDIVIFDMGLNLSKVLVHDNVETEKMHSLDLIDMGAIPDDRVMSDLEGDVKAIVPTHGHLDHIGAISKLAHRYDAPIVGSPFTIELVKGEIESEQKFGVENDLVKMEAGGTMEIGDRCELEFVHVTHSIIDAINPVLHTPEGAVVYGLDKRMDHDPVLEDPIDMERFREIGREGEGVLCYIEDCTNAGKKGRTPSESTARRHLKDVLTSVADYDGGIVATTFSSHISRVSSLVEFAKEIGREPILLGRSMERYSGTAERMGRVNFPDDLGMFGHRKSVDRAFKRVMNEGKENFLPIVTGHQGEPQAMLTRMGRGETPYDIEDGDKIIFSASVIPEPTNKGQRYQSEQLLRMQGARIYDDIHVSGHLREEGHYQMLDALQPQHLIPAHQDMKGMAPYAKLAKSQGYKIGRDLHMTENGNTIQLVE

SEQ ID NO: 9787 - protein, 220 aa, Ehrlichia canis str. Jake
MKLFLDTVDIDFLKEFSITGLIDGVTTNPSLMSKSNLECQDLILKICSLIPGPVSIEVISTSYKDMIKEGLDISKIADNIVVKLPLTYDGLIACKVLSHEHNVKVNVTLCFSVPQAILSAKSGAYFISPFVGRIDDIGQSGMQLIKDIRDVYTSYNTFNTEILVASVRNITHVIEAAKIGADIVTIPPSIFKQMFTHPLTDKGLESFLQSWNASGKKIFS

SEQ ID NO: 9788 - protein, 183 aa, Glycine max
MAGVGRNMVAPLLVLNLIMYLIVIGFASWNLNHFINGLTNRPGVGGNGATFYFLVFAILAGVVGAASKLAGVHHVRTWRGDSLATSASSSLVAWAITALAFGLACKEIHIGGYRGWRLRVLEAFVIILAFTQLLYVLALHSGLFGNQLGGNHAGGYPAEHAYGAGGDPHNKGMGMGTGGVARV

SEQ ID NO: 9789 - protein, 314 aa, Vibrio vulnificus CMCP6
MVNNSIQWFPGHMHKAQKEIAEAIPQIDVIIEVLDARIPFSSENPLISKIRGEKPVVKVLNKRDLADPELTELWIEHLEKEQNVKAMAITTSQTQEVHKILELCRKLAPHREEVGKNIRTMIMGIPNVGKSTIINTLAGRAIAQTGNQPAVTRRQQRINLQNGIVLSDTPGILWPKVENPHSGFRLAATGAVKDTAMEYDEVAFYTVEYLAKHYPEKLKERYQIEELPETDVELMEEIGQRRGALRSGGRVDLHKASEILLHELRSGTLGQITLERPEMITEELVEVELEAARRAEEKAKNKEERRKRYLRNKR

SEQ ID NO: 9790 - protein, 141 aa, Brassica napus
PRVRIKEGPDTIGAFIAEPVMGAGGVIPPPATYFEKIQAVVKKYDILFIADEVICAFGRLGTMFGCDKYNIKPDLVSLAKALSSAYMPIGAILMSQEVADVIYSQSNKLGAFSHGFTYSGHPISCAVAIEALKIYKERNIP

SEQ ID NO: 9791 - protein, 461 aa, Aspergillus nidulans FGSC A4
MQIVWRGSADPAVYEEARVGRVFNNRRPDRYPIAVVKASCTADIVAAVKLAKERNCRVAVRSGGHSWAGWSVRDESILVDLGNYKYLGVDAERCIASASPSMTGKEINGRLIHEYGLMFPGGHCPDVGLGGFLLQGGMGWNCRGWGWACERVKAIDVVTAEGELLHCDESQNEELYWAARGSGPGFPGIVTRFHFEILPYPKHGFRSSGYVYPISKYHEAFSWVLAITPDFDRDTEITVVSMYPEGSEQICLFILLVTLKHTPSEAEAALAPAQQSRPPGAIEEWFCREDSLENQYTNQAKANPKGHRYCAENAYLQNEADVPSVLEEAFTTLPHRKAFALWYAMNPCSRRQLPDMALSMQSDHYFALYTVWEEEEDDARCMAWVKNVMKRVQRHSVGAYLGDSDFQERQTRYWAESNGRRLMDIRRRWDPTGRICGYLDHGDASGPRGPSLDISDRASMN

SEQ ID NO: 9792 - protein, 506 aa, Triticum aestivum
MAAPPAIPRRGLFIGGGWREPTLGRRIPVINPATEDTIGDIPAATAEDVELAVAAARSAFLLDGGSRWARASGATRAKYLNAIATKIKEKISYLALLETVDSGKPKDEAVADMDDVAACFEFYAGLAEALDGKQHAPISLPMEEFKTYVLKEPIGVVGLITPWNYPLLMATWKVAPALAAGCTAVLKPSELASLTCLELGAICEEVGLPSGVLNIITGLGPDAGAPIASHPHVDKIAFTGSTATGKTIMTAAAQMVKPVSLELGGKSPLVIFDDVADIDKAVEWAMFGCFFNSGQVCSATSRLLLHEKIAERFLDRLVEWAKNIKISDPLEEGCRLGSVISKGQYEKIKKFISTARSEGATILHGGDRPKHLGKGFFIEPTIITDVSTSMQIWREEVFGPVICVKVFKTESEAVELANDTHYGLAGGVISDDLERCERIAKVIHSGIVWINCSQPTLVQAPWGGNKRSGFGRELGEWGLENYLSVKQVTRYCKDELYGWYQRPSKL

SEQ ID NO: 9793 - protein, 276 aa, Bacillus halodurans C-125
MANNLQATTTLHNGVKMPWFGLGVFKVSEGDEVIQSVKDAIRAGYKSIDTAAVYGNEEGVGKAIAESGVPREELFITSKVWNADQGFDSTISAFNTSLKKLGLDYLDLYLVHWPVKGKYVETWKALEKLYQDGLVRAIGVSNFQVHHLKDVLEAGSIVPMVNQVEYHPHLTQTELHDFCKQNKIQLEAWSPLKQGQLLNDPTIVAIAEAHQKTPAQIILRWDLQNEVVTIPKSVKKDRIISNADIFDFQLTEEDMQKINELNKNERVGPDPDNFDF

SEQ ID NO: 9794 - protein, 108 aa, Hordeum vulgare subsp. vulgare
QEQARKNRRFMVYVHSKGMIVDDEYVIIGSANINQRSMEGTRDTEIAMGAYQRQYTWANKISAPRGQVYGYRMSLWAEHIGAIEEDFNHPESIECMRRVRHLGEHNWD

SEQ ID NO: 9795 - protein, 309 aa, Pseudomonas aeruginosa PAO1
MSPPQRLRAGLLRGCLRLLFRGLVRPPMPVALQRGVLRGLSLATLGAGGVVRERRSLAGVPCEWLRPRGVEARRRVLYLHGGAYLIGSPATHRAITTHLARRCAAEVCAVDYRRAPEHPFPAARDDALAVYLALLEAGHSPRRLLLAGDSAGGHLALSLALELKARGLPLPAGLLLFSPWTDLGCQRLHTPAAGDPLLSRAWLESAVRLLLPADAEPGSAALSPLHADLAGLPPLLVQVGEDELLRDDSLRLAQRAGEQGVAVRLQRYAGCWHVFQAHAGVLASADRALDEAAAFVVECSAEGDRCRTS

SEQ ID NO: 9796 - protein, 441 aa, Ralstonia eutropha JMP134
MTHVFHRNPRQTLPVAVAGSGVELVDSEGRRYLDASGGAAVSSLGHGHPRVIAAIKAQLDTIAYAHTSFFTTEVSETLAQTLAQAAPGDLEHVYFVSGGSEAVEAALKLARQYFVELGQGSRRHFIARRQSYHGNTLGALAIGGNAWRREPFLPLLVPAHHVSPCYAYRDQVAGETDAQYAQRLADELEAKIQELGAENVAAFVAETVVGATAGAVPPVGDYLKRIRAVCDKYGVLLILDEVMSGMGRTGYLFACEEDGVVPDIVTIAKGLGGGYQPIGAMISTRRIYDTIVAGSGFFQHGHTYIGHATACAAALAVQRTIAEDNLLANVRQRGEQLRARLRESLGNHPNLGDIRGRGLFVGVEFVADRDSKATLDPKLKTHARLKSTAMQHGLLVYPMGGTVDGVHGDHVLFAPPFICTAQDIDKIVERFTAAVAAVLPA

SEQ ID NO: 9797 - protein, 226 aa, Zea mays
MTTGEGAEAAAVPRVVSILSALLQRVAERNDAAAAAPPPAAAAGPPVLSAFQGLTKPAISIGGYLERIFRFAGCSPSCYVVAYIYLDRFLRRRPALAVDSFNVHRLLITSVLTAVKFVDDICYNNAYFARVGGISLVEMNYLEVDFLFGIAWDLNVTPAAFASYCAVLQSEMAYLDVAPAPVVEAPPRLHYCYGAAGTSDRPDDPAAVAAAAPACPRPSSQPQLTV

SEQ ID NO: 9798 - protein, 457 aa, Staphylococcus aureus subsp. aureus COL
MAIAVLLNRMFRMEHNPLFEYIYQQKEDIDACYFIIPEEDMSSASDLKAQFYRGTLQRFYQSLHAEKLTPYVMSYDDIISFCKENNISEVVTAGDIMSYHLEEYDILHQRSLFNEARIAVTLIRGNHYFKASKTMNQQGEPYNVFTSFYKKWRPYLRHRDVYHYDLKSFEDFVIASPDDLVFDDIAFGSSQIIEQNKWQHFLDQDIQNYESGRDYLPEVLTSQLSVALAYGLLDIIEIFNDLLARYDEDEANYEAFIRELIFREFYYVLMTQYPETSYQAFKPKYRQIKWSQNEADFNAWCEGQTGFPIIDAAIMELTQTGFMHNRMRMVVSQFLTKDLFIDWTWGEKFFRKHLIDYDAASNIHGWQWSASTGTDAVPYFRMFNPIRQSERFDAKALYIKTYLPIFNQIDAKYLHDTQRNESNLFEQGIELGSHYPRQMVDHQEKRTQVLATFKALD

SEQ ID NO: 9799 - protein, 441 aa, Lactococcus lactis subsp. lactis
MNLMNKEEKMIKNSQIPSEFYKKYNVKKGLRDINGKGVLAGLTNISAIHSFDKEGNQIPGVLEYRAYNIKDIVSDLRSKNRFGFEEMTYLLLFGELPSAKELQEFQILLASKRTLPEFFVRETILTNPSSDVMNSMSRCLLALASYDKKASDISIENVLEQSLALIADFPLLAIYSYQAYIHYFKKESLYIHFPDPELTTAENILRMLRPDCHYSDMEAKVLDIALILHMEHGGGNNSTFTTHVVTSSGTDTYATIAAALSSLKGPKHGGANIKAAKMLENIKENISDYNNDEEIKKYLHQILNKEVFDKQGLIYGIGHAIYSVSDPRFEVFKSYVESLAKEKGLEEEFKLYEKVAFLAPKVISENRKIYKTICPNVDFYSGFVYKILEIPQELFTPLFAIARIVGWLAHRMEELINMNKIIRPAYESILESKAYTRLEER

SEQ ID NO: 9800 - protein, 414 aa, Arabidopsis thaliana
MDRIIGLPDEVLVKILSFVPTKVAVSTSILSKRWEFLWMWLTKLKFGSKRYSESEFKRLQCFLDRNLPLHRAPVIESFRLVLSDSHFKPEDIRMWVVVAVSRYIRELKIYSSHYGEKQNILPSSLYTCKSLVILKLDGGVLLDVPRMVCLPSLKTLELKGVRYFKQGSLQRLLCNCPVLEDLFVLLLRCDDIGMFIVIVPSLQRLSLYLSPRCNLEGFVIVLDTPLEYFKLVDRNYDRHPYMIENMPKLTSAYVEVISADLKSLVESITSVKYLTIFSEVILLSLFVCMLCLVTLHVWDDNLLARLLKDSPKLQELVYVSDKDVSSFDKLLYLIYCTLFFIIQSDFLLDLRIMTILCFPGINLVLFLNAFVQSTKVHQSTKVHLDKILRKTTRQRYCGLHLEKRLSLKDCNNHM

SEQ ID NO: 9801 - protein, 588 aa, Zea mays
  misc_feature (196)..(196): Xaa can be any naturally occurring amino acid
  misc_feature (460)..(460): Xaa can be any naturally occurring amino acid
  misc_feature (487)..(487): Xaa can be any naturally occurring amino acid
  misc_feature (512)..(512): Xaa can be any naturally occurring amino acid
MASHIILPPDDADENHNHQTAAAAAAEEEEEERDELGRDDDDDEHGVPPALPPKAALPFSATCVRISRDSYPNLRALRNASSVSLADAAYVKISEGDFGYVLDDVPHFTDYLPDIPTYPNPLQDHPAYSTVKQYFVNEDDTVPQKVVVQKNSRRGVHFRRAGPRQRVYFGTDEVKACIVTCGGLCPGLNTVIRELXVCGLSHMYNVSSIFGIQNGYKGFYSSNYLPLTPKSVNDIHKRGGTVLGTSRGGHDTKKIVDNIQDRGINQVYIIGGDGTQKGAYEIFKEIRKRGLKVSVAGVPKTIDNDIAIIDKSFGFDTAVEEAQRAIDSAHVEACSAENGIGLVKLMGRYSGFIAMYATLASRDVDCCLIPESPFYLDGEGGLLQYVEKRLKENKHMVIVVAEGAGQDLIAKSLATSDQQDASGNKLLLDIGLWLTHKIKDYFKSKKMEMTIKYIDPTYMXRAIPSNASDNVYCTLLAHSAIHGAMAXGYSFTVGMVNGRHTYIPFYRVTSTXRNKVKVTDRMWARLLSSTNQPSFLSQKDIDEASEADRLANRPPLPTGASSRVVRSFDQSSSCSSNGRDLSALLVHR

SEQ ID NO: 9802 - protein, 155 aa, Nicotiana tabacum
MSSSKMIVLKSSDGETFEVEEAVALESQTIKHMIEDDCADTSIPLPNVTSKILAKVIEYCKRHVDATKTEDKASEDELKGFDSDFVKVDQATLFDLILAANYLNIKSLLDLTCQTVADMIKGKTPEEIRKTFNIKNDFTPEEEEEVRRENAWAFE

SEQ ID NO: 9803 - protein, 392 aa, Brassica napus
RPTRPVRGGELFNKVAKGRLKEDVARKYFQQLISAVTFCHARGVYHRDIKPENLLLDENGNLKVSDFGLSAVSDQIRQDGLFHTFCGTPAYVAPEVLARKGYDAGKVDIWSCGVVLFVLMAGYLPFHDRNVMAMYKKIYKGEFRCPSWFSPELTRLCSRLLETNPEKRFTFPQIMENSWFKKGFKHVKFYVEDDKLCNVVDDDDELETGSVESDRSSTVSESDVEFFKPARRVGGLPRPASLNAFDIYRFSQGFDLSGLFDDDGEGSRFVSGAPVSKIISKLEEIAKVVSFTVRKKDCRVSLEGSRQGVKGPLTIAAEIFELTPSLVVVEVKKKGGDRTEYEEFCNKELKPKLQTLTADEVDDPVAVSAVVDETASGVANSPPVCFLPSDTE

SEQ ID NO: 9804 - protein, 444 aa, Arabidopsis thaliana
MVRRQEEEKKAEKGMRLGKYELGRTLGEGNFGKVKFAKDTVSGHSFAVKIIDKSRIADLNFSLQIKREIRTLKMLKHPHIVRLHEVLASKTKINMVMELVTGGELFDRIVSNGKLTETDGRKMFQQLIDGISYCHSKGVFHRDLKLENVLLDAKGHIKITDFGLSALPQHFRDDGLLHTTCGSPNYVAPEVLANRGYDGAASDIWSCGVILYVILTGCLPFDDRNLAVLYQKICKGNPPIPRWLSPGARTMIKRMLDPNPVTRITVVGIKASEWFKLEYIPSIPDDDDEEEVDTDDDAFSIQELGSEEGKGSDSPTIINAFQLIGMSSFLDLSGFFEQENVSERRIRFTSNSSAKDLLEKIETAVTEMGFSVQKKHAKLRVKQEERNQKGQVGLSVTAEVFEIKPSLNVVELRKSYGDSCLYRQLYERLLKDVGTSSPEQEIVT

SEQ ID NO: 9805 - protein, 360 aa, Schedonorus arundinaceus
MGSTAADMAASADEDACMFALQLASSSVLPMTLKNAIELGLLEILVAAGGKSLTPTEVAAKLPSAANPEAPDMVDRILRLLASYNVVTCLVEEGKDGRLSRSYGAAPVCKFLTPNEDGVSMAALALMNQDKVLMESWYYLKDAVLDGGIPFNKAYGMSAFEYHGTDPRFNRVFNEGMKNHSIIITKKLLELYHGFEGLGSLVDVGGGVGATVAAIAAHYPTIKGVNFDLPHVISEAPQFPGVTHVGGDMFKEVPSGDAILMKWILHDWSDQHCATLLKNCYDALPAHGKVVLVECILPVNPEANPSSQGVFHVDMIMLAHNPGGRERYEREFQALARGAGFTGVKSTYIYANAWAIEFTK

SEQ ID NO: 9806 - protein, 360 aa, Schedonorus arundinaceus
MGSTAADMAASADEEACMFALQLASSSILPMTLKNAIELGLLEILVAAGGKSLTPTEVAAKLPSAANPEAPDMVDRMLRLLASYNVVTCLVEEGKDGRLSRSYGAAPVCKFLTPNEDGVSMAALALMNQDKVLMESWYYLKDAVLDGGIPFNKAYGMSAFEYHGTDPRFNRVFNEGMKNHSIIITKKLLELYHGFQGLGTLVDVGGGVGATVAAIAAHYPAIKGVNFDLPHVISEAPQFPGVTHVGGDMFKEVPSGDAILMKWILHDWSDQHCATLLKNCYDALPAHGKVVLVECILPVNPEAKPSSQGVFHVDMIMLAHNPGGRERYEREFEALARGAGFTGVKSTYIYANAWAIEFTK

SEQ ID NO: 9807 - protein, 506 aa, Burkholderia fungorum LB400
MNHAEMQFLTTEFPYKKQYANFIGGEWVKPVGGEYFDNVSPITGEAFTSIPRSREADVELALDAAHRAKTAWGKTSAADRANILNRIADRMEANLQRLAVAETIDNGKPLRETTAADIPLAIDHFRYFAGAVRAQEGSLSEIDHDTVAYHFHEPLGVVGQIIPWNFPILMAVWKLAPALAAGNCVVLKPAEQTPASILVLVELIQDLLPPGVLNVVNGFGLEAGKPLASSKRIAKIAFTGETTTGRLIMQYASQNIIPVTLELGGKSPNIFFADVMNEDDSFFDKALEGFAMFALNQGEVCTCPSRVLIDEKIYDRFMERALKRVAAITQGHPLDTKTMIGAQASQEQLEKILSYVDLGKQEGAECLIGGERNALGGELSKGYYVKPTVFRGNNKMRIFQEEIFGPVVSVTTFRNEEEALEIANDTLYGLGAGVWTRDGTRAYRFGRQIQAGRVWTNCYHAYPAHAAFGGYKQSGIGRENHKMMLDHYQQTKNLLVSYSDKPLGFF

SEQ ID NO: 9808 - protein, 419 aa, Pirellula sp. 1
MLSLPLMIAASASTVVILGVVMFTVVVIALVLLILAAKSQLVASGPVKIMINGQKEISVPAGGKLLGALADAGIFVSSACGGGGTCAQCKVKVSEGGGDLLATEAGHINKKEAAEGERLSCQVAVKTDMVVEVPPEAFDTQKWECTVKSNDNVATFIKEFVLQLPEGAEVDFRAGGYIQIECPPHEIHYKDFDIAEEYHPDWDQYNIWRYVSKVEEPVVRAYSMANYPGEKGIIMLNIRVASPPPRAPEGTPPGKMSSYIFSLKPGDKATISGPYGEFFIKDSDAEMVYIGGGAGMAPLRSHIFELFKRQKTDRKVSYWYGGRSLRELFYIEHFREIEKDFPNFKFNIALSEPQPEDNWDGYVGFIHQVLLDNYLSKHPAPEDIEYYICGPPMMNAAVFRMLDDLGVEPENIAYDDFGG

SEQ ID NO: 9809 - protein, 360 aa, Schedonorus arundinaceus
MGSTAADMAASADEEACMFALQLASSSILPMTLKNAIELGLLEILVAAGGKSLTPTEVAAKLPSAANPEAPDMVDRMLRLLASYNVVSCLVEEGKDGRLSRSYGAAPVCKFLTPNEDGVSMAALALMNQDKVLMESWYYLKDAVLDGGIPFNKAYGMSAFEYHGTDPRFNRVFNEGMKNHSIIITKKLLELYHGFQGLGTLVDVGGGVGATVAAITAHYPAIKGVNFDLPHVISEAPPFPGVTHVGGDMFKEVPSGDAILMKWILHDWSDQHCATLLKNCYDALPAHGKVVLVECILPVNPEAKPSSQGVFHVDMIMLAHNPGGRERYEREFEALARGAGFTGVKSTYIYANAWAIEFTK

SEQ ID NO: 9810 - protein, 142 aa, Zea mays
MALRKAFDKPVSLVTAVAVRHLAGTEAARRLGTKLHSFYVGLKGSPDLKAAREVAEYLGTLHHEFHFTDDIDAIEDVIYHTEAYDVTTIRASTPMFLMSHKIKSLGVKMVISGEGSDELFGGYLYFHKAPNKEELHRETCRK

SEQ ID NO: 9811 - protein, 485 aa, Pseudomonas fluorescens PfO-1
MAGAQTHMHTALLIDGELVAGQGFVEPILNPATGEVLTQIAEASTEQVEAAILAAHRAFAEWSRTTPQQRSNLLLEIANAVEKHADHLARLEALNCGKPLHLARQDDLTATIDVFRFFAGAVRCQTGQLSGEYVPGYTSMVRRDPIGVVASIAPWNYPIMMAAWKIAPALAAGNTLVFKPSEHTPLSILALAPALAEILPRGVINIVCGGGEGVGSHLVGHPKVRMVSLTGDIVTGQKILQAAAKTLKRTHLELGGKAPVIVCNDADLKAVVEGVRTYGYYNAGQDCTAACRIYAQAGIHDKLVAELGAAVSSLRFAGKRDADNEIGPLISTRQRDRVASFVERALGQPHIERVTGAAVHSGAGFFYQPTLLAGCKQSDEIVQREVFGPVVTVTRFDELAQAVDWANDSEYGLASSVWTQNLDKAMQVAARLQYGCTWINSHFMLASEMPHGGLKRSGYGKDLSSDSLQDYSVVRHIMARHGQHL

SEQ ID NO: 9812 - protein, 360 aa, Schedonorus arundinaceus
MGSSAADVAASADEEACMYALQLGSSSILPMTLKNTIELGLLETLMAAGGKSLTPTEVAAKLPCAANPEAPDMVDRMLRLLASYNVVSCLVEEGTDGRLSRRYGAAPVCKFLTPNEDGVSMAALALMNQDKVLMESWYYLKDAVLDGGIPFNKAYGMSAFEYHGTDPRFNRVFNEAMKNNSIIITKKLLELYDGFQGIGTLVDVGGSVGATVAAITAHYPAIEGINFDLPHVISEAPPFPGVTHVGGDMFKKVPSGDAILMKWILHDWSDQHCATLLKNCYDALPAHGKVVLVECILPVHPEAKPSSQGVFHVDMIMLAHNPGGRERYEREFEALAKGAGFAGFKSTYIYANAWAIEFTK

SEQ ID NO: 9813 - protein, 512 aa, Mycobacterium avium subsp. paratuberculosis str. k10
MLSKCSALSAVGAGHDGSPEDSPEERDQMTVQAVLDDIRKRPGTGDVIAVIDPATEEKITEFTDCGAEAVDEAAARAKASFESGVWSQLPGRERAKILWRIGDLIDEHAEEFAQLDSLNTGMPLLQAQLQMSTCSEFFRYYAGWCSKINGTAYDVKTDGIATDTFVNMHAYTLKEPYSVVGLIFPWNGPIFNANAKLAPALAAGCSLLVKPAEETPLSALLLDRLVHEAGVPEGVVNLLTGYGHTAGAAITAHPDVEKVAFTGSTEVGKEIVRASAGNLKKVTLELGGKSPVLIFDDADLDKAILMASLGIFVHSGQGCVCGSRIFVQRGVYDRVVEGIAMMANTFKLGAPSEEGCVSGPLISQKQLNRVMGFIDEGKNDGVEVVTGGYRLDRKGYFVHPTVLTNVDPGMRLYQQEIFGPVVAILPFDDEDEAVAMANDTTYGLAATAWTENLGRAHRIVKRLQAGSVQVNCQLVFDHDVPFGGYKQSGWGHEFGKEGLEIYLKTKSVWAQL

SEQ ID NO: 9814 - protein, 407 aa, Vibrio vulnificus CMCP6
MDIILGVVMFTLIVLALVLVILFAKSKLVPTGDITISINGDADKSIVTSPGGKLLSALAGAGVFVSSACGGGGSCGQCRVKVKSGGGDILPTELDHITKGEAREGERLACQVAVKTDMDIELPEEIFGVKKWECTVISNDNKATFIKELKLQIPDGESVPFRAGGYIQIEAPAHHVKYADFDVPEEYRGDWDKFNLFRYESIVKEDIIRAYSMANYPEEFGIIMLNVRIATPPPNNPDVAPGQMSSYIWSLKEGDKCTISGPFGEFFAKDTDAEMVFIGGGAGMAPMRSHIFDQLKRLKSKRKMSYWYGARSKREMFYVEDFDGLAAENDNFVWHCALSDPLPEDNWDGYTGFIHNVLYENYLRDHDAPEDCEYYMCGPPMMNAAVIGMLKNLGVEDENILLDDFGG

SEQ ID NO: 9815 - protein, 300 aa, Saccharomyces cerevisiae
MVNNSQHPYIKDGWFREINDKSFPGQAFTMTVDSILYEARSEFQDILIFRNKVYGTVLVLDGIVQCTEFDEFAYQEMITHIAMFAHSNPKRVLIIGGGDGGVLREVAKHSCVEDITMVEIDSSVIELSRKFLPTLSNGAFDDERLDLKLCDGFKFLQDIGASDVHKKFDVIITDSSDPEGPAEAFFQERYFELLKDALNPNGVVIMQSSENFWLNLKYLHDLKNTAKKVFPNTEYCYTMVPTYTSGQLGLIVCSNNANIPLNIPQRKISEQEQGKLKYYNPQIHSSAFVLPTWADKVINE

SEQ ID NO: 9816 - protein, 481 aa, Candida albicans SC5314
MLLHHTLGNGDFTVFHRMSTNICETTAFLDDLATACNEIDRCLRTAYTMQRPVYIALPSNMVDMKVPQAMLEKSIDLSLEPNNIQSQNEVIDRILGMVSKASNPIVLVDACASRHDCKKEVKQLVETTQFPVYVTPMGKGMIDEGGIGGEDLADASAFKNLASNLSSGTSVASRYGGVYIGSLSKPEVKEGIENSDLIFSCGALLSDFNTGSFSYSIGTKNVIEFHSDHAKIKSAIYSGIKMKELMQALNKKISSVLTNYVPKSVPKVKLVNAPTELSAPLTQAWFWTRVSSWFKEEDIIITESGTAAHGILEARFPNNVVGISQILWGSIGYSVGATLGASVAAKEVDPKKRVILFVGDGSLQLTMQEVSTMIKNGVHPYIFVVNNAGYTIEKLIHGLNAKYNNIQPWNHSQILSLFNAKDSQSAKISTVGEADDLFRNKYFGVNSKIRLIELMFSSLDAPKALVQQAKAAADVNRGTTD

SEQ ID NO: 9817 - protein, 498 aa, Bifidobacterium longum DJO10A
MSITLRNIKVWNTGEVIDLVVPGTAAAYFADTSAVADGADIDATGLTVAPGFEDPHVHFRDPGQTYKESMVSGCRASASGGYTNVLIMPNTLPALDGQTVSGPEATGAKEVLDAGFDNVIDFLQQYDTAHDVQLPVRYDLCVCASKDRAGHEASDVADWLKYVPGFEDDAKTPAMLTHPITAISDDGSAVTPEILDQVLENVKASDLYLIEHCEHHDTGAVNEGPVSRELGVPGIPEDTELKIVARDIEAARRTGVHVHFQHVSTAISFEAIRRAKAEGLPITCETAPHYLALSDEALLKYGTLAKMNPPLRSEADRKATIAAIADGTVDLLATDHAPHTLAEKELGFLEAPNGIIGLECAYGVCHKVLVDGGFISDERLIELMSVGPAELMGHVPTDVAALVEDYAEPAPTGDDPDGVIAGESDAQPQREGVNRLLDLSRVDDADNVDLVVLNTAEEWTVDPEQFHSKARNTPFGGWQVTGRPLATIIGSQLMFSRL

SEQ ID NO: 9818 - protein, 250 aa, Zantedeschia aethiopica
MGKSYPAVSEEYQKAVDKAKKKLRGLIAEKNCAPLMLRLAWHSAGTFDVCTKSGGPFGTMRLAEELGHGANNGLDIAIRLLEPIKEQFPILSYADFYQLAGVVAVEITGGPEIPLNPGREDKPVPPPEGRLPDATKGSDHLRQVFGQQMGLCDQDIVALSGGHTLGRAHRERSGFEGAWTSNPLIFDNSYFTELLTGEKEGLLQLPSDKALLSDPVFRPLVEKYAADEDAFFADYSEAHLKLSELGFPEC

SEQ ID NO: 9819 - protein, 117 aa, Nicotiana glauca
MAKVALLVVVCMAAVAVMLTPQADAAISCGQVVSSLTPCISYVTKGGAIPAPCCSGIKSLNNQATSTPDRQTACNCIKSAVGSISGINFGLASSLPGKCGVNLPYKISPSIDCSTVQ

SEQ ID NO: 9820 - protein, 116 aa, Zea mays
TCRLLIVVYGILWGFSAPGPGADPKVDYACTPEEVQQHFQACGTVNREGVQEALNLNESELHGRQIKVAPKRTNVPGMKQRPPRGLLDSAALCATDLTSEVRGRVMKFNAKPAHGH

SEQ ID NO: 9821 - protein, 465 aa, Chlamydomonas reinhardtii
MGSCLAKPAESAEQKKASSVPSPPPAPAPQPVQQAAAPAPKDSGDVKPGQQATPVPPPSPPPQPKPAPPAQPAPAPAAKVVEAIPAVADEKSPQGKQPRRSQEHDNGVKAEEIELVKQKSTEPQPSASATAAVATPKAIEPAMEPKVAAPSAPAAAPAPAQAPAAAPTPARPGSKLRTDVKLRDLYKLGKTLGTGGFSVVKLATDRGTGVEYACKIMALPPVGQEVGENENTREDIFKEIDLLCGMNHENVIFLKEYFEEGNKVYLITELLTGGELLEAVLKRGSYTEAEARLCFVQVLRGIEYLHSKNVVHRDLKLENLLLAKQDDISLVKIADFGLAKHAVNGMQTICGTPQYVAPEVIVGAKGHVYGPGVDMWSAGVVLYILLGGYPPFWSDSEPQLFDMIRKGKYSFGDPVWNKVSEGAKDLIRKLLVVDPTKRLSATEALQHQFILEGNFNPPSTPKGPR

SEQ ID NO: 9822 - protein, 1870 aa, Gibberella zeae PH-1
MKGSDSLRRANRPAANFDLPPVALAQAQQQTQVQAQAQAQSFQSQSQPQESITNTVTSTSPEITNASLHGQAQAKAQALTTARFRSSSRPSLQDLALVDGTSTSNNHDLPPAYALSSSSSSTGPSSFSYPPAHVHPRPSTANAAATTHTHTRPRPLGPSSSDIATAEQAQFLRIHPVSSTSSLRPRSSTTSASAVASASASTSPSHTPNSLLRQHTSPPSAVDNNSAHFVPRGGLPPAPSIMYQANQRHVSGTDPSRPYQVPPPPPPPMGGPNNGHMPNMMNLPPPPPLPRYNTAPGSNGLSLPPPPGPPPASALGQQPPWHGAFGRMYDSRSGFNIPPPPPSSQHQPYNPKLHAQIAAGQTVSIPPPPPPNEAMSATYIPQGDTYGEGVGIPAFGLEDPTLTVNSQTLRPVTTPQSGTDTNATTPMDEATRERLYAANNAQPRGTSNSSNPTPPGSIPPEIAAQWPLDTVLLWLAQNQFSKDWQETFRALNLHGAQFLELGSGHGGRGNFGMMHQQVYPRLAQECTNSRTGWDQPREREEGKRMRRLIRSIVTGRPADVSKVSTSHGRKESLNGGHGNNLPSAGTDPMDSPNTPLTAPGPGFSSRRFSQTRSTTLPNSISASNINSESNHRNILKHVDTDGARRHSPNVSESSEATFRAPAVHSASPTGSPGIPPALYTSTTTPTIAQSPSAIKAGHRSRSSMDSVASVAAIYGSGVPSDAASLLNRNMNLGDIVHGRSHDARSRHSPSDGGDRSAGGETPSSAKDSNRLLSFLSRKKKQTKDDGAYPSPEDMNGSPTSPHGSFRPVGLGVRGSNGSDTNIDLSGSTLGDDRNGSTLNMRWNKISPVRTYVLATMDYWNYRMCDITEAETATEIRQVICMHLGLGDYENSHIYLTEAGKFEHVDPLDDPSLITVRRAKGDPLGTLKFFVTPPGVAPISSLSVKAEVPIILSPSYLSPGTPVEDAQQMSRQRSSSSPPTSRSNTLTNEKNEDKIAREAKQYRAEIERKQQEYLAKRKQAAMKGSPSETLGPGIVGRNVDFDQPRESPYEDKRPEPLFPQRRPPAPPSDPSATLIKANSLSRKTGASMRASSSSLEGYPSKRYPENEMAEKTKKANKQAPPAPGIGAALAGMGRNLSAIGQSAKNGRASSPSRSSTHSIPGGKDTFSTVEPSQGRGSPSTTSSSKLTTGNVTWNKKNLGFIVPDYSPSDSSFLLSPSPTVDAKFNATVPRAMSPAEMSPNSSRSRTSFPPNQQSPTHRRASHGPEPEFEDTDVHFSKPAPAPPADDDSDDSDDGLFAIPIANQNKGKAAAANADANGHSKRPSLHVNTERSRKGLSVAFKSPKSFGSGMDSNEDSGRQNPTTPHSETWEPEEKDKESKLGRRKSFIEKDVWANRPPTDALINNLDDFFPNLDLDQPVLDEPGESGMPPSPIAESSETNIDQQAQNVAPPQPSYPQHVPPAIPPTRQPSLYNENDTLGSDESTLKALDQHRPTSVAQRSIRRSGGLGRMKSIREVARGAHEANKRTTSTNQGQAATTNIMRRKSTKMFNANIVQIRPDRRGSVVMPQIPQDTVPKRQTTFRWFKGQLIGKGTYGRVYLGMNATTGEFLAVKEVEVNPKAAGGDKNKMKELVAALDQEIDTMQHLDHINIVQYLGCERKETSISIFLEYISGGSIGSCLRKHGKFEESVVSSLTRQTLSGLAYLHREGILHRDLKADNILLDLDGTCKISDFGISKKTDNIYGNDKTNSMQGSVFWMAPEVIRSQGEGYSAKVDIWSLGCVVLEMFAGKRPWAKEEAVGAIYKIANGERPPIPEDIQDTLGPLAVAFMMDCFQVNPFDRPTADVLLSQHPFCEVDPHYQFYDTALYHRIKSFK

SEQ ID NO: 9823 - protein, 342 aa, Lycopersicon esculentum
MADECAAFMKGTELPVKRPREEEAETEMEAANNSNNGCEKEESSPYISSVLPGWFSEISPLWPGEAHSLKVEKILFQGKSDYQNVLVFQSSTYGKVLVLDGVIQLTERDECAYQEMITHLPLCSIPNPKKVLVIGGGDGGVLREVSRHSSVEQIDICEIDKMVVEVAKQFFPDVAVGYEDPRVNLHIGDGVAFLKNVPAGTYDAVIVDSSDPIGPAQELFEKPFFESIAKALRPGGVVSTQAESIWLHMHIIEEIVANCRQIFKGSVNYAWTTVPTYPSGMIGFMLCSTEGPAVDFKNPINPIDDESPAKSIEPLKFYNSEIHQASFCLPSFAKRVIETKGK

SEQ ID NO: 9824 - protein, 240 aa, Atriplex hortensis
MSYSYPPPLPSNTLNNFLSPKPVTMKTTGGPPKPTKLYRGVRQRHWGKWVAEIRLPKNRTRLWLGTFDTAEEAALAYDKAAYKLRGDFARLNFPNLRHEGSHIGGEFGEYKPLHSSVNAKLEAICESLAKQGNEKQGKSGKSKKKDVANNNNNTSSSSSSSCCTTATAAADAPQQQQRMPENGGDVKTESTSDSEVGSGGSSPLSDLTFGDNEEMGSENFLLESCPSHEIDWDAILSSES

SEQ ID NO: 9825 - protein, 331 aa, Brassica napus
MSNVTADPTADGPSTAVAVSNSTAIQTSPPTDRPVRVYADGIYDLFHFGHARSLEQAKKSFPNTYLLVGCCNDETTHKYKGRTVMTAEERYESLRHCKWVDEVIPDAPWVINQEFLDNHRIDYVAHDSLPYADTSGAGKDVYEFVKKVGRFKETMRTEGISTSDIIMRIVKDYNQYVMRNLDRGYSREDLGVSFVKEKRLRVNMRLKKLQERVKEQQEKVGEKIQTVKMLRNEWVENADRWVAGFLEIFEEGCHKMGTAIRDRIQERLIRQIPRNRLENGQDDDTDDQFYEEYFDHDMGSDEDEEERYYDEEEDVEEEKYKTVKPDAKDDK

SEQ ID NO: 9826 - protein, 110 aa, Glycine max
IQALEFKPIFLHLRKVRRMAGIRDAKSILVKLEWFLNWVTFFVARSVPHVLITAKLIKDAYKFEKGMELPLALLGMAGMNLLNIGLGIDLLKAFKRERKSQQGNLHHHRE

SEQ ID NO: 9827 - protein, 170 aa, Zea mays
  misc_feature (93)..(93): Xaa can be any naturally occurring amino acid
  misc_feature (118)..(118): Xaa can be any naturally occurring amino acid
MHRHVTSGRASGTDGSPFSYQMVVKSRHQRVAEGRSRLARLILGQALHLVAGGLLLWLSLSKGAAVNKFAVLSMAAAFLAIGVGELGRMRTMXLLLRLYSSSPSIAVAFSVTCIFRSXLFLKVMKQNTEAISSYEMLDAVRVALGIPLQMVVIATTTRLLQNMSPPKRAS

SEQ ID NO: 9828 - protein, 175 aa, Crocus sativus
MGKSSPTVSAEYLKAVEKCKRKLRGFIAEKNCAPLMLRIAWHSAGTFDCKSKTGGPFGTMRHKAELAHGANNGLDIAVRLLEPIKEQFPIISYADFYQLAGVVAVEITGGPDVPFHPGREDKPEPPVEGRLPDATKGCDHLRTVFGEQMGLSDKDIVALSGGHTLGRCHKDRSGF

SEQ ID NO: 9829 - protein, 344 aa, Arabidopsis thaliana
MLTCIACTKQLNTNNGGSTREEDEEHGVIGTPRTKQAIKSLTSQLKDMAVKASGAYKNCKPCSGTTNRNQNRNYADSDAASDSGRFHYSYQRAGTATSTPKIWGNEMESRLKGISSEEGTPTSMSGRTESIVFMEDDEVKEWVAQVEPGVLITFVSLPQGGNDLKRIRFSREMFNKWQAQKWWVENFEKVMELYNVQFNQQSVPLQTPPVSEDGGSQIQSVKDSPVTPPLERERPHRNIPGSSGFASTPKLSSISGTKTETSSTDGSARSSSVDRSEEVSVSNASDMESEWVEQDEPGIYITIRALPDGNRELRRVRFSRDKFGETHARLWWEQNRARIQQQYL

SEQ ID NO: 9830 - protein, 447 aa, Triticum aestivum
FLRRRDRIAERLFNALLARPSCHGCTASTGSVPPATPAVAEDKGSVRRVPEKESKVDSSSLGAPGGGALGGGISEDEDSDSEDDERLRRAAASNYGHNYDDDNDVEEEQDAAAPAEEDHHAEDDDPEAEELEALTNEIDEESQIVGEVLRIKELLLHKQDHSDATLFDSLRRLQLMQLSVSTLKATEIGRAVNGLRKHSSQQIRHLALALIQDWKILVDEWVSTTVAARAGGPPRHGAPPAPENGQGSPPPPPLHAGAFFAPETAALQPPEFFDEMDEDGNLRHNNDVSPWKQEGKQWQEACKPFNCVKTRTYSTCSLIPGSMRPMKAATQQKPIGEMKYKQTQEHFGVERKPTMGHVDKSRLRAQPSSGVRLESARPKTQDGLESNVRLEAAKRRLQERYQEAENAKKQRTIQVMELGDIPKPKSNTRQPMVKSRNNIRSRVLGRR

SEQ ID NO: 9831 - protein, 90 aa, Zea mays
MRCLILFPSSSSWSLAAGRSGGGLYDEEYVQKRMDRAYEVEELGANLTKKMHPSGRDDISVLAMQRLFNHQPNGPTTPVDMALDYFIYDY

SEQ ID NO: 9832 - protein, 368 aa, Clarkia breweri
MGSTGNAEIQIIPTHSSDEEANLFAMQLASAAVLPMALKAAIELDVLEIMAKSVPPSGYISPAEIAAQLPTTNPEAPVMLDRVLRLLASYSVVTYTLRELPSGKVERLYGLAPVCKFLTKNEDGVSLAPFLLTATDKVLLEPWFYLKDAILEGGIPFNKAYGMNEFDYHGTDHRFNKVFNKGMSSNSTITMKKILEMYNGFEGLTTIVDVGGGTGAVASMIVAKYPSINAINFDLPHVIQDAPAFSGVEHLGGDMFDGVPKGDAIFIKWICHDWSDEHCLKLLKNCYAALPDHGKVIVAEYILPPSPDPSIATKVVIHTDALMLAYNPGGKERTEKEFQALAMASGFRGFKVASCAFNTYVMEFLKTA

SEQ ID NO: 9833 - protein, 122 aa, Sorghum bicolor
TPSAAVVKEELFGPVLYVMKFQSLKEAIEINNSVPQGLSSSIFTKRPEIIFKWLGPHGSDCGIVNVNIPTNGAEIGGAFGGEKATGGGREAGSDSWKQYMRRATCTINYGSELPLAQGINFG

SEQ ID NO: 9834 - protein, 307 aa, Zea mays
MAFLNMEQQTWAFTFGILGNIVSLMVFLSPLPTFYRVYRNKSTEGFQSTPYVVTLFSCMLWILYALLKPGAELLVTINGVGCVVETVYLAMYLVYAPKAARVLAAKMLLGLNVAVFGLVALVTMLLSDAGLRVHVLGWICVSVSLSVFAAPLSIMRQVIRTKSVEFMPISLSFFLVLSAVVWFAYGALKKDVFVAFPNVLGFVFGLAQMALYMAYSRNRKPAAALVILPEQSKEEAAEGKASCGGAEVHPIDIAEVHDLQAVVVDVDVEPVTYAAASGMVDGSVGRPRAPEQLVIKPDMVTVIAAEA

SEQ ID NO: 9835 - protein, 583 aa, Zea mays
SRPAGPGLHADLLYEPWEVLDDDGFPFTMFAPFWNRCLCMPDPAAPLLPPKRINSGEFPGRPTRPGDLSRCPWDELIFEDESERGSNALLARAWSPGWQNADKALTAFLDGPLVDYSANHKKADSASTSLLSPYLHFGELSVRKVFHLVRMKQLMWSNDGDRAGEESCTLFLRAIGLREYSRYLTFNHPCSLEKPLLSHLRFFPWVVDEVHFKVWRQGRTGYPLVDAGMRELWATGWAHDRIRVVVSSFFVKVLQLPWRWGMKYFWDTLLDADLESDALGWQYISGSLPDGRELDRIDNPQFEGYKFDPHGEYVRRWLPELARLPTEWIHHPWDAPESVLQAAGVELGSNYPRPIVELDAANSRLQDALSEMWELEAASRAAMENGMEEGLGDSTDEPPIDFPQELRMEVDRQPAQPAIIHTPVVAGWRREDQRVPSMTSSLIRAETELTADFGNTSEDSRPEVPSNIHLQARPEREETVDGATGNAVRVNGNQQQQNLQNNMHRVLGIAPSISEASSSWTGRDGGVVPVWSPPAASVHSDPYTADEADISSRSYLDRHQQSNTMMNWSQLSQSLTTGWEVDN

SEQ ID NO: 9836 - protein, 264 aa, Solanum tuberosum
MCGGAIISDYEPAGNFYRKLSARDLWAELDPISDYWSSSSSSSTVENPYSAQSPVTHSVDKPKKSDSGKSNQLKKGNKTVKVEKEKSTGPRQRKNKYRGIRQRPWGKWAAEIRDPQKGVRVWLGTFNTAEDAARAYDEAAKRIRGNKAKLNFPAPSPPAKRQCTSTVAADPPPALLLESSNIISYNNSPLMNFGYDVQSQTPYYPMEMPVASDDYELKEQISNLESFLELEPADSSDQFSGIVDPDPLNVFLMEDFASTQHQFY

SEQ ID NO: 9837 - protein, 479 aa, Sinorhizobium meliloti 1021
MNDMCLTNLQSGITMVSAAAIEAFTARLRGRVLVATDAAYDEARTIWNGMIDRRPGLIVQCAGAADVVNAVRFAAENQLLVAVRGGGHNIAGNAVCDGGMVIDLTPMKSVRVDATTKTAWVEPGATLADLDMETQAFRLALPTGINSTTGIAGLTLGGGFGWITRKFGLTIDNLLSADVVTANGELVRASPTEHRDLFWAIRGGGGNFGVVTAFEFRLHELGPEVLSGLVIHPFAEAESVLQQYRQALENAPDELTCWVVMRQAPPLPFLPTEWHGKEVVVLAMCYCGDLEAGEKAMAGLRAIGNPIADVVSPHPFVGWQQAFDPLLAPGARNYWKSHDFMELSDQAIEILTESIRQLPGQECEIFIAHVGGAAGRVAPEETAFPQRNSHFVMNVHGRWRDPAMDQACIDWARHLFEAAKPHAAGTAYVNFMPEDEMDRVEAAYGANYGRLVEIKRHYDPLNLFRMNQNVRPIEERGAA

SEQ ID NO: 9838 - protein, 254 aa, Methanosarcina acetivorans C2A
MTSYKVLVRDVIKKADVLLEVIDARFPDETRNNEVEKEIIRLKKPFIIVINKCDLVSKDKLEKTKARLSRIAPTVFVSGKARFGTTMLRHQILASACIKGQDILVGTLGYPNVGKSSVINGVTGRHRASTSPVSGHTKGVQHVGAGSRIMFVDTPGVIPFDENDDYVQGLLGIKDATHLKDPIGVALKIIEKMLVENKTALEVFYNVTLETQDSYSGLELIGKQCNFLQKKGEVDEMRTAIRIINDWQTGLLLI

SEQ ID NO: 9839 - protein, 133 aa, Brassica napus
MEGDGVKGLACQKTMDGNASNGNGVEKTVPSCCLKAMSCLPEEDAKCHSTVVSGWFSEPPHLRSGKRGKAVYFNNPMWPGEAHSLKVEKVLFKDKSDYQEVLVFESATYGKVLVLDGILQLTEKDEFAYQEMI

SEQ ID NO: 9840 - protein, 175 aa, Azoarcus sp. EbN1
MRARSFRHLLPSAVSALLFTLILAVAAPPAFAADEAAPLVTDPQLEERVMDLSHKLRCLVCQNQSIAESNAPLALDLRNQVREQLAAGKSEEAVVDYLVARYGDFVLYLPPFKGITLLLWLGPALLLVAGAGWLGWRLRRRAEEVRSAPHLTRDERARARALLDGTSPSSEEPRS

SEQ ID NO: 9841 - protein, 508 aa, Glycine max
MDYHTTVLLLITFVSATIILIFIRRLFNQTSESEYAKLPPGPRPFPIIGNILELGTNPHIALTKFSKIYGPLMTFKLGRITTIVISSPQVAKEVLLENGQVLSSRTIPHSVHALDHHIYSTVWLPPSAQWRNLRRVCATKIFSPQLLDSTQILRQQKVKDLLDFVKERCKKGGVVDIGEVVFTTILNSISTTFFSMDLSDSTSEKSHEFMNIIRGIMEEIGRPNVADLFPILRPLDPQRVLARTTNYFKRLLKIIDEIIEERMPSRVSKSDHSKVCKDVLDSLLNDIEETGSLLSRNEMLHLFLDLLVAGVDTTSSTVEWIMAELLRNPDKLVKARKELSKAIGKDVTLEESQILKLPFLQAVVKEALRLHPPGPLLVPHKCDEMVNISGFNVPKNAQILVNVWAMGRDPTIWENPTIFMPERFLKCEIDFKGHDFKLIPFGAGKRICPGLPLAHRTMHLIVASLVHNFEWKLADGLIPEHMNMEEQYAITLKKVQPLRVQATPIKRD

SEQ ID NO: 9842 - protein, 126 aa, Zea mays
DARDIFASDSIELLRRSGIDLRLNAERGVDARRFAELLMSSGVVLNDSVYWVTFHAGYDFGLHGGLNKLAELLDVERVGESHQAGSDSLVTSCAFWKLKDSFFTGSTEKYAGVLYGLNAEIDVSAH

SEQ ID NO: 9843 - protein, 311 aa, Triticum aestivum
  misc_feature (146)..(146): Xaa can be any naturally occurring amino acid
  misc_feature (178)..(178): Xaa can be any naturally occurring amino acid
MKTLLILTILAMATTIATANMQVDPSSRVQWPQEQPPPQSQQPFSQQPQQIFPQPQQTFPHQPQQAFLQPQQTFPRRPQQQFPQPQQPQQPFPQPQQPQLPFPQQPQQPFPQPQQPQQPFPQSQQPQQPFPQPQQQFPQPQQPQQXHSPQQQQWMIQSFLQQQMNPCKNFPLAAMQPXCHWVSSLVSMILPRSDCKVMRQQCCQQLAQIPQQLQCAAIHGIVHSIIMQQEQQQQQQQQQQQQQQQGIQIMRPLFQLVQGQGIIQPQQPAQLEVIRSLVLGTLPTMCNVFVPPECSTTKAPFASIVADIGGQ

SEQ ID NO: 9844 - protein, 186 aa, Brassica napus
  misc_feature (42)..(42): Xaa can be any naturally occurring amino acid
LDPRVRTGAKLSRSEHSMGASSEPKSIYDFTVKDAKGNDVDXSTYKGKVLLIVNVASQCGLTNSNYTELAQLYQKYKDHGFEILAFPCNQFGNQEPGSNEEIVQFACTRFKAEYPIFDKVDVNGDSAAPIYKFLKSSKGGLFGDGIKWNFAKFLVDKDGNVVDRYAPTTSPLSIEKDLKKLLGVTA

SEQ ID NO: 9845 - protein, 361 aa, Caulobacter crescentus CB15
MSDGLEGVIAAQTVLSDVDGAHGRLVIRGYAVEDLAGRTRFEDAAHLLLDGFFDDAPSDLSSALGEARVGVFAEVAALDEGLARRDPVEALRALLARIPDGDDLKTALRLIAAPAVFTPAVLRVANGDAPIAPDPALSHAADILRMIRGVPATDAEAAALDAYLVTVCDHGLNASTFAARVVASTRAGLTSAVLAGLSALKGPLHGGAPGPVIDMLDAIGTPENARPWLERALARGDRLMGFGHRIYRVRDPRADALKAAVRRLSSASGGLPGRLAFAEAVERAALEILREHKPDRPLDTNVEFYTALLLEALGLPPSSFTCVFAMGRVAGWLAHAREQLAGGRLIRPQSVYVGPEVRVAA

SEQ ID NO: 9846 - protein, 475 aa, Bordetella pertussis Tohama I
MYEQLALYIDGEFLTGDGRRTQDVVNPATLEVLGQLPHASEADLDRALAAAQRAFETWKRTSPMERAAILRKVGQLSRDRAQEIGRNMTLDQGKPLAEAVGEVASCSEHADWHAEECRRIYGRVIPPRNPDVRQFVVREPIGVCAAFTPWNFPYNQAIRKIAAALGAGCTVVLKGPEDSPSAVMAIARMFHEAGLPKGCLNIVWGEPAKISDYLIRSPIVRKVSFTGSVPVGKQLAALAGAHMKRVTMELGGHSPVLVFDDADVDRAAEMLARFKVRNAGQVCVSPTRFYVQNGAYEQFLARFTEVLKNIKVGDGLEKGTDMGPLAHERRVPAMSTFVDDALKHGGKVVLGGDAPDRKGYFFSPTVVTELPDNAMLMTEEPFGPLAPVVRFTDTDEVLRRANSLPFGLSSYVFTNSLKTATKVSNALEAGMVNINHFGSALAETPFGGIKDSGIGSEGGLETFDGYLVTKYITHI

SEQ ID NO: 9847 - protein, 388 aa, Caulobacter crescentus CB15
MDAEQVLERLGIRPQTLYAYVSRGRIEAAAHPSDPRRSLYRASDVTALARKKARGRRVADVAAEAIAWGEPVLPSAITTVSGGKLWYRGEDAAGLADQGLTLENVARLLRGGHGAALKASSRPPPPATDSARSRMFLTLAERAGREPPARGRAPLALAMEAADLLDAIVDAATGQAGDGPAHQRFAHAWNLTADGADLVRRALVLMADHELNASTFAARVAASTGASLSAACLAGLSALSGPLHGGMAARVEALVEEADRRDAARAVSSRLEQGASLPGFDHPLYPGGDPRAAALLARFEPPEPLTALWQATRAATGLAPNIDFALVALARGLALPQDAPFILFATARSAGWTAHAIEQLQTGRLIRPRARYIGTVPSAAGYSPSSSS

SEQ ID NO: 9848 - protein, 398 aa, Pseudomonas putida
SGNRGVVYLGSGKVEVQKIDYPKMQDPRGKKIEHGVILKVVSTNICGSDQHMVRGRTTAQVGLVLGHEITGEVIEKGRDVENLQIGDLVSVPFNVACGRCRSCKEMHTGVCLTVNPARAGGAYGYVDMGDWTGGQAEYVLVPYADFNLLKLPDRDKAMEKIRDLTCLSDILPTGYHGAVTAGVGPGSTVYVAGAGPVGLAAAASARLLGAAVVIVGDLNPARLAHAKAQGFEIADLSLDTPLHEQIAALLGEPEVDCAVDAVGFEARGHGHEGAKHEAPATVLNSLMQVTRVAGKIGIPGLYVTEDPGAVDAAAKIGSLSIRFGLGWAKSHSFHTGQTPVMKYNRALMQAIMWDRINIAEVVGVQVISLDDAPRGYGEFDAGVPKKFVIDPHKTFSAA

SEQ ID NO: 9849 - protein, 159 aa, Triticum aestivum
  misc_feature (88)..(88): Xaa can be any naturally occurring amino acid
FSWADAWADAWDLWFPAGALVLRFRRRLKTAERVMGTVKRFNVTKGFGFIFVSPEDGSQDLFVHQAAIKADGYRSLNENDALEFEVIXTGDDGRTKASDVTAPGGGALAGGSRPGHRGGDRGGRGGYGGGGYGGGGGGGGCFSCGESGHFSRECPNKAH

SEQ ID NO: 9850 - protein, 389 aa, Euphorbia esula
MEDASATTTAPSDSLNNHQLPPTAGIENIPATLSHGGRFIQYNIFGNIFEVTAKYRPPIMPIGKGAYGIVCSALNSETGEHVAIKKIANAFDNKIDAKRTLREIKLLRHMDHENVVAIRDIMPPPQREVFNDVYIAYELMDTDLHQIIRSNQALSEEHCQYFLYQILRGLKYIHSANVLHRDLKPSNLLLNANCDLKICDFGLARVTSETDFMTEYVVTRWYRAPELLLNSSDYTAAIDVWSVGCIFMELMDRKPLFPGRDHVHQLRLLMELIGTPSEEELGFLNENAKRYIRQMSVFRRQSFTEKFPTVHPAAIDLVEKMLTFDPRQRITVEDALAHPYLTSLHDISDEPVCMTPFSFDFEQHALTEEQMKELIYREALAFNPEYQQQ

SEQ ID NO: 9851 - protein, 319 aa, Glycine max
QYVGPPPFMCPSGINDFPMTTIDHIKAGLPVLAKYKRPIVVHAEVQQDFENHLELNEDNLDPRAYLTYLNARPPSWEEAAIKQLVGVTKDTRKGGPLEGAHVHIVHLSDSSASLDLIKEAKSRGDSISVETCPHYLAFSSEEIPNGDTRFKCSPPIRDAYNREKLWGAVLEGHIDLLSSDHSPTVPELKLMEEGDFLKAWGGISSLQFNLPVTWSYGKKYGLTLEQLSLLWSKKPATLAGLESKGAIAVGNHADIVVWQPELEFDLDDDYPVFIKHSELSAYMGRRLSGKVLETFVRGNLVFKDGKHAPAPCGVQILAK

SEQ ID NO: 9852 - protein, 468 aa, Pseudomonas aeruginosa PAO1
MNARLHATSPLGDADLVRADQAHYMHGYHVFDDHRVNGSLNIAAGDGAYIYDTAGNRYLDAVGGMWCTNIGLGREEMARTVAEQTRLLAYSNPFCDMANPRAIELCRKLAELAPGDLDHVFLTTGGSTAVDTAIRLMHYYQNCRGKRAKKHVITRINAYHGSTFLGMSLGGKSADRPAEFDFLDERIHHLACPYYYRAPEGLGEAEFLDGLVDEFERKILELGADRVGAFISEPVFGSGGVIVPPAGYHRRMWELCQRYDVLYISDEVVTSFGRLGHFFASQAVFGVQPDIILTAKGLTSGYQPLGACIFSRRIWEVIAEPDKGRCFSHGFTYSGHPVACAAALKNIEIIEREGLLAHADEVGRYFEERLQSLRDLPIVGDVRGMRFMACVEFVADKASKALFPESLNIGEWVHLRAQKRGLLVRPIVHLNVMSPPLILTREQVDTVVRVLRESIEETVEDLVRAGHR

SEQ ID NO: 9853 - protein, 505 aa, Citrus x paradisi
MDLLLLEKTLLALFAAVVVAITVSKLRGKRFKLPPGPLPVPVFGNWLQVGDDLNHRNLSDLAKKYGDVLLLRMGQRNLVVVSSPDHAKEVLHTQGVEFGSRTRNVVFDIFTGKGQDMVFTVYGEHWRKMRRIMTVPFFTNKVVQQQRFNWEDEAARVVEDVKKDPEAATNGIVLRRRLQLMMYNNMYRIMFDRRFESQDDPLFNRLKALNGERSRLAQSFEYNYGDFIPILRPFLRGYLKICKEVKERRLQLFKDYFVEERKKLASTKSMSNESLKCAIDHILDAQTKGEINEDNVLYIVENINVAAIETTLWSIEWGIAELVNHPEIQKKLRNELDTVLGPGHQITEPDTHKLPYLQAVIKETLRLRMAIPLLVPHMNLHDAKLGGYDVPAESKILVNAWWLANNPAQWKKPEEFRPERFLEEESKVEANGNDFRYLPFGVGRRSCPGIILALPILGITIGRLVQNFELLPPPGQSKIDTAEKGGQFSLHILKHSTIVAKPRSF

SEQ ID NO: 9854 - protein, 469 aa, Bacillus anthracis str. Ames 0581
MFQKDFRLYDNPALFEAAQSGEVVPVYVHDETFSMGSASKWWLHHAIIDVKKQLEALGSTLIIRKGSTQEEILSLVEQLGITAVYWNICYDPDRLQSNQKMKMMLEHKGMICKEFNSHLLLEPWVIKKKDNTEYKVFTPFYNAFQKQVIHKPISKVQSIKGGNSLPVSLSVSELHLLPTIPWTSHMESIWEPTEEGAYKTWKEFFSSKLASYSEGRDFPNQNAHSMLAPYLSFGQISVKLIYHYLINKSTESQCSLFEKQVNSFIRQLIWREFSYYLLYHYPFTAYKPLNKSFEHFPWNNEEELLRVWQKGDTGYPFIDAGMRELWQTGFMHNRTRMAVASFLVKHLLIPWQEGAKWFMDTLLDADIANNTMGWQWVAGSGADASPYFRIFNPITQGEKFDKNGEYIRKWVPELKDMPNKYIHKPWEAPEHILQKANIQLGHTYPLPVVDHKAARERALCAYKSMKEFV

SEQ ID NO: 9855 - protein, 424 aa, Blastocladiella emersonii
TLIDKLMEKTKKVVGSSDKDAPAPASPSSPSTAAGAGSASSTASSTTTAAASGNLSIPSPLVAGSTTSSSISHAQKMATAAHTNSDYSPSPAATPSAPLDAVAERRRRKTTLADLELRQTLGTGSFGRVHLVRLRSTGKYYAMKVLKKAEVVKHKQVEHTLNEKGILEQIDHPFLVALHSSFQDSANLYMVMEYVTGGELFTYLRRSQRFSNNVAKFYAAEVVLAFEYLHSKDIIYRDLKPENLLLDAQGHVKITDFGFAKHVPDITWTLCGTPDYLAPEIIQSRGYGRAVDWYALGVLIFEMLAGYPPFYDEDHVRMYEKILQGKVKWPSHFDPAAKDLLKRLLTTDLTKRYGNLKGGSKDIKMHKWFAGLDWTKLFNKQIPPPYTPPNRGDGDTSNFDAYPEETEPYGKVQPDPYAQLFKDF

SEQ ID NO: 9856 - protein, 149 aa, Brassica napus
  misc_feature (11)..(11): Xaa can be any naturally occurring amino acid
  misc_feature (16)..(16): Xaa can be any naturally occurring amino acid
  misc_feature (35)..(35): Xaa can be any naturally occurring amino acid
  misc_feature (45)..(45): Xaa can be any naturally occurring amino acid
  misc_feature (47)..(47): Xaa can be any naturally occurring amino acid
  misc_feature (52)..(52): Xaa can be any naturally occurring amino acid
  misc_feature (60)..(60): Xaa can be any naturally occurring amino acid
  misc_feature (62)..(62): Xaa can be any naturally occurring amino acid
  misc_feature (65)..(65): Xaa can be any naturally occurring amino acid
  misc_feature (79)..(79): Xaa can be any naturally occurring amino acid
  misc_feature (89)..(89): Xaa can be any naturally occurring amino acid
  misc_feature (91)..(91): Xaa can be any naturally occurring amino acid
  misc_feature (93)..(93): Xaa can be any naturally occurring amino acid
  misc_feature (98)..(98): Xaa can be any naturally occurring amino acid
  misc_feature (102)..(102): Xaa can be any naturally occurring amino acid
  misc_feature (108)..(108): Xaa can be any naturally occurring amino acid
  misc_feature (115)..(116): Xaa can be any naturally occurring amino acid
  misc_feature (126)..(126): Xaa can be any naturally occurring amino acid
  misc_feature (130)..(130): Xaa can be any naturally occurring amino acid
MASSMLSSAAXGTSPXQATMVAPFTGLKTSAAFPXTRKANNDITXIXSNGGXVSCMKVWXPXGKXKFETLSYLPDLTEXVELGKEDDYXLXAXRGIPXVEFXLEHGFXVYREHEXXPRNYDGRYWXTMGXLPLVKLTLLGKGPKREKGP

SEQ ID NO: 9857 - protein, 235 aa, Glycine max
MGSTGETQITPTHVSDEEANLFAMQLASASVLPMVLKSALELDLLEIIAKAGPGVHLSPSDIASRLPTHNPDAPVMLDRILRLLACYNILSFSLRTLPHGKVERLYGLAPVAKYLVRNEDGVSIAALNLMNQDKILMESWYYLKDAVLEGGIPFNKAYGMTAFEYHGTDPRFNKVFNKGMADHSTITMKKILETYTGFEGLKSLVDVGGGTGAVVNMIVSKYPTIKGINFDLPHV

SEQ ID NO: 9858 - protein, 124 aa, Paracoccidioides brasiliensis
MTTPSKEKLTHALVLHAPRDLRLESRLTPAPKHGELQIAIRATGLCGSDLHYYNHGRNGDFIVQSPLCLGHESSGIITAIGPDVADTFHIGDRVALEVGLPCHSCPLCLQGRYNICRKLRFRSS

SEQ ID NO: 9859 - protein, 464 aa, Streptomyces maritimus
MQFPQLDPATLAAFSAAFRGELIWPSDADYDEARRIWNGTIDRRPALIARCTSTPDVVAAVSFARKSGLLVAVRGGGHSMAGHSVCDGGIVIDLSLMNSIKVSRRLRRARAQGGCLLGAFDTATQAHMLATPAGVVSHTGLGGLVLGGGFGWLSRKYGLSIDNLTSVEIVTADGGVLTASDTENPDLFWAVRGGGGNFGVVTAFEFDLHRVGPVRFASTYYSLDEGPQVIRAWRDHMATAPDELTWALYLRLAPPLPELPADMHGKPVICAMSCWIGDPHEGERQLESILHAGKPHGLTKATLPYRALQAYSFPGAVVPDRIYTKSGYLNELSDEATDTVLEHAADIASPFTQLELLYLGGAVARVPDDATAYPNRQSPFVTNLAAAWMDPTEDARHTAWAREGYRALAGHLSGGYVNFMNPGEADRTREAYGAAKFERLQGVKAKYDPTNLFRLNQNIPPSSP

SEQ ID NO: 9860 - protein, 197 aa, Lotus corniculatus var. japonicus
MSASRFIKCVTVGDGAVGKTCLLISYTSNTFPTDYVPTVFDNFSANVVVDGSTVNLGLWDTAGQEDYNRLRPLSYRGADVFILAFSLISKASYENIAKKWIPELRHYAPGVPIILVGTKLDLRDDKHFLADHPGAVPITTAQGEELRKLIGAPAYIECSSKTQQNVKAVFDAAIKVVLQPPKQKKKKREAQKSCSIL

SEQ ID NO: 9861 - protein, 244 aa, Triticum aestivum
MVRESMGEESEAFATTAPLAPVTGERKVRNDLEETLPKPYLARALVAPDTEHPNGSEGHDSKGMSVMQQHVAFFDQNGDGIVYPWETYAGFRDLGFNPISSVFWAIFINFAFSYVTLPSWLPSPLLPVYIDNIHKAKHGSDSSTYDTEGRYVPVNLENIFSKYALTAPNKITLKELWNLTEGNRMAIDPFGWLANKVEWLLVYLLAKDEEGFVSKEAVRGVFDASFFEYCAKKNKEKADSRKQD

SEQ ID NO: 9862 - protein, 337 aa, Haloarcula marismortui ATCC 43049
MSDHTDERETFHHDPIGHAEARAGMTVGELANSYGEAGIGASDIHEAVDIYSQMLDDDVTTFFGLAGAMVPTGMRAIVSELIRDGHIDVLVTTGANCTHDSIEAIGGKHHHGEVTPEGQTEREHDETLRDEGVDRIYNVYLPQEHFVLFENHLRDEVFSTLEDEGPVSIQRMTEELGRANSEVNEREDVPEDAGVLAAAYENDVPVYCPAFQDSVLGLQAWMYSQTSEFTIDALADMTQITDIAYEADSAGAMVVGGGVPKNYVLQTMLVSPDAYDYAVQLTMDPSNTGGLSGATLDEARSWGKLEKDARNVSVYADATITLPLVVAAARERHSTEA

SEQ ID NO: 9863 - protein, 153 aa, Brassica napus
ITKGEKKRMCKLMDCRKLSVEACMHAVQNDRLPLRVVVQVLFFEQVRASASSGSSTPDFPKGIRELRSCGTYGSSRSVPTVMEDEWDAVATEEEMRALKSEIAALKLQEESGRKSTDKAAVTAISRVKSLIMSRKMFGKKLQGKAVVGEKNYG

SEQ ID NO: 9864 - protein, 176 aa, Glycine max
  misc_feature (164)..(164): Xaa can be any naturally occurring amino acid
MAIHHETWAFVFGLLGNVISFMVFLAPLPTFYQIYKKKSSEGFQSLPYVVALFSSMLWIYYAFVKKDASLLLITINSFGCVIETIYLAIFLVYAPSKTRLWTIKLLLMLNVFGFGAMLLSTLYLTTGSKRLTVIGWICLVFNISVVAAPLCIMKRVIKTKSVEXMPFSLCFSLTIN

SEQ ID NO: 9865 - protein, 99 aa, Triticum aestivum
  misc_feature (90)..(90): Xaa can be any naturally occurring amino acid
  misc_feature (95)..(95): Xaa can be any naturally occurring amino acid
MAPTVMASSATSVAPFQGLKSTAGLPVSRRSNGASLGSVSNGGRIRCMQVWPIEGIKKFETLSYLPPLSTEALLKQVDYLIRSKWVPCLXFSKVXFIFR

SEQ ID NO: 9866 - protein, 145 aa, Triticum aestivum
  misc_feature (60)..(60): Xaa can be any naturally occurring amino acid
  misc_feature (94)..(94): Xaa can be any naturally occurring amino acid
  misc_feature (119)..(119): Xaa can be any naturally occurring amino acid
  misc_feature (125)..(125): Xaa can be any naturally occurring amino acid
  misc_feature (130)..(130): Xaa can be any naturally occurring amino acid
  misc_feature (144)..(144): Xaa can be any naturally occurring amino acid
MAPAVMASSATTVAPFQGLKSTAGLPVSRRSSGSLGSVSNGGRIRCMQVWPIEGIKKFEXTLSYLPPLSTEALLKQVDYLIRSKWVPCLEVQQXGFVFREAKQLPPGTTTVDNGTMWKXLPMFGXCNDPXKVLKQVEGRSKKEXP

SEQ ID NO: 9867 - protein, 306 aa, Fagus sylvatica
MPSHSDLDRQIEHLMECKPLPEAEVKTLCDQARAILVEEWNVQPVKCPVTVCGDIHGEFYDLIELFRIGGNAPDTNYLFMGDYVDRGYYPVETVTLLVALKVRYRDRITILRGNHESRQITQVYGFYDECLRKYGNANVWKFFTDLFDYLPLTALIESQIFCLHGGLSPSLDTLDNIRALDRIQEVPHEGPMCDLLWSDPDDRCGWGISPRGAGYTFGQDIAAQFNHTNGLTLISRAHQLVMEGFNWCQDKNVVTVFSAPNYCYRCGNMAAILEIGENMDQNFLQFDPAPRQIEPDTTRKTPDYFL

SEQ ID NO: 9868 - protein, 273 aa, Magnaporthe grisea 70-15
MWPGQAMTLKVEKVLHHERSKYQDVLIFQSTDYGKVLVLDNVIQCTERDEFSYQEMITHLAMNSHPNPKKVLVIGGGDGGVLREVVKHDCVEEAILCDIDEAVIRLSKEYLPNMSAGFNHPKVKVHVGDGFKFLADYQNTFDVIITDSSDPEGPAESLFQKPYFQLLFNALTEGGVITTQAENQWLHLPLITKLRKDCKEIFPVAEYAYTTIPTYPSGQIGFMVCSKDPKANLKEPLRSWTQEEELEKCRYYSSDIHKASFVLPNFARKALQD

SEQ ID NO: 9869 - protein, 320 aa, Hordeum vulgare
MASAKATMGQGEQDHFVLKSGHAMPAVGLGTWRAGSDTAHSVRTAITEAGYRHVDTAAEYGVEKEVGKGLKAAMEAGIDRKDLFVTSKIWCTNLAPERVRPALENTLKDLQLDYIDLYHIHWPFRLKDGAHMPPEAGEVLEFDMEGVWKEMENLVKDGLVKDIGVCNYTVTKLNRLLRSAKIPPAVCQMEMHPGWKNDKIFEACKKHGIHITAYSPLGSSEKNLAHDPVVEKVANKLNKTPGQVLIKWALQRGTSVIPKSSKDERIKENIQVFGWEIPEEDFKVLCSIKDEKRVLTGEELFVNKTHGPYRSARDVWDHEN

SEQ ID NO: 9870 - protein, 170 aa, Sinorhizobium meliloti
NQLPAVLWFTGLSGSGKSTIANELDRILHAQGKHTYLLDGDNVRHGLNRDLGFTEEDRVENIRRVAEVAKLMADAGLIVLVSFISPFRDERRMARELMEEGEFIEIFVDTPLDECARRDPKGLYEKALAGKIANFTGVSSCYEAPENPELHIRTVGHQPNDLALAIEGIP

SEQ ID NO: 9871 - protein, 273 aa, Methanosarcina mazei Go1
MIKKDYQGEFIVTSLRKARKKQELRLIMPEINGILESEPAVLRIDPELIMLIGDIHGNLDALEFIIAMRKKLGCKKILFLGDYVDRGTEGTEVLIELFRMKLEEPEDVFLLRGNHESADMNIYYGFFEEIDFDRDFLLEISRTYERLPVAALVSGHTFCVHGGINGTENIDTITKEGAFPYLWNDPSERPGLVTSSRGSTVREFGPDIVEGFLKVNSLKRIIRGHTALRTGYEWWFDGKLLSLFSCPDYVGLGNAAAFGMMRREEIKIITFES

SEQ ID NO: 9872 - protein, 464 aa, Methanocaldococcus jannaschii DSM 2661
MNKMNIDKNLLEKWDKEYIWHPYTQMKEYRESKNLIIERGEGNYLIDIYGNKYLDAVSSIWCNLFGHSRKEIIEAIKNQADKICHSTLLGCGNVPSILLAKKLVDITPKHLTKVFYSEDGAEAVEIAIKMAYQYYVLRGDKGRTKFISVKEGYHGDTVGAMSVGGSELFHGVFKPLLFKGYHANPPYCYRCKYHNFKDTDERNEKGCEMECLNEMISLIEKHAEEVFCVILEGGIMGSAGMIPYPDGYIEGVAKACKENDVIFILDEVATGFGRTGKMFFCDNEELKKLEKPDILCLGKGLTGGYLPLAATLTTDEIYNQFLGEFGESKQLYHGHTYTGNQLLCSAALATLEIFEKENVIENIQPKIKLFHKELRKLKELEHVGDVRGRGFMVGIELVKDKETKEPYPYGYKAGYRVAEKLLEKGIYMRPIGNVIILVPPLSITEKEIIYLCDALYEAIKEADL

SEQ ID NO: 9873 - protein, 373 aa, Arabidopsis thaliana
MGYLLEETLSSNSKTPIVIDDDNELGLMAVRLANAAAFPMVLKAALELGVFDTLYAEASRSDSFLSPSEIASKLPTTPRNPEAPVLLDRMLRLLASYSVVKCGKVSVGKGERVYRADPICRFFLKDNIQDIGSLASQVIVNFDSVFLNTWAQLKDVVLEGGDAFGRAHGGMKLFDYMGTDERFSKLFNQTGFTIAVVKKALEVYQGFKDVNVLVDVGGGVGNTLGVVTSKYPNIKGINFDLTCALAQAPSYPGVEHVAGDMFVDIPTGDAMILKRILHDWTDEDCVKILNNCWKSLPENGKVVVIELVTPDEAENGDINANIAFDMDMLMFTQCSGGKERSRAEFEALAAASGFTHCKFVCQAYHCWIIEFCK

SEQ ID NO: 9874 - protein, 183 aa, Glycine max
  misc_feature (42)..(42): Xaa can be any naturally occurring amino acid
MDLPFLDHYYQSPFFAFPLNIHSIVLGFASWCLNKFINGQTXHPSFGGNGATMFFLTFSILAAVLGIVSKLLGANHMRTWRSDSLASAGATSIVAWAVTALAFGLACKQINIGGHRGWGLRVVEAFIIILTLTQLLYLILIHAGLYSSRYGPGYRDTDYGNAHGVGGTTGDPMHKSAAAGTRV

SEQ ID NO: 9875 - protein, 493 aa, Prochlorococcus marinus
MQTNFLFMTTALQTPQRRSRSKLQDASLVNGPMLLLRSIRGFSSNRSMLWLATVPLALFGLGIFNLSAHAADLPELNAAFLANNLWLLIATILVIFMNAGFAMVEAGMCRSKNAVNILAKNLFVFALAVTSYWFIGYSLMYGGSVADGWLYFGGLFFDPTVTADMVTDAGLVPTVDFLFQSAFAGTAATIVSGLVAERVKFGEFVVFAIVLTAFIYPIAGSWKWNGGWLDSLGFVDFAGSSIVHSVGAWAGLVGAMLLGPRIGKYSDGKPQAMPGHNMAIATLGALILWIGWYGFNPGSQLAMDQWVPYVAVTTTLAAAAGAIGATIVSTLTSGKPDLTMIINGILAGLVSITAGCGDMTLAGAWFAGLVGGIIVVFSVAALDAAEIDDPVGAFSVHGVCGVWGTLVIGLWGTAVQGDGAGMGLFNGGGINLLLVQALGAAAYAIWTLVTCWIAWSIIGGLFGGIRVSEEEETQGLDISEHGMESYPDFASAK

SEQ ID NO: 9876 - protein, 242 aa, Porphyra yezoensis
MVSDLEKAVRADLQALIKEKNCHGIMVRVAWHDAGTYSKEDGTGGANGTQRFAPESGHGANAGLDIARNMCEDIKAKHPEISYADLYQLASVVAIEDAGGPVIPFRMGRKDADAPQCTPDGRLPDADKRMPHLRDIFYRMGFNDAEIVALSGAHTLGAAHKDRSGFDGPWTSNPNTFDNSYFKEIMKETPESGLLHLPSDKALLDEPECKALVETYASDQAKFFEDYAKAHQKLSELGAVWA

SEQ ID NO: 9877 - protein, 241 aa, Oryza sativa (japonica cultivar-group)
MAAAARHRGTVKWFNDTKGFGFISPDDGSEDLFVHQSSIKADGFRSLAEGEQVEFAISESEDGRTKAVDVTGPDGSFVKGGAGGGGGGGGGFGSRGGGGSGGGGRSYGGSWGGGRRSGGGGPGGGCFKCGESGHMARDCFNGGGVGVGGGGGGGGGAGGGCFKCGEMGHMARDCFNSGGGGGGGGGGGGGGACYNCGETGHLARDCYNGGGGGGGGRFGGGGDRSCYNCGEAGHIARDCHK

SEQ ID NO: 9878 - protein, 291 aa, Glycine max
  misc_feature (237)..(237): Xaa can be any naturally occurring amino acid
  misc_feature (243)..(243): Xaa can be any naturally occurring amino acid
MASVASSSSFSTRLLLHSHTPLVCRRRCRPNFLRMVTRSCLDDSSALLRAAQHTVDTYVKSGMVVGLGSGHASGMAIQHLGSQLRTGNLKDIVGIPMSVSSASEAAKAGIPLDTYQGSSQIDFAFDDADVIEEGTLVAIIGRRKLQGGESIIQEKSIINSANKCVFIIEENQYKGGLEGSIPVLIQSLNWMTIAEEIDDMFLGDAEVWRRPSIGQAGPLGGDFPVVTKEGHNILDVXFTSPIXNVAEVSKSLDKVDGVVDHGVVSKIPCTVVIASQTGLNILDKLTADIVG

SEQ ID NO: 9879 - protein, 217 aa, Shigella boydii
ELDLYICLRPVRYYQGTPSPVKHPELTDMVIFRENSEDIYAGIEWKADSADAEKVIKFLREEMGVKKIRFPEHCGIGIKPCSEEGTKRLVRAAIEYAIANDRDSVTLVHKGNIMKFTEGAFKDWGYQLAREEFGGELIDGGPWLKVKNPNTGKEIVIKDVIADAFLQQILLRPAEYDVIACMNLNGDYISDALAAQVGGIGIAPGANIGDECALFEA

SEQ ID NO: 9880 - protein, 213 aa, Shigella boydii
ELDLYICLRPVRYYQGTPSPVKHPELTDMVIFRENSEDIYAGIEWKADSADAEKVIKFLREEMGVKKIRFPEHCGIGIKPCSEEGTKRLVRAAIEYAIANDRDSVTLVHKGNIMKFTEGAFKDWGYQLAREEFGGELIDGGPWLKVKNPNTGKEIVIKDVIADAFLQQILLRPAEYDVIACMNLNGDYISDALAAQVGGIGIAPGANIGDECA

SEQ ID NO: 9881 - protein, 506 aa, Burkholderia fungorum LB400
MNHADMQFLDVEFPYARQYGNFIGGEWVPPVRGEYFDNVSPITGEPFTSIPRSTEEDIELALDAAHRARKAWADTAPALRANVLNRIADRMEQNLSRIAFSESIDNGKPIRETLAADIPLAIDHFRYFASCIRAQEGTLSEIDHDTVAYHFHEPLGVVGQIIPWNFPILMAVWKLAPALAAGNCVVLKPAEQTPASILVLIELIQDLLPPGVLNVVNGFGLEAGKPLASSKRIAKIAFTGETSTGRLIMQYASQNIIPVTLELGGKSPNIFFADVVDQDDGYFDKALEGFAMFALNQGEVCTCPSRVLIDEKIYDRFMERALKRVAAIAQGHPLDPRTMIGAQASQEQLEKILSYVDLGKQEGAECLIGGERNTLGGELSKGYYVKPTVFRGNNKMRIFQEEIFGPVVSVTTFRTEEEALEIANDSLYGLGAGVWTRDGTRAYRFGRQIQAGRVWTNCYHAYPAHAAFGGYKQSGIGRETHKMMLDHYQQTKNLLVSYSEQPLGFF

SEQ ID NO: 9882 - protein, 213 aa, Shigella boydii
LDLYICLRPVRYYQGTPSPVKHPELTDMVIFRENSEDIYAGIEWKADSADAEKVIKFLREEMGVKKIRFPEHCGIGIKPCSEEGTKRLVRAAIEYAIANDRDSVTLVHKGNIMKFTEGAFKDWGYQLAREEFGGELIDGGPWLKVKNPNTGKEIVIKDVIADAFLQQILLRPAEYDVIACMNLNGDYISDALAAQVGGIGIAPGANIGDECAL

SEQ ID NO: 9883 - protein, 372 aa, Candida albicans
MKKFTGPTQTRQVVFNISQNFKVLKILGEGAYGIVALAVHLPTETKVAIKKIEPFERPLFCLRTLREIKLLTKFKNHDNIVRLYDVQKPMNYDSFNEVYLIQGYMPSDLHNLIHTHLLSDQHVQYFIYQILKGLKMIHSARVIHRDLKPSNILVNEKCDLKICDFGLARLDTKHYNFDEAPRISMLTEYVATRWYRAPEIMLSASNYSTAIDLWSVGCILAELLTYRALFPGSDYINQLKLIFEVLGTPTDEDLQIIKSERAQKFIRSLPTKVKIDLSEFINNHPYRNIKHRGRDQVNPLAIDLLEKLLVFDPAKRITVQDALEHPYLNSYHEQLDEPVTSPIPIEEFDFDIDKKNLDTNDLKKQIFEIVMS

SEQ ID NO: 9884 - protein, 213 aa, Triticum aestivum
  misc_feature (37)..(37): Xaa can be any naturally occurring amino acid
  misc_feature (55)..(55): Xaa can be any naturally occurring amino acid
  misc_feature (113)..(113): Xaa can be any naturally occurring amino acid
  misc_feature (136)..(136): Xaa can be any naturally occurring amino acid
RVRPNAVRSLIGAHFCFCAFSRGYLASDQLDTLRYRXLYSGWIPGILLHHLLLLXCFTLALPRNVTINYLILTLLCEAPPRRRRPLISHFCGSVVTIPPLLPARLRSRPSPAXMHSIFLHVRKLRRMAGFRDFNKXLVKLEWVLNWTTFVTARVICHILITYKLITDAHKFDKGIELPLALSGMAGMNVLNVSLGLDLFKAFARERNQQTHQD

SEQ ID NO: 9885 - protein, 297 aa, Saccharomyces cerevisiae
MKTTTPLVHVASVEKGRSYEDFQKVYNAIALKLREDDEYDNYIGYGPVLVRLAWHISGTWDKHDNTGGSYGGTYRFKKEFNDPSNAGLQNGFKFLEPIHKEFPWISSGDLFSLGGVTAVQEMQGPKIPWRCGRVDTPEDTTPDNGRLPDADKDAGYVRTFFQRLNMNDREVVALMGAHALGKTHLKNSGYEGPWGAANNVFTNEFYLNLLNEDWKLEKNDANNEQWDSKSGYMMLPTDYSLIQDPKYLSIVKEYANDQDKFFKDFSKAFEKLLENGITFPKDAPSPFIFKTLEEQGL

SEQ ID NO: 9886 - protein, 312 aa, Zea mays
MYWAPETERAHWSPSAWESLTRSKKNPPPPFPIKSSTRVLLVPATRISPDFIILPRNKSLAKMTKNYPTVSEDYKKAVEKCRRKLRGLIAEKNCAPIMVRLAWHSAGTFDCQSRTGGPFGTMRFDAEQAHGANSGIHIALRLLDPIREQFPTISFADFHQLAGVVAVEVTGGPDIPFHPGREDKPQPPPEGRLPDATKGCDHLRDVFAKQMGLSDKDIVALSGAHTLGRCHKDRSGFEGAWTSNPLIFDNSYFKELLSGEKEGLLQLVSDKALLDDPVFRPLVEKYAADEDAFFADYAEAHMKLSELGFADA

SEQ ID NO: 9887 - protein, 158 aa, Salmonella enterica subsp. enterica serovar Typhi Ty2
MKLISNDLRDGDKLPHRHVFNGMGYDGDNISPHLAWDDVPMGTKSFVVTCYDPDAPTGSGWWHWVVVNLPADTRVLTQGFGSGLVAVPDGVIQTRTDFGKAGYGGAAPPKGETHRYIFTVHALDVERLDVDEDASGAMVGFNVHFHSLASASITAMFS

SEQ ID NO: 9888 - protein, 506 aa, Dechloromonas aromatica RCB
MLYASPGTAGAKIAYKAQYDNFIGGKWVAPVNGQYFDVVTPISGKPYTKAARSTAEDMELALDAAHAAFPTWGKTSAADRANVLLKIADRLEANLELLAYAETVDNGKAIRETLNADIPLAVDHFRYFAGCLRAQEGGISEIDENTMAYHIHEPLGVVGQIIPWNFPILMAAWKLAPAIGAGNCVVLKPAESTPISILILAELIADILPAGVLNIVNGYGREAGMPLATSKRIAKIAFTGSTSTGRVIAQAAANNLIPATLELGGKSPNVFFADIMDKDDSFLDKAVEGMVLFAFNQGEVCTCPSRALIQESIYEKFMERVLKRVAAIKQISPLDTDCMMGAQCSQEQMTKIQSYLELGKQEGAECLIGGERAHLGGDLEGGYYIQPTMFKGHNKMRIFQEEIFGPVLAVTTFKDEAEALAIANDTIYGLGAGVWSRNGNVAYRMGRAIQAGRVWTNCYHAYPAHAAFGGYKESGIGRETHKVMLDHYQQTKNLLVSYSETKLGFF

SEQ ID NO: 9889 - protein, 297 aa, Saccharomyces cerevisiae
MKTTTPLVHVASVEKGRSYEDFQKVYNAIALKLREDDEYDNYIGYGPVLVRLAWHISGTWDKHDNTGGSYGGTYRFKKEFNDPSNAGLQNGFKFLEPIHKEFPWISSGDLFSLGGVTAVQEMQGPKIPWRCGRVDTPEDTTPDNGRLPDADKDAGYVRTFFQRLNMNDREVVALMGAHALGKTHLKNSGYEGPWGAANNVFTNEFYLNLLNEDWKLEKNDANNEQWDSKSGYMMLPTEYSLIQDPKYLSIVKEYANDQDKFFKDFSKAFEKLLENGITFPKDAPSPFIFKTLEEQGL

SEQ ID NO: 9890 - protein, 151 aa, Coxiella burnetii RSA 493
MAKAVQKYPHSMLSHLQQDINRLFEPFGWATGGELWDAFSSEWSPHIDIKDEGQNYLICADIPGVDPKKIQVSMENNILTIKGERETEAKEKSEGYLRIERTKGAFLRQFTLPESVDAESIKAKSKHGVLEITIPKAQPPRTKKIEIEEQE

SEQ ID NO: 9891 - protein, 247 aa, Oryza sativa (japonica cultivar-group)
MGKHGKCDVEACYPGGAPGGGMYPYMIENAQLRWAFIRKVYVIVSVQLLVTVAVAGAVNLVEPIKTFFQARTPEVLVAYVIIIISPLIMMLPMIYFRNKHPINLFFLLLFTVCISFSVGLGCLSKNGTVIFQAAGMTAAIVIGLTCYTFWAAKRGYDFEFLGPFLFAATLVLFLYAIITIFLPMGRTGKLVYGCVAALIFSGFIIYDTDNLIKRYTYDEYVAAAITLYLDIINLFMALVTALQAADG

SEQ ID NO: 9892 - protein, 297 aa, Saccharomyces cerevisiae
MKTTTPLVHVASVEKGRSYEDFQKVYNAIALKLREDDEYDNYIGYGPVLVRLAWHISGTWDKHDNTGGSYGGTYRFKKEFNDPSNAGLQNGFKFLEPIHKEFPWISSGDLFSLGGVTAVQEMQGPKIPWRCGRVDTPEDTTPDNGRLPDADKDAGYVRTFFQRLNMNDREVVALMGAHALGKTHLKNSGYEGPWGAANNVFTNEFYLNLLNEDWKLEKNDANNEQWDSKSGYMMLPTAYSLIQDPKYLSIVKEYANDQDKFFKDFSKAFEKLLENGITFPKDAPSPFIFKTLEEQGL

SEQ ID NO: 9893 - protein, 164 aa, Triticum aestivum
  misc_feature (147)..(147): Xaa can be any naturally occurring amino acid
MAGMVFGLENPMMTALQHLLDIPDGEAGGAGAAGGEKQGPTRAYVRDARAMAATPADVKELPGAYAFVVDMPGLGSGDIKVQVEDERVLVISGERSREEEEDAKYLRMERRMGKLMRKFVLPENADMEKISAACRDGVLNRPTVREXLPARPKPKPKNNPRSKA

SEQ ID NO: 9894 - protein, 106 aa, Zea mays
MPSSPQTPPPPVGRTAAHGGRHKHDDDDPSTPRGFCAKYFSRESCLLLALVTVLLVVLPLVLPPLPAPPLALLLVPVAMLAVLLVLALMPAAAGGRNEAVDPASYL

SEQ ID NO: 9895 - protein, 472 aa, Coxiella burnetii RSA 493
MTTIFWFRQDLRLSDNPALVEAAKSADHLIPLYILDDQLKMLGDAQRWWLHHSLSSLQTALSKKGTSLILKKGDTKRVLLELIKKYKVEKIYWNRSYEPPYREIDTYLENRLPPLSVEIYHSTLLTEPQKIKNKSGGYYKIFTPFWKHINASLQPRKTLAAPKKFSQHRAIKSDNLETWNLLPKHPDWSQGFDQWKPGEKNAQIVLKKFIKENLKNYPAHRDRPDISSTSHLSPYLHFGEISIRQVWTAITQATIQDKNLQKAADVFLRQLIWREFAYYLLWHFPQMGRSNFRNQFDNFKWKKNKNWLRAWQKGLTGYPIVDAGMRELWCTGYMHNRVRMIVASFLVKDLMIDWREGEKWFWNTLLDADLANNALGWQWIAGCGPDAAPYFRIFNPILQSKKFDPDGTYIKRWIPELAKVPSKYIHYPADMPDNISESSKVNLGVDYPFPIVNHHKAKELALKAYKDSTYRL

SEQ ID NO: 9896 - protein, 167 aa, Neurospora crassa
MSSATTIYDFKPLDKKGSELPLSTYQGKVVLIVNVASKCGFTPQYAGLEKVYKEIKEKYPDDFEILAFPCNQFGGQEPGTEEEIQSFCQLNYGVSFPIMKKVEVNGDNADPLYEWMKNEKPGLMGLKRIKWNFEKFLIGKDGKVKGRWASTTKPESLKEAILKELGE

SEQ ID NO: 9897 - protein, 335 aa, Listeria monocytogenes str. 4b F2365
MDPFLLKDLKQHLGGTNDAIKEAPQEIQMPDFSNLEIATAAALQMRATMGSPNIDLSNGVTTEYRVVEGDYGDIPVRIYRHEEATKPVPAFIFYHGGGFVGGTPAVVENFCKGIAEKLPAVVINVDYHLAPEFPAPAAPKDCYRALEWVVEQSDELGIDASKIGVSGDSAGGTLAAAVSYMDYEAETNYVGFQALLYPALTLVDEDNDKYQWDISKFGASEETLPLVAPGIIGMNSSGELLRTAYVRDENPASPIYSPLSAVDKSIYPPTLIASAEFDALRAFADIFAKELRASGVQTKVIVYQGMCHAFIDKYGIFPQAEDVADEIVQMMKEIF

SEQ ID NO: 9898 - protein, 240 aa, Zea mays
EYLAPRSYGPPPAPPPHPCLSASGSPPPLSRPPRPQFDPNFAWHQAKPLPPCCVKARAAAPESEAKCHATVVSGWFTETRSRCGKASKLQYYNNPMWPGETHSLKVDKILYQGKSPYQEVLIFESLTYGKVLVLDGIVQLTDKDECAYQEMITHLPLCSIPSPKKVLVIGGGDGGVLREIARHGSVESIDICEIDQLVIDVCKDFFPDLSVGFEDPRVRLHVGDAVEFLRNSPEGTYDAI

SEQ ID NO: 9899 - protein, 189 aa, Pinus strobus
AWHSAGTYDVKSKTGGPFGTIKHPDELAHGANNGLDIAIRLLEPIKEQFPTISYADFYQLAGVVAVEITGGPDIPFHPGRPDKTEPPEEGRLPDATKGIDHLRDVFGHMGLSDKEIVALSGAHTLGRCHKERSGFEGAWTSNPLIFDNSYFKELLSGEKEGLLQLPSDKALLEDPIFRSYVEKYAADDD

SEQ ID NO: 9900 - protein, 452 aa, Triticum aestivum
MGEQKGNILMGKYEMGKMLGQGTFAKVYHARNIETSQSVAIKVTDKEKVLKGGLTDQIKREISVMKLVKHPNIVQMYEVMATKTKIYFVLEHVKGGELFNKVQRGRLKEDAARKYFQQLICAVDFCHSRGVYHRDLKPENLLLDENSNLKVSDFGLSTISECRRLDGLLHTSCGTPAYVAPEVINRKGYDGAKADIWSCGVILFVLLAGYLPFQDKNLMNMYKKIGKAEFKCPSWFSSDIRRLLLRILDPNPSTRISIERIMEHPWFRKGLDAKLLRYNLQAKDAVPAADMTATSDSLSCSNSATEGKEQEAKKLANLNAFDIISLSTGLDLSGMFEDNDKKRESKFTSTNSASTIVSKIEDIAKCMRLKLVKKDGGMLRMESFKAGRKGVMSIDAEIFEVTPDFHLVELKKTYGDTLEYQKVLNQEMRPALKDIVWAWQGEQQPQPQQQPC

SEQ ID NO: 9901 - protein, 506 aa, Pseudomonas putida KT2440
MIYAQPGTPGAVVSFKPRYGNFIGGEFVQPLAGQYFINSSPVNGQPIAEFPRSTAQDVERALDAAHAAAEAWGKTSVQDRARVLLKIADRIEQNLEVLAVTESWDNGKAIRETLNADVPLAADHFRYFAGCIRAQEGGVGEINEGTVAYHIHEPLGVVGQIIPWNFPLLMAAWKLAPALAAGNCVVLKPAEQTPLSITVFAELIADLLPAGVLNIVQGFGREAGEALATSKRIAKIAFTGSTPVGSHIMKCAAENIIPSTVELGGKSPNIFFEDIMQAEPAFIEKAAEGLVLAFFNQGEVCTCPSRALIQESIYEPFMAEVMKKIAKITRGNPLDTETMVGAQASEQQYDKILSYLEIAREEGAQLLTGGGAERLQGDLASGYYIQPTLLKGNNKMRVFQEEIFGPVVGVTTFKDEAEALAIANDSEFGLGAGLWTRDINRAYRMGRGIKAGRVWTNCYHLYPAHAAFGGYKKSGVGRETHKMMLDHYQQTKNLLVSYDINPLGFF

SEQ ID NO: 9902 - protein, 223 aa, Triticum aestivum
  misc_feature (26)..(26): Xaa can be any naturally occurring amino acid
RGRGRGLSVFSLLPDVWGIKWRFPMXPVSRLNEEPTRMSTLIDLTCDSDGKIDKFIGNAETLPLHPLDPERGGCYYLAVLLSGAYQEALSNKHNLFGGPSIVRVEKSTAAATGFQIATADLGPTTEELISTMRYNVRQDIVGVIQRRAIEIGVWGMVGEAVHTGLTTMPYLIMEDHAASSWKHQGGLDGKDESIVKMVFRQVSRLLCLPFMWSIPSKRIGSAA

SEQ ID NO: 9903 - protein, 294 aa, Magnaporthe grisea 70-15
MPLEAVMIVVDNSESSRNGDYTPTRFDAQADAVNVLFQHVTNGNPESSVGLMSMGGKDPEVLVTLTSDQGKILEGLHRTKKKVSGSSHLATAIQVASLALKHRQNTTQRTRIVAFVCSPVSDEQKALVQLAGKLKKNNVTVDFVLFGDLDDDTSKKLEAFNAKVKNNEGNSHLVVIPPSGNLLSDQLIATPIFGEGAGSSAAAGGGGGGGDFGDLEFDPATDPELALALRMSLEEENARKEKEAKKEAEQAKKQGLESVEEQDESAPLLDKSGGPSGSGSKDKKSDGGDKMDTS

SEQ ID NO: 9904 - protein, 501 aa, Zea mays
MASNGCNGNGNGKAAPAGVVVPEIKFTKLFINGEFVDAASGKTFDTRDPRTGDVLAHVAEADKADVDLAVKSARDAFEHGKWPRMSGYERGRIMSKLADLVEQHTEELAALDGADAGKLLLLGKIIDIPAATQMLRYYAGAADKIHGDVLRVSGRYQGYTLKEPIGVVGVIIPWNFPTMMFFLKVSPALAAGCTVVVKPAEQTPLSALYYAHLAKMAGVPDGVINVVPGFGPTAGAALASHMDVDSVAFTGSTEVGRLIMESAARSNLKTVSLELGGKSPLIIFDDADVDMAVNLSRLAVFFNKGEVCVAGSRVYVQEGIYDEFVKKAGVAVGARRHRVGDLLLRHRPGRAVRQVQDERLRPGPGAGSHGQVPAGQERHHRAPGLAMGPMEPHRSLLVQCTCVMRACSHSWTVDEVIEKANCTRYGLAAGIVTKSLDVANRVSRSVRAGTVWVNCYFAFDPDAPFGGYKMSGFGRDQGLAAMDKYLQVKSVITALPDSPWY

SEQ ID NO: 9905 - protein, 197 aa, Oryza sativa
MSTARFIKCVTVGDGAVGKTCMLISYTSNTFPTDYVPTVFDNFSANVVVDGNTVNLGLWDTAGQEDYNRLRPLSYRGADVFLLAFSLISKASYENIHKKWIPELRHYAPNVPIVLVGTKLDLREDKQFFLDHPGLAPISTAQGEELKRMIGAAAYIECSSKTQQNVKSVFDSAIKVVLCPPKPKKKNTRKQRSCWIL

SEQ ID NO: 9906 - protein, 208 aa, Escherichia albertii
LDLYICLRPVRYYQGTPSPVKHPELTDMVIFRENSEDIYAGIEWKADSADAEKVIKFLREEMGVKKIRFPEHCGIGIKPCSEEGTKRLVRAAIEYAIANDRDSVTLVHKGNIMKFTEGAFKDWGYQLAREEFGGELIDGGPWLKVKNPNTGKEIVIKDVIADAFLQQILLRPAEYDVIACMNLNGDYISDALAAQVGGIGIAPGANIG

SEQ ID NO: 9907 - protein, 367 aa, Desulfitobacterium hafniense DCB-2
MEIAQDPELVNTYTNRANCVAVVSNGTAVLGLGDIGARAAMPVMEGKSLLFKNFAGVDSFPICLDTKNIDKIVEVVKLLEPTFGGINLEDIKAPECFEIEEKLKAVYDGPVFHDDQHGTAVVTLAAMFNALKIVNKELKDVKIVTSGAGAAGMAIVKLLMDCGLQNVIMCDTKGTIYKGRAEGMNKYKEEIALRTNPAMVKGSLGEALKGADVFIGISVGNTVTQEMIRTMAKDAIVFAQANPVPEIMPEEAKEAGAAVIGTGRSDYPNQINNILSFPGIFRGTFDVEAREINGPMKIAAAEAIASIVSPEELSAEYIIPKAFDKRVAPAVAAAVAKAAMESGVAKRKVDPEQVALNLTSLLAQEGK

SEQ ID NO: 9908 - protein, 205 aa, Shigella boydii
LDLYICVRPVRYYQGTPSPVKHPELTDMVIFRENSEDIYAGIEWKADSADAEKVIKFLREEMGVKKIRFPEHCGIGIKPCSEEGTKRLVRAAIEYAIANDRDSVTLVHKGNIMKFTEGAFKDWGYQLAREEFGGELIDGGPWLKVKNPNTGKEIVIKDVIADAFLQQILLRPAEYDVIACMNLNGDYISDALAAQVGGIGIAPGA

SEQ ID NO: 9909 - protein, 236 aa, Brassica napus
  misc_feature (59)..(59): Xaa can be any naturally occurring amino acid
  misc_feature (132)..(132): Xaa can be any naturally occurring amino acid
  misc_feature (183)..(184): Xaa can be any naturally occurring amino acid
  misc_feature (199)..(199): Xaa can be any naturally occurring amino acid
  misc_feature (204)..(204): Xaa can be any naturally occurring amino acid
  misc_feature (209)..(210): Xaa can be any naturally occurring amino acid
  misc_feature (216)..(216): Xaa can be any naturally occurring amino acid
  misc_feature (219)..(219): Xaa can be any naturally occurring amino acid
  misc_feature (227)..(227): Xaa can be any naturally occurring amino acid
MKGEGNEMFPKLPQNHSLSSHFHLPATIAVDDSSIEVVRRPRGRPPGSKNKPKPQVYVXTRDTEPPMSPYILEVPSGNDVVEAINRFCRRKSIGENPSACAFSVALDSVANITLRQPSPAAPGSTITFHGKXFDLLSVSATFLPPPPRTSLSPPVANFFTVSLAGPQGQIIGGFVAGPLISAXXTVYVIAASFNNPSYXRFTGXREEHXXSISARXREXGDGQSPRXFGRRRAKKG

SEQ ID NO: 9910 - protein, 282 aa, Allium cepa
  misc_feature (179)..(179): Xaa can be any naturally occurring amino acid
MAAARRIGSTIFSRYATASPRSSQLCRAASRIQNFGSTAAAVEEQPITPPVKVEYTQLLINGKYVDSASGKTFPSLDPRTGEVIAHVSEGDAEDIDRAVAAARKAFDEGPWLKMTAYERSNILLRFADLIEKHNDHIAALETWDNGKPYEQAALVEIPMLVRLMRYYAGWTDKIHGLIXPADGPHHVQVLYEPIGVAGQIIPWNFPLLMFAWKVGPALATGNTVVLKTAEQTPLSALYVAKLFHEAGGPDGVLNVISGFGPTAGAALASHMDVDKLAFTGST

SEQ ID NO: 9911 - protein, 364 aa, Glycine max
  misc_feature (203)..(203): Xaa can be any naturally occurring amino acid
NSRVDPASVSRSNRKPLPSSSSSSSVATEAEQKEILETLVSNLPLEKSSKAATATRFLFGLLRTTNILNAAEACRDALEKKIGLQLEEATLDDLLVPSYSYLNETLYDVDCVERILSHFLEGMEARTATETTEDAAATRSPALMLVGKLIDGYLSEIASDANLKPEKFYNFAISLPDEARLFDDGLYRAVDVYLKAHPWVSEXDREKICGLLDCQKLTLEACSHAAQNERLPLRAVVRVLFFEQLQLRRAIAGKLGAAEEPSRHSAAMAEEEEVEDDNNTWQVTVRENQVLRLDMDSMRTRVHELERECSSMKRAIEKMDKMGPRGGGPWRASLALGRKFGCKFKTQVCDSHEPATREGRPHRR

SEQ ID NO: 9912 - protein, 207 aa, Shigella boydii
LDLYICLRPVRYYQGTPSPVKHPELTDMVIFRENSEDIYAGIEWKADSADAEKVIKFLREEMGVKKIRFPEHCGIGIKPCSEEGTKRLVRAAIEYAIANDRDSVTLVHKGNIMKFTEGAFKDWGYQLAREEFGGELIDGGPWLKVKNPNTGKEIVIKDVIADAFLQQILLRPAEYDVIACMNLNGDYISDALAAQVGGIGIAPGANI

SEQ ID NO: 9913 - protein, 230 aa, Allium cepa
KSPMIILDDADIDQAVELAHFALFFNQGQCCCACSPTFVHEKIYDEFVEKAKARAMRRVVGDPFKKGVEQGPQIDDEQFNKILRYIKLGVDGGASLVTGGERIGSKGYYIQPTIFSDVKDDMVIAKEEIFGPVQSILKFNDLNEVIRRANASRYGLAAGVFTSNIDKANTLTRALRVGTVWVNCFDVFDAAIPFGGYKMSGQGREKGIDSLKGYLQTKAVVTPLKNPAWL

SEQ ID NO: 9914 - protein, 177 aa, Triticum aestivum
QCPCDGCCPCPCRQNPHGCGQACSPQLNIDGAVKSAPVTCPPASGEAAAPKERRWELSDFDIGRPLGRGKFGNVYLAREKKTKFIVALKVLFKSQLQKANVEHQLRREIEIQSHLRHPNILRLYGYFYDASRVYLILEYAPRGELYKELQKFQRFDEKRSATYVYQLGEALKYCHAN

SEQ ID NO: 9915 - protein, 212 aa, Shigella boydii
LDLYICLRPVRYYQGTPSPVKHPELTDMVIFRENSEDIYAGIEWKADSADAEKVIKFLREEMGVKKIRFPEHCGIGIKPCSEEGTKRLVRAAIEYAIANDRDSVTLVHKGNIMKFTEGAFKDWGYQLAREEFGGELIDGGPWLKVKNPNTGKEIVIKDVIADAFLQQILLRPAEYDVIACMNLNGDYISDALAAQVGGIGIAPGANIGDECA

SEQ ID NO: 9916 - protein, 142 aa, Mycobacterium avium subsp. paratuberculosis str. k10
MNHGVDAYRSVPRPRPVWTQQVLGTAARPAVMPMDAWRDGDQFVVEFDLPGVNADSLDLDVERNVLTVRAERPDLDQNREMVSAERPRGVFSRQLFLGDNLDTDKIEANYHDGVLRLTIPVAEKAKPRRIEINHNHKTAINA

SEQ ID NO: 9917 - protein, 152 aa, Pisum sativum
MDLDSPLFNTLHHIMDLTDDTTEKNLNAPTRTYVRDAKAMAATPADVKEHPNSYVFMVDMPGVKSGDIKVQVEDENVLLISGERKREEEKEGVKYLKMERRIGKLMRKFVLPENANIEAISAISQDGVLTVTVNKLPPPEPKKPKTIQVKVA

SEQ ID NO: 9918 - protein, 185 aa, Burkholderia cepacia R18194
MLFEKGMDFEIRDVDLFNKPEDISVMNPYGQVPILVERDLILYESNIINEYIDERFPHPQLMPADPVQRARARLFLLNFEKELFVHVSTLENEKGKAAEKNHEKARLAIRDRLTQLAPIFVKNKYMLGEEFSMLDVAIAPLLWRLDHYGIELSKNAAPLMKYAERIFSRPAYIEALTPSEKVMRR

SEQ ID NO: 9919 - protein, 357 aa, Oryza sativa (japonica cultivar-group)
MNYRVVNPVKVESGPSTGVANGQPPRPMDGLADGGPPPFLTKTYDMVDDPTTDAVVSWSATNNSFVVWDPHLFGNVLLPRYFKHNNFSSFVRQLNTYGFRKVDPDKWEFANEGFLRGQKHLLKSIKRRKPPNSSPSQQSLGSFLEVGHFGYEGEIDQLKRDKHLLMAEVVKLRQEQQNTKSDLQAMEQKLQGTEQKQQHMMAFLSRVMHNPEFIRQLFSQSEMRKELEEFVSKKRRRRIDQGPELDSMGTGSSPEQVSQVMFEPHDPVDSLFNGVPSDLESSSVEANGGKAQQDVASSSSEHGKIKPSNGELNEDFWEDLLHEGGLDEDTRNPAIDDMNLLSQKMGYLNSSSTKSPQ

SEQ ID NO: 9920 - protein, 241 aa, Oryza sativa (japonica cultivar-group)
MFGKGHDLEAGGSSEPLYPGMVESPDLRWALIHKIYVILSVQLAMTAAVAAFVVKVRGVSEFFVSSNAGFALYIFLLFLPLIVLCPLRYYHQKHPVNLLLLGLFTVAISFAVGMTCAYTSGKVIFEAAALTAVVVISLTAYTFWAAKRGHDFNFLGPFLFSAVMVLILFSLIQIFFPLGKISEMIYGGLASLVFSGYIIYDTDNIIKRYTYDEYVWAAVSLYLDVINLFLALLRVLRAADN

SEQ ID NO: 9921 - protein, 131 aa, Triticum aestivum
  misc_feature (27)..(27): Xaa can be any naturally occurring amino acid
  misc_feature (39)..(39): Xaa can be any naturally occurring amino acid
  misc_feature (41)..(41): Xaa can be any naturally occurring amino acid
  misc_feature (47)..(47): Xaa can be any naturally occurring amino acid
  misc_feature (51)..(51): Xaa can be any naturally occurring amino acid
  misc_feature (55)..(55): Xaa can be any naturally occurring amino acid
  misc_feature (81)..(81): Xaa can be any naturally occurring amino acid
  misc_feature (89)..(89): Xaa can be any naturally occurring amino acid
YVHLRDIRFVFVECDYACIRRSAQHFXSCGTVNRVISLXDXFGQLKXFAYXEFVXAELFRNCQVEWSEFMVGQIKVALKRXNVPGLSSXRGRRFNPYGGHPYMRPYPPPFYNPYGGYGRAPRFRRPRRPFY

SEQ ID NO: 9922 - protein, 293 aa, Candida albicans SC5314
MKKALPEHAKLSKESKECIQECVSEFISFITSQAADRCLVEKRKTLNGEDILWAMYTLGFENYSETLKIYLAKYRQYEQEQLSLKPPRKKIRKRKTKSSLSQTQSKEQVDQDQDFQQIEQQYDDGEEEEEESENEEGDMSNIESNLILQNLPEYSDDYFDDEDEEEDRQQQREENSDNEPQQHHGDDSQPINLQPQLPSSAVPSLPTQQQQQFSDINPTTESNQQESFFTTQYYPNQTQYVNAAPLPTNPQPRQYQNQNQPNNYQNDQRQNDKQRIIPDLLNITNSYSEDEFI

SEQ ID NO: 9923 - protein, 493 aa, Methanosarcina mazei Go1
MCGIAGMFGTPDSNTKVKKMLAILGHRGPDACGIHTEGKLSIGNTLLKITGDMPQPLTGTGSLVLNGEIYNFRELAAEIGLKTDSDTELLFTLIERKVRKGIKPTNAVFSVLSKVNGDYALAYACGTELVLARDPSGVKPLYYFYEKSMVKPGLAFASEKKALAFTGREVKPFPQGGIMGFSTENGKIAEKFTEKSLKITQPEKRISAEKEAIIYLKAALEKAVELRLTPVSGIAFSGGIDSTFLAALAKRIDPYVSLYAVGLPDSHDIAQAEYAAEAIGMKRNLKTHFLSPEEIEAAVPEVIYATESTDPMKVAIGLPLHIVAKTAREEGKRVLLTGQGADELFGGYSRHEGFFEQGADVLDREIYSDLENISAINLERDDMVAMANSVELRVPFLDKEVIKTGLAISPELKVRKKEGVYIRKYILRKAAEGLLPPKILWKEKKAVQYGTGVQKTLDRLARDSGFSKKQGGHIEKYLSQIASEKGFDFINEM

SEQ ID NO: 9924 - protein, 201 aa, Salmonella enterica subsp. enterica serovar Typhi Ty2
MALHDENVVWHSHPVTVAAREQLHGHRGVVLWFTGLSGSGKSTVAGALEEALHQRGVSTYLLDGDNVRHGLCRDLGFSDADRQENIRRVGEVASLMADAGLIVLTAFISPHRAERQLVKERVGHDRFIEIYVNTPLAICEQRDPKGLYKKARAGELRNFTGIDAIYEAPDSPQVHLNGEQLVTNLVSQLLDLLRRRDIIRS

SEQ ID NO: 9925 - protein, 290 aa, Triticum aestivum
MGGLSMEHPWAFAFGLLGNVISFSSLLAPIPTFYRIFKSKSTEGFQSVPYVVALFSAMLWIFYALVKTGEGLLISINAAGCVIETVYIVMYLVYADRKAKIFTAKIVVLLNIAGFGLIFLLTLFAFHGETRVVSLGWICVGFSVCVFVAPLSIIGRVIKTKSVEYMPFTLSLTLTLSAIVWFLYGLLIKDKYVALPNILGFTFGVIQMVLYVFYMNKTPVASQVKEGKEAWKAPAEDHVVVINVGKADKSSCAEVRPVTEMAGAVDVPRRCAAEAAAAPGVDFARSVNVV

SEQ ID NO: 9926 - protein, 480 aa, Pseudomonas putida KT2440
MSHKTYNNYIDGQWCEGHATLGNYSPSDTGDLIGQYHQASAEQARQAIQAARAAQPLWAASGLESRQQVLMAIGDELIARKEELGELLSREEGKPLAEGIGEVNRSGQFFHYYAAEVLRQMGETAASVRPGVDIEVHREPVGVVGIITPWNFPMATAAWKIAPALAFGNAVVFKPANLVPASAWALTEIISRQGLPSGTFNLVMGSGADVGEALIQSAEIDALTFTGSLQTGRRVAVATAGNLVRCQLEMGSKNALVVMDDADLELAVECALNGAFFGTGQKCTASSRLIVCDGIHDRFVEALRLRMRQLKVGHALEAGVQIGPVADARQLEQNLAYLQLAQAEGATLIEGGERLQLACDGYYMRPALFINSRNDMRINREEVFGPIACVIRVRDFEEALATLNDTEYGLTAGIITQSLRHASHFKRRAQTGCVMVNLPTAGTDYHVPFGGRKASSFGPREQGQYARDFYTVVKTTYLRP

SEQ ID NO: 9927 - protein, 374 aa, Arabidopsis thaliana
MLTCIACTKQLNTNNGGSKKQEEDEEEEDRVIETPRSKQIKSLTSQIKDMAVKASGAYKSCKPCSGSSNQNKNRSYADSDVASNSGRFRYAYKRAGSGSSTPKILGKEMESRLKGFLSGEGTPESMSGRTESTVFMEEEDELKEWVAQVEPGVLITFVSLPEGGNDMKRIRFSREMFDKWQAQKWWAENFDKVMELYNVQQFNQQSVPLPTPPRSEDGSSRIQSTKNGPATPPLNKECSRGKGYASSGSLAHQPTTQTQSRHHDSSGLATTPKLSSISGTKTETSSVDESARSSFSREEEEADHSGEELSVSNASDIETEWVEQDEAGVYITIRALPDGTRELRRVRFSREKFGETNARLWWEQNRARIQQQYL

SEQ ID NO: 9928 - protein, 224 aa, Hypocrea jecorina
MGYYDDEGSYHSLKHGVAKTIDKLLPHHHHHHHHSDHHHHSDHHDHNNTTITEHVEVDVVRHDANHSRRAAPATESQPQTVSIPCHHIRLGDFLMLQGRPCQVIRISTSSATGQYRYLGVDLFTKQLHEESSFISNPAPSVVVQTMLGPVFKQYRVLDMADGYVTAMTETGDVKQGLKVIDQSNLWSRLQQAFESGRGSVRVLVLNDGGHELAVEMKVVHGSRL

SEQ ID NO: 9929 - protein, 248 aa, Solanum tuberosum
MENSVPRTVEEVFSDFKSRRAALIKALTTDVEKFYQQCDPEKENLCLYGLPNETWEVNLPVEEVPPELPEPALGINFARDGMQEKDWLSLVAVHSDSWLLSVAFYFGARFGFGKSERKRLFQMINDLPTVFEVVTGAAKQTRDPPHNNSNKSKSSGKPRQPESQLKAVKVSPPKMENDSGEEEEEEEDEQGATLCGACGDNYATDEFWICCDICERWFHGKCVKITPAKAEHIKQYKCPSCSSKRAKV

SEQ ID NO: 9930 - protein, 487 aa, Arabidopsis thaliana
MVITANDLSKWENFPKGLKVLLLLNGCDSDGDGSSAAETRSELESMDYIVTTFTDETEALSAVVKNPESFHIAIVEVNMSAESESFKFLEAAKDVLPTIMISTDHCITTTMKCIALGAVEFLQKPLSPEKLKNIWQHVVHKAFNDGGSNVSISLKPVKESVVSMLHLETDMTIEEKDPAPSTPQLKQDSRLLDGDCQENINFSMENVNSSTEKDNMEDHQDIGESKSVDTTNRKLDDDKVVVKEERGDSEKEEEGETGDLISEKTDSVDIHKKEDETKPINKSSGIKNVSGNKTSRKKVDWTPELHKKFVQAVEQLGVDQAIPSRILELMKVGTLTRHNVASHLQKFRQHRKNILPKDDHNHRWIQSRENHRPNQRNYNVFQQQHRPVMAYPVWGLPGVYPPGAIPPLWPPPLQSIGQPPPWHWKPPYPTVSGNAWGCPVGPPVTGSYITPSNTTAGGFQYPNGAETGFKIMPASQPVSVNNSLFSF

SEQ ID NO: 9931 - protein, 155 aa, Populus nigra
GASDTVRTYHVNLSLFTSIPDFWGIGQLFPIVPIHRLDQRPGARGILSDLTCDSDGKIDKFIGGESSLPLHEIEGGGAGGNGGKYYLGMFLGGAYEEALGGIHNLFGGPSVVRVSQSDGPHSFLVTQAVPGPSCGDVLRVMQHEPELMFETLKHR

SEQ ID NO: 9932 - protein, 367 aa, Bacillus subtilis subsp. subtilis str. 168
MKKITVNQDKKLAYIEAGAELGEVYRTLWQYGLTLPAGTIANVGLTGLTLGGGIGLLTRAAGLTCDSLVQLEMIVADEKEGADLITVSCSNHPDLFWASQGGGGGNFGIVTSMTFKAVPISQVSIFSITWGWDDFEEVYNTWQNWPPYTDDRLTSSIEFWPKEVNRIEALGQFVGPKTELKKLLKPLLKAGSPTSGMVKTTPFIEAVTFFNSPGGNQPQKMKRSGSFIEKPLSERAISTIKHFLEHAPNQNASVWQQALGGAAGRVAPDQTAFYYRDAIIAQEYLTNWTSPGEKRQNVRWIEGLRTSLSKETMGDYVNWPDIEIRNWPRTYYGENVERLRRVKTTYDPENVFRFEQSIPPLRRSLFF

SEQ ID NO: 9933 - protein, 152 aa, Triticum aestivum
  misc_feature (136)..(136): Xaa can be any naturally occurring amino acid
MAPTVMASSATSVAPFQGLKSTAGLPVSRRSNGASLGSVSNGGRIRCMQVWPIEGIKKFETLSYLPPLSTEALLKQVDYLIRSKWVPCLEFSKVGFIFREHNASPGYYDGRYWTMWKLPMFGCTDATQVINEVEEXKKEYLTVFRIIGSTTS

SEQ ID NO: 9934 - protein, 359 aa, Gloeobacter violaceus PCC 7421
MSPYRVTLIRGDGIGPEVTQAARIVLDATGIDFEWVVVDAGAEVMEKSGTPLPAPVIEAVRASDAAIKGPITTPAGSGIRSVNVALRRALDLYANLRPARTLPGVHSRYDNIDLVVVRENTEDLYSGIEFEKNSPQALEVIEMLMRLGGKKIFPRSGLAVKPISSEASERIARFAFEYARRHARRKVTAVHKANILKHTDGLFLEAARQVASEYPDVEFEDRIVDNLCMQLVQRPESYDVLVLPNLYGDIVSDLTAGLVGGLGVAPGANIGDRSAVFEAIHGSAPRYAGQNKVNPSALILSGALLLRHLGEQEAAVRVEQAVAAVIAEGRSVTYDLAPAGATPAGTRQMAEAIAQKVAG

SEQ ID NO: 9935 - protein, 205 aa, Shigella boydii
LYICLRPVRYYQGTPSPVKHPELTDMVIFRENSEDIYAGIEWKADSADAEKVIKFLREEMGVKKIRFPEHCGIGIKPCSEEGTKRLVRAAIEYAIANDRDSVTLVHKGNIMKFTEGAFKDWGYQLAREEFGGELIDGGPWLKVKNPNTGKEIVIKDVIADAFLQQILLRPAEYDVIACMNLNGDYISDALAAQVGGIGIAPGANI

SEQ ID NO: 9936 - protein, 211 aa, Shigella boydii
LYICLRPVRYYQGTPSPVKHPELTDMVIFRENSEDIYAGIEWKADSADAEKVIKFLREEMGVKKIRFPEHCGIGIKPCSEEGTKRLVRAAIEYAIANDRDSVTLVHKGNIMKFTEGAFKDWGYQLAREEFGGELIDGGPWLKVKNPNTGKEIVIKDVIADAFLQQILLRPAEYDVIACMNLNGDYISDALAAQVGGIGIAPGANIGDECAL

SEQ ID NO: 9937 - protein, 176 aa, Triticum aestivum
  misc_feature (132)..(132): Xaa can be any naturally occurring amino acid
  misc_feature (158)..(158): Xaa can be any naturally occurring amino acid
MAPTVMASSATSVGPFQGLKSTVGLPVSRRSNGASLGSVSNGGRIRCMHVWPIEGGGKVDTLSYLPPLRTEALLEQVDYLIRSKWVPCLEFSKVGFIFRDHNTSPGYYDGRYWTMWKLPMFGCTDATQVINXVEEVKKEYPDAYVRIIGFDNMRQVQXCVSFIAFKPPGCEESGKV

SEQ ID NO: 9938 - protein, 310 aa, Alicyclobacillus acidocaldarius
  misc_feature (53)..(53): Xaa can be any naturally occurring amino acid
  misc_feature (64)..(64): Xaa can be any naturally occurring amino acid
  misc_feature (210)..(211): Xaa can be any naturally occurring amino acid
MPLDPVIQQVLDQLNRMPAPDYKHLSAQQFRSQQSLFPPVKKEPVAEVREFDXDLPGRTLKVRXYRPEGVEPPYPALVYYHGGGWVVGDLETHDPVCRVLAKDGRAVVFSVDYRLAPEHKFPAAVEDAYDALQWIAERAADFHLDPARIAVGGDSAGGNLAAVTSILAKERGGPALAFQLLIYPSTGYDPAHPPASIEENAEGYLLTGGXXLWFRDQYLNSLEELTHPWFSPVLYPDLSGLPPAYIATAQYDPLRDVGKLYAEALNKAGVKVEIENFEDLIHGFAQFYSLSPGATKALVRIAEKLRDALA

SEQ ID NO: 9939 - protein, 206 aa, Escherichia albertii
LYICLRPVRYYQGTPSPVKHPELTDMVIFRENSEDIYAGIEWKADSADAEKVIKFLREEMGVKKIRFPEHCGIGIKPCSEEGTKRLVRAAIEYAIANDRDSVTLVHKGNIMKFTEGAFKDWGYQLAREEFGGELIDGGPWLKVKNPNTGKEIVIKDVIADAFLQQILLRPAEYDVIACMNLNGDYISDALAAQVGGIGIAPGANIG

SEQ ID NO: 9940 - protein, 317 aa, Pseudomonas aeruginosa UCBPP-PA14
MIEVIVGAIRLEAQDIHSFELFRADGAALPSFEPGAHIDLHLPNGLVRQYSLCGPAERPRHYRIAVLRCRDSRGGSATLHAELRVGQRLRIGEPRNLFPLSPEPGPRLLFAGGIGITPLLAMAERLARDGANFQLHYCAHSAERAAFVDYLDRCAFADRVHCHFDHGDSSRRADLRALLAASPRDAQLYLCGPAGFMQWIEESARELGWEASRLHREHFAAAPRDANADGTFEVQLASNGALIRVAAGQTVLAALREAGVDLPASCEQGICGTCLTRVLDGEPEHRDLYLSEEEQAANDCFTPCCSRSRSPRLVLDL

SEQ ID NO: 9941 - protein, 205 aa, Shigella boydii
YICLRPVRYYQGTPSPVKHPELTDMVIFRENSEDIYAGIEWKADSADAEKVIKFLREEMGVKKIRFPEHCGIGIKPCSEEGTKRLVRAAIEYAIANDRDSVTLVHKGNIMKFTEGAFKDWGYQLAREEFGGELIDGGPWLKVKNPNTGKEIVIKDVIADAFLQQILLRPAEYDVIACMNLNGDYISDALAAQVGGIGIAPGANIG

SEQ ID NO: 9942 - protein, 169 aa, Nicotiana tabacum
MASQSSKPQSIYDFTVKDAKGNDVDLSIYKGKVLIIVNVASQCGLTNSNYTDMTEIYKKYKDQGLEILAFPCNQFGGQEPGSIEEIQNMVCTRFKAEYPIFDKVDVNGDNAAPLYKFLKSSKGGFFGDSIKWNFSKFLVDKEGNVVDRYSPTTTPASMEKDIKKLLGVA

SEQ ID NO: 9943 - protein, 332 aa, Schizosaccharomyces pombe
MNSNFSYPALGVDGISSQISPIRDVWSTNLQQEMNLIMSLIERYPVVSMDTEFPGVVARPLGVFKSSDDYHYQTLRANVDSLKIIQIGLALSDEEGNAPVEACTWQFNFTFNLQDDMYAPESIELLTKSGIDFKKHQEVGIEPADFAELLIGSGLVLQEEVTWITFHSGYDFAYLLKAMTQIPLPAEYEEFYKILCIYFPKNYDIKYIMKSVLNNSKGLQDIADDLQIHRIGPQHQAGSDALLTARIFFEIRSRYFDGSIDSRMLNQLYGLGSTGSVLWHNNSSTPQIQFRDLPGAHPSPTPSNAGIPTTLTNTSSAPNFANSTFRFPPRVV

SEQ ID NO: 9944 - protein, 329 aa, Bdellovibrio bacteriovorus HD100
MAQFDKKIQKIGVYTSGGDAPGMNAAIRAVVRVGISQKLEVYGIHNGYVGMIENKIEPLQLRDMANIIQRGGTILKTGRSTEFMRPEGRARAAQNIKNLGLDALVCIGGDGSFRGAHALWEEHQIPVVGVPGTIDNDIFGSDKTIGFDTAVNTALEAIDRIRDTAASHDRLFIVEVMGRNSGFIASHVGLAGGAEEIFTPDANTTVEKAIDRINEAKSRGKTSSIIITAEGQKPGRAYDLADAIRKKSGMDAKVCILGHQQRGGSPTAADRILASRMGAAAVDALFKGYCDVMIGTEGERLIQVPLDLVYKNEKKNQLDLISLASVLAT

SEQ ID NO: 9945 - protein, 319 aa, Zea mays
PSPPLPLKLYCRRESAPPPADQTSAMTTLATDTAAWTREEDKAFENAVAASAAPPADGPPDDGWFTALVASVPARTAEEVRRHYEALVEDVAAIEAGRIPLPRYAGEESSAATPEGSGAAGPSTPKDGGGGSGHRREERKGGVGADAGKSCSKAEQERRKGVPWTEEEHRLFLLGLDKFGKGDWRSISRNFVISRTPTQVASHAQKYFIRLNSMNRDRRRSSIHDITSVTAGEVATAGAPITGGGPTAAGAMPMGPGGMKHHHPVPPMGMYGHAPMGHPVAGHMVAPAAVGTPVMFPPGHHSPYVLPVGYPAPPTKMHQ

SEQ ID NO: 9946 - protein, 272 aa, Brassica napus
  misc_feature (88)..(88): Xaa can be any naturally occurring amino acid
VDPRVRNWLGIGLERKMKSSLVTVNRMFAKIISTRREEISRGEGEQLMDALTYYIKAAPASDRLLKPSNDTFIRDVAFSLLLAGRDTXTSSVLTWFFWLLSKHPHVLTKIRQEINTKFDPTYLEKLVYLHAALYETMRLYPPVPFNHKSPLKSDVLPSGHKVKAESKIVICIYALGRMRSVWGEDALDFKPERWISESGELKHEPSYKFMAFNAGPRACLGKHLALQQMKIVAVELIQNYDFKFTEGHKIEAVPSIVLRIKHGLSVTVTKKM

SEQ ID NO: 9947 - protein, 160 aa, Brassica napus
MSTKKIVLKSSDGESFEVDEAVALESQTIAHMVEDDCVDNGIPLPNVTSKILAKVIEYCKKHVDAAASKTEAVDGGGSSDDDLKAWDAEFMKIDQATLFELILAANYLNIKNLLDLTCQTVADMIKGKTPEEIRTTFNIKNDFSPEEEEEVRRENQWAFE

SEQ ID NO: 9948 - protein, 298 aa, Solanum tuberosum
MCGGAILYDIIPRDRRLSSTDLWPSSADFWQTSSFSKPISTQNVPPKPKRAQLSRGSEQMKKRQRKNLYRGIRQRPWGKWAAEIRDPRKRVRVWLGTFNTAEAARAYDREARKIRGKKAKVNFPNEDDDHYYSHPEPPPLNIVYESYDTTSTYNQESNNCYPFHSIENTEPVMEFAIANKNSSGSAYNGIEDQNVEGEEQTVKNSNNRIVEEEEKTEDEVQILSDELMAYESLMKFYEIPYVDGQSVAATVNPAADTEVGGGSMELWSFDDVSRLQPSYNVSLIIVLFKLLHLFSLLN

SEQ ID NO: 9949 - protein, 282 aa, Glycine max
MGGGGAMRTVAKFATAGIRGVPSVRRASSQTAAASEVSPLQAAAWDDVDDWEVADGGEGTPRVVLGGVPSFQEATSATTELKHAIDKIYLSSNSSECDGCSLSGHVSVMSPSHSELENKSRVTEAILNPSESNRALQAFQLLSECPEAQSVVASIACDPNIWNAIVQNPALQDFFQSQQTADFEVEETHDQRLGNLPYSDSVYAFIDSLNVLQNVKFTVSEMLSRVPNYLQNMFGFLSGQTSSAVIDARGNTKANFIDPITMGGTFMGLAVLVVMVIMLKRA

SEQ ID NO: 9950 - protein, 158 aa, Neurospora crassa
MDEYSGYRYAYASEPWIVSGSGVSPPPSNDDLSLPKATVQKIVSEILPSSTGLSFAKEARDLLIDLCVEFISLVSSEANEISEKESKKTIACDHITQALERLGFADYVPAVLEAAAEHKEVQKGREKKANKFEQSGLSLEELERIQREQFADAAARHT

SEQ ID NO: 9951 - protein, 285 aa, Methylococcus capsulatus str. Bath
MCDAQDWFTESYPDNGSALSLKIRAKLHEEQTPFQRIEIYDTESFGKLMVIDGCTMVSDRDNFLYHEMMTHPVLYTHPAPKTVWIIGGGDCGSLREVLKHSEVEKAVQIDIDERVTRLAERYFPELCEANGDPRAELLFIDGIQWVKEAPDGCVDVIIVDSTDPVGPAEGLFNEAFFRQCHRCLRTDGILVQQSESPLFHLPLIASMHRIMRQAGFAQTRTLFFPQFIYPSGWWSATMAGKGDLNRFRADAAEAKLFPTRYYNADIHRAAFAVPEFFGDALRELV

SEQ ID NO: 9952 - protein, 317 aa, Magnaporthe grisea 70-15
MSSGRKIKLNSGHEIPQSNPNEVAKAVEHALRNGYRHIDGALVYGNEHEVGEGIRASGVPRSDIFLTSKLWNTFHHPDDVEAGIDLTLRDLGTHYVDLYLIHWPVSFAPRENPRELFPIDPATGATHVVDIPDADTWRAMERLVESGKARSIGVSNFTRGRLEKLLQTARIRPAVNQIEAHPYLQQRELLEWHRQQGIVVQAYSPTGNNIYGRPKPLDDPVVLEVAARVGRTPAQVLVQWAAQRGTVVLPKSVTPSRIDENFVDFELPADEVEKLNALERHARYNFPARLGVDIFGEATEEELKAAVQAFIEQRRQA

SEQ ID NO: 9953 - protein, 509 aa, Xanthomonas campestris pv. campestris str. ATCC 33913
MNALPSAKSLNTDPQSIFKPRYDNFIGGAWVAPQGGQYFDNTTPITGKVFTSIARSTAPDIEAALDAAHAAKEAWGKTSTTDRSNVLLKIADRIEQNLELLAYAETWDNGKPVRETLNADVPLCVDHFRYFAGAIRAQEGGISEIDSDTIAYHFHEPLGVVGQIIPWNFPLLMACWKLAPALAAGNCVVMKPAEQTPASILVLMEVIGDLLPPGVLNVVNGFGLEAGKPLASNPRIAKIAFTGETTTGRLIMQYASQNLIPVTLELGGKSPNIFFADVMAEDDDFLDKAVEGFVLFAFNQGEVCTCPSRALIQESIYDTFMEKALKRVAAIKQGNPLDPNTMVGAQASSEQLEKILSYIDIGKQEGAEILIGGERNMLDGELSDGFYVKPTVFKGHNKMRVFQEEIFGPVVSVTTFKDEAEALAIANDTLYGLGAGVWSRDASRLYRMGRAIQAGRVWTNCYHAYPAHAAFGGYKQSGIGRENHKMMLDHYQQTKNLLVSYSPKALGFF

SEQ ID NO: 9954 - protein, 654 aa, Zea mays
MAGPEKTVVWFRRDLRIQDNPALAAAAKGGSVLPIFIWCPSDYGQYYPGRCSRWWLKQSLTHLGKSLELLGCPLVLIRAEDSTLAALLECVRSISATRVVYNRLYDPISLVLDNKIKNELPAHGISVQSFNGDLLYEPWDVYDENGQAFTTFNKYWEKCMNLPIEISQYLAPTRLVAAPGLANVRCCSIDDLGLESSKDVESSNALLSRAWSPGWRNAENMLEEFVSYGLLEYSEHGMKVGGSTTSLLSPYLHFGELSVRMIYQLVKMRQVKWQNEGKSEAEESVRLFLRSIGFREYSRYLCFNYPFTHERSFLGNLKHYPWLLDEGRFKSWRQGMTGYPLVDAGMRELWATGWTHNRIRVIVSSFAVKFLQIPWIWGMKYFWDVLLDADLESDILGWQYISGSLPDGHELSRLDNPEVQGQKYDPDGEYVRTWIPELARMPTEWIHSPWAAPNSILQVAGVELGFNYPKPIVELHMARECLDDAISTMWQLDTAAKLAELDGEVVDDNLNNIRNFDIPKVVLNKKLSPSTSSMEHRVLSTNGKDEKSQPTEVKALYKQIIRDDMMNDSNMDDTCSTANLKVTRKRSSSDSAFNVPSCSSSLVMESRIHHNEPSSVLYSGYFQKTADRDGTSKVEDNDSEDSGTSISRPSKKAA

SEQ ID NO: 9955 - protein, 466 aa, Mycobacterium tuberculosis CDC1551
MSRTRVYAVPVPGSAQSAYACGVERLLASYRSIPATASIRLAKPTSNLFRARVKHDARGLDASGLTGVIGIDPEARTADVAGMCTYEDLIAATLHYGLSPLVVPQLRTITLGGAVTGLGIESASFRNGLPHESVLEMDILTGAGELLTVSPGQHSDLYRAFPNSYGTLGYSTRLRIQLEPVRPFVALRHIRFSSLTAMVAAMERIIDTGGLDGESVDYLDGVVFSADESYLCIGMQTSVPGPVSDYTGQDIYYRSIQHEAGIKEDRLTIHDYFWRWDTDWFWCSRSFGAQNPRLRRWWPRRYRRSSVYWRLMALDQRFGIADRFENSRGRPARERVVQDIEVPIERTCEFLEWFGENVPISPIWLCPLRLRDHAGWPLYPIRPDRSYVNIGFWSSVPVGATEGATNRKIENKVSALDGHKSLYSDSFYTREEFDELYGGETYNTVKKAYDPDSRLLDLYAKAVQRR

SEQ ID NO: 9956 - protein, 367 aa, Glycine max
  misc_feature (149)..(149): Xaa can be any naturally occurring amino acid
  misc_feature (157)..(157): Xaa can be any naturally occurring amino acid
  misc_feature (262)..(262): Xaa can be any naturally occurring amino acid
MGSTGETQITPTHVSDEEANLFAMQLASASVLPMILKSALELDLLEIIAKAAPGVHLSPTDISSQLPTQNPDAPVMLDRILRLWACYNILSFSLRTLPDGKVERLYGLAPVAKYLVKNEDGVSIAALNLMNQDKVLMESWYLFDRCSPXGGIPFNKXAYGMTAFEYHGTDPRFNKVFNKGMADHSTITMKKILETYTGFESLKSLVDVGGGTGAVINMIVSKHPTIKGINFDLPHVIEDAPSYPGVEHVGGDMFASVPKADXAIFMKWICHDWSDEHCLKFLKNCYEALPDNGKVIVAECILPVAPDSSLATKGVVHIDVIMLAHNPGGKERTEKEFEALAKGSGFQGFRVVCCAFNTNIMEFLKKI

SEQ ID NO: 9957 - protein, 202 aa, Shigella boydii
YICLRPVRYYQGTPSPVKHPELTDMVIFRENSEDIYAGIEWKADSADAEKVIKFLREEMGVKKIRFPEHCGIGIKPCSEEGTKRLVRAAIEYAIANDRDSVTLVHKGNIMKFTEGAFKDWGYQLAREEFGGELIDGGPWLKVKNPNTGKEIVIKDVIADAFLQQILLRPAEYDVIACMNLNGDYISDALAAQVGGIGIAPGA

SEQ ID NO: 9958 - protein, 449 aa, Gibberella zeae PH-1
MGNGNSTPLQDCLNAVCANQSNCVRYPGDPLFAWWSTPFNLEFPVVPAAVIRPQTVIQVAETVKCATNHGAKVQALSGGHSYGMNNKTWYASFGAGMNLGELDEHLHANGRRAIAHGTCPGVGTGGHLTVGGLGPISRQWGSALDHILEIEVVTADGTVQRASYTKNSGLFWALRGAGASFGIVTKFMVKTHPEPGRVIQYSYKFAFTSHDEMAKLYREWQAVVGDPNMDRRFSSLFIVQPFGALITGTFFGTRSQFMITRIPSRLPGTFRSNAWITDWAALLLHEAEAVGCALGSVPTAFYGKSLSLSEQDLLSDKAITDLFKYLEQKRSELAPVTIIFNSEGGAMMDIPADATAYPHRNSIIMYQSYGIGVGKVSAATRELLDGVHKRIQRSAPGARSTYAGYIDPWADRKAAQKLYWADNLPRLRELKKAWDPTDVFHNPQSVDPA

SEQ ID NO: 9959 - protein, 211 aa, Shigella boydii
YICLRPVRYYQGTPSPVKHPELTDMVIFRENSEDIYAGIEWKADSADAEKVIKFLREEMGVKKIRFPEHCGIGIKPCSEEGTKRLVRAAIEYAIANDRDSVTLVHKGNIMKFTEGAFKDWGYQLAREEFGGELIDGGPWLKVKNPNTGKEIVIKDVIADAFLQQILLRPAEYDVIACMNLNGDYISDALAAQVGGIGIAPGANIGDECALF

SEQ ID NO: 9960 - protein, 124 aa, Zea mays
  misc_feature (76)..(76): Xaa can be any naturally occurring amino acid
  misc_feature (85)..(85): Xaa can be any naturally occurring amino acid
MAGCCVFLRWPSASPSRIGYRSLVDAAADDAAPPSTVTVVVGKERRAFAVDRLVLDSYPLRLLLETAARREERRAXGGAGAIFVXDVDAILFEHILWLACDARSVSQILHLDLKEIIDFYAQDA

SEQ ID NO: 9961 - protein, 459 aa, Anabaena variabilis ATCC 29413
MLTQLPNPISVPSWWQLINWIADPIGFQKKYSQKYGDIFSMQLAGIGSFVILGEPQAIQEIFTQDSRFDIGRGNKLAEPLIGRTSLMLMDGDRHRRERKLLMPPFHGEKLQAYAQQICLITHQIASQWQIGQPFVARSAMQKLSLEVIIQIVFGLANGERYQQIKPLFTDWLNMTDSPLRSSMLFLKSLQQDWGNRSPWGQMKYQQRCIYDLLQAEIEEKRTKENERRGDVLSLMMAARDENGQAMTDEELKDELLTILFAGHETTATTIAWAFYQIFRNVNVREKLQQELDSLGENPNPMEIAQLPYLTAVCQETLRMYPVLPTLFPRITKSSINIAGYQLEPNTTLMASIYLIHYREDLYPHPQQFRPERFIERQYSPSEYIPFGGGSRRCLGYALALLEIKLVIATVLSNYQLALAEDKPIKVQRRGFTLAPEGGVRMIMTGKKSLRFEQSNKIFN

SEQ ID NO: 9962 - protein, 203 aa, Shigella boydii
ICLRPVRYYQGTPSPVKHPELTDMVIFRENSEDIYAGIEWKADSADAEKVIKFLREEMGVKKIRFPEHCGIGIKPCSEEGTKRLVRAAIEYAIANDRDSVTLVHKGNIMKFTEGAFKDWGYQLAREEFGGELIDGGPWLKVKNPNTGKEIVIKDVIADAFLQQILLRPAEYDVIACMNLNGDYISDALAAQVGGIGIAPGANI

SEQ ID NO: 9963 - protein, 200 aa, Escherichia albertii
RPVRYYQGTPSPVKHPELTDMVIFRENSEDIYAGIEWKADSADAEKVIKFLREEMGVKKIRFPEHCGIGIKPCSEEGTKRLVRAAIEYAIANDRDSVTLVHKGNIMKFTEGAFKDWGYQLAREEFGGELIDGGPWLKVKNPNTGKEIVIKDVIADAFLQQILLRPAEYDVIACMNLNGDYISDALAAQVGGIGIAPGANI

SEQ ID NO: 9964 - protein, 121 aa, Zea mays
MSGENDNGGAKRRGSVKWFAAEKGFGFITPEDGGEDLFVHQSSIRSEGYRSLAEGESVEFLVEVDNSSGRTKAIEVTGPDGAPVQGTSRGSAGGRGGFGGDGYGGRGGGRGSYGGRGGGGG

SEQ ID NO: 9965 - protein, 345 aa, Thermoplasma acidophilum DSM 1728
METVAVKLTGTKFFDTGLSTGTYFLFETAFASVTLALVSVVVLRKMKMSAFMLFSIIYFIFIWTIPAAWIWNPTGWLYKLGVRDFAGGLVVHVASGFAALAIMVRIWQEEKKMGLKESKKENLNLNSGWLTLSIILLWVGWFGFNPGSELAFTTETVIVVITTFLAAASAMVSTMLTKFLVSKQDPGLIYAVNGVLMGLIVITPLAGYVSPGSAIILGLISGPIFVSAESIFSKHKWYSDPIGVLPGHMVGGIFGLLMIAFFTQTPFADASGASNLPNGILFGGGIMALHQLGLEAMAVVVVGAFVFTVSYASVYAISLLLNGILRDSEYSPARPANRLAKDTGA

SEQ ID NO: 9966 - protein, 274 aa, Arabidopsis thaliana
MSLFLKDDSIQIREVWNDNLQEEMDLIRDVVDDFPYVAMDTEFPGIVVRPVGTFKSNADYHYETLKTNVNILKMIQLGLTFSNEQGNLPTCGTDKYCIWQFNFREFDLDSDIFALDSIELLKQSGIDLAKNTLDGIDSKRFAELLMSSGIVLNENVHWVTFHSGYDFGYLLKLLTCQNLPDSQTDFFKLINVYFPTVYDIKHLMKFCNSLHGGLNKLAELLEVERVGICHQAGSDSLLTSCTFRKLKENFFVGPLHKYSGVLYGLGVENGQVAI

SEQ ID NO: 9967 - protein, 360 aa, Arabidopsis thaliana
MNEIHQPLARRVWRSNVDEEMARMAECLKRFPLIAFDTEYPGIIFRTYFDSSSDECYRAMKGNVENTKLIQCGFTLFNAKGEIGGVWEINFSNFGDPSDTRNELSIEFLRRHGLDLQKIRDEGVDMFGYGFFPKLMTVFRSQKHVEFVTFQGAYDFAYFLSILNHGKLPETHGEFATEVVKVFGQVYDTKVMAGFCEGLGEHLGLSKLAQLLQITRVGRAHHAGSDSLMTALVFIKLKHVYEDSRFARGLIYGIGKSNLVAAPAPAPVPEPTLPLMCQQNVASYPVFHNGYVQNYEQPQLVSYDPSGAPWAFCNATGTYVQLTHLPASTFAYPSQTPSATVDYLGPVPNYYNNNACYVVE

SEQ ID NO: 9968 - protein, 506 aa, Zea mays
MKTSVVVAALAAVLFAAQSYASLAGASGPRVIIVGAGMSGISAGKTLWEAGVRDLLILEATGRVGGRMHKHNFGGINVEIGANWVEGLGGDQLNPIWPLVNSTLKLRNFYSDFDSVVGNVYKENGGGLYDEEYVQKRMDRAYEVEELGANLTKKMHPSGRDDISVLAMQRLFNHQPNGPTTPVDMALDYFIYDYEFAEPPRVTSLQNTQPTPTNADFGEDNYFVADQRGYESIIHSIGSSYLSTDGNGKLKDRRILLNKVVRQITYNKQGVVVKTEDGSSYRADYVVVSTSLGVLQTDLIQFKPQLPFWKIAAIYSFDMGVYTKIFLKFPERFWPVGEGKQFFMYASSRRGYYALWQSFEREYPGANVLLATVTDDESRRIERQSDDQTKAEVAEVLRDMFPAADVPGPDQIDVYVPRWWSDRFFKGSYSNWPVGVSRYEYDQLRAPVGRVYFTGEHTSERYNGYVHGAYLAGIDSANILINYIFKNEEYKVRGKYDVDDLIAQAR

SEQ ID NO: 9969 - protein, 167 aa, Ipomoea nil
MDLRNFGLSNFGLEPQLLSTIQDMLDFADDHDRAGRAPPEQPIRAYVRDAKAMAATPADVKEYPNSYVFIADMPGVKAAEIKVQVEDDNVLVVSGERTEREKDEKDGVKYLRMERRVGKFMRKFVLPENANVEAINAVYQDGVLQVTVEKLPPPEPKKPKTVEVKVA

SEQ ID NO: 9970 - protein, 205 aa, Shigella boydii
PVRYYQGTPSPVKHPELTDMVIFRENSEDIYAGIEWKADSADAEKVIKFLREEMGVKKIRFPEHCGIGIKPCSEEGTKRLVRAAIEYAIANDRDSVTLVHKGNIMKFTEGAFKDWGYQLAREEFGGELIDGGPWLKVKNPNTGKEIVIKDVIADAFLQQILLRPAEYDVIACMNLNGDYISDALAAQVGGIGIAPGANIGDECAL

SEQ ID NO: 9971 - protein, 427 aa, Coxiella burnetii RSA 493
MTELTGVSIVTYQHIKVPSQGEKITVNKAVLEVPDRPIIPFIEGDGIGIDIAPVMKNVVDAAVEKSYAGKRKIEWMEIYAGEKATKVYGKDNWLPDETLEAIKEYQVAIKGPLTTPVGGGIRSLNVALRQQLDLYVCLRPVRYFTGVPSPVKTPEKVNMVIFRENSEDIYAGIEWPAGSPEAVKLINFLQNEMGVKKIRFPETAGIGIKPVSKEGTSRLVRRAIQYAIDNDRDSVTLVHKGNIMKFTEGAFKDWGYEVAVKEFGAKPLDGGPWHVFENPKTGQKITIKDVIADAFLQQILLRPAEYSVIATLNLNGDYISDALAAEVGGIGIAPGANLSDTVGLFEATHGTAPKYAGQDKVNPGSLILSAEMMLRYLGWKEAADLVVQGIEGAIESKTVTYDFARLMTGAKEVSTSQFGKAIIKHIL

SEQ ID NO: 9972 - protein, 391 aa, Ralstonia eutropha JMP134
MLREHGLAITTHFYREMFAARPELTQLFNMGNQANGSQQQSLASAVFAYAANIDNANALAPVVERIVHKHAAVGLKPAHYPIVGRHLLGAISAVLGEAATPDLIAAWDEAYWLLAGELIAAEARLYQSTGMAAGERIAVRVDRREVQSDTVVALTLSAVDGQPLRDFRPGQYVSVEVTLDDGNRQQRQYSLSAERGLPTWQISVKREDGDHATPAGAVSNWLHANAQPGTELSVSAPFGDFAPRLDNHRPIVLLSAGIGITPMLSVLRTLAAQGSRREILFAHAARDGRHHAHRADVAWARERLPQLRTHISYEQPQAADVAGRDYDHAGTMPVAALLDAPDNRLFIDGDFHLCGPLGFMQAQRHALISAGVPVGHIHREVFGPDLLDDLL

SEQ ID NO: 9973 - protein, 252 aa, Arabidopsis thaliana
MALIREVVDDFPFVAMDTEFPGIVCRPVGTFKTNTEYHYETLKTNVNILKMIQLGLTFSDEKGNLPTCGTDNKYCIWQFNFREFDLESDIYATDSIELLRQSGIDFVKNNEFGIDSKRFAELLMSSGIVLNENVHWVTFHSGYDFGYLLKLLTCQNLPETQTGFFEMISVYFPRVYDIKHLMKFCNSLHGGLNKLAELLDVERVGICHQAGSDSLLTSCTFRKLQENFFIGSMEKYSGVLYGLGVENGQIVH

SEQ ID NO: 9974 - protein, 455 aa, Coxiella burnetii RSA 493
MPIRTTNPSTGEVIKTYQEMTDQQVEDIINDVHYDYEKWRSVGFKERGGKLRRIAERLRKNKTDYAKLIATEMGKPITAGEAEAEKCAWVCDYYADHAEALLKPRIVNTDWKKSYVTYQPSGVIFGIMPWNFPLWQVFRFAAPNLMAGHGCLLKHASISTGTALAIEKLIQSADLPDNIFRTLVINTEKASDVISHPKISAVTLTGSEGAGKAVGSAAGKALKKVVLELGGNDAYLILKDADLEKAAEACVESRLSNSGQSCIAAKRLIIVENVYDEFKALVIEKAQSYRMGDPLKKETELGPLARSDLRDTVHGQVRESIDKGALLETGGEIPESKGFYYPPTVLSGVRAGQPAFDDEVFGPVIALIRAKDEKHAIEIANNSKFGLGAAVFTNDNERGEKIAASELQAGTCVVNTFVKSDPRLPFGGVKHSGYGRELAAEGIRSFMNVKTVVVD

SEQ ID NO: 9975 - protein, 278 aa, Zea mays
MDSSSFLPAAGAENGSAAGGANNGGAAQQHAAPAIREQDRLMPIANVIRIMRRVLPAHAKISDDAKETIQECVSEYISFITGEANERCQREQRKTITAEDVLWAMSRLGFDDYVEPLGAYLHRYREFEGDARGVGLVPGAAPSRGGDHHPHSMSPAAMLKSRGPVSGAAMLPHHHHHHDMQMHAAMYGGTAVPPPAGPPHHGGFLMPHPQGSSHYLPYAYEPTYGGEHAMAAYYGGAAYAPGNGGSGDGSGSGGGGGSASHTPQGSGGLEHPHPFAYK

SEQ ID NO: 9976 - protein, 326 aa, Candida albicans SC5314
MKLATEIDFKLNNGKTIPALGLGTVASKDPKDVKDQVITAVKAGYRHIDTAWFYGTEKYIGEALQELFAEGIIKREDLFITTKFWPSYWANPEKSLDESLKDLQLDYVDLFLQHWPICLHGDENGLPKIPKDENGELIYDDDPTPNGTKYIDVYHKLEDILETTTKVRSIGVSNYSIPKLRQLLPKVKKHIPVCNQIEYHPQLPQQDLVDYCTKNNILISCYSPVGSYGAPVLKIPLVKQLAEKYQVTENEIADAYNILNGRVTLPRSSNLERIKTIIRLPHLTKEELDELYQVGVKDPQRYICDPWGYGIGFRWWKGDTLSKEFD

SEQ ID NO: 9977 - protein, 113 aa, Triticum aestivum
MAPTVMASSATSVAPFQGLKSTAGLPVSRRSNGASLGSVSNGGRIRCMQVWPIEGIKKFETLSYLPPLSTEALLKQVDYLDPLQSGLPLPLSSKVRFNPSVEAKMRPRVNRAA

SEQ ID NO: 9978 - protein, 148 aa, Brassica napus
  misc_feature (6)..(6): Xaa can be any naturally occurring amino acid
  misc_feature (12)..(12): Xaa can be any naturally occurring amino acid
  misc_feature (14)..(14): Xaa can be any naturally occurring amino acid
  misc_feature (17)..(20): Xaa can be any naturally occurring amino acid
  misc_feature (32)..(32): Xaa can be any naturally occurring amino acid
  misc_feature (37)..(37): Xaa can be any naturally occurring amino acid
  misc_feature (39)..(39): Xaa can be any naturally occurring amino acid
  misc_feature (42)..(42): Xaa can be any naturally occurring amino acid
  misc_feature (47)..(48): Xaa can be any naturally occurring amino acid
  misc_feature (53)..(56): Xaa can be any naturally occurring amino acid
  misc_feature (59)..(59): Xaa can be any naturally occurring amino acid
  misc_feature (68)..(68): Xaa can be any naturally occurring amino acid
  misc_feature (71)..(71): Xaa can be any naturally occurring amino acid
  misc_feature (73)..(73): Xaa can be any naturally occurring amino acid
  misc_feature (77)..(77): Xaa can be any naturally occurring amino acid
  misc_feature (99)..(99): Xaa can be any naturally occurring amino acid
  misc_feature (102)..(102): Xaa can be any naturally occurring amino acid
  misc_feature (105)..(105): Xaa can be any naturally occurring amino acid
  misc_feature (107)..(107): Xaa can be any naturally occurring amino acid
  misc_feature (109)..(109): Xaa can be any naturally occurring amino acid
  misc_feature (111)..(112): Xaa can be any naturally occurring amino acid
  misc_feature (114)..(114): Xaa can be any naturally occurring amino acid
  misc_feature (116)..(116): Xaa can be any naturally occurring amino acid
  misc_feature (119)..(119): Xaa can be any naturally occurring amino acid
  misc_feature (126)..(126): Xaa can be any naturally occurring amino acid
  misc_feature (128)..(128): Xaa can be any naturally occurring amino acid
  misc_feature (131)..(131): Xaa can be any naturally occurring amino acid
  misc_feature (139)..(139): Xaa can be any naturally occurring amino acid
  misc_feature (144)..(144): Xaa can be any naturally occurring amino acid
KREQVXASSMFXSXAVXXXXAQATMVAPFTGXLKSSXAXPVXRKANXXITSIXXXXGRXSCMKVWPPXGKXKXESLXYLPDLTEVELGKEVDYLLRNKXIPXVEXEXEXGXXYXEXGSXPGYYDGXYXTMXNLPLVGCXDSAQXLEGS

SEQ ID NO: 9979 - protein, 402 aa, Pseudomonas putida KT2440
MENMHSAMDSLVHGSNTLFILMGAILVLAMHAGFAFLEVGTVRHKNQVNALSKILSDFAISALVYFFIGYWIAYGVNFFQPATTLAVDHGYALVKCFFLLTFAAAIPAIISGGIAERARFVPQLCATALIVAFVYPFFEGVVWNGNLGLQAWLQARFGAPFHDFAGSVVVHAMGGWLALAAVLLLGARRGRYRDGRLVAFAPSSIPFLALGSWILIIGWFGFNVMSAQTLQGVSGLVAINSLMAMVGGTLSALLAGRNDPGFLHNGPLAGLVAICAGSDLMHPVGALATGLVAGALFVWTFTAAQNRWKIDDVLGVWPLHGLCGVWGGIACGVFGQVALGGMGGVSLVSQLLGSLMGVLVALAGGFAVYGAIRALHGLRLSHEQEFQGADLSLHRIGATSQD

SEQ ID NO: 9980 - protein, 187 aa, Triticum aestivum
SPPLPSPRAPPSPSSSSIPMQQRRGRPSGTDGSDFSYRMVVDSRYQRVADGRSRLARLMLVQTLHQVAGGALLLLSLSKGAEINKFAVLSLAAGLLAILLGEFGRRRTVAVFLRLYTSLSSIAIAFSVTCIIRSDLFVKITKQNTAAITSYEMFDVVRVALGVLLQLVVIATTTRLLQNMSPPKRTS

SEQ ID NO: 9981 - protein, 123 aa, Oryza sativa (japonica cultivar-group)
MIQPQTLLNVADNSGARKLMCIRVIGAASNQQYARIGDVIVAVIKDAVPQMPLERSQVIRAVIVRTCKEFKCEDGIIIRYDDNAAVIIDQKGNPKGTRVFGTIVEELRELNFTKLVSLAPEVL

SEQ ID NO: 9982 - protein, 230 aa, Helicobacter pylori J99
MALYDRANSRNAYAEDSVLHESELVSFVKTTYKFFAGSLLLATVGALLGLMNFQAVVQYKWVFFIAEIVAFFGLMFSKSKPGLNLFMLFAFTSLSGVTLVPLLGMVIAKAGLGAVWQALGMTTIVFGLMSVYALKTKNDLANMGKMLFIALIVVVVCSLINLFLGSPMFQVVIAGASAILFSLYIAYDTQNIVKGMYDSPIDAAVSLYLDFLNVFISILQIIGIFSDRDK

SEQ ID NO: 9983 - protein, 269 aa, Fischerella sp. Cohn [sequence omitted]

SEQ ID NO: 9984 - protein, 337 aa, Methanococcoides burtonii DSM 6242
MSKTAAVIEGDGVGPELVDAMVKVAEAVGTNVEFVKCEAGVQWWEKNGGATLIPDETWALLDEADACFKGPTTTPGGAGSPRSVAVSIRQKYNLYANVRPIKTFPNTNNPLGDVDFVCVREGTEGMYIGEEVKLTDDVYIAIRKITRPACKNIATYSFEEAKKRGYDTVVPIHKSNILKMTCGTFLEEVEKVAEGYPGIDVWEYHVDNIAQQLIKNPQLFNNKILLSTNLFMDVISEECSALIGSIGLIYSANIGDNFAMFEPAHGSAPKYAGLDKVNPVATILAGAWMLDYLGESDKFAQIFKATEDVISEGKHLTYDLGGKASLSEMTDAIISKL

SEQ ID NO: 9985 - protein, 526 aa, Glycine max
MESRTKSNPQLTRALCYANDGNQQGRSPSVIVIGGGMAGIAAARSLHDASLQVVLLESRERIGGRIHTDYSFGFPVDMGASWLHGVSNENPLASVIGRLGLPLYRTSGDNSILYDHDLESYGLFDMDGKQVPQELVAKVGEIFEAILQETDKIRQESSEDMSVLRGLSIVFDRKPELRLEGIAYKVLQWYLCRLEGWFAADTDAISLKGWDQEVLLPGGHGLMVRGYLPVVNSLAKGLDIRLGHRVTKVVRRYNGVKVTVENGKTFFADAAVIAVPLGVLKAKKILFEPKLPDWKEAAIADLGIGLENKIILHFENVFWPNVEFLGVVADTPYECSYFLNLHKATGRAVLVYMPSGQLAKDVEKMPDEAAVNFAFMQLKKIFPDASSPIQYLVSRWGSDINSLGSYSYDAVGKPHELYERLRVPVDNLFFAGEATSMSYPGSVHGAYSTGTMAAEDCRMRVLERYGEVDLFQPVMGEEGSMGSVCSASLLLCLIDLDMRNVQCINIQTFHFSIALSIFEQIKNEFC

SEQ ID NO: 9986 - protein, 386 aa, Triticum aestivum
  misc_feature (325)..(325): Xaa can be any naturally occurring amino acid
MEKNHTLVPVPSHTSPSLPPRSLARRGSGPRTQARNRLDSPTHPDRALELPAELAAMLSARTAAAASPAASLWKRGGGAGARGDGCTSCLEVRRRAAAVTVRAAQPKRVEAVAMESAAETAEAEKEVAAEKEVAAAGGGVEDKYGEDRATEELPVTPWAFSVASGYTLLRDPHHNKGLAFTERERDAHYLRGLLPPGVVSQDLQVKKIMHNLRQYKVPLQRYVAMMDLQERNERLFYKLLIDNVEELLPVVYTPTVGEACQKYGSIFRRPQGLYVSLRDKGKVIDVLRNWPERNIQVIVVTDGERILGLGDMGCQGMGIPVGKLXSYTALGGVRPTACLPITIDVGTNNEQLLNDEFYIGLRQRLATGEEYHELTEEFMVAVKQIY

SEQ ID NO: 9987 - protein, 177 aa, Magnaporthe grisea 70-15
MSVSCRYAAQCCSRQLRVSPSVRVSGVAVQRIARRHNSTEAASPKITTIVDQISQLTLLETAELVSSLKSRLNIPDLPVGGFAAAAPAAAPAAAEEADEPAPAAAAKTVFTLKLMSFDAGAKAKIIKEVKGLLGLSLVDSKKFVESAPKVMKESVPKEDAEKIIATMKELGAVVTME

SEQ ID NO: 9988 - protein, 405 aa, Bacillus thuringiensis serovar konkukian str. 97-27
MPKHRKQSKIKIYRITSYKKDKRSELDSDKFELEQQEVENKQGKHSKQDKQDKQDNLDKQDNLDKQDNLDKQDNLDKPDNLDKPDNLDKQDNLDKQVQSENVVIVPTDSHNLDIWDEISLKEIQAGEHTNLFAEQSNYQNINLLQVSDIRLYLDKQLQFSSIDEQIYHEALVHPIMSKVIDPKRVLILGGGDGLALREVLKYETVLHVDLVDLDGSMIDMARNVPELVSLNKNAFFDNRVNTHVCDAKEFLSSPSSLYDVIIIDFPDPATELLSTLYTSELFARIATFLTEDGAFVCQSNSPADAPLVYWSIGNTIEHAGLTVKSYHTIVPSFGTDWGFHIAANSADVLDQIEQLYVVPTPRTLPSLLFPLFQFKEEHLEQRNFALLNSESNLILHQCYKKEMEF

SEQ ID NO: 9989 - protein, 126 aa, Zea mays
MPVAASLMAIELEKDQLAWAEQQRQQNRRQTMVVCRKSAAAVAKGQQRQNASPPSPKPPPAGGLSAEAFLVLACVAVSLIVLPLVLPPLPPPPPLLLLVPVCLLLLLAALATFMPSDVRSMPSSNL

SEQ ID NO: 9990 - protein, 142 aa, Escherichia coli
RDLELARRFAQAIHAKYPGKLLAYNCSPSFNWQKNLDDKTIASFQQQLSDMGYKFQFITLAGIHSMWFNMFDLANAYAQGEGMKHYVEKVQQPEFAAAKDGYTFVSHQQEVGTGYFDKVTTIIQGGTSSVTALTGSTEESQF

SEQ ID NO: 9991 - protein, 198 aa, Shigella boydii
VRYYQGTPSPVKHPELTDMVIFRENSEDIYAGIEWKADSADAEKVIKFLREEMGVKKIRFPEHCGIGIKPCSEEGTKRLVRAAIEYAIANDRDSVTLVHKGNIMKFTEGAFKDWGYQLAREEFGGELIDGGPWLKVKNPNTGKEIVIKDVIADAFLQQILLRPAEYDVIACMNLNGDYISDALAAQVGGIGIAPGANI

SEQ ID NO: 9992 - protein, 169 aa, Zea mays
MGERVKGTVKWFNVTKGFGFISPDDGGEDLFVHQSSIKSDGYRSLNENDAVEFEIITGDDGRTKANDVTAPGGGALSGGSRPVEGGGDRGGRGGYGGGGGGYGGGGGGYGGGGGGYGGGGGGYGGGGYGGGGGGGRGCYKCGEEGHISRDCPQGGGGGYGGGEYGGRDR

SEQ ID NO: 9993 - protein, 201 aa, Shigella boydii
VRYYQGTPSPVKHPELTDMVIFRENSEDIYAGIEWKADSADAEKVIKFLREEMGVKKIRFPEHCGIGIKPCSEEGTKRLVRAAIEYAIANDRDSVTLVHKGNIMKFTEGAFKDWGYQLAREEFGGELIDGGPWLKVKNPNTGKEIVIKDVIADAFLQQILLRPAEYDVIACMNLNGDYISDALAAQVGGIGIAPGANIGDE

SEQ ID NO: 9994 - protein, 243 aa, Triticum aestivum
  misc_feature (27)..(27): Xaa can be any naturally occurring amino acid
SPLWALALMNQDKVLMESWNYLKDTVXLDGGIPFNKAYGMSAFEYPGTDPRFNHVFNEGMKNHSIIITKKLLESYKGFEGLNTLVDVGGGVGATVAAITAHYPTIKGINFDLPHVISEAPPFPGVTHVGGDMFQKVPSGDAILMKWILHDWSDEHCGTLLKNCYNALPPHGKVVLVECILPVNPEATPKAQGVFHVDMIMLAHNPGGRERYEREFEALAKGAGFATMKTTYIYANAWAIEFTK

SEQ ID NO: 9995 - protein, 511 aa, Physcomitrella patens
MAMDMARIEVEPLVEVHNNTNNLLVHCVLDALPDSSPCLKSSETSFEAVVVKEDEEGGRPLFGKPELHPASPSSDTAAAANGEFARCLNFVTEADCGDVGVQCFEDFGTLPDCGEAGISREEGGGRDGEQVELLESMSLDGSRNSENLELGELGELLQGSETLDSVPGNEVGEEEALLLAKAAKATGVVVSASDSGECSSVDRKENQQSPKSCKSAAPGKKKAKVDWTPELHRRFVHAVEQLGVEKAFPSRILELMGVQCLTRHNIASHLQKYRSHRRHLAAREAEAASWTHRRAYTQMPWSRSSRRDGLPYLVPLHTPHIQPRPSMVMAMQPQLQTQHTPVSTPLKVWGYPTVDHSSVHMWQQPAVATPSYWQAPDGSYWQHPATNYDAYSARACYPHPMRVSLGTTHAGSPMMAPGFPDESYYGEDVLAATMYLCNQSYDSELGRAAGVAACSKPPETHLSKEVLDAAIGEALANPWTPPPLGLKPPSMEGVIAELQRQGINTVPPSTC

SEQ ID NO: 9996 - protein, 205 aa, Shigella boydii
VRYYQGTPSPVKHPELTDMVIFRENSEDIYAGIEWKADSADAEKVIKFLREEMGVKKIRFPEHCGIGIKPCSEEGTKRLVRAAIEYAIANDRDSVTLVHKGNIMKFTEGAFKDWGYQLAREEFGGELIDGGPWLKVKNPNTGKEIVIKDVIADAFLQQILLRPAEYDVIACMNLNGDYISDALAAQVGGIGIAPGANIGDECALF

SEQ ID NO: 9997 - protein, 150 aa, Chlamydophila pneumoniae TW-183
MQLLSPAFAYGAPIPKKYTCQGAGISPPLTFVDVPGAAQSLALIVEDPDVPKEIRSDGLWIHWIVYNLSTTITNLAEGAEIFAVQGLNTSGKPVYEGPCPPDKQHRYFFTLFALDVVLPEEENVTRDQLYEAMEFHIIEQAELMGTYEKS

SEQ ID NO: 9998 - protein, 196 aa, Shigella boydii
VRYYQGTPSPVKHPELTDMVIFRENSEDIYAGIEWKADSADAEKVIKFLREEMGVKKIRFPEHCGIGIKPCSEEGTKRLVRAAIEYAIANDRDSVTLVHKGNIMKFTEGAFKDWGYQLAREEFGGELIDGGPWLKVKNPNTGKEIVIKDVIADAFLQQILLRPAEYDVIACMNLNGDYISDALAAQVGGIGIAPGA

SEQ ID NO: 9999 - protein, 181 aa, Lactuca sativa
MASISSSAIATVNRTTSTQASLAAPFTGLKSNVAFPVTKKANNDFSSLPSNGGRVQCMKVWPPIGLKKYETLSYLPPLSDEALSKEIDYLIRNKWIPCLEFELEHGFVYREHHHSPGYYDGRYWTMWKLPMFGCTDSAQVMKEVGECKKEYPNAFIRVIGFDNIRQVQCISFIVAKPPGVL

SEQ ID NO: 10000 - protein, 180 aa, Stellaria longipes
MASSIMSSAAVATRSNGAQASMVAPFTGLKSNASFPVSRKTNLDITSIASNGGRVRCMQVWPPINMKKYETLSYLPDLSSEQLLSEIEYLLKNGWVPCLEFETEHGFVYREHTSSPGYYDGRYWTMWKLPMFGCTDATQVAAEVQEAKKAYPDAHIRIIGFDNVRQVQCISFIAYKPEAF

SEQ ID NO: 10001 - protein, 159 aa, Zea mays
MASDRVLGTVKWFNGTKGFGFITPDDGSEDLFVHQSSIKSDGYRSLNDGDAVEYTVGSGNDGRAKALDVTAPGGGPLAGGERPDGGNGGGRGGYGGGDRGYGGGGDRGYGGGGDRGYGGGDRGYGGGGDRGYGGGGDRGYGGGGGYGGGYGGGGGGGGP

SEQ ID NO: 10002 - protein, 414 aa, Arabidopsis thaliana
MGLCWGSPSDSPPTTTPSSTGNISSVGTFKSSNNTTTTGTSRGSNISSNSGFSVASGEDAYPDGQILPIPNLRIFSLAELRASTRNFRSENVLGEGGFGKVFKGWLEDKTPGKQSNGTVIAVKKLNAESFQGFEEWQCEVNFLGRVSHPNLVKLLGYCLEGEELLLVYEYMQKGSLENHLFRKGSAVQPLSWEIRLKIAIGAAKGLAFLHASEKQVIYRDFKASNILLDGSYNAKISDFGLAKLGPSASQSHITTRVMGTHGYAAPEYVATGHLYVKSDVYGFGVVLAEILTGLHALDPTRPTGQHNLTEWIKPHLSERRKLRSIMDPRLEGKYPFKSAFRVAQLALKCLGPEPKNRPSMKEVVESLELIEAANEKPLERRTTRASPSIRQQQGHYRPQQLSSFRPRQNVSRAH

SEQ ID NO: 10003 - protein, 507 aa, Streptomyces avermitilis MA-4680
MAARAAGRRPCLTRTTPQEAIVPDLFIDGEWRAALDGRTREIRCPADGSLVGVVDEAGGKDTAEAIAAARRAFDEGPWPWLPAADRGDLLLRVADLLVRDRAKLARAESLDTGKRFVESEYDIDDIVNCFRYFGRLAAAESGRVIDTGSASTDSRVVYEPVGVCALITPWNYPLLQTAWKVAPALAAGNTFVLKPSELTPHTAIHLMRLLQEAELPPGVANLVLGAGPEAGAPLADHPDVDLVSFTGGLHTGRRLMAAAAGTVKKVALELGGKNPNIVFADADFDTAVDMALTAVFLHSGQVCSAGARLLVEDSLHDRFVDEVVRRAAEIRLGGPFDERAQTGALISAAHRAKVEAYVAKGLDEGAVLRCGGRRPEGLDEGFFYLPTVLDECTSGMSVIQDESFGPVLTVERFTGEAEAVRLANDTVYGLAGAVWTTDEAKAQRVVSRLRIGTVWINDYHPYVPQAEWGGYKQSGFGRELGPSGLAEYREAKHIWRNTDPSPQGWFA

SEQ ID NO: 10004 - protein, 168 aa, Zea mays
  misc_feature (49)..(49): Xaa can be any naturally occurring amino acid
  misc_feature (51)..(51): Xaa can be any naturally occurring amino acid
  misc_feature (73)..(73): Xaa can be any naturally occurring amino acid
  misc_feature (79)..(79): Xaa can be any naturally occurring amino acid
  misc_feature (92)..(92): Xaa can be any naturally occurring amino acid
  misc_feature (104)..(104): Xaa can be any naturally occurring amino acid
  misc_feature (127)..(127): Xaa can be any naturally occurring amino acid
  misc_feature (147)..(147): Xaa can be any naturally occurring amino acid
MDRADPARGRLAVLSSHLRGAGVEEASVLERSPVSAAAPGSRDGALAVXNXRTGKRHEVKVSEEGTVRATDFXEITTGXDDKGLKIYDPGYXLNTAPVRSSIWXIDEEEEFLRYRVYPTETLGESTXFVEGALPFYGRGNLPTQRSXWAGGNFAISQNFGGPQGTGGK

SEQ ID NO: 10005 - protein, 427 aa, Salmonella enterica subsp. enterica serovar Typhi Ty2
MADTKAKITLTGDTAIELDVLKGTLGQDVIDIRSLGSKGVFTFDPGFTSTASCESKITFIDGDEGILLHRGFPIDQLATDSNYLEVCYILLYGEKPTQEEYDEFRTTVTRHTMIHEQITRLFHAFRRDSHPMAVMCGITGALAAFYHDSLDVNNPRHREIAAFRLLSKMPTMAAMCYKYSIGQPFVYPRNDLSYAGNFLNMMFSTPCETYEVNPVLERAMDRILILHADHEQNASTSTVRTAGSSGANPFACIAAGIASLWGPAHGGANEAALKMLEEISSVKHIPEFVRRAKDKNDSFRLMGFGHRVYKNYDPRATVMRETCHEVLKELGTKDDLLEVAMGLEHIALNDPYFIEKKLYPNVDFYSGIILKAMGIPSSMFTVIFAMARTVGWIAHWNEMHTDGMKIARPRQLYTGYDKRDFKSALKR

SEQ ID NO: 10006 - protein, 195 aa, Zea mays
APAFCELSLPLTKEKGAAFSPSHPAMQRHVASGRPSGTDGSDFSYRMVVESRYQRVAEGRSRLARLILVQALHLVAGGLLLLLSLSKGAAVNKFAVLSMAAGFLAIVVGELGRMRTMAVLLRLYTSLSSIAVAFSVTCIIRSELFLKVMKQNTEAITSYEMLDAVRVALGILLQMVVIATTTRLLQNMSPPKRAS

SEQ ID NO: 10007 - protein, 78 aa, Triticum aestivum
SARGPIGVSRYEYDQLRAPVGRVYFTGEHTSERYNGYVHGAYLAGIDSANILINHIFKNEEYKVRGKYEPDDQIAKAK

SEQ ID NO: 10008 - protein, 165 aa, Triticum aestivum
  misc_feature (49)..(49): Xaa can be any naturally occurring amino acid
  misc_feature (63)..(63): Xaa can be any naturally occurring amino acid
  misc_feature (67)..(67): Xaa can be any naturally occurring amino acid
  misc_feature (78)..(79): Xaa can be any naturally occurring amino acid
  misc_feature (84)..(84): Xaa can be any naturally occurring amino acid
  misc_feature (86)..(86): Xaa can be any naturally occurring amino acid
  misc_feature (89)..(90): Xaa can be any naturally occurring amino acid
  misc_feature (94)..(94): Xaa can be any naturally occurring amino acid
  misc_feature (140)..(140): Xaa can be any naturally occurring amino acid
  misc_feature (142)..(142): Xaa can be any naturally occurring amino acid
  misc_feature (144)..(146): Xaa can be any naturally occurring amino acid
MAAFLRSKCSPVGRTLMGSLGNSLFGAANSSVGAITRPSHCDAISQQIXRTFIQMRTNLKVVXDNSXGAKPVRCIHSXXGKKGXRXGKXXNRFXKEAHPRGKVKKGDVVYGVVVRAAMKKGRSDGSESVRRQRVVLVNKXGXLXXXRVFGPSPQLRKKNTQDLAC

SEQ ID NO: 10009 - protein, 423 aa, uncultured bacterium
MAETITIIDDRTGKRVTVPIHDGVFASSALRELDPTLRMYDPAFLSTAACASSITYVDGDAGVMRYRGYPIEQLAAKSTFLEVAYLLLNGELPTKDQLDAWSFDVTHHTMVHENMRKTICHGFHYDAHPMGMFISAIAALGTFYVDAKDISNVKVLNKQILRLVAKVPTIAAMTYRFSSGLPFVLPNNSMGYAQNFLNMMYRIGDDYVVNPVLARALDVLFILHADHEQNCGTTAMRIVELTTHTDPYSATAAAAAALYGPLHGGANEAVVRMLAEIGDIKKVPAFIESVKRGDGRLIGFGHRVYKNFDPRATIIKKTAYDVFNVTGNNPLLDIALKMEEVALNDDYFVSRKLYPNVDFYSGLIYQALGFPVEMFTVLFAIPRTVGWLAHMSELLKDKEQKISRPRQWYIGVDEREYTPIANR

SEQ ID NO: 10010 - protein, 364 aa, Magnaporthe grisea 70-15
MQMASASRQILRAASRASTRTAFAPAASRGLAARTIAGRRFYSSSSEPAKASSSNLGWIAGALAAAAAGAGYWYTQNGGAATLTKPEFKDYQTVYNDIASRLEENPDYDDGSYGPVLVRLAWHASGTYDKETGTGGSNGATMRFSPEGGHGANAGLKAARDFLEPIKAKYPWITYSDLWILGGVCAIQEMLGPKIPYRPGRSDKDAAACTPDGRLPDAAQRQDHVRNIFYRMGFNDQEIVALAGAHALGRCHTDRSGFDGPWTFSPTVLTNDYFKLLLNEKWEYKKWDGPKQYVDSKTKSLMMLPADMCLIEDKKFKEWTKKYADDNDLFFKDFSAAVLKLFELGVPFAEGTENQRWIFKPTSE

SEQ ID NO: 10011 - protein, 313 aa, Gloeobacter violaceus PCC 7421
MEYRDYYEILGVPKSADEQQIKSTYRKLARQFHPDLNPGDKQAEEKFKTISEAYEVLSDPSKRSRYDQYGRYWQQAGRSGGTPAGGAAPAGAGVGGFEGFDFDFSRFGSFDEFIDSLMGNLRGSGGERAARANVRTTQRPGRSEDVEMSLELTLEEALNGTKKRVRTATGKVVEVNIPAGVHEGTKVRVAGEGSGRGDLFLVVKLKTHPFFAVDGDDLLCEVPLTPAEAALGTKVEVPTLTGRVRVTIPAGTSTGRTLRLAGRGLPRRGGGRGDQLVKIRIEVPTALSSEERDLYEKLSRTESFRPRARFDSQ

SEQ ID NO: 10012 - protein, 253 aa, Mesorhizobium sp. BNC1
MPILGLGTWQLTHETARTVRAAFDLGYRMVDTSGDYGTQSAIGEAIRASGLDRDDIYLVTKVEETEDAYNATQANLRELGLDYADLILIHRPPRHGAGEELWRALIRAREDGLTRDIGVSNYSIELIEELVDATGEIPVVNQVEWSPFGHDLELKHYADFNGIVIQAYSPLTRATRLDDAALCETAEKYGKTPAQVLIRWNLERGTVPIPKANLHSHMKENISVFDFTLEKSDLESLDSLNEHFSSLGRLPYV

SEQ ID NO: 10013 - protein, 447 aa, Triticum aestivum
  misc_feature (379)..(379): Xaa can be any naturally occurring amino acid
PKAPKLTEAMSLYDGGLAGVYPEEEDDRLADLAGDSDYDDDEYVQSISKASEDTSAMDVLKGKDIQGIPWERLTITRDGYRKSRLEGYTNFENIPNSGQLSEKVCTPVEKGQLYYEFAHNTRSVRPTIFHFQLRNLVWATTRHDVYLMSHMSVLHWSPLTSEKHEVIDLQGHVAPCVKHEGNFYEGFYRTHVSTLAVKNNLLVAGGFQGELICKFLDREGISYCSKSTHDDNGITNCLEIFEKPSGSVHFLASNNDCGLRDFDMEKFQMCNHFHFDWAVNHTSLSPDGKIIAVVGDNPDGVLVDASSGKVIHELSGHLDYSFASAWNPDGRTFATGNQDKTCRIWDARNLSKSVAVLGGNMGAIRSIRYTSDGKFLAMXAEAADFIHIFDVGSGYDRKQELDFFGEIAGISFSPDTEALFVSVHDRNYSSLLQYSRRRFYGYLDSAL

SEQ ID NO: 10014 - protein, 317 aa, Zea mays
  misc_feature (47)..(47): Xaa can be any naturally occurring amino acid
MDPALLDDVIRRLLEVKNLKPGKNAQLSESEIKQLCAAAKEIFLQQXPNLLELEAPIKICGDVHGQYSDLLRLFDYGGYPPQANYLFLGDYVDRGKQSLETICLLLAYKVKYPENFFLLRGNHECASVNRIYGFYDECKRRFSVKLWKTFTDCFNCLPVSALIDEKILCMHGGLSPELNKLEQILNLNRPTDVPDTGLLCDLLWSDPSNEATGWAINDRGVSFTFGPDKVSEFLEKHDLDLICRAHQVVEDGYEFFASRQLVTIFSAPNYCGEFDNAGAMMSVDDTLMCSFQILKPARKMMGGSTNNKSGFKSFRGW

SEQ ID NO: 10015 - protein, 303 aa, Triticum aestivum
  misc_feature (207)..(207): Xaa can be any naturally occurring amino acid
MNTFIIFVLLAMAMNKASASRQLSPRGKELHTPQEQFPQQTFPHQPQQQFPQPQQPQQPFPQQPQQQFPQPQQPQQPFPQQPQQQFPQPQQPQQPFPQPQQPQLPFPQQPQQPFPQPQQPQQPFPQLQQPQQPLPQPQQPQQPFPQQQQPLIQPYLQQQMNPCKNYLLQQCNPVSLVSSLVSMILPRSDCKVMRQQCCQQLAQIPQXQLQCAAIHGVVHSIIMQQEQQQQQQQQQGIQFMRHYFSRPRSRASSQPQTTSQLEVIKAMGLGNPSNKCNVFVQLMSTTKICNISPTLGAMMQRLL

SEQ ID NO: 10016 - protein, 361 aa, uncultured bacterium
MKHRIAVIAGDGIGQEVMPEGLRVLDAACRQFGLDLEFVSFDWAHCDYYLQHGQMMPDDWFAQLKDFDAIYFGAVGWPATVPDYISLWGSLLKFRREFDQYANVRPVRLMPGIPCPLAGKQVGDIDFYVIRENTEGEYSAVGGRMFEGTERETVIQESIFTRQGTDRILKFAFDLAQRRPKKHLTSATKSNGIAISMPYWDERVEAMAGHYPEVRWDKYHIDILTARFVLSPERFDVVVASNLFGDILSDLGPACTGTIGIAPSANLNPDRTFPSLFEPVHGSAPDIAGQGIANPVAMIWSGAMMLDFLGQGDSRYQAAHDAIMAAIEQVLVGGPRTPDMGGTASTVELGRAIAAALEGRD

SEQ ID NO: 10017 - protein, 325 aa, Triticum aestivum
KSFRVRNRFQAGPFEVEPIRVTHSIPDCCGLVLRCGDGTIFHTGDWKIDESPVDGRIFDREALEELSKEGVTLMMSDSTNILSPGRSTSESVVASSLLRHVSEAKGRRVITTQFASNIHRIGSIKAAADLTGRRLVFVGMSLRTYLEAAFRDGKAPLDPSTLVKAEDMDAYDPKNLLVVTTGSQAEPRAALNLASYGGSHALKLSKEDVLLYSAKVIPGNESRVMKMLNRLTDLGPKIVMGKDAGLHTSGHAYHDELEEVLQIVKPQHFLPVHGELLLLKEHELLGRSTGIKHTTGINGEMLGVSHLRNRKVLVNGFVSLGKQDF

SEQ ID NO: 10018 - protein, 321 aa, Burkholderia cepacia R1808
MSAPTLTVRVARKWQEARDICGFEFVADDGSPLPRFDAGAHIDVHLPGGLVRQYSLCNDPRHGDRYRIAVLRDADGRGGSRAIHDEVRQGDTLRIGMPRNQFPLARDASHHLLLAGGIGVTPMLSMAEQLSAAGESFDLHYCARSLERMAFVEQINTAAFRDRTRLHVDDGDAAQRFDLPAALDAAPAGTHLYVCGPRGFMDAVLDAARARGWPDARLHYEFFGGAVVASGAERAFQVRLASSGKVVDVPADCTVVAALAAHGIDVLTSCEQGVCGTCVTRVLEGEPDHRDSYLTEAEQAAGDQFMPCCSRARSDLLVLDL

SEQ ID NO: 10019 - protein, 491 aa, Escherichia coli
MMSRMAEQQLYIHGGYTSATSGRTFETINPANGNVLATVQAAGREDVDRAVKSAQQGQKIWASMTAMERSRILRRAVDILRERNDELAKLETLDTGKAYSETSTVDIVTGADVLEYYAGLIPALEGSQIPLRETSFVYTRREPLGVVAGIGAWNYPIQIALWKSAPALAAGNAMIFKPSEVTPLTALKLAEIYSEAGLPDGVFNVLPGVGAETGQYLTEHPGIAKVSFTGGVASGKKVMANSAASSLKEVTMELGGKSPLIVFDDADLDLAADIAMMANFFSSGQVCTNGTRVFVPAKCKAAFEQKILARVERIRAGDVFDPQTNFGPLVSFPHRDNVLRYIAKGKEEGARVLCGGDVLKGDGFDNGAWVAPTVFTDCSDDMTIVREEIFGPVMSILTYESEDEVIRRANDTDYGLAAGIVTADLNRAHRVIHQLEAGICWINTWGESPAEMPVGGYKHSGIGRENGVMTLQSYTQVKSIQVEMAKFQSIF

SEQ ID NO: 10020 - protein, 503 aa, Methanosarcina acetivorans C2A
MVLYSLFQGDFVVQEYKLHIGGESRDSATGETFDNINPATLENLATVQVAGSEDVDRAVEAAEEGFRVWSEVPAPRRAEVLFRTARILQERKEDLARLMTEEMGKVLPETRGDVQEAIDIAIYAAGEGRRMFGETTTSELKDKFCMTVLRPIGVVGMITPWNFPLAIPGWKIMPALIAGNAIVFKPASDTPLLAIKLVEILMEAGLPPGVVNLVTGPGGSTGKAIVQHPRIKAISFTGSLETGKWIMEECAKTMKRVSLELGGKNPVIIMDDADLELALEGVLWGAFGTTGQRCTATSRLILHEKIKDEFTARLLAKTKLLRVGNGLLPETDIGPIINKAQLEKIERYVRIGMEEGATLLLGGKAIDPGLPGYFFEPTVFTDVRPDMRIAQEEIFGPVLSIITVSGLEEAIEVANNTRYGLSSAIYTENVGKAFRAVKKIEAGITYVNAPTIGAEVHLPFGGVKGTGNGFREAGTEAIKEFTEIKAVYIDYSGRLQRAQIDME

SEQ ID NO: 10021 - protein, 373 aa, Candida maltosa
MSVKTKTITILPGDHVGTEIVNEAIKVLEAIEAATPYQKIHFDFKHHLIGGAAIDATGVPLPDDALESAKNSDAVLLGAVGGPKWGTGALRPEQGLLKIRKELNLYANIRPCNFASDSLLELSPLRPEVVKGTNLIIVRELVGGIYFGDREEQEESADKQTAWDTEKYTVDEVTRITRMAAFMALQHTPPLPIWSLDKANVLASSRLWRRTVDKVISEEFPTLSVQHQLIDSAAMILIQNPTKLNGIIITSNMFGDIISDEASVIQGSLGLLPSASLASLPDTNTAFGLYEPCHGSAPDLPANKVNPIATILSAASMLRLSLDCVKEAEALEEAVKQVLDKGIRTADLRGTSSTTEVGDAIVEAVTKILKEKA

SEQ ID NO: 10022 - protein, 487 aa, Ralstonia eutropha JMP134
MSPSPTLYRNYVDGRFVESAKGFPNISPVNGAVIGTVCEAGADLVDRAVRAARAALAGPWGRTTPAERARVLQAVADGIEKRFDAFVAAEVADTGRPEHQARTLDIRRGVQNFRTFAELAGQAGGECFEMRAADGDVFSYTVRKPHGVVAIISPWNLPMLLMTWKVAPALACGNAVVIKPSEETPGSATLLAEVMHEAGVPPGVFNLVHGFGGGSAGEFLSRHPDIDAITFTGESRTGSTIMKAVADGVKEVSFELGGKNAAVVFADCDFDQAVAGVTRSSFTNTGQVCLCSERVYVERPIFERFVAAMKARAEAMRIGYPDEDGVEMGSLISHGHRDKVLSYFALAREEGATVVAGGGVPQFGDARDNGAYVQPTIWTGLPDSARCVQEEVFGPVCHIAPFDSDDEVVARVNDSRYGLAASVWTRDLGRAHRVTRQFDVGIVWVNTWFLRDLRTPFGGTRLSGIGREGGRHSLDFYSSTTTICVNP

SEQ ID NO: 10023 - protein, 482 aa, Escherichia coli O157:H7 EDL933
MKLNDSNLFRQQALINGEWLDANNGEVIDVTNPANGDKLGSVPKMGADETRAAIDAANRALPVWRALTAKERANILRNWFNLMMEHQDDLARLMTLEQGKPLAEAKGEISYAASFIEWFAEEGKRIYGDTIPGHQADKRLIVIKQPIGVTAAITPWNFPAAMITRKAGPALAAGCTMVLKPASQTPFSALALAELAIRAGIPAGVFNVVTGSAGAVGNELTSNPLVRKLSFTGSTEIGRQLMEQCAKDIKKVSLELGGNAPFIVFDDADLDKAVEGALASKFRNAGQTCVCANRLYVQDGVYDRFAEKLQQAVSKLHIGDGLDKGVTIGPLIDEKAVAKVEEHIADALEKGARVVCGGKAHERGGNFFQPTILVDVPANAKVSKEETFGPLAPLFRFKDEADVIAQANDTEFGLAAYFYARDLSRVFRVGEALEYGIVGINTGIISNEVAPFGGIKASGLGREGSKYGIEDYLEIKYMCIGL

SEQ ID NO: 10024 - protein, 205 aa, Fucus distichus
MSRNDSPFDMQIKLLMIGDTGVGKTCLLLRYANDSFSQTFITTIGIDFKIKNIDLDSKRIKLQIWDTAGQERFRTITTSYFRGAQGILLVYDVTDKKSFNSIRNWVAQIQQHADVAVNKILIGNKCDMDEDREVSKEEGANLAAEYGIQFFETSAKNDINVEKGFITIAREVKDRLMADGPGGGGGHGRTVDINGQASKKKTGCC

SEQ ID NO: 10025 - protein, 356 aa, Zea mays
MAEPSPPKYGGAKRDGAYTAGARPYERRVDHGEGEHGDRAARLRPPHARSGGTTLGEAKSTVHRCLPLPVSSRRTSRGSQRRPSDPRRASSSPTEGRMAEPKAAAAARKTRVGPYEVGKTIGEGSFAKVKHARDSRTGAVRAIKVLDRNHVLRHRMVEQIKREISTMKLIKHPNVVQLHEVMASKTKIYMVLEFVDGGELFDKIVNSGRLGEDEARIYFHQLINAVDYCHSRGVYHRDLKPENLLLDSNGALKVSDFGLSAFAPQTNEDRLLHTACGTPNYVAPEVLADKGYDGMAADVWSCGIILFVLMAGYLPFDDANLMRLYKLICHATSLLCPSVIRPSRLPSPARCGTYVM

SEQ ID NO: 10026 - protein, 164 aa, Triticum aestivum
  misc_feature (129)..(129): Xaa can be any naturally occurring amino acid
  misc_feature (137)..(137): Xaa can be any naturally occurring amino acid
  misc_feature (143)..(143): Xaa can be any naturally occurring amino acid
DHVRLHPAAVDDWHKKGGTVLKTTRGGFDLGKIVDGIVARGYTQIYAIGGDGTMRGALAIFEEFKRRGLNISITGIPKTVDNDIGIIDRSFGFQTAVEVAQQAIDAAHVEAVSAVNGVGIVKLMGRSTXHIALHATXSSRDVXCCLIQSGFTWKQGGCSILYNG

SEQ ID NO: 10027 - protein, 140 aa, Zea mays
PIANISRIMKKAVPANGKIAKDAKETLQECVSEFISFVTSEASDKCQKEKRKTINGDDLLWAMATLGFEEYVEPLKIYLQKYKEMEGDSKLSTKAGEGSVKKDAISPHGGTSSSSNQLVQHGVYNQGMGYMQPQYHNGET

SEQ ID NO: 10028 - protein, 366 aa, Buchnera aphidicola str. Bp (Baizongia pistaciae)
MKRNYKIAVLPGDGIGPEIMREGYKILRILKSKLSLNIMTQEFDVGGVAIDKYGVALPKKTLQGCRDSHAILFGSIGGPKWEDLPSHLQPERGALLPLRKYFNLFSNLRLARIYSGLEKLSPLKSRISNLGCDILCVRELTGGIYFGDPKGSKVSKSLNCAFDTEVYYQFEIERIAHMAFDLALTRRCKVTSIDKANVLESSMFWRKIVNRISTQYSQVKLSHLYVDNAAMQIIKNPSQFDVLLCSNLFGDILSDECAAITGSIGLLPSASLNDKNFGLYEPAGGSAPDIKGKNIANPIALILSIGMMMRYSFKLYDVADLIDWAVNKTLKLGYRTQDISENNKFINTSSMGDIIAEILANRIHKI

SEQ ID NO: 10029 - protein, 162 aa, Corynebacterium efficiens YS-314
MEAMTSIHDIPVTLTDGTETTMADWAGHLVMVVNVASRCGLTPQYEGLQRLFEDYQDRGFFVIGVPCNQFMGQEPGTDAEICTFAQEKYDVTFPLLAKTDVNGENEHPLYTELKRFGEGGDIEWNFEKFLINADGETIARFGPRMDPEDDEVTSVIEDNLPV

SEQ ID NO: 10030 - protein, 131 aa, Magnaporthe grisea 70-15
MIQLKSMLNCIDNSGAALVECALIVGQKRHASIGDRIVVVVQEQRKNPNEGAAALAASNKVKRGDIRHAIVVRTKYKVQRKDGSVVRFDDNACVLINKAGDPVGSRVNGIVGMELRKAKWSKILSMAPMHI

SEQ ID NO: 10031 - protein, 164 aa, Brassica napus
MRAPISGLLSRSIGFLHRGRPLCAVAASPEARTKKLERIADDLLSLNRIELYDYSILFSHKLGLNRYGSGTVSSPAGDLPADASAAAETKTAEKTAFDVKLEKFESASKIKVIKEIRAFTELGLKEAKELVEKAPIVVKTGVTKEEAEKMMEKLKAVGATVALE

SEQ ID NO: 10032 - protein, 149 aa, Arabidopsis thaliana
MSSNKIVLSSSDGESFEVEEAVARKLKIVEHMIEDDCVVTEVPLQNVTGKILSIVVEYCKKHVVDEESDEFKTWDEEFMKKFDQPTVFQLLLAANYLNIKGLLDLSAQTVADRIKDKTPEEIREIFNIENDFTPEEEAAVRKENAWAFE

SEQ ID NO: 10033 - protein, 409 aa, Capsicum annuum
DSHYQGVYPVKCNQDRFVVEDIVKFGSPYRFGLEAGSKPELLLAMNCLSKGSADALLVCNGFKDTEYISLALIARKLLLNTVIVLEQEEELDLVIDISRKMAVRPVIGLRAKLRTKHSGHFGSTSGEKGKFGLTTTQILRVVKKLEGSGMLDCLQLLHFHIGSQIPTTELLADGVGEATQIYSELVRLGAGMKFIDIGGGLGIDYDGSKSSDSDVSVAYGIEEYASAVVQAVQFVCDRKGVKHPVICSESGRAIVSHHSIMIFEAVSASTTNVSPQLSSGGLQSLTETLNEDARADYRNLSAAAVRGEYDTCLLYSDQLKQRCVEQFKDGSLDIEQLAAVDSICDLVSKAIGVSDPVRAYHVNLSVFTSIPDFWAFGQLFPIVPIHRLDEKPTMRGILSDLTCDSEITS

SEQ ID NO: 10034 - protein, 175 aa, Triticum aestivum
MAPTVMASSATSVAPFQGLKSTAGLPVSRRSTNSGFGNVSNGGRIKCMQVWPIEGIKKFETLSYLPPLTVEDLLKQIEYLLRSKWVPCLEFSKVGFVYRENHRSPGYYDGRYWTMWKLPMFGCTDATQVLKELEEAKKAYPDAFVRIIGFDNVRQVQLISFIAYKPPGCEESGGN

SEQ ID NO: 10035 - protein, 487 aa, Brevibacterium linens
MSTSGEDLTLVWFRDDLRVADHEALTAARADGRVIAVWIRETRDEEGLGPRPLGGACRWWAHESLTVLHEELSDLGIPLLFAAGRAEKIIVQLASSLGVTAVRWTRRYASASRALDGQIKTVLNDQGFTVHSHTGALLVEPWTAAPQSSDHYKVFTPFWKAVAGRDVGDVLPKPQAQSPLSQTLLSRAHECPAVMELDGLGLLDGTETGAGEAAAASGPRWWQDTIAGHWSPGLRAAEDQLDDLSAIIDGYTTSKDVPSDAASTSRLSPRLRHGELSPRQLLQAARTTSSLTQDDRAAWIRQLYWREFSWHLTYHYPHIDSAPIRPEFHNFPYEDDDDALTHWRAGTTGYPLIDAGMAQLWQTGWMHNRVRMVTASFLTKNLLQHWWFGEQWFWDTLVDADEANNPVSWQWVAGSGADAAPYFRVFNPERQRERFDPDDAYIEDWLPYTPATAPPPLVDLRQSRQAALSAYDHMKNRSTTRDNPGES

SEQ ID NO: 10036 - protein, 501 aa, Mycobacterium tuberculosis
MSFVVTIPEALAAVATDLAGIGSTIGTANAAAAVPTTTVLAAAADEVSAAMAALFSGHAQAYQALSAQAALFHEQFVRALTAGAGSYAAAEAASAAPLEGVLDVINAPALALLGRPLIGNGANGAPGTGANGGDGGILIGNGGAGGSGAAGMPGGNGGAAGLFGNGGAGGAGGNVASGTAGFGGAGGAGGLLYGAGGAGGAGGRAGGGVGGIGGAGGAGGNGGLLFGAGGAGGVGGLAADAGDGGAGGDGGLFFGVGGAGGAGGTGTNVTGGAGGAGGNGGLLFGAGGVGGVGGDGVAFLGTAPGGPGGAGGAGGLFGVGGAGGAGGIGLVGNGGAGGSGGSALLWGDGGAGGAGGVGSTTGGAGGAGGNAGLLVGAGGAGGAGALGGGATGVGGAGGNGGTAGLLFGAGGAGGAGGFGFGGAGGAGGLGGKAGLIGDGGDGGAGGNGTGAKGGDGGAGGGAILVGNGGNGGNAGSGTPNGSAGTGGAGGLLGKNGMNGLP

SEQ ID NO: 10037 - protein, 120 aa, Bradyrhizobium japonicum USDA 110
MLELRTTITWGLLSKTCDRARQRIPFHFAQRLAAGSLIDLDEKVVFLFGANDVALGTVKWFNPTKGYGFVAPDDGGKDVFVHISAVEKAGYTSLVEGAKVGYELVTNRSGKQAAENLRLG

SEQ ID NO: 10038 - protein, 313 aa, Nicotiana tabacum
MATSHFILKLFLVISFCNVCFASRKLTALVQEPENQLLQYHKGALLFGKISVNLIWYGKFKPSQRAIVSDFITSLSSSTPSKTDPSVAKWWKTTEKYYHLANSKKSLSLYLGKQVLVENYSLGKSLTQKQIVQLASKGEQKDAINIVLTASDVAVDGFCVNRCGTHGSSKGAIIRGKTYKFAYIWVGNSETQCAGYCAWPFHQPIYGPQSPPLVAPNNDVGVDGMVINLASLLAGTATNPFGNGYYQGEADAPLEAASACPGVYAKGAYPGYAGDLLVDKTTGASYNAHGTNGRKYLLPALYDPSTSTCSTLV

SEQ ID NO: 10039 - protein, 147 aa, Zea mays
MPAAGGGHRYLRYAGRTGEVVTCSRTQSPELFFAVLGGLGQFGIITRARIPLQLAPPKVRWVRAFYDSFETFTKDQELLVSMPELVDYVEGFVVLNEQSLRSSSVAFPAQVDFSPDFASGAGSNNVHYYCIEFAVHDFQQQDSAADH

SEQ ID NO: 10040 - protein, 294 aa, Escherichia coli O157:H7 EDL933
MEGLTVEFSVLSNNLKMPMMGFGVFQVTDKNVCKQSVLNAIRTGYRLIDTAAVYGNEDAVGEAVREAISEGLCTREELFITSKLWVQDMLNQDTAAAGIEASLKKSGLEYFDLYLLHQAMRDYFSAWRALEDAYEEGKLKAIGVSNFYPHVLANFCETVRVKPMVNQVELHPYFAQPEALATMKYYNVQPEAWAPLGGGRHKPFENNLLQSIADAHQKSISQVILRWNIQRGVVVIPKSTHQQRIEENFAIWDFSLTEKEMAQISSLDLGYVGESVKHFNPEFVRGCLAVKIHD

SEQ ID NO: 10041 - protein, 436 aa, Nitrosomonas europaea ATCC 19718
MNDKKSAMRSHRVVWHPCTQMKHHEEFPPVLITRGEGVWLYDADGQRYLDTISSWWVNLFGHCNPRINAAIIDQLGRLEHTMLAGLTHEPVVELSERLSTITPGSLSHCFYASDGASANEIALKMSFHYWQQSGFPEKTQFINLQNGYHGETLGALSVTDVPIFRQVYAPLLRPAHPVLTPDWRFAEAGETPEAHALKAAAALESYLTQHHASTAALILEPLVQGAAGMGMYHPVYLQKAREICDTYRIHLITDEIAVGFGRTGTLFACEQAAITPDIMCLAKGLSGGYLPLSVVLTNDTIYRAFYSDQTSQAFLHSHSHSGNALACRAALATLDIIEQDNVIETNRHKTKFLNQCLQSVRTHPNVRHFRNCGMIWAFEVDNPRPDFTNRFAQMGLERQLLIRPMGNSVYIMPPYIINEEEMEFMAQAILNILNEI

SEQ ID NO: 10042 - protein, 338 aa, Leuconostoc pseudomesenteroides
MEALVLTGTKKLEVENIEQPEVKPNEVLIHTAFAGICGTDHALYAGLPGSADAVPPIVLGHENSGVVAEIGSDVTNVAVGDRVTIDPNIYCGQCKYCRTARPELCENLSAVGVTRNGGFEEYFTAPASVVYQIPDNVSLKSAAVVEPISCAVHGIQLLKVTPYQKALVIGDGFMGELFVQILQAYGIHQVDLAGIVPEKLAMNKEKFGVKNTYNTKDGDKIPEGTYDVVVEAVGLPQTQEAAIEASARGAQVLMFGVGGPDAKFQMNTYEVFQKQLTIQGSFINPNAFEDSLALLSSGKLDVESLMSHELDYQTVDDFVNGKLGVVSKAVVKVGGEEA

SEQ ID NO: 10043 - protein, 341 aa, Salmonella enterica subsp. enterica serovar Typhi Ty2
MKVKAVFINKPGEVETRWVDYPHKKENEVLIKVDAAGICGSDIGAFRGTNPLVTYPRIIGHEVTGIVLQEGTGMPDNIKKGDRVIVDPYIYCGHCYPCSVGRTNCCENLNVIGVHIDGAMQEVVTHPAHLIHKIPDNVPSEMAPLAEPLTIALHALHRANVKAGEYVAIIGAGAIGLMAALSARHYKATPILIDIVEERLRYAQKLGVPYVLNAADDQVIDAIKNITHGTMAQVVIEASGANSAIRNTLDLASFAGRISFTGWPKQETSLPTNLITYKELDLRGSRTSAGEFDEALRMLSTLEINPQDVVSKVVNLDEIPDAVKELDRYPERYLKINAVFH

SEQ ID NO: 10044 - protein, 320 aa, Mycobacterium tuberculosis CDC1551
  misc_feature (61)..(61): Xaa can be any naturally occurring amino acid
MPSLDNTADEKPAIDPILLKVLDAVPFRLSIDDGIEAVRQRLRDLPRQPVHPELRVVDLAXDGPAGPIGTRIYWPPTCPDQAEAPVVLYFHGGGFVMGDLDTHDGTCRQHAVGADAIVVSVDYRLAPEHPYPAAIEDAWAATRWVAEHGRQVGADLGRIAVAGDSAGGTIAAVIAQRARDMGGPPIVFQLLWYPSTLWDQSLPSLAENADAPILDVKAIAAFSRWYAGEIDLHNPPAPMAPGRAENLADLPPAYIAVAGYDPLRDDGIRYGELLAAAGVPVEVHNAQTLVHGYVGYAGVVPAATEATNRGLVALRVVLHG

SEQ ID NO: 10045 - protein, 271 aa, Oryza sativa (japonica cultivar-group)
MATLLLIACLPTRRPHLSLRQRSYKLAPRITMASSSSSSPPSSDPSLETVAPHAAVTGERKLNPNLQEQLPKPYLARALAAVDPSHPQGTRGRDARGMSVLQQHAAFFDRNGDGIIYPWETFQGLRAIGCGYPVSIAGAILINLVLSYPTQPGWMPSPLFSIHIKNIHKGKHGSDSEAYDTEGRFDPSKFDAIFSKYGRTHPNALTKDELNSMIKANRNMYDFIGWITSAGEWMLLYSVAKDKEGLLQRETVRGAFDGSLFERLQDSKKSA

SEQ ID NO: 10046 - protein, 131 aa, Glycine max
  misc_feature (59)..(59): Xaa can be any naturally occurring amino acid
  misc_feature (78)..(78): Xaa can be any naturally occurring amino acid
  misc_feature (90)..(90): Xaa can be any naturally occurring amino acid
  misc_feature (112)..(112): Xaa can be any naturally occurring amino acid
GFLAHLVRLFSVRQRGVRTWYSRASFSDALPSAAYDPIVMRDAIVLAVIERFMTDVPFXSLLCGGLYSSLAACITSRXYLSNTKAVLQWXAQSRAFLGGLVVSTICGSEELXDYLCTVRHESTLSVQDGTY

SEQ ID NO: 10047 - protein, 525 aa, Glycine max
MDSSSSSPNNNNHHKLGFQPARSRSRLAMASPANTSEPKIVTGTAGYILEDVPHFTDYIPNLPTYPNPLQDNPAYSVVKQYFVHVDDSVPQKVVVHKDGARGVHFRRAGPRQKVYFEADEVQAAIVTCGGLCPGLNTVIRELVCGLHHMYGVKKVLGINGGYRGFYARNTITLTPKSVNDIHKRGGTVLGTSRGGHDTKKIVDSIQDRGINQVYIIGGDGTQKGASAIFEEVRKRGLKVSVVGIPKTIDNDIPVIDKSFGFDTAVEEAQRAINAAHVEAESVENGIGVVKLMGRNSGFIAMYATLASRDVDCCLIPESPFYLEGPGGLYEYIEKRLKENGHMVIVIAEGAGQELVSESVQSMSKQDASGNKLFQDVGLWISQKIRDHFAAQKTLPITLKYIDPTYMIRAIPSNASDNVYCTLLAQSAVHGAMAGYTGYTSGLVNGRQTYIPFYRITERQNHVVITDRMWARLLSSTNQPSFLDAKGDNEEKEEEEALNQLPDGHCAKDTSLASKEINSSIYPTAC

SEQ ID NO: 10048 - protein, 130 aa, Zea mays
MNFQLAMYSESSTSETGKHGMKKIGTTHRRSTQAVNQSEERPTVGSTHSNRSTGLTKAAFLRLQVEIFEASKDDSREASPECSICLDGFYDGDELIRLRCGHRFHSTCLEPWARKCADCPYCRTNIRSRS

SEQ ID NO: 10049 - protein, 122 aa, Spirogyra maxima
MIQPQSYLNVADNSGARKLMCIRVLGSNNRKYANIGDMIIAVVKEAVPNMPLKRSEVIRAVIVRTRKGLKRDNGMILRFDDNAAVVINTEGNPRGTRVFGPVARELRELNFTKIVSLAPEVL

SEQ ID NO: 10050 - protein, 473 aa, Salmonella enterica subsp. enterica serovar Typhi Ty2
MPTHLVWFRRDLRLQDNLALAAACRDASARVLALYISTPAQWQAHDMAPRQAAFISAQLNALQTALAEKGIPLLFHEVADFNASIETVKNVCRQHDVSHLFYNYQYEFNERQRDAAVEKTLPSVICEGFDDSVILAPGAVMTGNHEMYKVFTPFKNAWLKRLKEDIPPCVPAPKIRVSGALSIPLTPVSLNYPQQAFDAALFPVEENAVIAQLRHFCSQGADEYASRRDFPAVDGTSRLSASLATGGLSPRQCLHRLLAEQPQALDGGPGSVWLNELIWREFYRHLMTWYPALCKHQPFIRWTKRVAWQENPHYFQAWQKGETGYPIVDAAMRQLNATGWMHNRLRMITASFLVKDLLIDWRLGERYFMSQLIDGDLAANNGGWQWAASTGTDAAPYFRIFNPTTQRERFDRDGEFIRQWLPALRDIPGKAIHEPWRWAEKAGVVLDYPRPIVEHKQARIATLSAYEAARKGA

SEQ ID NO: 10051 - protein, 158 aa, Zea mays
  misc_feature (67)..(67): Xaa can be any naturally occurring amino acid
MADDGGSHEGSGGGGGVREQDRFLPIANISRIMKKAVPANGKIAKDAKETLQECVSEFISFVTSERXKRKTINGDDLLWAMATLGFEEYVEPLKIYLQKYKEMEGDSKLSTKAGEGSVKKDAISPHGGTSSSSNQLVQHGVYNQGMGYMQPQYHNGET

SEQ ID NO: 10052 - protein, 238 aa, Aspergillus nidulans FGSC A4
MRAHPQSAVGLMSMGGKGPEVLSTFTTDFGGILAGLHRTKIHGTAHFTSSIQVAGLALKHRSEKSQRQRIIVFSCSPIAEDEKTLVKLAKKMKKNNVSIDVIAFGDLESDQTKKLEAFVENVKGGDGSNLAIIPPGPNLLSEELQASPILGGDGSGGAGGLGGGDGGDGGAFDLDAAAENDPELAFALRLSLEEEKNRQEKERREREAQQGKENLEGIPEEGSSSKKDNEDPDKMDTA

SEQ ID NO: 10053 - protein, 127 aa, Triticum aestivum
  misc_feature (39)..(39): Xaa can be any naturally occurring amino acid
RPVKRDSDEKSTRLDAEDKTCGVEVKEESGSDSDEDPQXGEELPAHAERRRRANKQHIASITLVDIAPYFHLPIREASRALKIGVSILKQKCRQYGIPRWPHRKIKSLHSLISDLEFVMDDTNGDVV

SEQ ID NO: 10054 - protein, 490 aa, Xanthomonas campestris pv. campestris str. ATCC 33913
MPRFPDQLLYIGGRYVPARGGHTFEVVNPATGEVLANVHNADADDLDAAVDSAKAGQRHWAALTVVERSRILLRAVALLRERNDALAELETLNTGKPLSETRSVDIVTGADVLEYYAGVAQALQGVQVPLREGSFFYTRHEPLGVVGAIGAWNYPIQIALWKAAPALAAGNAMIFKPSEVTPLTALKLAEIFTEAGLPDGVFNVLPGDGASVGHALTEHPEIEKISFTGGTATGRKVMASASSSSLKDVTMELGGKSPLIVCADADLDLAADIAMMANFYSSGQVCTNGTRVFVPRALRTAFEARLLARVQRIHIGDPLDERTTFGPMVSAAHMQRVLEHIEQGKAEGARLLFGGERLRDGALAQGCYVAPTIFSDCTDVMTIVREEIFGPVLSLLTYDDEDEAITRANATSYGLAAGVVTPDLSRAHRLIHRLEAGICWINTWGESPAPMPVGGYKQSGVGRENGLATLQAYTRTKSVQVELERYASVF

SEQ ID NO: 10055 - protein, 348 aa, Pichia stipitis
MSVPTTQKAVVFESNGGPLLYKDIPVPTPKPNEILINVKYSGVCHTDLHAWKGDWPLDTKLPLVGGHEGAGVVVGIGSNVTGWELGDYAGIKWLNGSCLNCEFCQHSDEPNCAKADLSGYTHDGSFQQYATADAVQAARLPKGTDLAQAAPILCAGITVYKALKTAQIQPGNWVCISGAGGGLGSLAIQYAKAMGFRVIAIDGGEEKGEFVKSLGAEAYVDFTVSKDIVKDIQTATDGGPHAAINVSVSEKAIAQSCQYVRSTGTVVLVGLPAGAKVVAPVFDAVVKSISIRGSYVGNRADSAEAIDFFTRGLIKCPIKVVGLSELPKVYELMEAGKVIGRYVVDTSK

SEQ ID NO: 10056 - protein, 458 aa, Rhodococcus rhodochrous
LQIVHQATADDVDEAVAAGRVAAADPAWRRMLPHERARYLHRIADAIEHEASRLALLQSYNTGKTLTETTALVGSAAGTFRYFAAVLETSDDDLTTQRGNYLTMSIHEPIGVIGAIAPWNSPIASDAQKIAPALAAGNAVVLKPAEWTPLVSMALARAIHDSGLPPGLLSVLPGKGSIVGDAIVQHPHVGKVTFTGGTRTGRAVAHAGAEKLMPVSLELGGKSPTIVLDDADIEAAVAGVMYGIFSSTGQSCIAGSRLFVDRSLYEAFMERLVERTRALRIGNGRDPRTQVGPLVHHTHRASVARYVDLARCEGGRVLCGGTAPDDPELADGAYYLPTVIDGLSNDAAVCQDEIFGPVLIALPFDGESDLLAQANDSVFGLASGIWTRDYRRAWRLARQLEAGTVWVNTYKRFSISTPFGGIKESGLGTEKGRAGIAAYSRQKSIYLGLDDEPDRWVD

SEQ ID NO: 10057 - protein, 352 aa, Haemophilus somnus 129PT
MSINFVKEGNIMSKYVRSVCLVEPKKVDIKTVLYPKKGECDVLIKVESIGICGSDIGAFRGTNPLVTYPRILGHEIVGTVIESGVGMPKNINIGDRVILEPYIYCGHCYPCSISRTNCCEALKVLGVHIDGAMQEIVRHPAHMLIKAPDIPIHELALAEPLTISLHAIRRTKVKAGEHVAIIGAGAIGLMAALVAKAYGATPILIDILDKRLDYAKSIGIPNIINPAKENDLEAIKSITNGRMAEVVIEASGANIAVQNTLKYTSFAGRIALTGWPKNETPLPTNLITFKELNIYGARTSKGEFEEALKLLESRKIEPKNIISKVITFDEIPHYIEELSENPDDYLKIIAVF

SEQ ID NO: 10058 - protein, 450 aa, Bacillus subtilis subsp. subtilis str. 168
MEMMGMENIQQNQGLKQKDEQFVWHAMKGAHQADSLIAQKAEGAWVTDTDGRRYLDAMSGLWCVNIGYGRKELAEAAYEQLKELPYYPLTQSHAPAIQLAEKLNEWLGGDYVIFFSNSGSEANETAFKIARQYHLQNGDHSRYKFISRYRAYHGNTLGALSATGQAQRKYKYEPLSQGFLHAAPPDIYRNPDDADTLESANEIDRIMTWELSETIAGVIMEPIITGGGILMPPDGYMKKVEDICRRHGALLICDEVICGFGRTGEPFGFMHYGVKPDIITMAKGITSAYLPLSATAVKRDIFEAYQGEAPYDRFRHVNTFGGSPAACALALKNLQIMEDEQLIQRSRDLGAKLLGELQALREHPAVGDVRGKGLLIGIELVKDKLTKEPADAAKVNQVVAACKEKGLIIGKNGDTVAGYNNVIHVAPPFCLTEEDLSFIVKTVKESFQTI

SEQ ID NO: 10059 - protein, 173 aa, Bradyrhizobium japonicum USDA 110
MATETKLPVTKSPTAPAVAGETWRPFQALRNEIDQIFDDFGNGFWNRPFRSLARLERDFSKSISAPAVDVAESDKAYEITAELPGLDEKNIDIKVANGGLTIKGEKREETEEKNKDYYVSERRYGTFERYFTLPESVNADKIEATFKNGVLKVVLPKTEEAQKPAKTINVKAA

SEQ ID NO: 10060 - protein, 452 aa, Staphylococcus aureus subsp. aureus COL
MNYTQQLKQKDSEYVWHPFTQMGVYSKEEAIIIEKGKGSYLYDTNGNKYLDGYASLWVNVHGHNNKYLNKVIKKQLNKIAHSTLLGSSNIPSIELAEKLIEITPSNLRKVFYSDTGSASVEIAIKMAYQYWKNIDREKYAKKNKFITLNHGYHGDTIGAVSVGGIKTFHKIFKDLIFENIQVESPSFYRSNYDTENEMMTAILTNIEQILIERNDEIAGFILEPLIQGATGLFVHPKGFLKEVEKLCKKYDVLLICDEVAVGFGRTGKMFACNHEDVQPDIMCLGKAITGGYLPLAATLTSKKIYNAFLSDSHGVNTFFHGHTYTGNQIVCTVALENIRLYEKRKLLSHIETTSSTLEKQLHALKRHRNVGDVRGRGLMFGVELVTDKDSKTPLEIEKVERIVRNCKENGLMIRNLENVITFVPVLSMSNKEVKTMVRIFKKAVHNILDRKC

SEQ ID NO: 10061 - protein, 377 aa, Lactococcus lactis subsp. lactis Il1403
MTNLFENYGRLPFSLIKGEDQYLFDDRGNKYLDFTSGIGVMNLGYSFEKGKVAVKAQLDSLSHLSNLYQNPLQEDVAEKLSQNHSYKAFFCNSGTEANEAALKLTHLIKKDQKILAFTDGFHGRTFGAMSATMQEKIQAGFSPLLPNFVASPFNDVVALEQILEKEKIGAIIFEIIQGEGGVLPISPDFVEALKSCQQKGILLIIDEIQTGIGRTGKLFAFEHFDFEPDIFTLAKALANGIPTGAMLAKNKYASYFSAGKHGSTFGGNPLAMASANEVLKEIDSDFLEKVTDKGIFFLKLLTEKLSVKATVKSIRGLGLMIGIQLTDEKKVPEVLALLRENGLLALSAGHDVIRLLPPLVMTKVELQKGAELLEKIL

SEQ ID NO: 10062 - protein, 382 aa, Thermosynechococcus elongatus BP-1
MVACEFSPGLDGIPVAQSAISYVDGQAGILEYRGVPIQELAEKSTFLETAFLLIWGYWPNREELAAFEHDITYHRRVKYRIRDMMKCFPESGHPMDALQASAGALGLFYSRRALEDPEYIRAAVIRLLAKIPTMVAAFQLIRKGNDPVMPCDELDYAANFLYMLNERRPDPFAARVFDICLILHAEHTMNASTFSARVTASTLTDPYAVVASAVGTLAGPLHGGANEDVINMLEEIGSVENVRPYVEKCIQNKIKIAGFGHRVYKVKDPRATILQKLAEQLFDKFGGDRYYDIALKLEEVVGEYLSYKGIYPNVDFYSGLVYRRLGIPSDLFTPVFAIARVAGWLAHWKEQLEANRIYRPTQVYTGAHNQPYVPMEERNHRP

SEQ ID NO: 10063 - protein, 142 aa, Glycine max
  misc_feature (32)..(32): Xaa can be any naturally occurring amino acid
  misc_feature (51)..(51): Xaa can be any naturally occurring amino acid
GYGSQHTNYDITSIASNGGRVQCMQVWPPGGXKKVETVSSLPDLDDAQLAXEVKYLLRKGWIPCLEFELKHGFVYREHNRSPGYYDGRYWTMCEAAMFGCTDASQVSQELQEPRLHTLRLDAFMRFRHVRRALCMSLIAYMP

SEQ ID NO: 10064 - protein, 133 aa, Brassica napus
MALEEQSAARSTGKVNWFNDSKGYGFITPDGGGEELFVHQSSIVSEGYRSLAIDDLVEFEITQGTDGKTKAVDVTAPGGAPLKKKETSSRGGGARRVGGGGGCYNCGEAGHLAKDCRDDGGERGGRSVLLQLW

SEQ ID NO: 10065 - protein, 373 aa, Arabidopsis thaliana
MGYLFEETLSSNPKTPIVVDDDNELGLMAVRLANAAAFPMVLKASLELGVFDTLYAEASRTDSFLSPSEIASKLPTTPRNPGAPVLLDRMLRLLASYSMVKCEKVSVGKEQRVYRAEPICRFFLKNNIQDIGSLASQVIVNFDSVFLNTWAQLKDVVLEGGDAFGRAHGGMKLFDYMGTDERFSKLFNQTGFTIAVVKKALEVYQGFKGVNVLVDVGGGVGNTLGVVTSKYPNIKGINFDLTCALAQAPTYPGVEHVAGDMFVDVPTGNAMILKRILHDWTDEDCVKILKNCWKSLPQNGKVVVIELVTPDEAENGDINANIAFDMDMLMFTQCSGGKERSRAEFEALAAASGFSHCQFVCQAYHCWIIEFCK

SEQ ID NO: 10066 - protein, 240 aa, Triticum aestivum
  misc_feature (30)..(30): Xaa can be any naturally occurring amino acid
  misc_feature (41)..(41): Xaa can be any naturally occurring amino acid
  misc_feature (75)..(75): Xaa can be any naturally occurring amino acid
MASLGLPGPSSYHDLCCYGAGIAGNIFAFXLFISPLPTFRXRIVRNGSTEQFSATPYIYSLLNCLVCMWYALPFXSYGVVLVATVNTIGAAFQLAYTAVFIAYADAKKRLKVSVLLAGVFCVFGLFVYVSMALFDHYLGRTFVGYLIVASLTFMFVSPLSIIDLVIRINSVEYMPFYFSLSMALMSMPFFAYGVLLDDFFIYVPNGIGTVLGVMQLLLYAYYSRKGSRDEARRPLLVTHT

SEQ ID NO: 10067 - protein, 352 aa, Nostoc sp. PCC 7120
MKAQVFRGVNQLSYEEIPLPILEPDEVLVQVQVVGLCQSDIKKIRYPLYEPPRIFGHETAGTIAAVGSQVQGWQVGQRVAVMHHIPCMRCAYCMNENFSMCDVYKNISTTAGFNASGGGFAEYVKVPGHIVENGGLIPIPDGISFEEASFVEPTNCCLKAVKKAQIAPGQTVLVTGAGPIGLMFVMLVKYFGAKAIATDLLPSRIEKALNVGAEAAFDARDPDLPAKVHALTNGLGVDVTLLAVPSEKAFFQALECTRKGGKILFFAEFPDELEIPINPNILYRREIDLMGSYSSSYRLQNLSADIVFNRRIDVQALISDRYPLKDLSAAVDQAIAPTPETYKILIYPKIGD

SEQ ID NO: 10068 - protein, 311 aa, Ralstonia eutropha JMP134
MALDEQARYILDMIASAGRPPLHTCTPEQARQSFDFRPLAGVPDAVAQIEEVTIPGPAGDIRVRIYTPDGEGPFPALVYCHGGGWVVGDLDTVDVPCRRLATRASCVVVSVDYRLAPEHRFPAATEDAYAAFQWLVSNARAQQVDATRIAVGGDSAGGNLAAAVALMARDRAAPQPCFQVLLYPVTDGTLDTPSYRENAEGYLLTRDSMVWFWNHYVGDADRTHPYASPLRADHHRGLPPAFVVTAEFDPLRDEGEAYARRLAEAGTPVECKRYDGTIHGFCWMPGVLDKGRQALDDTAAALAAAFQSDNR

SEQ ID NO: 10069 - protein, 177 aa, Burkholderia fungorum LB400
MLGLALLAAQGPHAFAEGAFALTSASFHAGGTVEAAQVFNQGDCKGGNRSPQLSWHDAPPGTRSFAVTMFDQDAPGRGWWHWAVAGIPATVVSLPENASSSGFLSKVGALEARNDFDTDGYGGPCPPAGKPHRYIITVYALSTADLRLAQGRPALMFDHEISTATLGSARMVVSYGR

SEQ ID NO: 10070 - protein, 394 aa, Methanosarcina acetivorans C2A
MKAVVYKGPRNVDVEEVKKPEIEKPTDVIIKVTSSGICGSDLHLYDGHGPDGLGTILGHEPMGVVEEVGDAVELVKPGDRVVIPFNVACGSCLNCIRGLTNMCLTMNPDAAIANYGYPGAGPYAGGQAEYLRVPYGDWACLKLPGEPGDEFEDDFVMLADIFPTAYYAAELAKVKTGKTVAVFGAGPVGLLAAYSSMLMGASEVYVVDKSDKRLKLAESIGAVPINFTDGDPVEMIMQIRQNNKNLMSSLRPGEEKVLGVDCAIDAVGYQALDRNNSEEFKPNQVLMDIARIIAPGGSIGVIGVYSPDPAGKDENEKQGYLTLPWAELWFKGVSIGTGPTPVKQMHGFLRNLIFNGKAKPSFIVSDRISIDEAPEAYKQFDKRDDVVKPIIKFH

SEQ ID NO: 10071 - protein, 483 aa, Rickettsia sibirica 246
MAEFTPITIAYGDGIGPEIMEAVLYILRKAEARIRLETIEVGEKLYKKHYTSGISEESWESIQRTGIILKAPITTPQGGGYKSLNVTIRKTLQLFANIRPAVSFHPFTRTLHPNLNLTIIRENEEDLYAGIEYRQTHNMYESMKLISHTGCEKIIRYAFEYAVKNNRKKVMCLSKDNIMKFSDGILHKVFNEIAKEYPQINNAHYIIDIGTARLATKPEIFDVIVTSNLYGDIISDLAAEISGSVGLAGSANIGQHYAMFEAVHGSAPDIAGKDIANPSGLLNAAIMMLVHIGQGDIATLIENAWKKTIEDGVHTADIYNEQSSSKKVGTKEFAAEVTKRLGQLPTKLPKADYPLIAEKQESNIDYKIDTKEVKKLVGTDIFVNMNVSAAHDIADKINKLDLGNFELKTISSKGLKLWPRDTRFETVSDHWCCRFMNKDGTEIKHLDITRLLEALSTANIDFIKVENLFEFDGVAGYSLAQGE

SEQ ID NO: 10072 - protein, 448 aa, Pseudomonas aeruginosa UCBPP-PA14
MNQPLNVAPPVSSELNLRAHWMPFSANRNFQKDPRIIVAAEGSWLTDDKGRKVYDSLSGLWTCGAGHSRKEIQEAVARQLGTLDYSPGFQYGHPLSFQLAEKIAGLLPGELNHVFFTGSGSECADTSIKMARAYWRLKGQPQKTKLIGRARGYHGVNVAGTSLGGIGGNRKMFGQLMDVDHLPHTLQPGMAFTRGMAQTGGVELANELLKLIELHDASNIAAVIVEPMSGSAGVLVPPVGYLQRLREICDQHNILLIFDEVITAFGRLGTYSGAEYFGVTPDLMNVAKQVTNGAVPMGAVIASSEIYDTFMNQALPEHAVEFSHGYTYSAHPVACAAGLAALDILARDNLVQQSAELAPHFEKVLHGLQGAKNVIDIRNCGLAGAIQIAPRDGDPTVRPFEAGMKLWQQGFYVRFGGDTLQFGPTFNARPEELDRLFDAVGEALNGIA

SEQ ID NO: 10073 - protein, 355 aa, Zea mays
MPLVGQIAKVLTQRCRSWMLFYGEDVSVKMRLLFYILPCLLLSMDFLTLHPAMLGMEVILQGWMTGKAKKLMSFMIKGMSNGTFPTLPQPRRVASYDPKLSLLAAMAKNYPTVSAEYSEAVEKARRKLRALIAEKSCAPLMLRLAWHSAGTFDVSSRTGGPFGTMKHQSELAHGANAGLDIAVRLLEPIKEEFPILSYADFYQLAGVVAVEVTGGPEIPFHPGREDKPQPPPEGRLPDATKGSDHLRQVFGKQMGLSDQDIVALSGGHTLGRCHKERSGFEGAWTTNPLVFDNSYFKELLSGDKEGLLQLPSDKALLSDPVFRPLVEKYAADEKAFFDDYKEAHLKLSELGFADA

SEQ ID NO: 10074 - protein, 486 aa, Triticum aestivum
LIPSPANPRFPGPSLPYALGAALPRPAQHRWLIDSWPPACGKVRRRRRPRGTRWTITTSRTARWTSTSTAGGDGSRSDGEGDDEYALLTRITDTSAAEARAGKDIQGIPWERLQITRQDYRKARLEQYKNYENFPQSGELMDKLCKQVESSSKYYEFQYNTRIVKPSILHFQLRNLLWATSKHDVYFMSNSTVGHWSSLSHKMTDVLDFSGHVAPAKKHPGCALEGFTGVQVSTLAVNEGLLVAGGFQGELVCKSLGERDVKFCTRTTLSDNAITNAMDIHRSTSGSLRITVSNNDSGVREFDMERFQLLNHFRFNWPVNHTSVSPDKKLLAVVGDDRDALLVDSRNGKVTSTLVGHLDYSFASAWHPDGVTFATGNQDKTCRVWDIRNPSTSLAVLRGNIGAIRCIRYSSDGRFLLFSEPADFVHVYSAAECYRKRQEIDFFGEISGISLSPDDESLFVGVCDRVYASLLNYRMVHANGYLDSYM

SEQ ID NO: 10075 - protein, 396 aa, Pseudomonas syringae pv. tomato str. DC3000
MSAQVLRKRICVLPGDGIGVEVMEAALPVIAALGLPFDLLHADIGWECWRREGETVPDDTWKVMASCDATLLGAITSKPLAEAEAELPLPLQGHSRRYVSPVIQLRQNLDLYANVRPVTDMTGENRFRFVVIRENTEGLYAGLDFGRIPDALVPLLEAREALGAAWQRAGQEDATVTLRLQTRSGLTRIFEYAFDYARNNNFSRVTFVDKPMVLRHSSAFARVIFEETAQRYPDITGAIENVDAVALWMVQRPERFGVIVAENMFGDILSDLGAGVMGGLGFAPSGNFGNSGAYFEPVHGSAPAHAGLTKANPSAMFLAIAMMLEHLGYPAQSDCITRAVSLVARSAVRTYDLGGSHTTCQVGEAIVQQCVELQGLLVDRRERSRSAQGERHVSAL

SEQ ID NO: 10076 - protein, 408 aa, Oryza sativa (japonica cultivar-group)
MEGGGAGSGMERWREMFRGADIYDVIRNAILIAGADSPRELLRRRQGIIEWLFAVAPVTVPVPAPLACGRVVDGAGNRLPPAAIPDGGGHHHDDNDGNFAAAEAQTSLIDQQILEALYDEIEEDTQVINEVLRIKDILINYKEQSVDTLFDGLRRLQLMRLSISVLKSTQIAEAVAPLNKHRSPVICKIARDLAKGWKGVAADWVGPSSANADTSPDISNPSTVEDDFGLPTPPMDVGAFFLPQSAAEQYVSETLINFLLLSIFFYCHYMKFLHKADDDDDESLIPNAKNDCGFGGYKMEIAKPVANMDENILRKGKDLSRQHGPPMRQANLQMKLAQHHAIAITEQRPIAVVRKPLPDHVSKLERQATILEGCKVGIGKRNNTDIADLRLEATKRKLNDAYQEAENS

SEQ ID NO: 10077 - protein, 248 aa, Schizosaccharomyces pombe
PKYRLVVRFSNRFVTCQIVSSRVNGDYVLAHAHSSELPRYGIKWGLANWTAAYATGLLVARRALAKVGLADKYEGVTEPEGEFELTEAIEDGPRPFKVFLDVGLKRTSTGSRVFGAMKGASDGGLFIPHSPNRFPGFDIETEELDDETLRKYIYGGHVAEYMEMLIDDDEERYQKQFSGLIADGIESDQLEDIYAEAYAKIREDPSFQKSGKDAAAFKAESLKYTQRKLTAEERKERFNAKVIEAGRA

SEQ ID NO: 10078 - protein, 220 aa, Spinacia oleracea
RNLLSVAYKNVVGARRASWRIISSIEQKEESRGNEDHVSVIRDYRSRIEKELSDNCDGILKLLDTKLVPAASSGDSKVFYLKMKGDYHRYLAEFKTGAQRKEAAESTLTAYKAAQDIANAELAPTHPIRLGLALNFSVFYYEILNSPDRACNLAKQAFVEAIAELDTLGEDSYKDSTLIMQLLRDNLTLWTSDMQDEAADEITEEAAKQQKAVNNNKIAY

SEQ ID NO: 10079 - protein, 177 aa, Silene latifolia subsp. alba
MASLMSNAAVVTASTAAQANMVAPFSGLKSTSAFPVSRKSNVDITSLATNGGRVNCMQVWPPRNLKKFETLSYLPTLSEESLLKEINYLLIKGWVPCLEFEVGPAHVYRENNKSPGYYDGRYWTMWKLPMFGCTDASQVAAEVVECKNAYPDAHVRIIGFDNKRQVQCISFIAYKPE

SEQ ID NO: 10080 - protein, 459 aa, Saccharomyces cerevisiae
MPSNVRSGVLTLLHTACGAGVLAMPFAFKPFGLMPGLITLTFCGICSLCGLLLQTRIAKYVPKSENASFAKLTQLINPSISVVFDFAIAVKCFGVGVSYLIIVGDLVPQIVQSIFYRNDDNMSGSQEHHMFLDRRLYITLIIVFVISPLCFKRSLNSLRYASMIAIVSVAYLSGLIIYHFVNRHQLERGQVYFMVPHGDSQSHSPLTTLPIFVFAYTCHHNMFSVINEQVDKSFKVIRRIPIFAIVLAYFLYIIIGGTGYMTFGENIVGNILTLYPNSISTTIGRLAMLLLVMLAFPLQCHPCRSSVKNIIIFIENFRKGKLYDNRASFIPLDNFNSEDPQEAPTQQNNEEPNLRSESLRHINIITLCILLFSYLLAISITSLAKVLAIVGATGSTSISFILPGLFGYKLIGSEFTGTNERVPTSIKIFKYLSLSLFIWGIAVMVASLSAIVFLGTSSH

SEQ ID NO: 10081 - protein, 286 aa, Brassica napus
MGEEVRMKDVSGDGERVMEWEKGLPSDEDLASLSYSLVPSNLAMAFSITPEKSRTIQDVNRASETTFSSLRGGSPGPNTSSSTNLGVAAAEEEEEEDRVGSSSPGSDSKKQKISEEEGDSGTELKRARLVWTPQLHKRFVDVVAHLGIKNAVPKTIMQLMNVQGLTRENVASHLQKYRLYLKRMQGFTSEGPSSSDKLFSSTPVPPQSFQDQGSASAGAPSMMQMPVYAHHMGMQGYHHQNHAHDPYHQNHHRGSGAPANPYMMQQNKFGSMASYPPVGGGSANEN

SEQ ID NO: 10082 - protein, 392 aa, Sulfolobus solfataricus
MGEKMIKLLKFYQDRGIKIIKGEGQYVWDEKNNKYLDMHAGHGVAFLGHRNKVIIDHLKKQMEEISTLSLAFDTPIREEMIKELDELKPEDLDNLFLLNSGSEAVELALKIARKITKRRKIVAFKNSFHGRSMGALSVTWNKKYREPFEPLIGPVEFLEYNNVDSLKSITEDTAAVIVEPVQGEGGVIPAKKEFVKSLREVTEKVNALLIIDEVQTGFGRTGKIWAYQHFDIKPDILTAGKAIGGGFPVSAVFLPNWISEKIEEGDHGSTYGGNPLAAAAVTAACKVAKSEKIAEQAQKKGELFMRILKEKLEDFKIVREIRGLGLMIGIDLKVNPSIAIKVLQDEKVLSLKAGLTTIRFLPPYLITQSDMEWASDATRKGISETESKRVAS

SEQ ID NO: 10083 - protein, 159 aa, Aspergillus nidulans FGSC A4
MADEAHEVTFESADAGASATYPMQCSALRKNGFVVIKNRPCKIVDMSTSKTGKHGHAKVHLVAIDIFTGKKYEDLSPSTHNMDVPNVSRKEYQLLDVTDDGFLSLMDDSGDTKDDVKVPEGEVGERINKMFKEEEKDCNVVILTSMGEQMCMEVKEAPK

SEQ ID NO: 10084 - protein, 184 aa, Zea mays
LKYFVDSVKKWGTRSATFHFHQGSKSVSVNYFVVILVTACELFLALGGFGCQGMGIPVGKLALYTALGGVRPSACLPITIDVGTNNEDLLKDEFYIGLKQRRATGQEYSEFLDEFMAAVRQNYGQKVLVQFEDFANHNAFTLLEKYRTNHLVFNDDIQGTAAVVLAGIIAALKSVGGTLADHTF

SEQ ID NO: 10085 - protein, 361 aa, Bacillus sp. KSM-K16
MEALNLYGAGDIRFEQSPKPTIMNDNEVIVRVETAGICGSDLSRYKKLGPYISGTTFGHECSGTIEEVGSNVSHLKEGMRVAVCPALPCGDCTQCRQGAFSRCPSLTVIGAVQPGAFAEYVKLPAENVLPLPNEIDADTAAFIEPAAVVAHGFYKTAIEPGADVAIIGCGSIGLLAIQWAKLFGARYVYAIDIDEQKLKVAKELGADQRVNPLDGPVHEQIHDLTAGEGVDVAIEAAGTPITSAQALALPKKGGEVVFLGIPYGDVTIERFYFEKIVRNELRVHGSWNGLSAPFPGKEWKTAIHSLQTGALQVNPLITHRLPLSDGPFVFKEMASGSPGYIKTLLYPGKTGQKERAINHLK

SEQ ID NO: 10086 - protein, 342 aa, Bacillus sp. KSM-K16
MKALVKTAPGFGHVELQNKPEPAPGEKQVKIKVKYAGICGSDIHTYEGHYKVAFPVTLGHEFAGEIVEVGPGVQSFKVGDRVTSETTFSICGQCPYCQTKDYNLCSERKGLGTQQDGGFAEYVLAREESLHLLPDNVDFRSAAMTEPLACTHHALAKTTINAGDLCVVIGPGPIGLLAAQAAKSKGAKVMITGLNHDKVRLEKARALGIDYVVNGEETDVGEVVNELTNGYGADVVLECSGAVKAANQGLKLLRKKGQYSQVGIFAASEIPFDLETIIQKEIHVIGSRSQKPADWEPSLMLLKTGNVNARALVTHEYELHQWEEAYQAIKSGEAIKVLLKPE

SEQ ID NO: 10087 - protein, 250 aa, Solanum commersonii
  misc_feature (231)..(231): Xaa can be any naturally occurring amino acid
MGRGRVQLKRIENKINRQVTFSKRRSGLLKKAHEISVLCDAEVGLIVFSTKGKLFEYATDSCMERLLERYERYSFAEKQLVPTDHTSPGSWTLENAKLKARLEVLQRNEKLYVGEDLESLNMKELQNLEHQLASALKHIRSRKNQLMHESISVLQKQDRALQEQNNQLSKKVKEREKEVEQQNQWDQQNHEINSSTFVLPQQLDSPHLGEASQNTNVVDNGEVEGGNSSQXQGAANNTVMPQWMVRHLNG

SEQ ID NO: 10088 - protein, 250 aa, Hevea brasiliensis
MTKNYPKVSEEYQKAIDKAKRKLRGFIAEKGCAPLMLRIAWHSAGTYDANTKTGGPFGTMRHAAEQAHAANNGLDIAVRLLEPIKQQFPILSYADFYQLAGVVAVEITGGPEIPFHPGREDKPEPPPEGRLPNATKGADHLREVFGKTMGLSDKDIVVLSGGHTLGRCHKERSGFDGPWTANPLIFDNSFFTELLAGQKEGLLQLPTDTVLVTDPVFRPYVEKYAADEDAFFADYAEAHVKLSELGFAEA

SEQ ID NO: 10089 - protein, 390 aa, Nicotiana tabacum
GKCWEDMFNAINQARRLIYITGWSVYHLVTLVRDNGKAEESMLGEILKRKSQEGVRVLLLIWDDPTSSKSILGYKSEGIMGTSDEETRRYFKHSSVHVLLCPRSAGKGHSWVKKQETGTIYTHHQKTVIVDVDAGNYQRKIIAFVGGLDLCKGRYDTPQHPIFKTLQNVHKDDYHQPNYTGPTTGCPREPWHDLHSRIEGPAAYDVLTNFEERWLKASKRHGLQKMKASQDDALLQLDRIPDILKIADVPCLGEDDADTWHVQIFRSIDSNSVKGFPKDPKEATNKNLVCGKNVLIDMSIHTAYVKAIRAAQHFIYIENQYFLGSSYNWNNYQDLGANNLIPMEIALKIANKIRANERFSVYIIVPMWPEGVPTSTATQRILFWQHNTMQ

SEQ ID NO: 10090 - protein, 347 aa, Escherichia coli O157:H7 EDL933
MKNSKAILQVPGTMKIISAEIPVPKEDEVLIKVEYVGICGSDVHGFESGPFIPPKDPNQEIGLGHECAGTVVAVGSRVRKFKPGDRVNIEPGVPCGHCRYCLEGKYNICPDVDFMATQPNYRGALTHYLCHPESFTYKLPDNMDTMEGTLVEPAAVGMHAAMLADVKPGKKIIILGAGCIGLMTLQACKCLGATEIAVVDVLEKRLAMAEQLGATVVINGAKEDTIARCQQFTEDMGADIVFETAGSAVTVKQAPYLVMRGGKIMIVGTVPGASAINFLKINREVTIQTVFRYANRYPVTIEAISSGRFDVKSMVTHIYDYRDVQQAFEESVNNKRDIIKGVIKISD

SEQ ID NO: 10091 - protein, 226 aa, Triticum aestivum
MATMAPSPALLPLLLLLPLLLLSVACTAGAAPAATATVPTIPSQPGKPNSNNKQKQGGAPLGPAVRALVQSTCNATTYYDLCVAALVADPASSTADLRGLCAIAVSAAAANASATASALANTTWAASGAPEPGSDGRAQQVPALLTRTCAGKYREAREALLEARESVGEEAYDYAFVHVGAAAEYPAVCRTMFRRKRVPYPVELARREEALEHLCTVVIDIITLLA

SEQ ID NO: 10092 - protein, 377 aa, Deinococcus radiodurans
MSNIAKGLEGVLFTESKLTFINGSEGILTHLGIPIQEWAEKSTFEELSLALLDAKLPTAEELAKFDAELKANRAIPDQLVGIIRDMPKGVHPMQALRTAVSYLGLLDPQAEDITPEARRAISTRMIAQFSTIIAAINRAQEGQDIVAPRADLTHAGNFLYMLTGNEPTPEQARLFDIALVLHADHGMNASTFTAIATSSTLSDMYSCMVSAIGALKGPLHGGANEAVMTMLDEIGTVDKAEAYITGKLDNKEKIMGVGHRVYKYFDPRSRVLRDYAEHVANKEGKSNYYQILEAIEKIIVDRMGAKGIYPNVDFYSGTVYSDLGIKKEYFTPIFALARISGWCASVIEYSQDNRLLRPDAEYTGARDQHYVDIKDRQ

SEQ ID NO: 10093 - protein, 158 aa, Oryza sativa
MASTALSSAFSLLSLPSSSSPAAAAAAAPRSFAVPSRARPRRAVAVVASTATDSPKVLELGDAIAGLTLEEARGLVDHLQERLGVSAAAADEAPAEKTEFDVVIEEVPSSARIASIKVVRALTNLALKEAKDLIEGLPKKVKEGVSKDEAEDAKKQLE

SEQ ID NO: 10094 - protein, 301 aa, Glycine max
  misc_feature (52)..(52): Xaa can be any naturally occurring amino acid
MERRRVMEHLKTYPAFPGWYADVSWPGEAHIYKMEKILFHGKSEFQELLVFXSSRHGKVAILDGCIQLTENDEFAYQEMLTHLALCSIPNPKKVLLVGGGDGGILREISRHSSVEHIDICEIDKMVIDAYKKFFPDIAVGYEDPRVHVHIRDGIAFTNSVPEGTYDVIIVDAFPAMGHSADVLADECFLESVAKALRPGGVFSAPADSLWHKNFVVADTIANCKKIFKGSVNYAWTTVPTYASGVIGFMLCSTEGPPVNFKHPINKLNPEKNGVAKGPTKFYNPEIHAAAFCLPSFVDKVD

SEQ ID NO: 10095 - protein, 490 aa, Escherichia coli O157:H7 EDL933
MSRMAEQQLYIHGGYTSATSGRTFETINPANGNVLATVQAAGREDVDRAVKSAQQGQKIWAAMTAMERSRILRRAVDILRERNDELAKLETLDTGKAYSETSTVDIVTGADVLEYYAGLIPSLEGSQIPLRETSFVYTRREPLGVVAGIGAWNYPIQIALWKSAPALAAGNAMIFKPSEVTPLTALKLAEIYSEAGLPDGVFNVLPGVGAETGQYLTEHPGIAKVSFTGGVASGKKVMANSAASSLKEVTMELGGKSPLIVFDDADLDLAADIAMMANFFSSGQVCTNGTRVFVPAKCNAAFEQKILARVERIRAGDVFDPQTNFGPLVSFPHRDNVLRYIAKGKEEGARVLCGGDVLKGDGLDNGAWVAPTVFTDCSDEMTIVREEIFGPVMSILTYESEDEVIRRANDTDYGLAAGIVTADLNRAHRVIHQLEAGICWINTWGESPAEMPVGGYKHSGIGRENGVMTLQSYTQVKSIQVEMAKFQSIF

SEQ ID NO: 10096 - protein, 172 aa, Glycine max
  misc_feature (53)..(53): Xaa can be any naturally occurring amino acid
  misc_feature (118)..(118): Xaa can be any naturally occurring amino acid
  misc_feature (143)..(143): Xaa can be any naturally occurring amino acid
AYSMISSPTVTNVNPACAGMVAPFTGLKSIAGFPTRKTNNDITSIATNGGRVXCMHVWPPVGKKKFETLSYLPDLDDAQLAKEVEYLLKNGWIPCLKFELEHGFVYREHNRSPGYYDXRYWTMWNLPMTCCTDAYDVFKELQXANTAIANSFIQIIRFDNLLSVQCMSFDRY

SEQ ID NO: 10097 - protein, 147 aa, Neurospora crassa
MSGANPKQNSEPNRSAFFFPFELFLLQDGEKKIEEKVFTGMSNTSDFKILKEDHTLGNLLAEHLKQAPHVLMAGYKIAHPNVPELFIRIQTDGSITPREALVGACKQLVAMYGQLGREFQKELALRQYADQGEQGGGVNGGANGGHY

SEQ ID NO: 10098 - protein, 287 aa, Arthrobacter keyseri
MTTETIDTTASETPRLRLLHGHSIPRLGLGTWPMLEDECEAAVRVAVQSGYRLVDTAFQYRNEEAVGRGIRTAGVPRSELFISSKFNKESHSIDGVQRAYDESLRKLGLDHLDMFMCHWPVPALGKYVDAWKGLVKLLEEGRVKAIGVSNFKPSHLKEIIDATGVVPDVNQIQLSPDIARTEPRAVHRLLGTVTEAWSPIGRSSGLRANPIIIEIAQRLNKSPAQILLRWHVQQDIVPIPQASDPLWLTENLSVFDFSLSATEMAAIRQLDKGEGAARDSDLPENGH

SEQ ID NO: 10099 - protein, 323 aa, Mycoplasma genitalium G-37
MDKIAILTSGGDASGMNATIAYLTKYAIAKQLEVFYVKNGYYGLYHNHFITSKELDLTDFFFMGGTVIGSSRFKQFQDPSLRKQAVLNLKKRGINNLVVIGGDGSYMGAKALSELGLNCFCLPGTIDNDVNSSEFTIGFWTALEAIRVNVEAIYHTTKSHNRLAIIEVMGRDCSDLTIFGGLATNASFVVTSKNSLDLNGFEKAVRKVLQFQNYCVVLVSENIYGKNGLPSLEMVKEHFENNAIKCNLVSLGHTQRGFSPNSIELFQISLMAKHTIDLVVNNANSQVIGMKNNQAVNYDFNTAFNLPKADRTKLLNQVNTAII

SEQ ID NO: 10100 - protein, 348 aa, Pyrococcus horikoshii OT3
MSEKMVAIMKTKPGYGAELVEVDVPKPGPGEVLIKVLATSICGTDLHIYEWNEWAQSRIKPPQIMGHEVAGEVVEIGPGVEGIEVGDYVSVETHIVCGKCYACRRGQYHVCQNTKIFGVDTDGVFAEYAVVPAQNIWKNPKSIPPEYATLQEPLGNAVDTVLAGPISGKSVLITGAGPLGLLGIAVAKASGAYPVIVSEPSDFRRELAKKVGADYVINPFEEDVVKEVMDITDGNGVDVFLEFSGAPKALEQGLQAVTPAGRVSLLGLYPGKVTIDFNNLIIFKALTIYGITGRHLWETWYTVSRLLQSGKLNLDPIITHKYKGFDKYEEAFELMRAGKTGKVVFMLK

SEQ ID NO: 10101 - protein, 416 aa, Escherichia coli
MESKVVVPAQGKKITLQNGKLNVPENPIIPYIEGDGIGVDVTPAMLKVVDAAVEKAYKGERKISWMEIYTGEKSTQVYGQDVWLPAETLDLIREYRVAIKGPLTTPVGGGIRSLNVALRQELDLYICLRPVRYYQGTPSPVKHPELTDMVIFRENSEDIFAGIEWKADSADAEKVIKFLREEMGVKKIRFPEHCGIGIKPCSEEGTKRLVRAAIEYAIANDRDSVTLVHKGNIMKFTEGAFKDWGYQLAREEFGGELIDGGPWLKVKNPNTGKEIVIKDVIADAFLQQILLRPAEYDVIACMNLNGDYISDALAAQVGGIGIAPGANIGDECALFEATHGTAPKYAGQDKVNPGSIILSAEMMLRHMGWTEAADLIVKGMEGAINAKTVTYDFERLMDGAKLLKCSEFGDAIIENM

SEQ ID NO: 10102 - protein, 282 aa, Streptococcus pyogenes SSI-1
MAMIQWFPGHMSKARRQVQENVKHVDFVTILVDARLPLSSQNPMLTKIVGDKPKLMILNKADLADATRTKEWKAYYESQGIKTLAINSKEQSTVKKVTEAAKELIADKIKRLRDRGIQKETLRTMIIGIPNAGKSTLMNRLAGKKIAVVGNKPGVTKGQQWLKSNKELEILDTPGILWPKFEDELVGLKLALTGAIKDQLLPMDEVTIFGLNYFKTHYPSRLTKRFKNIPLEEEAPEIIMTLTRQLGFKDDYDRFYSLFVKEVRDGKLGQYTLDQVGDMDAD

SEQ ID NO: 10103 - protein, 324 aa, Candida parapsilosis
MSTATASPAVKLNSGYEIPLVGFGCWKLTNDVASDQIYRAIKSGYRLFDGAEDYANEQEVGEGIKRAIKEGIVKREELFITSKLWNSFHDKKNVEVALMKTLSDLNLDYVDLFYIHFPIAQKPVPIEKKYPPGFYCGDGDKWSIEEVPLLDTWRALEKLVDQGLAKSIGISNFSAQLIYDLIRGCTIKPVALQIEHHPYLTQPKLVEYVQLHDIQITGYSSFGPQSFLEMDLKRALDTPVLLEEPTVKSIADKHGKSPAQVLLRYQTQRGIAVIPRSNSPDRMAQNLSVIDFELTQDDLQAIAELDCNLRFNEPWDFSNIPVFV

SEQ ID NO: 10104 - protein, 487 aa, Sinorhizobium meliloti
MRAQPKASHFIDGEYVEDAAGTVIESIYPATGEIIARLHAATPGIVEKAIAAAKRAQPEWAAMSPTARGRILKRAAELMRQLNRELSELETLDTGKPIQETIVADPTSGADSFEFFGGVAPAALNGDYIPLGGDFAYTKRVPLGVCVGIGAWNYPQQIACWKGAPALVAGNAMVFKPSENTPLGALKIAEILIEAGLPKGLFNVIQGDRATGPLLVNHPDVAKVSLTGSVPTGKKVAGAAAAELKHVTMELGGKSPLIVFDDADLESAIGGAMLGNFYSTGQVCSNGTRVFVQRKIKEPFLARLKERTEAIVIGDPLDEATQLGPMVSAAQRDKVFSYIGKGKAEGARLVTGGGIPNNVSGEGTYIQPTVFADDTDGMTIAREEIFGPVMCVLDFDDEVEVIARANATEFGLSAGVFTADLTRAHRVADRLEAGTLWINTYNLCPVEIPFGGSKQSGFGRENSVAALNHYTELKTVYVGMGPVEAPY

SEQ ID NO: 10105 - protein, 458 aa, Magnaporthe grisea 70-15
MPCTSNVRSTRNYSASSEPDLKTTLKSVIPAKRELLKKVKAHGSKVIGEVKVENTIGGMRGLKAMVWEGSVLDADEGIRFHGRTIKDCQRELPKGKTGTEMLPEAMFWLLLTGQVPSTNQVRVLSRQLAEQAQLPAFVNKMLDDFPRDLHPMTQFAIAVSALNHTSKFAKAYADGLNKADYWEPTFDDSISLLAKLPTIAAKIYHNSYKGGGALPAEVDLEQDWSYNFAAMLGKGGKGNENFQDLLRLYLALHGDHEGGNVSAHATHLVGSALSDPFLSYSAGLQGLAGPLHGLAAQEVLRWIIQMKEAIPATYSEKDVTDYLWSTLNSGRVVPGYGHAVLRKPDPRFQALMDYAASRPEIAKDPVFQLVQLNSQVAPEVLKKHGKTKNPYPNVDSSSGVLFHHYGFHETLYYTATFGVSRGLGPLAQLIWDRALGLPIERPKSINLEGILKIVGDKS

SEQ ID NO: 10106 - protein, 309 aa, Zea mays
MTSTTTTMSSLALALALLLLSGDIGGAARQLQELPKPDLPPLPKPEVPPRPDLPPLPKPEEQPPLPKPELPVPPQPLPIPPQPLPKPELPVPPEPLPVPPQPLPVPPQPLPKPEAELPVPPEPLPVPPQPLPVPPQPLPKPELPVPPEPLPVPPQPLPVPPQPLPKPDDMPVPPEPLPKPELPVPPQPLPNPELPVPPEPLPKPELPVPPQPLLKPELPVPPEPLAKPELPMPPQPLPKPELPVPPEPLPKPELPVPPEPLPKPELPVPPEPLPKPELPPPVLPGELPPKPEPEVVPPKAEIMPSLPKP

SEQ ID NO: 10107 - protein, 182 aa, Zea mays
  misc_feature (157)..(157): Xaa can be any naturally occurring amino acid
MTTGEGAEAAAVPRVVSILSALLQRVAERNDAAAAAPPPAAAAGPPVLSAFQGLTKPAISIGGYLERIFRFAGCSPSCYVVAYIYLDRFLRRRPALAVDSFNVHRLLITSVLTAVKFVDDICYNNAYFARVGGISLVEMNYLEVDFLFGIAFYLNVXPSGFAYYSAVLHIVKTVMFKQLGGG

SEQ ID NO: 10108 - protein, 455 aa, Secale cereale
MKTLLMLAILAMATTIATANMQVNPSGQVQCPQQQPFPQPQQSSPQQPQQPFPQQSQQPFPQQPQQSSPQPQQPYPQQPFPQQPQQPYPQQPQQPFPQQPQQPYPQQPQQQFPQQPQQPVPQQPLQQFPQQPQQPFPQQPLQQFPQQPQQPFPQQPQQPVPQQSQQPFPQTQQPQQPFPQPQQPQQLFPQTQQSSPQQPQQVTSQPQQPFPQAQPPQQSSPQSQQPYPQEPQQLFPQSQQPQQPFPQPQQPQQPFPQPQPQTQQSIPQPQQPFPQPQQPFPQSQEQFPQVHQPQQPSPQQQQPSIQLSLQQQLNPCKNVLLQQCSPVALVSSLRSKIFPQSECQVMQQQCCQQLAQIPQQLQCAAIHSVVHAIIMQQEQREGVQILLPQSHQQHVGQGALAQVQGIIQPQQLSQLEVVRSLVLQNLPTMCNVYVPRQCSTIQAPFASIVTGIVGH

SEQ ID NO: 10109 - protein, 181 aa, Hordeum vulgare
MAGVGRNMVAPLLVLNLIMYIIVIGFASWNLNHFINGITNRPGVGGNGATFYFLVFAILAGVVGAASKLAGVHHVRTWRGDSLATSASSSLVAWAITALAFGLACKEIHVGGYRGWRLRVLEAFVIILAFTQLLYVLALHSGLFGNQFGNNNGGYPAEHAYGAGVGDHHNKGMGTGGVARV

SEQ ID NO: 10110 - protein, 228 aa, Bacillus sp. KSM-K16
MDQLKRMAAEAAAEYVKDGMKIGLGSGSTVFEFVRVLGEKAKEGLNIQAVAASRKTEALAKACGIHIIDFPTMEKLEVAFDGADEIAPGLMLLKGGGGSLLREKLVAAAAKRLVVLADESKLVEELGAFKLPVEIIPFGWETTAMRIEALGGVASLRQTGKSPFVSDNHNWILDCDFGNIRDPYSLHEKVKKLVGVVETGLFLDMACEAIVASKNGIHHITKGDEFNV

SEQ ID NO: 10111 - protein, 475 aa, Mesorhizobium sp. BNC1
MFKNYIAGEWVEAEGTENINPSDTSDVVGVYSRATRENVLDAISAAKAAFASWSRSGPLQRHSVLRKAADEIMARKDELGSLLAREEGKTLPEAIGEVVRASQIFDFFAGESLRLSGEIIPSVRPGIGVEITREPVGVIGIITPWNFPIAIPAWKIAPAICYGNAIVFKPADLVPASSWAIVDILQRAGLPAGVLNLVMGKGSVVGQAILESPDVAAVTFTGSTQTGKHVAAASIEHNRRFQLEMGGKNPMVVLDDADLSIAVEAATNSAFFSTGQRCTASSRLIVTEGIHDRFVEAMTQRLSSLVVDNALKPGTHIGPVVDESQLQQDLDYIEVGQKEGARLHFGGRRLERETNGFYLEPALFTEASNDMRIAREEIFGPVAAVIRVKDYEEALAVSNDTPYGLSAGIATQSLKFATHFKQNAEAGMVMVNLPTAGVDFHVPFGGRKRSSYGPREQGRYAAEFFTTVKTSYSLA

SEQ ID NO: 10112 - protein, 494 aa, Arabidopsis thaliana
MVLTKTATNDESVCTMFGSRYVRTTLPKYEIGENSIPKDAAYQIIKDELMLDGNPRLNLASFVTTWMEPECDKLIMDSINKNYVDMDEYPVTTELQNRCVNIIARLFNAPLEESETAVGVGTVGSSEAIMLAGLAFKRKWQNKRKAEGKPYDKPNIVTGANVQVCWEKFARYFEVELKEVNLSEGYYVMDPDKAAEMVDENTICVAAILGSTLNGEFEDVKRLNDLLVKKNEETGWNTPIHVDAASGGFIAPFIYPELEWDFRLPLVKSINVSGHKYGLVYAGIGWVVWRAAEDLPEELIFHINYLGADQPTFTLNFSKGSSQIIAQYYQLIRLGFEGYKNVMENCIENMVVLKEGIEKTERFNIVSKDQGVPVVAFSLKDHSFHNEFEISEMLRRFGWIVPAYTMPADAQHITVLRVVIREDFSRTLAERLVADISKVLHELDTLPSKISKKMGIEGIAENVKEKKMEKEILMEVIVGWRKFVKERKKMNGVC

SEQ ID NO: 10113 - protein, 439 aa, Helicobacter pylori J99
MNFQENLAALDLEYLWHPCSQMQEHQNFPIIPIKKAQGIYLYDFNDNAYMDLISSWWVNLFGHNNAYISQQLKNQIDNLEHVLLASFSHKPIITLSQRLCQLTGMDKCFYADNGSSCIEIALKMSYHAHFLKNQTRRKKLFLSLSNSYHGETLGALSVGDVKLYKDTYTPLLLKNLITPVPKNDSEIENSLNALKRLLDKHGEEICAFIAEPLLQCAGNMHIYSAKYLKQAVLWCKQKNIHIIFDEIATGFGRTGSMFAYEQCGIKPDFLCLSKGISGGYLPLSALLTHNEIYNQFYAPYEENKAFLHSHSYTGNALACACANATLDIFEKENVIEKNKALSEFIFSALQNALKPLIERQVVSDLRHLGMVFAFEVFLQTKERLSLAVFKKALKKGLLLRPLNNTIYLMPPYIITHEEIKKAIAGLVEAIDELKKAENK

SEQ ID NO: 10114 - protein, 157 aa, Oceanobacillus iheyensis HTE831
MSIYEYQVEKSNGEEISLSQYQDNVLLIVNTATKCGFANQFEGLEELHQKYQDEGLRVLGFPSNQFNEQEPVDDENMEEACKVNFGVTFPLFKKIDVKGPNAAPLFKYLTEEQKGLLGSNVKWNFTKFLVDRNGNVVKRFAPKDKPAKIEDDIKALL

SEQ ID NO: 10115 - protein, 380 aa, Zygosaccharomyces rouxii
MATHEEFIRTQVFGTVFEITNRYTDLNPVGMGAFGLVCSATDTLAGQPVAIKKIMKPFSTAVLAKRTYRELKLLKHLRHENLICLQDIFLSPLEDIYFVTELQGTDLHRLLQTRPLEKQFVQYFLYQILRGLKYVHSAGVIHRDLKPSNILINENCDLKICDFGLARIQDPQMTGYVSTRYYRAPEIMLTWQKYDVEVDIWSAGCIFSEMIEGKPLFPGKDHVHQFSIITDLLGSPPRDVINTICSENTLKFVTSLPHRDPVPFQERFKTVEPDAVDLLERMLVFDPKKRITAADALVHPYLAPYHDPTDEPTAEAQFDWDFNDADLPVDTWRVMMYSEILDFHKIGGGDGQIDTNAAFDDQVAAATAAPMAQHTNQTNQ

SEQ ID NO: 10116 - protein, 197 aa, Glycine max
MSASRFIKCVTVGDGAVGKTCLLISYTSNTFPTDYVPTVFDNFSANVVVDGSTVNLGLWDTAGQEDYNRLRPLSYRGADVFILAFSLISKASYENIAKKWIPELRHYAPGVPIILVGTKLDLREDKQFFIDHPGAVPITTTQGEELRKLIGAPAYIECSSKTQQNVKAVFDAAIKVVLQPPKQKKKKRKAQKACSIL

SEQ ID NO: 10117 - protein, 438 aa, Corynebacterium glutamicum ATCC 13032
MQAKEEEKRAFDNDRAHVFHSWSAQDKISPKVWAAAEGSTLYDFDGNAFIDMGSQLVSANLGHNNPRLVEAIQRQAARLTNINPAFGNDVRSDVAAKIVSMARGEFSHVFFTNGGADAIEHSIRMARLHTGRNKILSAYRSYHGATGSAMMLTGEHRRLGNPTTDPDIYHFWAPFLHHSSFFATTQEEECERALKHLEDVIAFEGAGMIAAIVLEPVVGSSGIILPPAGYLNGVRELCNKHGILFIADEVMVGFGRTGKLFAYEHAGDDFQPDMITFAKGVNAGYAPLGGIVMTQSIRDTFGSEAYSGGLTYSGHPLAVAPAKAALEIYAEGEIIPRVARLGAELIEPRLRELAEENVAIADVRGIGFFWAVEFNADATAMAAGAAEFKERGVWPMISGNRFHIAPPLTTTDDELVALLDAVEAAAQAVELTFAGALF

SEQ ID NO: 10118 - protein, 169 aa, Aspergillus nidulans FGSC A4
MASASTAGSYSNPLKKFKLVFLGEQSGAHTLSLHSQTGARFLMLYYNRTVRLQLWDTAGQERFRSLIPSYIRDSSVAVVVYDISNAKSFQNTRKWIDDVRGERGNDVIIVLVGNKTDLSDKREVTTAQGEEEAKKNGLMFIETSAKVGHNVKQLFRRIAQALPDLNDND

SEQ ID NO: 10119 - protein, 219 aa, Oryza sativa (japonica cultivar-group)
MEWAYYGSGYSSSGTPSPVGGDGDEDSYMTVSSAPPKRRAGRTKFKETRHPVYKGVRSRNPGRWVCEVREPHGKQRIWLGTFETAEMAARAQDVAAMALRGRAACLNFADSPRRLRVPPLGAGHEEIRRAAVEAAELFRPAPGQHNAAAEAAAAVAAQATAASAELFADFPCYPMDGLEFEMQGYLDMAQGMLIEPPPLAGQSTWAEEDYDCEVNLWSY

SEQ ID NO: 10120 - protein, 152 aa, Nicotiana tabacum
AWHSAGTYDVCSKTGGPFGTMRLKAEQGHGANNGIDIAIRLLEPIKEQFPILSYGDFYQLAGVVAVEVTGGPDVPFHPGREDKTEPPVEGRLPDATKGSDHLRDVFVKQMGLSDKDIVALSGGHTLGRCHKERSGFEGPWTTNPLIFDNSYF

SEQ ID NO: 10121 - protein, 125 aa, Candidatus Liberibacter africanus
MSNIESIVEKLSSLTLLQAAELSKRLEEEWGVSAAAPVAVVASAAGESAAAVAEKTEFEVFLEGFDAKKKISVIKEVRAITELGLKEAKDFVESAPKSLKTGVSKDEAEELKKKLEAAGATIILR

SEQ ID NO: 10122 - protein, 113 aa, Arabidopsis lyrata
STGKRSEREEDTDPQGSRGISDDEDGDNSRKKLRLSKDQSVILEETFKDHSTLNPKQKQALAKQLGLRARQVEVWFQNRRARTKLKQTEVDCEFLRRCCENLTEENRRLQKEV

SEQ ID NO: 10123 - protein, 161 aa, Schizosaccharomyces pombe
MNDGFADDELSLPKATVQKMVSDILPVDLTFTKEARDLLIECCVEFIHLVSSEANEICEKEAKKTIAAEHIIKALENLEFKEYIAEALEVAAEHKEQQKNREKKSSKFEQSGVSRDELLRQQEELLSRARERFKNQNIAHDNHTTTAIPVPTASETETKEN

SEQ ID NO: 10124 - protein, 591 aa, Triticum aestivum
  misc_feature (71)..(71): Xaa can be any naturally occurring amino acid
  misc_feature (91)..(91): Xaa can be any naturally occurring amino acid
MCGILAVLGCADWSQAKRARVLSCSRRLKHRGPDWSGLFQCEGNFLAQQRLSVVSPLSGDQPLYNEDRTVXVVVANGEIYNHKKIRKQFRXKHTFTTGSDCEVIIPLYEEYGENFVNMLDGVFSFVLYDTRNKTYMAARDAVGVNPLYFGRGSDGSVWIASEMKALHEDCPKFELFPPGNLYSSAAGGFRRWYNPQWFAEHVPATAYQPLVLREAFEKAVIKRLMTDVPFGVLLSGGLDSSLVASVTKRHLIETEAAKKFGTELHSFVVGLEGSPDLKAAREVADYLGTIHHEFHFTVQDGIDAIEEVIYHNETYDVTTIRASTPMFLMARKIKALGVKMVLSGEGSDELLGGYLYFHFAPNKEEFHKETCRKVKALHQYDCLRANKATSAWGLEVRVPFLDKEFIDVAMSMDPEWKLYDANLGRIEKWVLRKAFDDEKEPYLPKHILYRQKEQFSDGVGYNWIDGLKAFTEQQVTDEMMKNAAEEYPYNTPINKEAYYYRMIFERLYPQDSARETVPWGPSIACSTPAAIEWVAQWKASNDPSGRHIASHNDAAPAHAHANWNGAVANGKANGNGTANGNANANGTLVPC

SEQ ID NO: 10125 - protein, 275 aa, Brucella suis 1330
MTVPTVKLNDGNHIPQLGYGVWQISNDEAVSAVSEALKAGYRHIDTATIYGNEKGVGKAINGSGIARADIFLTTKLWNSDQGYESTLKAFDTSLKKLGTDYVDLYLIHWPMPSKDLFMETWRAFIKLKEEGRVKSIGVSNFRTADLERLIKESGVTPVLNQIELHPQFQQDELRLFHGKHDIATEAWSPLGQGKLLEDPTLKSIAEKHAKSVAQIILRWHIETGNIVIPKSITPARIKENFDIFDFTLNGTDHDAITKLDMADGRIGPNPSVFSA

SEQ ID NO: 10126 - protein, 402 aa, Gibberella zeae PH-1
MNSKNWNDRADKDLFFTILSVKNIGVISGSEWTTIGNHMRSLGYGFTNEGCRQHFQGLRRAQHKSDIPGPNGDTVRRNDPTMNPITRRPGPGRGRPRKQPPVPVPGAPGEGAPHPPLALGIDHGPPPNSAPPYPQGAQSYDPTPAGHQPTHPQQVQAAMRPGTISSAPPTPQASTPGNAVPGPGPVTYPSPNLTPALPQNPPHLHPLQHGQPGQSGQPGQQPQQPQQPQPEQQSQSDQQSQPDQQPQQPQPQQTQPQSAQQSQPGQQPNPTTQPQPQPQPDQEIQHDYQSQELPQEPPQETREATDTDAISQSQPQPIEQNHEPHAILPQEQLQPEHEDIDADGDADGEVDVDNDEPSAKRQRMGSPEPAKDDDMDDEAVLALAAHSGPTDFASDFATYGEA

SEQ ID NO: 10127 - protein, 464 aa, Xanthomonas campestris pv. campestris str. ATCC 33913
MTDGLPTALADLLAARLGPEGWLTGADARRRYGEDDSRRWALPGAVALPRDTDDVVAIVQACRAHGVPIVARGAGTGTTGAAVPFSGGVVVSMARMNRILALRPADRCAVVQPGVLNGDLQQALQPHGLFWPPDPSSAEICSVGGNLSTNAGGPRAVKYGATRDNVLGLVAVTGTGDVIHCGGAYTKNSTGYDLTHLLVGSEGTLAIIVEATLKLTPRAVAQAGVRALYRDAASAAAAVSRIMAQPTTPTMLEFMDASAIALLRRNGSDVPDAGAMLLIEADGDHDTLPYALQALHDAADGDGVLSLDIAADGSARDKLWAARRALSPALRTIKPGKINEDVVVPVSRIPELVAGVEALAVEFAVPIVAFGHAGNGNLHVNIMYDPDDADETARAQAALPRVFALVLALEGTLSGEHGIGVAKRDFMTQAFSAPTLAAMRAIKAALDPDGILNPGKVLPTSPAE

SEQ ID NO: 10128 - protein, 182 aa, Zea mays
MPAGKRHSWVKQQETGTIFTHHQKTVILDADAGNHRRKIVAFVGGLDLCGGRYDTPKHTLFRTLQTFHKEDYYNPNFAVEDARGPREPWHDLHSKIDGPAAYDVLKNFEERWLKASKRSAAKKLSKLSRSHNDSLLWINKIPDIIAIDDEIYSNDDDPERWEEQESLPKGSINHCKINNDID

SEQ ID NO: 10129 - protein, 364 aa, Buchnera aphidicola
MTKKLYKIAVLPGDGIGPEIIQEAYKIIDVLQKKFSFNVKMHEYDIGGISIDKHGTALTQETIEGCENSDAILFGSVGGSKWDHLPEIEKPEKAGLLKLRKHFNLFANIRPCKLSQHLLDISPLKNSIIKKGIDLICIRELTGGIYFGKSNKITNIDDPYAFDTEIYFRSEIKRIAKIAFQIAQSRKKKIVSIDKANVLKSSILWRDTVNKMAYKFPNVKLEHMYIDNATMELIKNPSSFDVILCSNLFGDIISDECAAIIGSIGLLPSASLNKSGFGLYEPAGGSAPNIAGKTIANPIAQILSLSMLLKYSLHLPFLSSCIDEAVHEALVKKYMTMDISKNPQNFLKTNEIGDKISDLLAKKA

SEQ ID NO: 10130 - protein, 205 aa, Cytophaga hutchinsonii
MYTKKNKQFVLMGLTYSLMMFVSSCLGINSDVKNRPSATDSMATVDKTQSIYSIKVTTLDGQPFDLSTLKGKKILIVNTASKCGYTPQYEELQQLHALHGDSVAVLGFPCNDFGGQESGSESEIGAFCTKNYGVTFQMFEKVHIKGNEQHPLYKWLTDPALNGWNKDAPTWNFCKYLINEKGELVNFFGSGVKPMSKTVLDAIRK

SEQ ID NO: 10131 - protein, 161 aa, Triticum aestivum
  misc_feature (134)..(134): Xaa can be any naturally occurring amino acid
MSDSEDHHFESKADAGASKTYPMQAGAIRKGGFLVIKNRPCKVVEVSTSKTGKHGHAKCHFVALDIFNGKKLEDIVPSSHNCDVPHVDRTEYQLIDISEDGFVSLLTDNGSTKDDLKLPTDDAILTQLKDGFAXEGKDLALTVMSAMGEEQICAVKDVGPR

SEQ ID NO: 10132 - protein, 324 aa, Hypocrea jecorina
MASPTLKLNSGYDMPQVGFGLWKVDNAVCADTVYNAIKAGYRLFDGACDYGNEKECGEGVARAIKDGLVKREDLFIVSKLWQTFHDEDKVEPITRRQLADWQIDYFDLFLVHFPAALEYVDPSVRYPPGWFYDGKSEVRWSKTTTLQQTWGAMERLVDKGLARSIGVSNYQAQSVYDALIYARIKPATLQIEHHPYLQQPDLVSLAQTEGIVVTAYSSFGPTGFMELDMPRAKSVAPLMDSPVIKALADKHRRTPAQVLLRWATQRGIAVIPKTSRPEVMAQNLDNTSFDLDSEDLAKIADMDLNIRFNKPTNYFSANKLYLFG

SEQ ID NO: 10133 - protein, 67 aa, Zea mays
LQIEIFEASKDDNREASPECSICLDGFYDGDELIRLHCGHRFHSTCLEPWVRKCSDCPYCRTNIRSQ

SEQ ID NO: 10134 - protein, 481 aa, Salmonella enterica subsp. enterica serovar Typhi Ty2
MTIWENAMQYQLLINGVLVDGEGERQSVYNPATGEVILEIAEASPVQVDAAVLAADSAFAEWGQTTPKARAECLLKLADSIEQNALEFARLESQNCGKPLHCVINDEIPAIVDVFRFFAGAARCLSGLAAGEYLEGHTSMIRRDPIGVVASIAPWNYPLMMAAWKLAPALAAGNCVVIKPSEITPLTALKLAALAKDIFPPGVLNVLFGRGQTVGDVLTGHEKVRMVSLTGSIATGEHILRHTAPAIKRTHMELGGKAPVIVFDDADLDAVAQGVRTFGFYNAGQDCTAACRIYAQRGIYDALVEKLGNAVSSLKMGAPEDKSTELGPLSSLAHLKRVTAAVEEAKALSHIRVITGGSQTEGKGYYFAPTLLADAKQEDAIVQREVFGPVVSITVFDDEDQVLRWANDSRYGLASSVWTQDVGRAHRLSARLQYGCTWINTHFMLVSEMPHGGQKQSGYGKDMSLYGLEDYTLVRHIMVKH

SEQ ID NO: 10135 - protein, 507 aa, Glycine max
  misc_feature (220)..(220): Xaa can be any naturally occurring amino acid
  misc_feature (241)..(241): Xaa can be any naturally occurring amino acid
  misc_feature (346)..(346): Xaa can be any naturally occurring amino acid
MASNDSDSQMKIVHGDAGYILEDVPHFADYIPNLPTYPNPLRSNPAYSVVKQYFVHMDDTVPPTRPVHKDSPRGVHFRRAGPRQKVYFKSDEVHACIVTCGGLCPGLNTVIREIVCGLSYMYGVNKGLGIDGGYRGFYSKNTITLTPKVVNDIHKRGGTILGTSRGGHDTGKIVDSIQDRGINQVYIIGGDGTQRGATVIYEEVRRRGLKVAIAGIPKTXDNDNSSINKSFGFNNAVEVGXHAINAAHVEAESIENGIGVVKLMGRYSGFIAMYATLASRDVDCCLIPESPFYLEGKGGLFEFIEKRLKENGHMVIVIAEGAGQDLLTESMQAMDQKDASGNKLLXDVGLWISHKIKDHFARKDKMPINLKYIDPTYMIRAIPSNASDNVYCTLLAQSAVHGAMAGYTGFTVGLVNGRQTYIPFIRINERQNKVVITDRMWARLLSSTNQPSFLSPKDLEEAKKAESPTQLLEENNCNDVGDAEKEQPPKDEQESGNHTDNGIKTQN

SEQ ID NO: 10136 - protein, 474 aa, Novosphingobium aromaticivorans DSM 12444
MRERLQQYIDGKWVDSEGGKRHEVINPTTEEPCCVITLGTQADVDKAVAAAQRAFKTFSKTTREERLALLERIVEEYKKRVPDLAAAMAEEMGAPVSFASTAQVGAGIGAFLGTMAALRNFSFVEDNGAFKVAYEPIGVVGMITPWNWPLNQIALKVAPALAAGNTMILKPSEECPTNAAIFTEILDAAGVPPGVFNLIQGDGPGVGTAISSHPGIDMVSFTGSTRAGILVAKAAADTVKRVHQELGGKSPNVVLPDADFAKYLPSTASGPLVNSGQSCISPTRILVPREREAEAAAFVSAMYSATPVGDPMQEGAHIGPVVNKAQFDKIRGLIQSAIDEGAKLETGGPDLPANVNRGYYIKPTVFSGVTPDMRIAQEEIFGPVATIMAYDSLEEAIEIANDTAYGLSACITGDPAKAAEVAPELRAGMVAINNWGPTPGAPFGGYKQSGNGREGGLYGLKDFMEMKAISGLPA

SEQ ID NO: 10137 - protein, 181 aa, Glycine max
MAESDNESGGHTGNASGSNELSGCREQDRFLPIANVSRIMKKALPANAKISKEAKETVQECVSEFISFITGEASDKCQKEKRKTINGDDLLWAMTTLGFEDYVDPLKIYLHKYREMEGEKTAMMGRPHERDEGYGHGHGHATPMMTMMMGHQPQHQHQHQHQHQHQGHVYGSGSASSARTR

SEQ ID NO: 10138 - protein, 114 aa, Glycine max
  misc_feature (17)..(17): Xaa can be any naturally occurring amino acid
  misc_feature (44)..(44): Xaa can be any naturally occurring amino acid
  misc_feature (75)..(75): Xaa can be any naturally occurring amino acid
  misc_feature (86)..(86): Xaa can be any naturally occurring amino acid
  misc_feature (99)..(99): Xaa can be any naturally occurring amino acid
PALTARHLTEEQWEDYXYISELAIQGDYETRLMDTEEMKERSVXQTTQGTECMEQLAAMEGMSEWLRKAEGAAEXARRYDGDLSIXTCGTDARGIDQAXDMNAIHRLEEKPSVR

SEQ ID NO: 10139 - protein, 214 aa, Triticum aestivum
HGAINARAGYGEMVTCSKSLSADLFDAVLGGLGQFGVIVRARIALEPAPTRARWARLVYTDFAAFSADQERLAAPGPDGAFGPMSYLEGAVYVNHSLAAGLRNSGGFFTDAHVARIVAVAAARNATTVYVIRGNLQIQQTHGPVSGEQETPLSGLETLRPQGGASGFGGKPFYPSNFLDTGCPGKKGGLLKKNGCWWGSPEPLGSKGFWAPPSP

SEQ ID NO: 10140 - protein, 268 aa, Medicago truncatula
  misc_feature (192)..(192): Xaa can be any naturally occurring amino acid
  misc_feature (199)..(199): Xaa can be any naturally occurring amino acid
MAISHNTLAFTFGMLGNVISFLVFLAPISTFYRIYKKKSTEGFQSLPYLVALFSSMLWLYYALLKKDAFLLITINSFGCVVETIYIILYIIYAPRDARNLTFKLLSAMNVGSFALILIVTNYAVHGPLRVQVLGWVCVSLSVSVFAAPLSIVAQVVRTKSVEFMPFNLSFTLTLSATMWFGYGFFLKDICIXLPNVLGXVLGLLQMLLYAIYRNGGEKAMKKEKKAPIEPPKSIVIETQLEKIEQEKKNKDDDNEEKDKSEEPIGCGV

SEQ ID NO: 10141 - protein, 123 aa, Brassica napus
  misc_feature (11)..(11): Xaa can be any naturally occurring amino acid
  misc_feature (20)..(20): Xaa can be any naturally occurring amino acid
  misc_feature (25)..(25): Xaa can be any naturally occurring amino acid
  misc_feature (29)..(29): Xaa can be any naturally occurring amino acid
  misc_feature (32)..(32): Xaa can be any naturally occurring amino acid
  misc_feature (35)..(38): Xaa can be any naturally occurring amino acid
  misc_feature (41)..(43): Xaa can be any naturally occurring amino acid
  misc_feature (46)..(46): Xaa can be any naturally occurring amino acid
  misc_feature (49)..(49): Xaa can be any naturally occurring amino acid
  misc_feature (53)..(55): Xaa can be any naturally occurring amino acid
  misc_feature (59)..(59): Xaa can be any naturally occurring amino acid
  misc_feature (61)..(61): Xaa can be any naturally occurring amino acid
  misc_feature (71)..(71): Xaa can be any naturally occurring amino acid
  misc_feature (74)..(74): Xaa can be any naturally occurring amino acid
  misc_feature (76)..(76): Xaa can be any naturally occurring amino acid
  misc_feature (78)..(78): Xaa can be any naturally occurring amino acid
  misc_feature (85)..(85): Xaa can be any naturally occurring amino acid
  misc_feature (87)..(87): Xaa can be any naturally occurring amino acid
  misc_feature (89)..(89): Xaa can be any naturally occurring amino acid
  misc_feature (97)..(101): Xaa can be any naturally occurring amino acid
  misc_feature (107)..(107): Xaa can be any naturally occurring amino acid
  misc_feature (109)..(111): Xaa can be any naturally occurring amino acid
MAYSMLSSAGXVTSPAQATXGAPFXGLKXSSXFPXXXXGQXXXTFXVSXGRRXXXVEVXPXGGKKKFENLXYLXDXTXVNGVKEXYXLXPKGDSCGXXXXXHGFFYXEXXXPPQGGELTPKPP

SEQ ID NO: 10142 - protein, 116 aa, Oryza sativa
MARAQLVLVALVAALLLAAPHAAVAITCGQVNSAVGPCLTYARGGAGPSAACCSGVRSLFAAASTTADRRTACNCLKNAARGIKGLNAGNAASIPSKCGVSVPYTISASIDCSRVS

SEQ ID NO: 10143 - protein, 509 aa, Candida albicans SC5314
MITKRLYSTIESSKKVLGTLSNPNLVKTEAYINGKWVPSSSGETFTVTNPALYPNPESELATMQSMSEEDFNSAIESADIAFNKFKKTTGRYRSELLLKLYNLMISNKDDLAKLVVLENGKPYADALGEVNYAASFFQWFSEEAPRIYGDIIPSANGTNRILTFKQPIGVCGILTPWNFPLAMITRKLGAAIATGCTAVIKPASETPLSATALAFLAEEAGFPPGVINVLPSADASGSGKYLTEHPLIKKVSFTGSTPVGKILMNQSASTLKKLSFELGGNAPFIAFDDVDVDKAVNGAIASKFRSSGQTCVCANRIFVHEKIYDEFAKKFVDKLKNETVLGNPLASGVTHGPVIHDRSMKKVRQHIEDAVDKGATILLGGSKRPDLGENFHDLTVLGDVTTEMLITQEETFGPVAPLIKFKTDDEVIKMANDTTVGLAGYFYANDVAKVFKIAEALNVGMLGVNTGAISEAALPFGGVGESGFGREGSKFGVEDYLVIKSAVLGGIEN

SEQ ID NO: 10144 - protein, 154 aa, Quercus suber
MALSLFGGRRSNVFDPFSLDIWDPFEGFSAVASVPPSARETTAFATARIDWKETPEAHIFKADLPGLKKEEVKVEVEDGNVLQISGERSKEHEEKNDKWHRVERSCGKFMRRFRLPENAKVDQVKANMENGVLTVMVPKEEQKKPAVKAIEISG

SEQ ID NO: 10145 - protein, 437 aa, Sulfolobus solfataricus P2
MNIRDKWIEEEKSLEYEWSEDPRWRGIKRNYKPLDVVKLRGSIRIEYSLAKLASHKLWNLLNTEPYVATFGALTGSQAVEMAKAGLKAIYVSGWQVAADNNLSNQTYPDLSLYPSNSVPNLVKRLNNALIRADQISWSEGKHDIDYLLPIVADAEAGFGGPIHAFELTKALIEAGAAGVHFEDQLAAEKKCGHLGGKVLIPISAFIRVLNAARLASDVLGVPTILIARTDALNAKYLSNDVDETDNQFLTGKRTSEGYYEIKGGIEYAIARGLAYAPYADLLWFETSKPDLEEARQFAEAIHTHYPGKMLAYNLSPSFNWKKFMDDSKISKFMNELGEMGYKFQFITLAGWHLINYHTFKLARAYRNEGMPAYVRLQELEFQAQAEGYTAVSHQREVGTDYFDLVLTIASGGEASTTAMEGSTEAEQFVEAKQKVLK

SEQ ID NO: 10146 - protein, 81 aa, Glycine max
  misc_feature (45)..(45): Xaa can be any naturally occurring amino acid
FIAVEWLLEYWLLTRAFDDHRHPYLPKHFFSCLLPHFSDGFDSGXIDVLSAHADIRVSVVLMLIAANIFPFYSPSTCAAFY

SEQ ID NO: 10147 - protein, 489 aa, Burkholderia cepacia R1808
MTSYDQSPVRHLLEAGRLERFFIDGDWVAPDGGGRFAVVCPSTEDTLCEIPLGSARDADRAVQAARHAFAGWAATSPQERAALLDRVHRLLLERAERFATALALEMGAPLGYARSAHVPLAAEHIRVARDNLTDYPFRKQRGTTAIVREPIGVCALITPWNWPIYQITAKVGPALAAGCTVVLKPSELSPLSALLFAEVLADAGVPAGVFNLVSGTGAEVGAALSSHPLVDMVSITGSTRAGVLVAQAAAPTVKRVAQELGGKSPNVVLPDADLERAIAPGVAAAFRNMGQSCSAPTRMIVPRAALGAVEALAVAAAQRCVVGDPFADATTHGPLANRAQFERVAQMIDVGVAEGAKLIAGGPGRPAGCERGFYARPTIFSDVRTGMAIAQQEIFGPVLAILPYDSIDEAVSIANDTVYGLGAHVQGTDRERTRAVAARIRAGQVHLNYPAWDPQAPFGGYKQSGNGREYGVEGMEEYMEVKSILGYYD

SEQ ID NO: 10148 - protein, 812 aa, Zea mays
MAQILLHGTLHATIFEAESLSNPHRATGGAPKFIRKPDYWIEDTVGIGKGTTKIYATVDLEKARVGRTRMVSNEPVNPRWYESFHIYCAHMAADVVFTVKIDNPIGASLIGRAYLPVEDILGGDEIDKWLEICDEKREPIGDSKIHVKLQYFDVGKDRNWARGVRSTKYPGVPYTFFSQRQGCKVTLYQDAHVPDNFVPRIPLADGKNYEPHRCWEDIFDAISKAQHLIYITGWSVYTEITLVRDTSRPKPGGDVTLGELLKRKASEGVRVLMLVWDDRTSVGLLKKDGLMATHDEETANYFHGTDVNCVLCPRNPDDSGSFVQDLQISTMFTHHQKIVVVDHELPNEGSQQRRIVSFVGGIDLCDGRYDTQYHSLFRTLDTVHHDDFHQPNFEGGSIKKGGPREPWHDIHSRLEGPIAWDVLYNFEQRWRKQGGKDLLVRLRDLSDIIIPPSPVMFPEDRDTWNVQLFRSIDGGAAFGFPETPDEAARAGLVSGKDQIIDRSIQDAYINAIRRAKNFIYIENQYFLGSSYDWKPEGIKPEDIDCLHLIPKELSLKIVSKIEAGERFTVYVVVPMWPEGVPESASVQAILDWQRRTMDMMYTDITQALEANGIQTNPKDYLTFFCLGNREVKQEGEYQPEEHPEPGTDYIRAQEARRFMIYVHAKMMIVDDEYIIIGSANINQRSMDGARDSEIAMGAYQPYHLATRQPARGQIHGFRMSLWYEHLGMLDDVFQRPESVECVQKVNKIAEKYWDLYSSDDLEQDLPGHLLSYPIGVTADGTVTELPGMENFPDTRARVLGNKSDYLPPILTT

SEQ ID NO: 10149 - protein, 153 aa, Glycine max
ISCPDDTTANRAGAGMVVPFTDLKSMVGFHTRKTSHDITCIASNGRRVQCMQVWPPVDKKKVETLSYLPDLDDAQLAKEVQYLLRKGWIPCLEFESQHGFPYREHNRSPRYYDGRYWTMWKLPMFDCTDACQVLKELQEAKTPYPIDLIRIIG

SEQ ID NO: 10150 - protein, 241 aa, Tradescantia virginiana
  misc_feature (228)..(228): Xaa can be any naturally occurring amino acid
VQLKRMENKINRQVTFSKRRGGLLKKAHEISILCDAEIALIIFSTKGKLYEYATNSKMDNILERYERYSYAEKALTSSDPDIQGNWCQEYAKLKSKVEALCKSQRHLMGEQLETLNLKELQQLEQQLEGSLKHVRSRKTQVMLDSISELQRKEKSLEEQNKNLEKEILEKQKIKALAQQAHWEHQNQPAPRGSPPRPFVIAESHPTLNIGHFQGRTNAVEAEENQQPXMRICSSLLPPWML

SEQ ID NO: 10151 - protein, 273 aa, Triticum aestivum
  misc_feature (138)..(138): Xaa can be any naturally occurring amino acid
  misc_feature (244)..(245): Xaa can be any naturally occurring amino acid
MAHAAAAAAVPLRRPLLLFLRPARLLSSVAPRSSSVRAYTRALRPLAPLPSDDEDPDDGDGAPSRNEKKREARRAVKWGMELAKFSPPQIKRIVRAASLEREVVDALMLVKKFGPDVREGRRRQYNYIGSLLRGAQPXELMEDLIHSLKNGDESRIQALLSEVADKSMPIEDEEVGELPHEEEGEENQEYMEIADRWFEGLVCQDIPVTNEVYAIHNVEFDRQELRKLVRIVQEVQKSTRDKDXXEKDLIESFPGPKKPLIMFLRSLAKKTLE

SEQ ID NO: 10152 - protein, 276 aa, Burkholderia cepacia R1808
MDARSTAFFEQPDQLAATGWPAFDGNARPRASELFAATDALADADPNWTLSALESRPGAGLTRRAFVSQTLAFLAASVGITAACATYVAMLGLPVGDSIVCMLAGLFTLSGLLGANALGRRVSKWLSLPLMGLFSVLQGVAVGPIVHGYWMQAGGALIVAGALATTAIAFAAIGVYAFGTRHARRDFTALGGFLFAGAIVALSLSIATFYVSAPGLEFALAGVGAMVFTGYLLHDLSRLWTAGQDDPVIAALGLYINVLNVFLSLLRLFEFFVSGD

SEQ ID NO: 10153 - protein, 222 aa, Tradescantia virginiana
  misc_feature (11)..(11): Xaa can be any naturally occurring amino acid
  misc_feature (218)..(218): Xaa can be any naturally occurring amino acid
  misc_feature (221)..(221): Xaa can be any naturally occurring amino acid
GLVKKAHEISXLCDAEVALIIFSTKGKLYEYATDSKMENILERYERYSYAEKALTSSDPELQGNWCQEYVKLKAKVEALHKSQRHLMGEQLEALDLKELQQLEHQLEGSLRLVRSRKTQMMLDSISELQRKEKSLEEQNKNLEKEILEKQKEKALAHQAHWEQQNQPLQSTNSPPRPFVIAETHPTLNIGNFQGRTNTVHAEESLQRQMRISSSLLPXWMXH

SEQ ID NO: 10154 - protein, 92 aa, Triticum aestivum
  misc_feature (11)..(11): Xaa can be any naturally occurring amino acid
  misc_feature (22)..(22): Xaa can be any naturally occurring amino acid
  misc_feature (28)..(28): Xaa can be any naturally occurring amino acid
  misc_feature (31)..(31): Xaa can be any naturally occurring amino acid
  misc_feature (35)..(36): Xaa can be any naturally occurring amino acid
  misc_feature (39)..(39): Xaa can be any naturally occurring amino acid
  misc_feature (42)..(42): Xaa can be any naturally occurring amino acid
  misc_feature (45)..(45): Xaa can be any naturally occurring amino acid
  misc_feature (54)..(54): Xaa can be any naturally occurring amino acid
  misc_feature (56)..(56): Xaa can be any naturally occurring amino acid
  misc_feature (59)..(59): Xaa can be any naturally occurring amino acid
  misc_feature (64)..(64): Xaa can be any naturally occurring amino acid
  misc_feature (68)..(68): Xaa can be any naturally occurring amino acid
  misc_feature (71)..(71): Xaa can be any naturally occurring amino acid
  misc_feature (73)..(76): Xaa can be any naturally occurring amino acid
  misc_feature (80)..(80): Xaa can be any naturally occurring amino acid
  misc_feature (82)..(82): Xaa can be any naturally occurring amino acid
  misc_feature (86)..(86): Xaa can be any naturally occurring amino acid
  misc_feature (88)..(88): Xaa can be any naturally occurring amino acid
MGTVKWFNVTXGFGFISPEDGXEDLFVXQSXIKAXXYRXLNXNDXVEFKVITGXDXRRXNATDXTAPXRGXLXXXXRPIXKXGDRXGXGGDR

SEQ ID NO: 10155 - protein, 203 aa, Zea mays
MEDEEHEVFGQEIPVDGEDVDMAAGDDATKLQELDDMKRRLKEMEEEAAALREMQAKVAKEMQGVDPNATTSENKEEMDSRSVFIGNVDYACTPEEVQQHFNSCGTVNRVTILTDKFGQPKGFAYVEFVEVEAVQEAIKLNESELHGRQLKVAPKRTNVPGMKQPRGRGFNPYHGHPYMRPYGYSPYGYGRFPRFRRPRRPYF

SEQ ID NO: 10156 - protein, 176 aa, Manihot esculenta
MASSMLSTATVASINRVSPAQATMVAPFTGLKSTPVFPTTRKTNSDITSITSNGGKVQCMKVWPTLGMKKFETLSYLPPLTREQLAKPSCIGPCLEFELEHGLVYREHARVPGYYDGRYWTMWKLPMFGCTDAAQVLKELDELIKHHPDGYARIIGFDNVRQVQCISFLAYKPPGA

SEQ ID NO: 10157 - protein, 208 aa, Bacillus halodurans C-125
MKSNSQDAASIVWHPQLVTKQARNQSNGHKSRMIWFTGLSGSGKSTIANAVQAELFKRGIQVYVLDGDNLRHGLNADLSFSMEDRKENIRRTAEVGKLFVDAGLVVLAALISPVEEERQRARSRFAEDEFLEVYVSCTLQECEKRDPKGLYKKARKGEIPQFTGIHQPYEEPKNPDICIDTTDRTVEQSVQIILPIILEKIAWKEGEQ

SEQ ID NO: 10158 - protein, 185 aa, Triticum aestivum
MAPTVMASSATSVAPFQGLKSTAGLPVSRRSNGASLGSVSNGGRIRCMQVWPIEGIKKFETLSYLPPLSREALLKQVDYLIRSKWVPCLEFSKVGFIFREHNASPGYYDGRYWTMWKLPMFGCTDATQVINEVEEVKKESPDAYVRIIGFHNMRQVQCVSFIAFNPPGCEESRQGLNSSLPTGHI

SEQ ID NO: 10159 - protein, 512 aa, Oceanobacillus iheyensis HTE831
MLNDKAIRQSKIIYWSSGIVSICGIIFEVLFGALGSYILGDGVKQYTLTISLFLTGMGIGASLSEKFMRNLIIKFVWIEFCVALIGGFSSFIMFGITAFAPAGTDAFYLYSITLIIGALTGVELPILIRKANEIGVTLNKSTARVLFSDYAGGLIGGVLFVFLFRPYFGMVKTAFLVGLINLTVALIVLWLFRKEIRHFIVHAVIGGVIGVLLIAGLFFGEEMAFNFEQKLYQDPIIHMEESSYQKITVTQDEKDIRLYLDGSLQFSSVDEHRYHEVLVHPAMANVETPENVLILGGGDGIAAKEVLKYQDVKQVTLVDLDPAVVELANENRHLLEINEGALMDEKVEVKNMDAFQFLEDTSEWYDVILVDLPDPNNESLNKLYTKEFYSLVRNHLKPEGTLMVQATSPVFAREVYWTISETISSTNLNTENLHVDVPSFGNWGFVMASREEIDLDIMEIPVSTRFLTDDMMPALTAFGKDEDQQIPNFELKANTLIDPHLIQIYEKAWENY

SEQ ID NO: 10160 - protein, 341 aa, Streptomyces coelicolor A3(2)
MRIGVLTSGGDCPGLNAVIRSVVHRAVVDHGDEVIGFRDGWKGLLECDYLKLDLDAVGGILARGGTILGSSRVRPEHLRDGVERARGHVEELGLDAIIPIGGEGTLKAARLLSDNGLPIVGVPKTIDNDIAVTDVTFGFDTAVTVATEALDRLKTTAESHQRVLIVEVMGRHTGWIALHSGMAAGAHAVVVPERPFDIDELTAKVGERFSAGKRFAIVVAAEGAKPKAGTMDFDEGGKDVYGHERFAGIARQLSIELEERLGKEARPVILGHVQRGGTPTAYDRVLATRFGWHAVEAVHRGEFGKMTALRGTDIEMVSLADAVESLKTVPDARYAEAECVL

SEQ ID NO: 10161 - protein, 174 aa, Triticum aestivum
MAPAVMASSATTVAPFQGLKSTAGLPVSRRSRGSLGSVSNGGRIRCMQVWPIEGIKKFETLSYLPPLSTEALLKQVDYLIRSKWVPCLEFSKVGFVFREHNSSPGYYDGRYWTMWKLPMFGCTDATQVLNEVEEVKKEYPDAYVRVIGFDNLRQVQCVSFIAFRPPGCEESGKA

SEQ ID NO: 10162 - protein, 110 aa, Glycine max
  misc_feature (86)..(86): Xaa can be any naturally occurring amino acid
MASSMIWDRAVTTVNRAGAGMVAPFTGLKSMAGFPTRKTNNDITYIASNGGRVQCMHVWPPIGKRKSRLFSTWQNLVNPNLPKEVXFLLRKGWIPCLEFELEHGFLYRGP

SEQ ID NO: 10163 - protein, 173 aa, Lemna gibba
MMVSTAAVARVRPAQTNMVGAFNGCRSSVAFPATRKANNDLSTLPSSGGRVSCMQVWPPEGLKKFETLSYLPPLSVEDLAKEVDYLLRNDWVPCIEFSKEGFVYRENHASPGYYDGRYWTMWKLPMFGCTDASQVIAEVEEAKKAYPEYFVRIIGFDNKRQVQCISFIAYKPT

SEQ ID NO: 10164 - protein, 426 aa, Streptomyces coelicolor A3(2)
MAEARTQAAEDLARRWDTEPRWQGIERTYSAQDVVRLSGSVREEHTLARRGAERLWRQLHERDYVHALGALTGGQAVQQIKAGLQAIYLSGWQVAADANQAGHTYPDQSLYPANSVPQVVRRINNALLRADQIATSEGDNSTDWLAPIVADAEAGFGGPLNAFELAKAMIAAGAAGIHYEDQLASEKKCGHLGGKVLVPTSQHIRTLNAARLAADIADTPTVIIARTDALAANLLTSDVDERDAQFVTGERTPEGFYRVRNGMAPVIARGLAYAPYADLIWVETGTPDLEQAREFAEAIHAEHPDQMLAYNCSPSFNWKAALDDDQIAKFQRELGAMGYKFQFITLAGFHSLNHGMFDLARGYAEHGMTAYVDLQEREFAAQAHGFTAVKHQREVGTGYFDLVSTAVNPASSTTALAGSTEEEQFH

SEQ ID NO: 10165 - protein, 177 aa, Lemna gibba
MASSMMASTAAVARAGPAQTNMVAPFNACRSSVAFPATRKANNDLSTLPSNGGRVSCMQVWPPEGLKKFETLSYLPPLSVEDLAKEVDYLLRNDWVPCIEFSKEGFVYRENHASPGYYDGRYWTMWKLPMFGCTDASQVIAEVEEAKKAYPEYFVRIIGFDNKRQVQCISFIAYKPT

SEQ ID NO: 10166 - protein, 316 aa, Triticum aestivum
GGPRPAGLFAARGAFALPQSYSAAHLVFNDDIQGTAAVVLAGLMAGLKFAGGTLADHTFLFFGAGEAGTGIAELVALEISMQSKTSQEEARKNIWLVDSKGLIVSSRKDSIQPFKKLYAHEHEPVKDLLSAIKDIKPTALIGSAGVGQSFTKEVIEAMSSINKRPIILALSNPTSKSECTAEQAYSWSQGRAIFGSGSPFDPVKYNDKLFVPAQANNAYIFPGFGLGVVTSGAIRVKDDMVLAAPKTSDEHVTAPPPDTGRSSPPAACTAPSSAHTAAPVAPHALALGLAPPLPRPNVAVTHAAGRWYRPFCRAYR

SEQ ID NO: 10167 - protein, 604 aa, Glycine max
MWKLVRYAAASNLARSRRFSAAIPGPCIVHKRGADILHDPWFNKDTGFPLTERDRLGLRGLLPPRVISFEQQYDRFMNSFRSLENNTQGQPDKVVSLAKWRILNRLHDRNETLYYRVLIDNIKEFAPIIYTPTVGLVCQNYSGLFRRPRGMYFSAKDKGEMMSMIYNWPAHEVDMIVLTDGSRILGLGDLGVQGIGIPIGKLDVYVAAAGINPQRILPVMLDVGTNNQKLLEDRLYLGLRQPRLEGEEYLSIIDEFMEAVHARWPKAIVQFEDFQMKWAFETLKRYQKKFCMFNDDIQGTAGVALAGLLGTVRAQGRPLTDFVNQKIVVVGAGSAGLGVLKMAIQAVAKISGCSELAAKSQFYLIDKDGLVTTERNNLDPAAAPFAKNPRDIEGLTEGASIIEVVKKIRPHVLLGLSGVGGIFNEEVLKAMRESVSTKPAIFAMSNPTMNAECTAIDAFKHAGENMVFASGSPFENVDLGNGIVGHVNQANNMYLFPGIGLGTLLSGAHLITDGMLQAAAECLASYMAEEDILKGILYPSVDSIRDVTAEVGAAVLRAAVEEELAEGNGDVGPKELSHMSKDETVEYVRSNMWYPVYSPLVHEK

SEQ ID NO: 10168 - protein, 112 aa, Zea mays
  misc_feature (17)..(17): Xaa can be any naturally occurring amino acid
  misc_feature (64)..(64): Xaa can be any naturally occurring amino acid
  misc_feature (79)..(79): Xaa can be any naturally occurring amino acid
  misc_feature (93)..(93): Xaa can be any naturally occurring amino acid
HEMNCSTAAVRHLASSXVDVFTALSGGGGALYGPLHGGANEALLKMLNERGSMENISRFHCMIXNRYRKIVVFGLRVFXNYYPRAYFIKDIVXMRCFSIFGRDPLIVVGLCP

SEQ ID NO: 10169 - protein, 220 aa, Zea mays
APAFCELSLPLTKEEAAFSPSHPAMQRHVASGRPSGTDGSDFSYRMVVESRYQRVAEGRSRLARLILVQALHLVAGGLLLLLSLSKGAAVNKFAVLSMAAGFLAIVVGELGRMRTMAVLLRLYTSLSSIAVAFSVTCIIRSELFLKVMKQNTEAITSYEMLDAVRVALGILLQMVVIATTTRLLQNMSPPKSASRLLGHFSFVSSSKGYKLRVKNIGQVR

SEQ ID NO: 10170 - protein, 235 aa, Tradescantia virginiana
VQLKRMENKINRQVTFSKRRTGLLKKAHEISVLCDAEVGLIIFSTKGKLYEYSTDNSMAKILERYDRYATAERAVLEANLNLEVGSHYEYRKIKAKVDALQKSQRHLMGEQLDTMTNKELQQLEQQLETALKHIRSRKNQMMLESVAALQKKEKALREQKSILEKKLIEKQKDMEISQIHQYQAHEDNTSPTSLVLTNSLPTTLNTNGCITHAIEEEHAPTLPHTNNNNLPPWMV

SEQ ID NO: 10171 - protein, 318 aa, Zea mays
MEAEAAAKRTRDSGEDAAAAGISAVIPGWFSEISPMWPGEAHSLKVDKVLFQGKSDYQSVMVFQSSTYGKVLVLDGVIQVTERDECAYQEMITHLPLCSIKDPKKVLVIGGGDGGVLREVSRHSSVEQIDICEIDKMVVDVSKQFFPHLAVGFEDPRVSLHIGDGVAFLKNAPEGTYDAVIVDSSDPIGPAQELFEKPFFQLVARALRPGGVVCTQAESIWLHMHIIEDIVVNCRQVFKGSVNYAWTTVPTYPSGVIGFMLCSTEGPAVDFQHPVFNIEEDEHPMKSKGPLKFYNSEIHTASFCLPSFAKRVIESKAN

SEQ ID NO: 10172 - protein, 455 aa, Bacillus sphaericus
MKQVLTELQEKDLQHVWHPCSQMKDYEAFPPIVIKKGEGVWLYDEQNQRYLDAVSSWWVNLFGHANPRISQALSEQAFTLEHTIFANFSHEPAIKLAQKLVALTPQSLQKVFFADNGSSAIEVALKMSFQYHMQTGKTQKKRFLALTDAYHGETLGALSVGGVDLYNEVYQPLLLDTVRAQGPDCFRCPFKHHPDSCHAQCISFVEDQLRMHHKEITAVIIEPLIQAAAGMKMYPAIYLRRLRELCTQYDVHLIADEIAVGFGRTGTLFACEQANISPDFMCLSKGLTGGYLPLSVVMTTNDVYQAFYDDYATMKAFLHSHSYTGNTLACRVALEVLAIFEEEQYIDVVQDKGERMRKLALEAFSDLPFVGEYRQVGFVGAIELVANRDTKEPLPSEERIGYQIYKRALAKGLLIRPLGNVLYFMPPYIITDDEMQFMIQTTKDTIVQFFEEREG

SEQ ID NO: 10173 - protein, 505 aa, Gossypium arboreum
MDLLFLEKALLGLFVAVVLAITISKLRGKRFKLPPGPLPVPVFGNWLQVGDDLNHRNLTDLAKKFGDIFLLRMGQRNLVVVSSPELAKEVLHTQGVEFGSRTRNVVFDIFTGKGQDMVFTVYGEHWRKMRRIMTVPFFTNKVVQQYRFGWEDEAARVVEDVRKNPEAATNGIVLRRRLQLMMYNNMYRIMFDTRFESEDDPLFVRLKALNGERSRLAQSFEYNYGDFIPILRPFLRGYLKICKEVKDRRLQLFKDHFVEERKKLGSTKSMNNDGLKCAIDHILDAQQKGEINEDNVLYIVENINVAAIETTLWSIEWGIAELVNHPEIQKKLRHELDTVLGPGNQITEPDTHKLPYLQAVIKETLRLRMAIPLLVPHMNLHDAKLGGYDIPAESKILVNAWWLANNPANWKNPEEFRPERFFEEEAKVEANGNDFRYLPFGVGRRSCPGIILALPILGITLGRLVQNFELLPPPGQSQIDTTEKGGQFSLHILKHSTIVAKPRQF

SEQ ID NO: 10174 - protein, 226 aa, Paeonia suffruticosa
SQVTFSKRRGGLLKKAHEISVLCDAEVALIVFSTKGKLFEYSTDSSMEKILDRYEQYSIAERQLVEEPGSQGNWSLEYSKLRAKIELLQRNQRRFMGEDLDSLSPKDLQNMEQQLDVSLKNIRSRKNQLMYESISELQKKERAIQEQNNLLAKQIKEKEKTMAQQAQWEQQIHHGPNASAYLLSPHELTTLNMGGNYQGEPTEMRRNELDLTLEPIYTCHLGCFGA

SEQ ID NO: 10175 - protein, 239 aa, Triticum aestivum
MESSKIDASDKHLESYLTLGLTVSQSKKGSTKFPKVLSLLATYLGRSVQKNEELLGSNGIKESTTIFHGQKVPDLSIQLYAERIFKYAECSPSCFVLALVYMERYLQQPNVYMTLFSVHRLLITSVVVAAKFTDDAFFNNAFYARVGGISTIEMNRLELDLLFNLDFRLKVNLGTFGSYCLQLEKHAPVSPERLPVQVHCVSVKGSKDLGYSSSGSADEFCQSKLVRQSYSSQALQGCS

SEQ ID NO: 10176 - protein, 184 aa, Manihot esculenta
MATSMLSTATVASINRASPAQASMVAPFTGLKSTSAFTATTKTSADITSLASNGGRVQCMQVWPTRGKKKFETLSYLPPLSREQLASEIDYLLRSGWIPCLEFELEHGFVYRAHGSLPGYYDGRYWTMWKLPMFGCTDSSQVLKELDELIKAHPDGFARIIGFDNVRQVQCISFIAYKPPGTDY

SEQ ID NO: 10177 - protein, 184 aa, Manihot esculenta
MATSMLSTATVASINRASPAQASMVAPFTGLKSTSAFPATTKTSADITSLASNGGRVQCMQVWPTRGKKKFETLSYLPPLSREQLASEIDYLLRSGWIPCLEFELEHGFVYRAHGSLPGYYDGRYWTMWKLPMFGCTDSSQVLKELDELIKAHPDGFARIIGFDNVRQVQCISFIAYKPPGTDY

SEQ ID NO: 10178 - protein, 505 aa, Gossypium arboreum
MDLLFLEKVLISLFFTIIFAILVSKLRGKRFKLPPGPLPIPVFGNWLQVGDDLNHRNLTDLAKKFGDIFLLRMGQRNLVVISSPELAKEVLHTQGVEFGSRTRNVVFDIFTGKGQDMVFTVYGEHWRKMRRIMTVPFFTNKVVQQYRHGWEDEAASVVEDVKKNPEAATNGIVLRRKLQLMMYNNMYRIMFDRRFESEDDPLFVKLKALNGERSRLAQSFEYNYGDFIPILRPFLRGYLKLCKEVKEIRLQLFRDQFLEERKKLATTKRIDNNALKCAIDHILDAQRKGEINEDNVLYIVENINVAAIETTLWSIEWGIAELVNHPEIQQKLRNEIDTVLGPGVQVTEPDTHKLPYLQAVIKETLRLRMAIPLLVPHMNLHDAKLGGYDIPAESKILVNAWWLANNPAHWKNPEEFRPERFFEEESKVEANGNDFRYLPFGVGRRSCPGIILALPILGITLGRLVQNFELLPPKGQSKLDTSEKGGQFSLHILKHSTIVAKPRVF

SEQ ID NO: 10179 - protein, 355 aa, Craterostigma plantagineum
MEKYELVKDIGSGNFGVARLMRNKETKELVAMKYIERGHKIDENVAREIINHRSLRHPNIIRFKEVVLTPTHLAIVMEYAAGGELFERICNAGRFSEDEARYFFQQLICGVHYCHALQICHRDLKLENTLLDGSPAPRLKSCDFGYSKSSLLHSRPKSTVGTPAYIAPEVLSRREYDGKLADVWSCGVTLYVMLVGAYPFEDQEDPFFFRKTILWIMAVQYKIPDYVRISQSCRHLLSRIFVANPLRRITIKEIKSHLWFLKNLPRELTEVAQAAYFRRDNPTYSLQSEEEIMKIVEEAKVPPQASRSIGGFGWGTEEDEENVEEEEEGESEGEEDEYEKQVKAAHASGEVPPLT

SEQ ID NO: 10180 - protein, 406 aa, Oceanobacillus iheyensis HTE831
MSNTTVLLDKKTTEIIKATVPVLKEHGEAITKHFYKILLENNPELKNVFNQTNQRKGAQSKALANTVYAAAANIEKLEEILPHVKQIAHKHVSLNIKPEQYPIVGKYLLIAIKEVLGDAATDEIIEAWEKAYFVIADIFISVEKEMYNEKKNQIGGWTGFRDFKVIKKVKESKEITSFYLKPDDNLPITTFIPGQYITIKAQIESEAYVHLRQYSLSTAPGKDYYRISVKREASNQPIGVVSNYLHTSVEVGSVLPISAPAGDFILDERDHRPLVLISGGVGLTPIMSMLESVVEHQPNRNVVFIHAAKSIDHQAMRKRVSEIAKSKEQVKQYVVYSNPTNRTDGDKQGYIDYEWLKEVIPTKDAAFYLCGPKPFMSAINNDLQNMNIAQNDIHMELFGPLEPIAK

SEQ ID NO: 10181 - protein, 495 aa, Hordeum vulgare subsp. vulgare
MKPTTATAALVLALTLAHHASIAAAAGPRVIIVGAGMSGISAGKRLSEAGITDLVILEATDHVGGRMHKQSFGGINVEVGANWVEGVNGAGRMNPIWPLVNSTLKLKNFRSDFDGLADNVYKENGGVYERAYVQKRLDRWGEVEEGGEKLSAKLRPSGQDDMSILAMQRLNDHLPNGPTSPVDMVLDYFKHDYEFAEPPRVTSLQNVVPLATFTDFGDDVYFVADQRGYEAVVYYLAGQYLKADKSGNIVDPRLQLNKVVTEISHSGGGVTVRTEDAKVYKADYVMVSTSVGVLQSDLIQFKPRLPTWKVLSIYQFDMAVYTKIFVKFPRKFWPQGKGREFFLYASSRRGYYGVWQEFEAQYPDANVLLVTVTDDESRRIEQQSDNQTKAEIVEVLRSMFPGEDVPDATDILVPRWWSDRFYRGTFSNWPIGVNRYEYDQLRAPVGRVYFTGEHTSEHYNGYVHGAYLSGIDSADILIKCAQKRMCKYHSPGKFD

SEQ ID NO: 10182 - protein, 389 aa, Escherichia coli O157:H7 EDL933
MSDTTILQNSTHVIKPKKSVALSGVPAGNTALCTVGKSGNDLHYRGYDILDLAEHCEFEEVAHLLIHGKLPTRDELAAYKTKLKALRGLPANVRTVLEALPAASHPMDVMRTGVSALGCTLPEKEGHTVSGARDIADKLLASLSSILLYWYHYSHNGERIQPETDDDSIGGHFLHLLHGEKPSQSWEKAMHISLVLYAEHEFNASTFTSRVIAGTGSDMYSAIIGAIGALRGPKHGGANEVSLEIQQRYETPDEAEADIRKRVESKEVVIGFGHPVYTIADPRHQVIKRVAKQLSQEGGSLKMYNIADRLETVMWESKKMFPNLDWFSAVSYNMMGVPTEMFTPLFVIARVTGWAAHIIEQRQDNKIIRPSANYVGPEDRQFVALDKRQ

SEQ ID NO: 10183 - protein, 167 aa, Triticum aestivum
  misc_feature (70)..(70): Xaa can be any naturally occurring amino acid
  misc_feature (92)..(92): Xaa can be any naturally occurring amino acid
EDSWGCKSRDEHHFEFKVDLAASKACRHQHGAIRKGVHIVIRGRPYKLAEVCTSKTGNHVHSKCHYVAIXIFNGKKLEDIVLSSHNCEVPPXCRPRCVRVIDITDDGYVSVVAESVNQKDDLKLLIDDVLSVQIKTGFVDGKGPIEYVMYRVGEEQIWAVKEIGGGK

SEQ ID NO: 10184 - protein, 503 aa, Hordeum vulgare subsp. vulgare
MKPSFVTAIAALLLIAAQHASIVAAGKGPRVIIVGAGMSGISAGKRLWDAGVRDLLILEATDRVGGRMHKHNFGGLNVEIGANWVEGLNGDKTNPIWPMVNSTLKLRNFYSDFDGVVANVYKESGGLYDEEFVQKRMDRADEVEELGGKFAAKLDPSGRDDISILAMQRLFNHQPNGPTTPVDMALDYYKYDYEFAEPPRVTSLQGTEPTATFADFGDDANFVADQRGFETIIYHIAGQYLRSDKSGNIIDPRVKLNKVVRQISYNDKGVVVTTEDNSAYSADYVMVSTSLGVLQSDLIQFKPQLPAWKIMAIYRFDMAVYTKIFLKFPKKFWPTGPGKQFFVYASSRRGYYGMWQSFEKEYPGANVLLVTVTDVESRRIEQQPDNVTMAEAVGVLRNMFPDRDVPDATDIYVLRWWSNRFFKGSYSNWPIGVNRYEYDQLRAPVGGRVYFTGEHTSEHYNGYVHGAYLAGIHSADILMNKASNNVDFKVRPKYDDELKAEAK

SEQ ID NO: 10185 - protein, 352 aa, Azotobacter vinelandii
MRAAVWHGRHDIRVENVPLPANPPPGWVQIRVDWCGICGSDLHEYVAGPVFIPVEKPHPLTGIQGQCILGHEFSGEIVKLGTGVSGFAPGERIAADACQHCGTCYYCRSGLYNLCEKLAFTGLMNNGAFAELVNVPAELLYKLPADFPVEAGALIEPLAVGMHAVKKAGNLLGRNVVVVGAGTIGLCTIMCAKAAGAAQVIALEMSSARKAKALEVGASLVLDPKECDALAEIRARTNGLGADVSFECIGNKHTAKLAIDVIRNAGKSVLVGIFEEPSSFNFFELVSTEKQVIGALAYNGEFADVIAFIADGRLDVEPLITGRIGLEEIVGRGFEELVNNKEHNVKIIVSPH

SEQ ID NO: 10186 - protein, 219 aa, Chromobacterium violaceum ATCC 12472
MGEVSIQAGVPANVFRTGGRIRLVDRQRLFGHAAVTIWLTGLSGAGKSTIAYELEARLVRGGFSAVVLDGDNLRHGINRNLGFTDADRRENLRRVAEVARLMNDAGLIVICSCISPLRIDREMARDIVGERHFAEVYVSTPLAVCEQRDCKGLYAKARSGQIAHFTGVSSPYEAPEQAALALDTSALSVDECVDRLFGMVLRCCSPAAMEGGIGHEYHI

SEQ ID NO: 10187 - protein, 167 aa, Glycine max
MASQSNTKSVHDFTVKDARGNDVNLADYKGKVLLLVNVASQCGLTNSNYTELNQLYEKYKGKGLEILAFPCNQFGAQEPGTNEEIVEFACTRFKAEFPIFDKVDVNGDNAAPLYKFLKSSKGGLFGDSIKWNFSKFLVDKDGNVVDRYAPTTSPLSIEKDIKKLLDA

SEQ ID NO: 10188 - protein, 384 aa, uncultured proteobacterium
MAFRSATNQEYTNQVGKPTSRFGRFLLWRNRLLRSSTFQKWAARLPISQSIARTRATDLHHILAGFVYSQTLSASYKLGLLECLKDRIATLDEIASYCELERGAAATLIKAATAIDLLQAVGADNWTLGELGASIHGNPGVQSMLRHHDLLYRDMADPASLLRSRDNAALRGYWPYVDGNHSDPAATARYSELMADSQHLIANHILDAIKLKPQQQLLDIGGGTGTFARLAAERFPKTETAVFDLPQVIASIAPRYHGTLQTISGNMFEDPIPTTFNTISLVRILHDHDDDPVDKLLARCFKALPAGGELIIAEPMADTRGAESIGHTYFGFYLWAMGSGRPRTKQELQAALERAGFESIKEKRTHIPALVRVVTAKKPNVIFY

SEQ ID NO: 10189 - protein, 246 aa, Zea mays
  misc_feature (26)..(26): Xaa can be any naturally occurring amino acid
MAAAARQRGTVKWFNDTKGFGFISPXDGSEDLFVHQSSIKSEGFRSLAEGEEVEFSVSEGDDGRTKAVDVTGPDGSFVRGGGGGGGGGGGYGSRGGGGSGGGGRSYGGSWGGGRRSGGGGGPGACYKCGEPGHMARDCPSADGGGGYGGGGYGGGGGGGGGCFKCGEPGHMAQGLPPAGGGGYGGGRRRRWRRLLQLRPGRATWPGTAPAVAAVAGGRFGGGGGGGGDRSCYNCGEAGHIARDCPT

SEQ ID NO: 10190 - protein, 396 aa, Zea mays
  misc_feature (188)..(188): Xaa can be any naturally occurring amino acid
  misc_feature (223)..(223): Xaa can be any naturally occurring amino acid
  misc_feature (246)..(246): Xaa can be any naturally occurring amino acid
  misc_feature (323)..(323): Xaa can be any naturally occurring amino acid
MTRASTIDFGRRKQSELFGSGPLRPANIIRNKFPTYKNGSNGIVIKLADGPEMPSLKEAVAKEATDLLDRCQRPSVRELTMKFEKGFNTATLLSNEAKWRHAALLERDILLKDLKSVLESLRGRVGGKNKDEIEESLSMVDILAIELSKREDELLRQKTEVTKIADTLKLASTDAKRIIDEERANARXEIESAKASVQKIQSALKEQEIFSQRTGKQDADELXKEEVQEARRVKMLHCPSKAMDIXENEIQVLRDQLAEKSSDSLRLLKELELHRSYGENDMPSYELKGLETLRSTLHIVGHECASVDFSNSSIQWFRIQPEXSKQEIISCATKLVYAPEPHDVGRYIQAEVKSGGQISVAKTAGSIDPAAGLVEYVETLVMCLNTIKWEREGGKD

SEQ ID NO: 10191 - protein, 270 aa, Triticum aestivum
  misc_feature (233)..(233): Xaa can be any naturally occurring amino acid
MKLSAVTLLTLATGIIAAPVADVSKEVRSYASYEPPKDTYEQPKTPKQEKPKKPEYNQPKAPKPHHEKPKAPKPHHDKPKHYAPPHHEKPKAPKPHHEKPKTPSYEKPKAPKPHHEKPKKPETPKKPEYNQPKAPKPHHEKPKKPETPKKPSYEAPKAPKPHHEKPKKPETPKKPAYEQPKAPKPHHEKPKKPETPKGPSYEQPKAPKPHHEKPKKPETPKKPEYNQPKAPPXLTHEKPKKPETPKGPSYEQPKTPKPHHEKPKKPETPR

SEQ ID NO: 10192 - protein, 378 aa, Nostoc sp. PCC 7120
MMVCEYKPGLEGIPAAQSSISYVDGQKGILEYRGIRIEDLAQQSTFLETAYLLIWGELPTKEELQVFEEEVRLHRRIKYRIRDMMKCFPESGHPMDALQASAAALGLFYSRRDLHNPAYIRDAVVRLIATIPTMVAAFQLMRKGNDPVKPRDDLDYSANFLYMLNEKEPDALAAKIFDICLILHVEHTMNASTFSARVTASTLTDPYAVVASAVGTLGGPLHGGANEEVIQMLEEIGSVENVRSYVEERLQRKDKLMGFGHRVYKVKDPRATILQGLAEQLFAKFGADKYYDIAQEMERVVEEKLGHKGIYPNVDFYSGLVYRKMGIPTDLFTPIFAIARVAGWLAHWKEQLEENRIFRPTQVYNGKHSVTYTPIDQR

SEQ ID NO: 10193 - protein, 138 aa, Aspergillus niger
  misc_feature (106)..(106): Xaa can be any naturally occurring amino acid
  misc_feature (108)..(108): Xaa can be any naturally occurring amino acid
  misc_feature (131)..(131): Xaa can be any naturally occurring amino acid
WDTAGQERFRSLIPSYIRDSSVAVVVYDISNAKSFQNTRKWIDDVRGERGNDVIIVLVGNKTDLNDKREVTTAQGEEEAKKNGLMFIETSAKVGHNVKQLFRRIAXAXPGMEVSHRRHQMIDVNITRKETXTNDGCAC

SEQ ID NO: 10194 - protein, 190 aa, Schizosaccharomyces pombe
MGKSQSKLSQDQLQDLVRSTRFDKKELQQWYKGFFKDCPSGHLNKSEFQKIYKQFFPFGDPSAFAEYVFNVFDADKNGYIDFKEFICALSVTSRGELNDKLIWAFQLYDLDNNGLISYDEMLRIVDAIYKMVGSMVKLPEDEDTPEKRVNKIFNMMDKNKDGQLTLEEFCEGSKRDPTIVSALSLYDGLV

SEQ ID NO: 10195 - protein, 215 aa, Zea mays
PHSPPALARRPRTKATATATATTTATATDRRPSTRRRRRSPSSSSTPPPPPPAAALVRTTCNSTSYYALCVSALAADPSSATADVRGLSAIAVSAAAANASGGAATAAALAANGTAPAGTATSAADSAVQALLQTCAAKYASARDALAAAGDSIALDDYDSASVHVSAAAEYPQVCRTLFRRQRPGQYPAELAAREETLGQLCSVSLDIIALLSS

SEQ ID NO: 10196 - protein, 433 aa, Ralstonia solanacearum
MTPSDVKATLSFSDGSPSVELPIYTGTVGPDVIDIRKLYGQTGKFTYDPGFMSTASCNSKITYIDGDKGELLYRGYAIDDLAGKCDFLEICYLLLKGELPNAKQKDEFNSTVMNHTMVHEQMQFFLRGFRRDAHPMAVLTGLVGAMSAFYPDAANINDSREREISQIRLIAKLPTLVAMAYKYNIGQPLIYPQNNLSYTGNFMRMMFATPCEDYKVNPVLERALDRIFILHADHEQNASTSTVRLAGSSGTNPIAAIAAGIACLWGPAHGGANEAALNMLEEIGSVDKIDEFIKQVKDKNSGVRLMGFGHRVYKNYDPRAKLMRETCHEVLQELGLENDRLFKLAMALEKIALEDEYFVSRKLYPNVDFYSGIVQRALGIPTSMFTCIFALARSVGWIAQWEEMITDPEYKIGRPRQLFNGAATRAVPELGKR

SEQ ID NO: 10197 - protein, 371 aa, Crotalaria retusa
MSEEVKEASSDDVIASVHSTVFKESENLEGKCAQIEGYDFNAGVDYHHLLNSMLTTGFQASNLGDAIHVINQMLDWRLADEPIAEDSSTEERDSNYRNSVTCKVFLGFTSNLISSGVRDIVRFLCQHHMVDVIVTTTGGIEEDLIKCLAPTYKGDFSLPGAYLRSKGLNRIGNLLVPNDNYCKFEDWIIPIFDQMLKEQNEENVLWTPSKLVARLGKEINNESSYLYWAYKNNISVYCPGLTDGSLGDMLYFHSFRSPGLIVDIVQDIRAINGEAVHASPRKTGMIILGGGIPKHHICNANMMRNGADYAVFINTAQEFDGSDSGARPDEAVSWGKIRGSAKTVKVHCDATIAFPLLVAETFATRVKPCHQ

SEQ ID NO: 10198 - protein, 372 aa, Cynoglossum officinale
MGEALKEQQLLESIRSVVLKQSENLEDKCTKIEGYNFNNGVNYQQLLKSLSSTGFQASNLGDAIQVVNQMLDWKLSDECPTEDCSETEKDPAYRESVKCKIFLGFTSNLVSSGIRDIIRYLVQHSMVDVVVTTAGGVEEDLIKCLAPTYRGDFSLSGAVLRSKGLNRIGNLLVPNDNYCKFEDWIMNIFDQMMEEQNTKKILWTPSKVISRLGKEINDESSYLYWANKNNIPVYCPGLTDGSLGDMLYIHSIRKDPGLVVDVVQDIRSMNSEAVHAGLRKTGIIVLGGGLPKHHICNANMMRNGADFAVFINTAQEFDGSDSGACPDEAVSWGKIRGSAKTVKVHCDATIAFPLLVAETFATKASKSADNKL

SEQ ID NO: 10199 - protein, 478 aa, Burkholderia cepacia R1808
MKIYDQFYIDGAWCKPAGAGTIDVIDSATEAVLGRIPEGAATDARHAVRAAHAAFDAWAATPPATRAGYLRRIVERLQTRSEELAQSITGEVGMPIKLSRAIQVGAPVYNWKVYAKLAESFEFEAKVGNSLVVREPVGVVAAITPWNYPLNQITLKVAPALAAGCTVVLKPSEVAPLNAFMLAEAIHEAGLPAGVFNLVCGYGPVVGEVLATDPEVDMVSFTGSTRAGKRVAELAAATVKRVALELGGKSAAVILDDADFPAAVKGTVNACFLNAGQTCSAHTRMLVPHARYDDARALAKAAAEAYLAGDPRQETTRLGALASAVQQQRVQAYIQRGIDDGAELVTGGTGLPDGLTKGFFVKPTVFGRVDPTSAIAQEEIFGPVLSIITYRDEDEAVRIANDTPYGLGGAVWAGSDERALRVARRLRTGQVDINGGSWNSAAPFGGYKQSGYGRENGVYGLEEYLEYKSMQLRPANPS

SEQ ID NO: 10200 - protein, 617 aa, Zea mays
  misc_feature (60)..(60): Xaa can be any naturally occurring amino acid
LPGQEIDLAKVVAKAAGPRAGGGLGLPLPLLVRFPDVLRHRVETLNAAFGYAVRSTGYGXRYQGVYPVKCNQDRYVVEDIVEFGAPFGFGLEAGSKPELLLAMSCLAARGGLDALLICNGYKDDGYVSLALMARSMGLNTVIVLEQEEELDIVVEASRRLGVRPVVGMRAKLRTKHAGHFGSTSGEKGKFGLSAAQILSVVTKLKAIGMLDCLQLLHFHIGSQIPTTALLSDGVGEAAQIYCELARLGADMRVIDVGGGLGIDYDGTHSAQTDMSVAYSLEEYAGAVVAAVGRVCDRKGVQHPIICSESGRALVSHHSVLVFEAFSATAPGRLDAATAYLLDELTDDCRADYRNVMAAAVRGDYDTCGLYADQLKRRSAELFKEGVLGLEHLAAVDAFCELVARGMGAPEPPRTYHINLSVFTSLPDMWAIGQQFPIIPIQRLQERPAVDGVLSDLTCDSDGKVSEFIGGRHSLPLHELPTHATRGYYLGMFLGGAYQEALGGLHNLFGGPSVVRVSQCDGPHCFAVTRAAAGPSCADVLRAMQHEPEVMYEVLKQRTDGATAAALARAFGAMPYLVFDPEAAVMSGGESSDSERSAAGAAEEEDDEEWEFMRGLTV

SEQ ID NO: 10201 - protein, 488 aa, Synechocystis sp. PCC 6803
MGRQLILFPMSDQSDHPLILLWHRRDLRLNDHLALAKARQKTAKIVGVFCLDNKILQAEDMAPARVAYLLGCLQSLQDHYQRLGSELLVFQADPVQLLPKLANTLGAHGVTWTLDTEPYAQKRDLAVAQALRERGLAIATEWDQLMHHPGEVLTQAGSPYTVYTPFWKNWSQLPKTSPVPTPKDLQGLTPAEKEKLAPLEPLAIPQLADLGFIWDQPLPLTPGEEAAEQRLDWFVAHGLEEYQQNRNFPALDGTSQLSAALKFGVISPRTLWQTTLEAWEQSRSEEARASIETWQQELAWREFYQHCLYSFPALAQGPYRSPFQEFPWEENQDHFQAWCEGRTGYPIIDAAMAQLNQTGWMHNRCRMIVASFLIKDLILNWQWGELYFMQTLYDGDLAANNGGWQWSASSGMDPKPLRIFNPHTQAQKFDPEGEYIRTWLPQLARFDTGDLLTGKLTPGSRRSVNYPEPIVDHNQQQREFKRRYQLVK

SEQ ID NO: 10202 - protein, 369 aa, Cynoglossum officinale
MGEVATSNNALDSVRSALFKKSENLEGSSKIIGYDFNGGVNYEDLLKSLVTSGFQASQLGDAIQIVNDMLNWRLSHDSPSEDCSEEEKDPKFREGVKCKIFLGFTSNLISSGLRETFRYLAQHRMVDVMVTTAGGIEEDLIKCLGDTYKGDFALPGAMLRSKGLNRIGNMLVPNDNYCKFEDWIMAILDKMLEEQISEKKLWTPSRVIARLGKEINDESSYLYWAYKNNIPVFCPALTDGSIGDMLYLHASRNKPSLVLDIVQDVCAMDDESVNASPRKTGIIILGGGLPKHHICNANMMRGGADFAVYINTAQEFDGSDSGARPDEAISWGKIRANAKNVKVHCDATIAFPLVVAETFATKIADKKSK

SEQ ID NO: 10203 - protein, 46 aa, Glycine max
  misc_feature (11)..(11): Xaa can be any naturally occurring amino acid
MSRVNIDNVTXLFNNGSFVTLFKFEISYECITALKDDLEWNLIYVG

SEQ ID NO: 10204 - protein, 654 aa, Zea mays
  misc_feature (103)..(103): Xaa can be any naturally occurring amino acid
  misc_feature (126)..(126): Xaa can be any naturally occurring amino acid
  misc_feature (141)..(141): Xaa can be any naturally occurring amino acid
MAGPEKTVVWFRRDLRIQDNPALAAAAKGGSVLPIFIWCPSDYGQYYPGRCSRWWLKQSLAHLGKSLELLGCPLVLIRAEDSTLAALLECVRSISATRVVQSXLYDPISLVLEMFQDNDFLSKDFXSKALDLLDLLITYWXAFIQLHSLTMLIIICFELIELTIEISQYLAHTRLVAAPGLANVRCWSSDDLGLESSKDVESSNALLSRAWSPGWRNAENMLEEFVSYGLPEYSEHGMKVGGSTTSLLSPYLHFGELSVRMIYQLVKMRQVKWQNEGKSEAEESVRLFLRSIGFREYSRYLCFNYPFTHERSFLGNLKHYPWLLDEGRFKSWRQGMTGYPLVDAGMRELWATGWTHNRIRVIVSSFAVKFLQIPWIWGMKYFWDVLLDADLESDILGWQYISGSLPDGHELSRLDNPEVQGQKYDPDGEYVRTWIPELARMPTEWIHSPWAAPNSILQVAGVELGFNYPKPIVELHMARECLDDAISTMWQLDTAAKLAELDGEVVDDNLNNIRNFDIPKVVLNKKLSPSTSSMEHRVLSTNGKDEKSQPTEVKALYKQIIRDDMMNDSNMDDTCSTANLKVTRKRSSSDSAFNVPSCSSSLVMESRIHHNEPSSVLYSGYFQKTADRDGTSKVEDNDSEDSGTSISRPSKKAA

SEQ ID NO: 10205 - protein, 449 aa, Desulfitobacterium hafniense DCB-2
MSHYDLILRNGNVVCPDGVRKADIAVSDGKIVLIAEEIPGDAKEIIDAAGKHIFPGITDGHVHFNDPGRTEWETITTGSSALAAGGGVAYFDMPLNCSPCTLDAVNFNNKLAVAQKDSLVDYGFWGGLTSANLDKLDELAECGVIGFKAFACHSGIDEFPRMDDYTALVGMEKLAKLGLPLMVHCENAEITKELTELSLANNRTGVRDYFAARPPITEIENVSRMITFAEETGCKLIIAHISTAKAVELVAQARARGVDVYCETIGHYLYLTGDDVERLGTVAKCSPPIRDGENQLQMWGRLFNDNIAFVSSDHSPCDPKLKNGEFMRVWGGISACQTTLQGLLTHAYHDRKFPLVKIAQLTAQHVNEIFKIKDKGQIALGYDADFALVDLDHEFTLQAEDLFYKHKVSPYVGDRFRGSVSQTILRGTTIYKDGKIVSQPIGKHLRPHQ

SEQ ID NO: 10206 - protein, 71 aa, Glycine max
  misc_feature (18)..(18): Xaa can be any naturally occurring amino acid
  misc_feature (41)..(41): Xaa can be any naturally occurring amino acid
PGAGMVVPFTGLKSMVGXPTRKTTIDFTSIVTTGEKFQCMXQVWPPFGKKNFKTFSYLPNLDDPQWAKEVE

SEQ ID NO: 10207 - protein, 171 aa, Glycine max
  misc_feature (63)..(63): Xaa can be any naturally occurring amino acid
  misc_feature (102)..(102): Xaa can be any naturally occurring amino acid
MASDGSEEFRLVSPAFKNGGKLPRHYTDDGQGTKKNISPPLEWYNLPEGTKTLALVVEDIDAXPHSGGPMVPWTHWVVANILATVKGLPEGFSGKSAEMGGXTPAIKEGNNDLKVPGWNGPRLPTPGHRIQFRLYALDDELKLGNKLTKEKLLEDTIEGHVLGEATLMAIF

SEQ ID NO: 10208 - protein, 318 aa, Saccharomyces cerevisiae
  misc_feature (162)..(162): Xaa can be any naturally occurring amino acid
PKYSLQDFQILRTLGTGSFGRVHLIRSRHNGRYYAMKVLKKEIVVRLKQVEHTNDERLMLSIVTHPFIIRMWGTFQDAQQIFMIMDYIEGGELFSLLRKSQRFPNPVAKFYAAEVCLALEYLHSKDIIYRDLKPENILLDKNGHIKITDFGFAKYVPDVTYXLCGTPDYIAPEVVSTKPYNKSIDWWSFGILIYEMLAGYTPFYDSNTMKTYEKILNAELRFPPFFNEDVKDLLSRLITRDLSQRLGNLQNGTEDVKNHPWFKEVVWEKLLSRNIETPYEPPIQQGQGDTSQFDKYPEEDINYGVQGEDPYADLFRDF

SEQ ID NO: 10209 - protein, 120 aa, Brassica napus
  misc_feature (106)..(106): Xaa can be any naturally occurring amino acid
  misc_feature (117)..(117): Xaa can be any naturally occurring amino acid
MDAVMFGLETPLMAALQHLLDVPDGDAGAGGDNKTGSGGSATRTYVRDARAMAATPADVKELPGAYAFVVDMPGLGTGDIRVQVEDERVLVVSGERRREEREDDAXYLRMERRMGKXMRK

SEQ ID NO: 10210 - protein, 122 aa, Flavobacterium psychrophilum
MADLKQFAEQLVNLTVKEVNDLATILKDEYGIEPAAAAVVMQAGGGEAAEEAQTEFTVVLKEAGASKLAVVKAVKELTGLGLKEAKDLVDAAPSNVKEGVSKDEAEGLKKSLEEAGAVVELK

SEQ ID NO: 10211 - protein, 322 aa, Bacillus methanolicus
MNKIAVLTSGGDAPGMNAAIRAVVRRGIFKGLDVYGVKNGYKGLMNGNFVSMNLGSVGDIIHRGGTILQTTRCKEFKTAEGQQQALAQLKKEGIDGLIVIGGDGTFEGARKLTAQEFPTIGIPATIDNDIAGTEYTIGFDTAVNTAVEAIDKIRDTAASHDRIYVVEVMGRNAGDIALWAGMCAGAESIIIPEADHDVEDVIDRIKQGYQRGKTHSIIVVAEGAFNGVGAIEIGRAIKEKTGFDTKVTILGHIQRGGSPSAYDRMMSSQMGAKAVDLLVEGKKGLMVGLKNGQLIHTPFEEAAKDKHTVDLSIYHLARSLSL

SEQ ID NO: 10212 - protein, 477 aa, Mesorhizobium loti MAFF303099
MSRQAQAPTIVLFRRDLRMGDNAALAAAAERGVPVVALYILDETTKGLRAMGAASRWWLHHSLAALGDLLRKAGANLFLAHGRTEDAVAKAIDASGANCVFWNRRYDPSEVAVDARLKAALREKGLTALSFDGALLHEPSLLKTGSGGFYKVFTPFWKAMADKVDVRDPIDTPGQIDGWRGELGGLRLDELDLLPSKPDWAYGLRETWTPGEKGAQARLGQFIEHGLANYERQRDYPGQPSTSRLSPHLTFGEITPFQIFAALRRSKSSGTSKFRAEIGWREFSYHLLFHNPDLSGRNFRPEFDAMSWRDDIRALRTWQRGLTGYPIVDAGMRELWRTGWMHNRVRMIVASFLIKDLMIDWRHGEKWFWDTLVDADAANNPASWQWVAGSGADPAPYFRIFNPVLQGEKFDPHGDYVRQHVPEISALPDRYIHRPWEAPAAVLKDKGIVLGKTYPNPIVDHGAARERALIVYQSLKD

SEQ ID NO: 10213 - protein, 374 aa, Eupatorium cannabinum
MGEPTKEAAMMENLRSVVFKESESLEGFSAKIHGYDFNQGVNYSQILKSLISTGFQASNLGDAIEIVNQMLDWRLSHEQVTEDCSEEEKILTYRESVRCKIFLGFTSNLISSGVRDVIRYLVQHHMVEVIVTTTGGIEEDLIKCLGDTYMGDFSLPGAALRTKGLNRIGNLLVPNENYCKFEDWIIPILDQLLEEQKKQHVLWTPSKLIARLGKEINNESSYLYWAYKNDIPVFCPGLTDGSLGDMLYFHSFRNPGLVVDVVQDIRAMNSEAVHANPRKTGMIILGGGLPKHHICNANMMRNGADYAVFINTAQEFDGSDSGARPDEAVSWGKIRAAAKYVKVHCDATIAFPLLVAETFAATKEKTTDSKPSSG

SEQ ID NO: 10214 - protein, 163 aa, Zea mays
MDAVMFGLETPLMAALQHLLDVPDGDAGAGDNKTGGGGGATRTYVRDARAMAATPADVKELPGSYAFVVDMPGLGTGDIRVQVEDERVLVVSGERRREEREDDAKYLRMERRMGKFMRKFVLPDNADVDKVAAVCRDGVLTVTVEKLPPPEPKKPKTIEVKVA

SEQ ID NO: 10215 - protein, 375 aa, Eupatorium cannabinum
MAAAIKEAAAVIENARSAVFKESESLDGISAKIHGYDFNQGLNYSQLLKSLISTGFQASNLGDAIETINAMLDWRLSHEKVKEDCCEEEKDETYRESVRCKIFLGFTSNLISSGVRDTIRYLVQNKMVEVLVTTTGGIEEDLIKCLADTYRGHFHLPGAALREKGLNRIGNLIMPNSNYSKFEDWIIPIFDQMLEEQKTQHVVWTPSKVIARLGKEINDESSYLYWAYKNNIPVFCPALTDGSLGDMFYFHSFKNPGLVVDIVQDVLAMDNEAVLADPRKTGVIILGGGLPKHHICNANMMRNGADYAVFINTAQEYDGSDSGARPDEAVSWGKIRATAKSVKVHCDATIAFPLVVAETFAARREKTIEKKLCSA

SEQ ID NO: 10216 - protein, 364 aa, Heliotropium indicum
MGEVATNALDSVRSQLFKKSENLDGSAKVIGYDFNKGVNYAELLKSMVTTGFQASHLGDAMDCINDMLKWRLSHETPTEGCSEQEKDPAYRESVKCKIFLGFTSNLTSSGVRETLRYLCQHRMIDVLVTTAGGIEEDFIKCLGDTYRGDFALQGSMLRSKGLNRIGNLLVPNDNYCKFEDWIMGILDQMLEEQKTQKVLWTPSKVIARLGKEINDESSFLYWASKNNIPVFCPALTDGSIGDMLYLHANNNSPGLVVDIVEDARAMDNEAVHADPRKTGIIILGGGLPKHHICNANMMRGGADFAVYINTAQEFDGSDSGARPDEAVSWGKIRASAKKVKVHCDATIAFPLVVAETFAKVKKSS

SEQ ID NO: 10217 - protein, 371 aa, Heliotropium indicum
MGDVSEEQQQQLLASIRSVVLKQSENLEASSATKIQGYDFNRGVNYPDLLKSLSSTGFQASNLGDAIQVVNQMLNWKLSDECPTEECSDKERDPAFRDSVRCKIFLGFTSNLVSSGVRDIIRYLVQHHLVDVIVTTAGGVEEDLIKCLAPTYRGDFSLPGAVLRSKGLNRIGNLLVPNDNYCKFEDWIMNIFDRMMEEQNSEKVLWTPSKVISRLGKEINDESSYLYWAYKNNIPVYCPGLTDGSLGDMLYIHAIRKDPGLVVDVVKDIRAMNSEAVHAGLRKTGIIVLGGGLPKHHICNANMMRNGADFAVFINTAQEFDGSDSGARPDEAVSWGKIRGSAKTVKVHCDATIAFPLLVAETFATKVNKSG

SEQ ID NO: 10218 - protein, 382 aa, Ipomoea hederifolia
MGEDTRDQNRVMDAVRATVFKKSESLDGEGGCTKIEGYDFNRGVDYPQLLNSLLSTGFQASNLGEAIQIVNEMLDWRLSQEPIMEDCDEEEKDPAYRDTVTSKIFLGFTSNLVSSGVRDTIRYLVQHHMVDVVVTTAGGIEEDLIKCLAPTYKGDFSLPGAVLRSKGLNRIGNLLVPNDNYCKFEDWIIPIFDQMYEEQTKQNVLWTPSKVIARLGKEINDESSYLYWAYKNKIPVFCPSLTDGSLGDMLYFHSFRKEDPNNPDHNPGLIIDIVGDIRAMNGEAVHAGSRKTGVIILGGGLPKHHICNANMMRNGADYAVYINTAQEFDGSDSGARPDEAVSWGKIRGGAKTVKVHCDATIAFPLLVAETFATKPKNSTGNQ

SEQ ID NO: 10219 - protein, 110 aa, Gibberella zeae PH-1
MSDAPVAKKAEGSNSKSVEGKKKFEVKKWNAVALWAWDIVVDNCAICRNHIMDLCIECQANQASATSEECTVAWGICNHAFHFHCISRWLKARSVCPLDNRDWEFQKYGR

SEQ ID NO: 10220 - protein, 367 aa, Psychrobacter sp. 273-4
MATILTLAGDGIGPEIMTQAIDVLNAVNNKFALGLTLESGLIGGVAVDATGEPLPEETLQRARAADAVLLGAVGGPKWDGIERSKRPERGLLKIRSELGLFANLRVAKLYPQLVNASSIKPEIISGLDLLIVRELTGGIYFGEPRGIRTLENGEQQGYNTMVYSTSEINRIGKVAFELAQTRAQAAGTPAKVCSIDKANVLEVTELWKQTMIELQQAEYSDVALSHMYADNACMQLIKDPKQFDVMVTGNLFGDILSDEAAMLTGSIGMLPSASLDEAGKGMYEPCHGSAPDIAGQDIANPLATILSVAMMLRYTFKQEVAAQAIEQAVSDVLDDGLRTVDILDRNEAGLIQVGCQQMGQAVLAKLL

SEQ ID NO: 10221 - protein, 165 aa, Zea mays
MDGRMFGLETPLMVALQHLLDVPDGDAGAGGDKASGAAAGGGPTRTYVRDARAMAATPADVKELPGVYAFVVDMPGLGTGDIKVQVEDERVLVISGERRREEREDAKYLRMERRMGKFMRKFVLPDNADMDKISAVCRDGVLTVTVEKLPPPEPKKPKTIEVKVA

SEQ ID NO: 10222 - protein, 214 aa, Zea mays
MAAVEVCVKAATGKPDTLGDCPFSQRVLLTLEEKKVPYEVKLVDLDNKPEWFLKISPEGKVPVFNGGDGECIADSDVITQTIEEKFPTPSLVTPVEYASVGSKIFPAFITFLKSKDASDGSEKALLDELQALDEHLKAHGPYINGENVSAADLSLGPKLFHLQVALEHFKGWKIPENLTNVHAYTKALFSRESFVKTKPSEEHVIAGWAPKVNA

SEQ ID NO: 10223 - protein, 326 aa, Bradyrhizobium japonicum USDA 110
MELRKIIRTDIAASAIAHLTLVALIIVISEVHPFHAAPPEAVAVDIVTPEQVKEQETKAEEAAKEKAPEPTPTPEMRLPKLDVTDKADAAAKPDAKQQAASQSSQQKASPEPEQPTQQKQPQPQPSQTPKQREATAQPQQPQQPQPQPSQLPPQQPLPQSQPQPAPQPSQAVPQPQAAPPAYQAPEPDVTVKYGVMLGLPPELPVEPKDAPRDDGGDAKDSIGAKLPPEVIAELRRRLRSCAKLPAGVAPTDPVRIKLRAVFATDGTLARPPILIEAPPSAKGVAIVKSATSALQACQPYKMLPADKYEEWKVLDLPFTPQDFGGG

SEQ ID NO: 10224 - protein, 182 aa, Zea mays
MAAAARQRGTVKWFNDTKGFGFISPEDGSEDLFVHQSSIKSEGFRSLAEGEEVEFSVSEGDDGRTKAVNVDRPRRSFVRGGGGGGGGGGGYGSRGGGGSGGGGRSYGGSWGGGRRSGGGGGPGACYKCGEPGHMARDCPSADGGGYGGGGYGGGGYGGGGGGGDRSCYNCGEAGHIARDCPT

SEQ ID NO: 10225 - protein, 429 aa, Arabidopsis thaliana
MESLPQPQNQSSPATTPAKILLGKHELGRRLGSGSFAKVHLARSIESDELVAVKIIEKKKTIESGMEPRIIREIDAMRRLRHHPNILKIHEVMATKSKIYLVMELASGGELFSKVLRRGRLPESTARRYFQQLASALRFSHQDGVAHRDVKPQNLLLDEQGNLKVSDFGLSALPEHLQNGLLHTACGTPAYTAPEVISRRGYDGAKADAWSCGVILFVLLVGDVPFDDSNIAAMYRKIHRRDYRFPSWISKQAKSIIYQMLDPNPVTRMSIETVMKTNWFKKSLETSEFHRNVFDSEVEMKSSVNSITAFDLISLSSGLDLSGLFEAKKKKERRFTAKVSGVEVEEKAKMIGEKLGYVVKKKMMKKEGEVKVVGLGRGRTVIVVEAVELTVDVVVVEVKVVEGEEDDSRWSDLITELEDIVLSWHNDIM

SEQ ID NO: 10226 - protein, 69 aa, Zea mays
GSPLGCLIFCPGLSGAPNGHGFAKGPLWKNPLSPSKWKEKPFVLASLSMWGGIFYGGSKLFSGKKEAKT

SEQ ID NO: 10227 - protein, 179 aa, Glycine max
  misc_feature (110)..(110): Xaa can be any naturally occurring amino acid
  misc_feature (124)..(124): Xaa can be any naturally occurring amino acid
  misc_feature (131)..(131): Xaa can be any naturally occurring amino acid
MDPMDIVGKSKEDVSLPKSTMTKIIKEMLPPDVRVARDTQDLLVECCVEFINLLSSESNDVCSRDDKKTIAPEHVIRALQDLGFKEYVEEVYAAYEQHKLETLDSPKATXFTGIKMTEKKAGAXQQRMFAXSPSKMNNGAAKPKEAALKPRFTPTAPKTFLGVGPRAEAPHLSARMCFP

SEQ ID NO: 10228 - protein, 119 aa, Glycine max
  misc_feature (26)..(26): Xaa can be any naturally occurring amino acid
MAAENVVEFTDLPVKRPREEEEEEEXQTNGVSNDAVSTLPNDPQYPGISAVIPGWFSEISPMWPGEAHSLKVEKILFQGKSDYQNVMVFQSSTYGKVLVLDGVMLLVPASRAREALLVP

SEQ ID NO: 10229 - protein, 157 aa, Brassica napus
  misc_feature (100)..(100): Xaa can be any naturally occurring amino acid
  misc_feature (145)..(147): Xaa can be any naturally occurring amino acid
MSEKMANYVDGDSDRKRKYSSSSGSSKNNSNEGKRKVKKVDWTPELHRRFVDAVEQLGLEKAVPSRILELMGVHCLTRHNVASHLQKYRSHRKHVLAREXEAANWTRKRHIYGLDSTRVNINGRNKNGWIAPAPTIGYAPPPPAXXXSPTIHNHHFR

SEQ ID NO: 10230 - protein, 218 aa, Aspergillus niger
MSSTSPSKEPEVEPEVQSGEDQEQMDKEQQDTQAQGQGEFEVKEQDRWLPIANVARIMKLALPENAKIAKEAKECMQECVSEFISFITSEASEKCQQEKRKTVNGEDILFAMTSLGFENYAEALKIYLSKYRETQSARGEHQNRPTSSGYGAGAPVGAPGPAGPGGRPMAPGAGFPDTADSANNIMNQSLDPSEQDTSTYGYPPMVGQPHNGTAGESY

SEQ ID NO: 10231 - protein, 133 aa, Brassica napus
VDPRVRALKVYVPSYESYGRMWPHIHTRILAALFLFQLVMFGYLGVKLFVWATLLVPLIFISLIFGYVCRQKFYKGFEHTALEVACRELKQRPDLEEVFKAYIPHSLSTHKGDDHQFKGAMSRYQDYAAISAA

SEQ ID NO: 10232 - protein, 346 aa, Rosa gallica
QKWSNGEHSNELLHAQAHIWNHIFSFINSMSLKSAIQLGIPDIINKHGYPMTLSELTSALPIHPTKSHSVYRLMRILVHSGFFAKKKLSKTDEEGYTLTDASQLLLKDHPLSLTPFLTAMLDPVLTKPWNYLSTWFQNDDPTPFDTAHGMTFWDYGNHHPSIAHFFNDAMASDARLVTSVIIDDCKGVFEGLESLVDVGGGTGTLAKAIADAFPHIECTVLDLPHVVADLQGSKNLKYTGGDMFEAVPPADTVLLKWILHDWNDEECVKILKRSREAITSKDKKGKVIIIDMMMENQKGDEESIETQLFFDMLMMALLTGKERNEKEWAKLFTDAGLSDYKITPIL

SEQ ID NO: 10233 - protein, 496 aa, Staphylococcus aureus subsp. aureus Mu50
MELLKHLSQRQYIDGEWVESTNKNTRDIINPYNQEVIFTVSEGTKEDAERAILAARRAFESGEWSQETAEKRGKKVRAIADKIKEHREALARLETLDTGKTLEESYADMDDIHNVFMYFAGLADKDGGEMIDSPIPDTESKIVKEPVGVVTQITPWNYPLLQASWKIAPALATGCSLVMKPSEITPLTTIRVFELMEEVGFPKGTINLILGAGSEVGDVMSGHKEVDLVSFTGGIETGKHIMKNAANNVTNIALELGGKNPNIIFDDADFELAVDQALNGGYFHAGQVCSAGSRILVQNSIKDKFEQALIDRVKKIKLGNGFDADTEMGPVISTEHRNKIESYMDVAKAEGATIAVGGKRPDRDDLKDGLFFEPTVITNCDTSMRIVQEEVFGPVVTVEGFETEQEAIQLANDSIYGLAGAVFSKDIGKAQRVANKLKLGTVWINDFHPYFAQAPWGGYKQSGIGRELGKEGLEEYLVSKHILTNTNPQLVNWFSK

SEQ ID NO: 10234 - protein, 318 aa, Arabidopsis thaliana
MVALDLEFERYPGERSFGSVSLFKYKRQRDGETQYAAVKTSSDENAKSLYKEFQILSQFKGCSRIVQCYGNGVKEIFNDKGYVEYKIAMEYAFGGSLSDFMDRFKDRKLSDSMIREFTRMLLEGLATIHRHGYVHCDLKPENILVFPSSVYKNGAWIRSYELKISDFGMSKRDGDTQWWQPRKPYVGTPIYMSPESISHGEIGKGLDLWSLGCVVLEMYTRKKPWWHTNYELEELMKCYEPLFPRNLPCDAKLFLMTCFASEPDERKDALTLLRQSFLHGDVNKFTNRQMNVKIDSADDFTLQLEKVSQMLSEIRTMC

SEQ ID NO: 10235 - protein, 346 aa, Rosa gallica
QKWSNGEHSNELLHAQAHIRNHIFSFINSMSLKSAIQLGIPDIINKHGYPMTLSELTSALPIHPTKSHSVYRLMRILVHSGFFAKKKLSKTDEEGYTLTDASQLLLKDHPLSLTPFLTAMPDPVLTKPWNYLSTWFQNDDPTPFDTAHGMTFWDYGNHHPSIAHFFNDAMASDARLVTSVIINDCKGVFEGLESLVDVGGGTGTLAKAIADAFPHIECTVLDLPHVVADLQGSKNLKYTGGDMFEAVPPADTVLLKWILHDWNDEECVKILKRSREAITSKDKKGKVIIIDMMMENQKGDEESIETQLFFDMLMMALLTGKERNKKEWAKLFTDAGFSDYKITPIL

SEQ ID NO: 10236 - protein, 373 aa, Arabidopsis thaliana
MVPPELEFNKYLGKGSYGSVSLFKYSKPRTTLYTAVMTCNYKNAESLEKEFGILSEFKGCSRIVQCYENRVIENLDVEGNKEYMMLMEYAAGGSLRTFMKRSEDKKLPDPLIREFTRMILEGLATIHGQGYVHCDLKPDNILVFPRCVYKKRAWRSSYELKISDFGLSKRDGDSKWWHPHRPFVGTAIYMSPGSVSHGETGRGLDLWSLGCVVLEMYTGKKPWWHNNYDLKDLKNWYAPMIPSDLPCDAKHFIMACFALNTNERRDALTLLEHSFLRGVVNKITKPHVKNENPKEIALALGRVVRRPSKVLTSIFKRAGELMKIIKKQPRAPRSNLLPVHICHLAQPSQKICFFIYCSLCVVFIILTVVCMFR

SEQ ID NO: 10237 - protein, 346 aa, Rosa hybrid cultivar 'Kazanlik'
QKWSNGEHSNELLHAQAHIWNHIFSFINSMSLKSAIQLGIPDIINKHGYPMTLSELTSALPIHPTKSHSVYRLMRILVHSGFFAKKKLSKTDEEGYTLTDASQLLLKDHPLSLTPFLTAMLDPVLTKPWNYLSTWFQNDDPTPFDTAHGMTFWDYGNHHPSIAHFFNDAMASDARLVTSVIIDDCKGVFEGLESLVDVGGGTGTVAKAIADAFPHIECTVLDLPHVVADLQGSKNLKYTGGDMFEAVPPADTVLLKWILHDWNDEECVKILKRSREAITSKDKKGKVIIIDMMMENQKGDEESIETQLFFDMLMMALLTGKERNKKEWAKLFTDAGFSDYKITPIL

SEQ ID NO: 10238 - protein, 440 aa, Oryza sativa (japonica cultivar-group)
MSDCHIMTARRRSCYGRYLSASNEPFLLGITGRKVLQAQPPGGRATDSSLEWEPVKDDALVYVRVELTAWNVAPLRCAAEYLEMTEEHAEDNLTARVEAYLEQAVLRHSCEATKALKSREELLPHAEELGIVSRCVEAISIFTSGVNLNEEQNMDHLTSPFATTARSSAASRSWFDDLAVLGLDMYRRVMAAMAARADVRTEARESCLVSYARGTITALSRSMRRLASAPASSEVEQRDLLEAVVTSVPTDKCSGRVVTAKFLFAQLWTAHILLALDAALGQKAATQLEHATLEDVLIPSYSGGMKTLYDVDCVERVVRHVLAEEEHGEAGESTSAAAITEEKRGGGGGEGASDGGEPAGAVECRRGGGGGAGGSPVIRLGGLRRARSHGGARRPPPPDAGVLMVVGQRSRRLPHLLPHRRPAVGAPRPDDLLPTACRPA

SEQ ID NO: 10239 - protein, 388 aa, Pichia norvegensis
MSAAKQLFKIVPLTPTEINFLQSLAPVVKEHGVTVTSTMYKYMFQTYPEVRSYFNMTNQKTGRQPKVLAFSLYQYILHLNDLTPISGFVNQIVLKHCGLGIKPDQYPVVGESLVQAFKMVLGEAADEHFVEVFKKAYGNLAQTLIDAEASVYKTLAWEEFKDFRVTKLVKEAEDVTSVYLTPVDGFKLKPIIPGEYISFRWDIHNPDITDIQPREYSISQDVKENEYRISVRDIGIVSDYINKKLQVGDIVPVHAPVGTMKYDSISKKGKVAVLAGGIGITPMIPIIEHALKDGKDVELYYSNRSYQSEPFREFFSNLEKENNGKFKLNNYISAENQKLQVKDLEHINPDEYDVYLLGPVAYMHEFKTYLVGKGVSDLKMEFFGPTDP

SEQ ID NO: 10240 - protein, 346 aa, Rosa hybrid cultivar 'Kazanlik'
QKWSNGEHSNELLHAQAHIWNHIFSFINSMSLKSAIQLGIPDIINKHGYPMTLSELTSALPIHPTKSHSVYRLMRILVHSGFFAKKKLSKTDEEGYTLTDASQLLLKDHPLSLTPFLTAMLDPVLTKPWNYLSTWFQNDDPTPFDTAHGMTFWDYGNHQPCIAHFFNDAMASDARLVTSVIIDDCKGVFEGLESLVDVGGGTGTVAKAIADAFPHIECTVLDLPHVVADLQGSKNLKYTGGDMFEAVPPADTVLLKWILHDWNDEECVKILKRSREAITSKDKKGKVIIIDMTMENQKGDEESIETQLFFDMLMMALVTGKERNEKEWAKLFTDAGFSDYKITPIL

SEQ ID NO: 10241 - protein, 371 aa, Phalaenopsis hybrid cultivar
MGSAACETERDVLKSLVFKESAALESLKIGGYDFNNGLDLTGLLNSLVSTGFQATNLGEAMEVVNQMISWRLADEEVAVDGSEETDRAFRESVKCKIFLGFTSNLISSGVRETIRFLVQHRMVDVLVTTAGGIEEDFIKCLAPTFKGDFSLGGTFLRSRGWNRIGNLLVPNDNYCKFGDWIMPILDKMLEEQINEKAHWTPSKVIARLGKEINNESSYLYWASKNGIPVFCPAITDGSIGDMLYLHSLRNPGHIIDLVQDVKAMDEEAVHASPRKTGVLILGGGVPKHHICNANMLRNGADYAVFINTAQEFDGSDSGARPDEAVSWGKIKGTAKTAKVHCDATIAFPLLVAGTFAKKINKAAAQANGIKA

SEQ ID NO: 10242 - protein, 370 aa, Senecio vernalis
MAESNKEAIDSARSNVFKESESLEGTCAKIGGYDFNNGIDHSKLLKSMVSTGFQASNLGDAMIITNQMLEWRLSHDEVPEHCSEEEKKNRESVKCKIFLGFTSNLISSGVRETICYLAQHRMVDVLVTTTGGIEEDFIKCLASTYKGKFSLPGADLRSKGLNRIGNLIVPNDNYIKFEDWIIPIFDQMLIEQKTQNVLWTPSRMIARLGKEINNETSYLYWAYKNNIPVFCPSITDGSIGDMLYFHSVSNPGPGLVVDIVQDVIAMDNEAVHASPQKTGIIILGGGLPKHHICNANMMRNGADFAVFINTAQEYDGSDSGARPDEAVSWGKISSTGKAVKVHCDATIAFPLLVAETFAVKKEKASKVNGF

SEQ ID NO: 10243 - protein, 272 aa, Bradyrhizobium japonicum USDA 110
MLFVEANGARIPAIGLGTWELSGRPCARVVEQALRLGYRHIDTAQVYDNEREVGDGVRASGVRRDDVFLTTKVWTNHFAPNDLERSVKESLARLRLPSVDLLLLHWPNSHVPLAETLGALSHARQMGLTRHIGVSNFTVALIEQAVALSPEPLVCNQVEFHPYLDQAKVRAACDQHGLALVAYSPIARGRIKTDQTLAGIGRAHRKTPAQVCLRWLVQQNVAAIPRTSRIERLSENIEIFDFELSDDEMARIAALANPKGRLTDFGFAPKWD

SEQ ID NO: 10244 - protein, 343 aa, Gibberella zeae PH-1
MAADDSPTFEEHFSRLSIDHKSVGSQSKRVPKTKIPQSQPVPGPAQPKCLLPVKGPVVANRVDTPTPHKDQDTNSPSPSSPQKPTTKSSTTKSATLYKHLHLGMFEIGRPMGKGKFGRVYLARERSSGFICALKVLYKTELRQSRMESQVRREIEIQTNLRHPNIVQLYSHFHDSKRIVLVLEFAAKGELYKHLQKETRFTERKAARFIAQVVSALQYLHRKNIIHRDIKPENILVGMHDELKMSDFGWSVHSPSKRRETMCGTLDYLPPEMIKLGAVDAGRFYDEKVDVWSLGVLTYEFLVGVPPFEDTPVRTQRRIARADMQIPDFISSKAKHLIKSACSL

SEQ ID NO: 10245 - protein, 372 aa, Senecio jacobaea
MGETNKSAEMIESARSAVFKESERLEGTCAIIGGYDFNNGIDHSKLLKAMVSTGFQASNLGDAIDIVNQMLDWRLSHEPVTEDCTEEEKKKRESVKCKIFLGFTSNLISSGVRETIRYLAQHRMVNVIVTTAGGIEEDYIKCLGSTFRGKFSLPGANLRSRGLNRIGNLLVPNDNYCKFEDWIIPIFDQMLIEQKTKNVLWTPSRIIARLGKEINNESSYLYWAYKNNIPVFCPALTDGSIGDMLYFHSVTNPGPGLVVDIVQDVIAMDNQAVHASPQKTGIIILGGGLPKHHICNANMMRNGADYAVFINTAQEYDGSDSGARPDEAVSWGKISSSGKAVKVHCEATIAFPLLVAETFAAKKEKASKLNGF

SEQ ID NO: 10246 - protein, 58 aa, Brassica napus
MSEGTANCVDILIAIILPPLGVFLKYGCGHEFWICLLLTFLGYIPGIIYAIYAITKNT

SEQ ID NO: 10247 - protein, 114 aa, Glycine max
MFHSIKTVLTCPQVSFPARSLSSNLGRETCAVRFCTDSARKMDKTQKPSTEENKQGDTMSHSFGEGYATRSDEEGFGGVYGGNQSKPEMDPAYDKTQGSEVKEKEKARHQTSAN

SEQ ID NO: 10248 - protein, 578 aa, Zea mays
  misc_feature (137)..(137): Xaa can be any naturally occurring amino acid
  misc_feature (166)..(166): Xaa can be any naturally occurring amino acid
  misc_feature (199)..(199): Xaa can be any naturally occurring amino acid
  misc_feature (210)..(210): Xaa can be any naturally occurring amino acid
  misc_feature (224)..(224): Xaa can be any naturally occurring amino acid
  misc_feature (234)..(234): Xaa can be any naturally occurring amino acid
  misc_feature (418)..(418): Xaa can be any naturally occurring amino acid
  misc_feature (442)..(442): Xaa can be any naturally occurring amino acid
MAGGGVEDVYGEDRATEEQLITPWAFSVASGYTLLRDPRHNKGLAFSEAERDAHYLRGLLPPALASQELQEKKLMQNLRRYEQPLHRYIAMMDLQERNERLFYKLLIDNVEELLPVVYTPTVGEACQKYGSIYRRPXQGLYISLRDKGKILEVLKNWPERSIQVIXVVTDGERILGLGDLGWPGGWEIPVGKLSLYTAXSGGVRPSACLXHFTIDVGTNNEALXLKDEFYIGLXRQRRATGEEYHELLEEFMTAVKQNYGEKVLTQFEDFANHNAFDLLEKYRESHLVFNDDIQGTASVVLAGLLAALKVVGGTLADHTYLFLGAGEAGTGIAELIALEMSKHTGSPIEECRPKIWLMDSKGLIVASRKDSLQAFKKPWAHEHEPVATLLEAVQSLKPTVLIGTSGKGGTFTKEVVEXMASQNEKPVIFALSNPTSHSECTXAEQAYTWTKGRAVFASGSPFDSVELDGKVLVPGQSNNAYIFPGFGLGVVISGAIRVRDDMLLAASEALAEQVTEEHFAKGLIFPPFTNIRAISARIAAKVAAKAYELGLASRLPRPDDLVKYAESCMYTPIYRSYR

SEQ ID NO: 10249 - protein, 364 aa, Hyphomicrobium chloromethanicum
MSTYSLRVERKQRETDDCASLWLSVPTDLRSAFAHRPGQFIAVSAEINGEEVTRQYSLSSAPDDSRGIRITVKKIPGGRMSSWLVDRVNEGDRIEVAAPRGRFFRPLDRAHRVLLLAAGSGIAPILPIAQKLLADGVGHRITLAYGSRALDDIILRKDVDELPNIFRTCALEHVLSRPGPTWDGPRGRLDSAYLLSRQDLWDGNASHLPLIVYLCGPESFMDAAEAFFLSHGVDASAIRRESFDLVLEDDADEPPLFVAGTEEVGEPSAICEEIVANVGGEETRVVPEPDETILAALIRGEAPVPFSCQEGTCSSCIAKIKKGSASVRSGVLKTLRQDDLDEGLLLACLARPASRHILIDFDDI

SEQ ID NO: 10250 - protein, 346 aa, Rosa hybrid cultivar 'Kazanlik'
KKWSNGEDSNELLHAQAHIWNHIFSFINSMSLKSAIQLGIPDIINKHGPPMTLSELTSALPIHPTKSHSLDRLMRILVHSGFFAKEKLSETDEEGYTLTDTSQLLLKDHPLSLTPFLTAMLDPVLTKPWHHLSTWFQNDDLTPFATAHGMTMWDYGNHQPSFSHFFNDAMASDARLVASVIINECKGVFEGLESLVDVGGGTGTLAKAIADAFPHIECTVLDLPHVVADLQGSKNLKYTGGDMFEAVPPADTVLLKWILHDWNDEECVKILQRSKEAITSKDKKGKVIIIDMIMGNQKGDEESIEMQLFFDMLMMVLLKGKERNEKEWAKLFTDAGFSDYKITPIL

SEQ ID NO: 10251 - protein, 346 aa, Rosa hybrid cultivar
QKWSNGEHSNELLHAQAHIWNHIFSFINSMSLKSAIQLGIPDIINKHGYPMTLSELTSALPIHPTKSHSVYRLMRILVHSGFFAKKKLSKTDEEGYTLTDASQLLLKDHPLSLTPYLTAMLDPVLTNPWNYLSTWFQNDDPTPFDTAHGMTFWDYGNHQPSIAHLFNDAMASDARLVTSVIINDCKGVFEGLESLVDVGGGTGTLAKAIADAFPHIECTVLDLPHVVADLQGSKNLKYTGGDMFEAIPPANTVLLKWILHDWNDEECVKILKRSRVAITSKDKKGKVIIIDMMMENQKGDEESIETQLFLDMLMMALVGGKERNEKEWAKLFTDAGFSDYKITPIL

SEQ ID NO: 10252 - protein, 346 aa, Rosa hybrid cultivar
QKWSNGEHSNELLHAQAHIWNHIFSFINSMSLKSAIQLGIPDIINKHGYPMTLSELTSALPIHPTKSHSVYRLMRILVHSGFFAKKKLSKTDEEGYTLTDASQLLLKDHPLSLTPYLTAMLDPVLTNPWNYLSTWFQNDDPTPFDTAHGMTFWDYGNHQPSIAHLFNDAMASDARLVTSVIINDCKGVFEGLESLVDVGGGTGTLAKAIADAFPHIECTVLDLPHVVADLQGSKNLKYTGGDMFEAVPPADTVLLKWILHDWNDQECIKILKRSRVAITSKDKKGKVIIIDMMMENQKGDEESIETQLFFDMLMMALVGGKERNEKEWAKLFTDAGFSDYKITPIL

SEQ ID NO: 10253 - protein, 589 aa, Glycine max
MESATQVGAAAQPSSASASVIPSAFDGTLGRHLARRLAETGVRDVFSVPGDFNLTLLDHLIAEPSLNLVGCCNELNAGYAADGYARAKGVGACVVTFTVGGLSVLNAIAGAYSENLPVICIVGGPNSNDYGTNRILHHTIGLPDFTQELRCFQAITCFQAVVNNLDDAHELIDTAISTALKESKPVYISISCNLPGIPHPTFARDPVPFFLAPKVSNQEGLEAAVEATAALLNNAVKPVIVGGPKLRVAKAQKAFLEFAEASGYPIAVMPSGKGLVPEHHPHFIGTYWGAVSSSFCGEIVESADAYVFVGPIFNDYSSVGYSLLIKKEKAIIVQPNRVTIGNGPSLGWVFMADFLTALAKKVKTNTAAVENYRRIYVPPGIPLRREKDEPLRVNVLFKHIQELLSGDTAVIAETGDSWFNCQKLHLPENCGYEFQMQYGSIGWSVGATLGYAQAATDKRVIACIGDGSFQVTAQDISTMIRCGQKTIIFLINNGGYTIEVEIHDGPYNVIKNWDYTRFVDAIHNGQGKCWTAKVRTEDDLTEAIAKATGPQKDSLCFIEVFVHKDDTSKELLEWGSRVAAANSRPPNPQ

SEQ ID NO: 10254 - protein, 346 aa, Rosa hybrid cultivar
QKWSNGEHSNELLHAQAHIWNHIFSFINSMSLKSAIQLGILDIINKHGYPMTLSELTSALPIHPTKSHSVYRLMRILVHSGFFAKKKLSKTDEEGYTLTNASQLLLKDHPLSLTPFLTAMLDPVLTKPWNYLSTWFQNDDPTPFDTAHGMTFWDYGNHQPSTAHFFNDAMASDARLVTSVIIDDCKGVFEGLESLVDVGGGTGTVAKAIADAFPHIECTVLDLPHVVADLQGSKNLKYTGGDMFEAVPPADTVLLKWILHDWNDQECIKILKRSRVAITSKDKKGKVIIIDMMMENQKGDEESIETQLFFDMLMMALVGGKERNEKEWAKLFTDAGFSDYKITPIL

SEQ ID NO: 10255 - protein, 194 aa, Zea mays
APAFCELSLPLTKEEAAFSPSDPAMQRHVASGRPSGTDGSDFSYRMVVESRYQRVAEGRSRLARLILVQALHLVAGGLLLLLSLSKGAAVNKFAVLSMAAGFLAIVVGELGRMRTMAVLLRLYTSLSSIAVAFSVTCIIRSELFLKVMKQNTEAITSYEMLDAVRVALGILLQMVVIATTTRLLQNMSPPKRAS

SEQ ID NO: 10256 - protein, 346 aa, Rosa hybrid cultivar
QKWSNGEHSNELLHAQAHVWNHIFSFINSMSLKSAIQLGILDIINKHGYPMTLSELTSALPIHPTKSHSVYRLMRILVHSGFFAKKKLSKTDEEGYTLTNASQLLLKDHPLSLTPFLTAMLDPVLTKPWNYLSTWFQNDDPTPFDTAHGMTFWDYGNHQPSIAHFFNDAMASDARLVTSVIIDDCKGVFEGLESLVDVGGGTGTVAKAIADAFPHIECTVLDLPHVVADLQGSKNLKYTGGDMFEAIPPANTVLLKWILHDWNDEECVKILKQSREAITSKDKKGKVIIIDMMMENQKGDEESIETQLFFDMLMMALVTGKERNEKEWAKLFTDAGFSDYKITPIL

SEQ ID NO: 10257 - protein, 455 aa, Mycobacterium avium subsp. paratuberculosis str. k10
MSTARLINPATEEVLRSVEHADAAAVDDAVDRARAAQRRWARLAPADRAAGLRAFAAAVDAHRDELAALEVANSGHPIASAEWEAGQVRDVLTFYAGSPERLSGKQIPVAGGLDVTFHEPLGVVGVITPWNFPMPIASWGIAPALAAGNAVLVKPAEPTPVTTIRLAELAVQAGLDRDLLQVLPGPGTVVGERFVTHPDVRKIVFTGSTEVGKKVLAGAAAQVKRVTLELGGKSANIVFADCDLQRAAATAPAGVFDNAGQDCCARSRILVQRTVFDRFMELLEPAVTGIVVGDPASRDTQMGPLVSAAHRAKVASYVPDGAPVAFRGTAPTGPGFWFPPTVLTPSRTDRCVTEEIFGPVVTVLAFDDEQDAVALANDTSYGLSGSIWTNDLSRALRVSRAVEAGNLSVNSHSSVRYHTPFGGFKQSGLGRELGPDAPAQFTETKNVFIAIDEEP

SEQ ID NO: 10258 - protein, 1499 aa, Streptococcus gordonii
MQKREVFGFRKSKVAKTLCGAVLGAALIAIADQQVLADEVTETNSTANVAVTTTGNPATNLPEAQGEATEAASQSQAQAGSKDGALPVEVSADDLNKAVTDAKAAGVNVVQDQTSDKGTATTAAENAQKQAEIKSDYAKQAEEIKKTTEAYKKEVEAHQAETDKINAENKAAEDKYQEDLKAHQAEVEKINTANATAKAEYEAKLAQYQKDLAAVQKANEDSQLDYQNKLSAYQAELARVQKANAEAKEAYEKAVKENTAKNAALQAENEAIKQRNETAKANYDAAMKQYEADLAAIKKAKEDNDADYQAKLAAYQAELARVQKANADAKAAYEKAVEENTAKNTAIQAENEAIKQRNETAKATYEAAVKQYEADLAAVKQANATNEADYQAKLAAYQTELARVQKANADAKATYEKAVEDNKAKNAALQAENEEIKQRNAAAKTDYEAKLAKYEADLAKYKKDFAAYTAALAEAESKKKQDGYLSEPRSQSLNFKSEPNAIRTIDSSVHQYGQQELDALVKSWGISPTNPDRKKSTAYSYFNAINSNNTYAKLVLEKDKPVDVTYTGLKNSSFNGKKISKVVYTYTLKETGFDDGTKMTMFASSDPTVTAWYNDYFTSTNINVKVKFYDEEGQLMNLTGGLVNFSSLNRGNGSGAIDKDAIESVRNFNGRYIPISGSSIKIHENNSAYADSSNAEKSRGARWDTSEWDTTSSPNNWYGAIVGEITQSEISFNMASSKSGNIWFAFNSNINAIGVPTKPVAPTAPTQPMYETEKPLEPAPVVPTYENEPTPPVKTPDQPEPSKPEEPTYETEKPLEPAPVAPTYENEPTPPVKIPDQPEPSKPEEPTYETEKPLEPAPVAPTYENEPTPPVKTPDQPEPSKPEEPTYDPLPTPPLAPTPKQLPTPPVVPTVHFHYSSLLAQPQINKEIKNEDGVDIDRTLVAKQSIGKFELKTEALTAGRPKTTSFVLVDPLPTGYKFDLDATKAASTGFDTTYDEASHTVTFKATDETLATYNADLTKPVETLHPTVVGRVLNDGATYTNNFTLTVNDAYGIKSNVVRVTTPGKPNDPDNPNNNYIKPTKVNKNKEGLNIDGKEVLAGSTNYYELTWDLDQYKGDKSSKEAIQNGFYYVDDYPEEALDVRPDLVKVADEKGNQVSGVSVQQYDSLEAAPKKVQDLLKKANITVKGAFQLFSADNPEEFYKQYVSTGTSLVITDPMTVKSEFGKTGGKYENKAYQIDFGNGYATEVVVNNVPKITPKKDVTVSLDPTSENLDGQTVQLYQTFNYRLIGGFIPQNHSEELEDYSFVDDYDQAGDQYTGNYKTFSSLNLTMKDGSVIKAGTDLTSQTTAETDATNGIVTVRFKEDFLQKISLDSPFQAETYLQMRRIAIGTFENTYVNTVNKVAYASNTVRTTTPIPRTPDKPTPIPTPKPKDPDKPETPKEPKVPSPKVEDPSAPIPVSVGKELTTLPKTGTNDATYMPYLGLAALVGFLGLGLAKRKED

SEQ ID NO: 10259 - protein, 432 aa, Bordetella parapertussis 12822
MTVRTVRIAGGRLIDPASGADARADLYLADGRIAAIGQAPAGFQAQQHIDARGLAVLPGLVDLSARVHGAGLAPLACEMQAALAGGVTRLVVPPDTDPPLDEPGRVEMLRHRAHQAGQAQLHPLGALTEGLRGERLSEMAALAEAGCVAFSQAGLPVADTRVLWRAMQYARTFGLALWLRPLDPWMGRDGVAAAGAYASRLGLAEVPVQAETLALHTIFELQRATGARVHLMRLSSAAGVALVRAARREGLPLTCDVAAHQIHLTDVDIGFFDSRFRLDPPLRGQRDRDAIVAGLADGTIDAICSDHRPVGDTGKLLPFAEAEAGASGLELLLSLTLKWAQRERVPLARALALVTSAPAAILRAATAALPPCGELAAGAPADLCLVDLDADWTAAPAAMRSRSVHTPFAGMMLPGRVRATLVAGRTVWETPA

SEQ ID NO: 10260 - protein, 137 aa, Glycine max
  misc_feature (71)..(71): Xaa can be any naturally occurring amino acid
  misc_feature (110)..(110): Xaa can be any naturally occurring amino acid
  misc_feature (131)..(131): Xaa can be any naturally occurring amino acid
KNKLLRTNNEKLTAGSMISCAAVTTVNRAGGDMVATFTGLMSMAGLPTTKTNDDISSIASNGGRVQCMQAXPPVGKKKFETLCYLPDLDDAQLAKEVEYLLRKGWIACWXFELDHRFWYREHNTSAEYYYXRYWTMW

SEQ ID NO: 10261 - protein, 181 aa, Leptospira interrogans serovar Copenhageni str. Fiocruz L1-130
MKIKWFIFVFLFSVSWLQAEPFQLKSPELTSVKLIANEQVFNGFGCSGGNISPSLSWTGLPKDTKSIALTVYDPDAPTGSGWWHWVVFNLPSTITSIPANAGNLEKNLLPKEAIQSRTDFGTSGYGGPCPPKGHKPHRYYFTVYALKDKIPADQNSSGALIGFYINQLKIGEAQILAKYGR

SEQ ID NO: 10262 - protein, 316 aa, Glycine max; identical to SEQ ID NO: 356

SEQ ID NO: 10263 - protein, 471 aa, Vibrio parahaemolyticus RIMD 2210633
MILVWFRRDLRTLDHTALKAALDTGQPVVACFIATPEQWQEHHMAPMQADLIARRLEHVHQELTELNIPLLYKEVPRFDDCTQVICDWADKLNATAAMVNINYEVNEVELDRKVSQALDNRGVEFHAFHDKCVHAPTTVLNKQGEYFKVFTPFKRAWLQKFSLPTVSKPQRQNELPSAQLAAVKQDGFDADFTFSYPRESSEAWCVSTNDILKQLRTFARERSDGYQMKRDFPAIDGTSQLSPYLAIGALSPRQCIARLYAENPQPDLSEGKATWLSEIIWREFYQHLLVFEPKLVKGRGFIDWEDKIQWSYDEQAFECWKTGTTGYPIVDAAMRQLNQTGWMHNRLRMIVASFLTKDLHIDWRWGEEYFMSKLVDGDFAANNGGWQWSASTGCDGQPYFRIFNPISQGEKFDSDGQFVRHWVPEIKSVPNKFVHKPWTWEGFSLLEYHKPMVDHKVEREITLRLFKSAKE

SEQ ID NO: 10264 - protein, 286 aa, Azotobacter vinelandii
MSDYQETLYEGYGQRFRMDRLLHEVRTGHQHLVIFENARMGRVMALDGVIQTTEADEFIYHEMLTHVPILAHGAARRVLIVGGGDGGILREVCRHRSVERITMVEIDATVVEMCKEFLPEHSRGAFEDPRLNLVIDDGMRFVATTEDRFDVIISDSTDPIGPGEVLFSENFYQACRRCLNDGGILVTQNGTPFMQLGEVQTTAQRMNGLFADWHFYQAAVPTYIGGAMTFAWGACDAASRRLPPDILRQRFVGSGIVARYYNPEIHQGAFALPQYVLQAIGKPGNN

SEQ ID NO: 10265 - protein, 360 aa, Physcomitrella patens
MSPSVDCLASLYCAEDVSGTAWNESEMCGAADRVFESQPAVFMDFPVEDDEAIATLLMKEAQFMPEADYLERYQSRKLSLEARLAAIEWILKVHSFYNYSPLTVALAVNYMDRFLSRYYFPEGKEWMLQLLSVACISLAAKMEESDVPILLDFQVEQEEHIFEAHTIQRMELLVLSTLEWRMSGVTPFSYVDYFFHKLGVSDLLLRALLSRVSEIILKSIRVTTSLQYLPSVVAAASIICALEEVTTIRTGDLLRTFNELLVNVESVKDCYIDMRQSEIGPYCVRMGLKRKILHASEPQSPVGVLEAADVSSPSGTVLGFSSRESSPDVTDSPPSTNSQRKRRKLCLHNESCLHVESASL

SEQ ID NO: 10266 - protein, 223 aa, Glycine max
MASSLIISPRKLRSDLYSYSYQEDHYSTPLVINVLASLIERSMARTERIVKNGSRSLSKAISTNIFDCREILDMTIQSYLERIFRYTRAGPSVYVVAYVYIDRFCQNNPGFRINARNVHRLLITTIMLASKYVEDMNYRNSYFGRVGGLTTDELNKLELEFLFLMDFKLHVNVSVFESYCCHLEREVSIGGGYHIERTLRCAEEIKAKHREERGYTHIARVML

SEQ ID NO: 10267 - protein, 310 aa, Malus x domestica
MSTGTLSSGYEMPVIGLGLWRLEKDELKEVILNAIKIGYRHFDCAAHYKSEADVGEALAEAFKTGLVKREELFITTKIWNSDHGHVVEACKNSLEKLQIDYLDLYLVHYPMPTKHNAIGKTASLLGEDKVLDIDVTISLQQTWEGMEKTVSLGLVRSIGLSNYELFLTRDCLAYSKIKPAVSQFETHPYFQRDSLVKFCMKHGVLPTAHTPLGGAAANKDMFGSVSPLDDPVLNDVAKKYGKSVAQICLRWGIQRKTAVIPKSSKIQRLKENLEVLEFQLSDEDMQLIYSIDRKYRTSLPSKTWGLDVYA

SEQ ID NO: 10268 - protein, 208 aa, Zea mays
  misc_feature (78)..(78): Xaa can be any naturally occurring amino acid
  misc_feature (113)..(113): Xaa can be any naturally occurring amino acid
  misc_feature (183)..(183): Xaa can be any naturally occurring amino acid
MACNYANRLLSPHPHSHAKNDVPSGLAAVLLCAAVAAALGGKRAPIPDDLRDVIDDEEDDEWRRYGTPPSRGPGRGDXQPPDLSRMDPAALQDELLRGQTGPSFGFVKLRPGXRRSREDVVGIATRWSNVLRTGSVDAKFVAVNFVTLMFTMERGRDILELKEFVLSQAEAYELRIGDQVFRXPGDPPLDQVLRKPRKKKRRKSRDEL

SEQ ID NO: 10269 - protein, 476 aa, Glycine max
  misc_feature (361)..(361): Xaa can be any naturally occurring amino acid
  misc_feature (380)..(380): Xaa can be any naturally occurring amino acid
ETEQFVWRVLPLLTILMSLVVFFYLQDSYRAHLHPLVKFPRSKCSLLPHRHFWITSKRIVTPQGIISGSVEINEGKIISVIKGYSKQGKSKQEKIIDYGGAVVMPGLIDVHVHLDEPGRTAWEGFDTGTRAAAAGGVTTVVDMPLNNHPTTVSRETLKLKLEAAENKIYVDVGFWGGLIPENAHNTSILEGLLSAGVLGVKSFMCPSGIDDFPMTTIDHIKAGLSVLAKYRRPIVVHAEIQQHFENHLELNEDNLDPRAYLTYLNTRPPSWEEAAIKQLVSVTKDTRKGGPLEGAHVHIVHLSDSSASLDLIKEAKSHGDSISVETCPHYLAFTSEEIPNGDTRFKCSPPIRDAYNKDKLXEAVLEGHIDLLRTDHSPTXLEQLSLLWSKKPATLAGLESKGAIAVGNHADIVVWQPELEFDLDDDYPVFIKHSELSAYMGRRLSGKVLETFVRGNLVFKDGKHAPAPCGVQILAK

SEQ ID NO: 10270 - protein, 181 aa, Vigna radiata
MASSMISSPAVTTVNRAGAAGMVAPFTGLKSLGGFPTRKTNNDITSVANNGGRVQCMQVWPTIGKKKFETLSYLPDLTEEQLGKEVDYLLRSGWIPCLEFELSHKDAFPHRENNRSPGYYDGRYWTMWKLPMYGCTDSSQVLKELREARTLYPDGFVRIVGFDSVRQVQCISFIAYKPPGY

SEQ ID NO: 10271 - protein, 123 aa, Psychrobacter sp. 273-4
MALSKDDVLNAIAEMSVMDIVELISAMEEKFGVTAAVAAAPAAAGPAAAAAEEKDEFDVVLASFGEKKVGVIKAVREATGLGLKEAKDLVESAPASIKEGVNKAEAEELKKKLEEAGATVELK

SEQ ID NO: 10272 - protein, 405 aa, Glycine max
MVLEATMICIDNSEWMRNGDYSPSRFQAQADAVNLICGAKTQSNPENTVGVLTMAGKGVRVLVTPTSDLGKILACMHGLDIGGEMNLAAGIQVAQLALKHRQNKKQQQRIIVFAGSPVKHEKKMLEMIGRKLKKNSVALDIVNFGEEDEGKTEKLEALLAAVNNNDTSHIVHVPSGPNALSDVLISTPIFTGDGEGGSGFAAAAATAAAGGVSGFEFGVDPNLDPELALALRVSMEEERARQEAAAKKAAEDAAKQEKGGEQQASSQDATMTEGASAAASEAENKTSDLMDDENALLQQALAMSMDDPTISHDVKDTDMSEASASDPDLALALQLSIADSAKDQSSQSDMSKLLADQSFVSSILASLPGVDPNDPSVKDLLASMQNQSEPQQKNDDKPSNEEEKK

SEQ ID NO: 10273 - protein, 225 aa, Glycine max
MTRKIMGTLTSNINLSPQYNVPKDYPPHGSVVEEIQGLIRVHKHGYVERPQVVPCVTASSKMSPELNVTSRDMAIDSATNTWARFYVPISQHKKMPFLVYFHGGGFCVGSAAWSCYHDFLARLSAKVECVIMSVNYRLAPENPLPAPYDDGLKAIMWVKQQMLHQQHNKGGSEWWTSKCNFSSVFLGGDSAGANIAYNVATRLCACDGAALRPLNLKGLILIQPF

SEQ ID NO: 10274 - protein, 117 aa, Brassica napus
MEGVGGRLGRSSTRYGGPATVFTGPVRKWKKKWVHVSPSTKKLNHSSSSSAASDAANGSHLLFFKWAPLSQTGNGNEDGKSESLSPSEDTVAVAAEDPPRRRFKYVPIALLEEQKNE

SEQ ID NO: 10275 - protein, 346 aa, Rosa gigantea
QKWSNGEHSNELLHAQAHIWNHIFSFINSMSLKSAIQLGIPDIINKHGYPMTLFELTSALPIHPTKSHSVYRLMRILVHSGFFAKKKLSKTDEEGYTLTDASQLLLKDHPLSLTPYLTAMLDPVLTNPWNYLSTWFQNDDPTPFDTAHGMTFWDYGNHQPSIAHLFNDAMASDARLVTSVIIDDCKGVFEGLESLVDVGGGTGTMAKAIADAFPHIECTVLDLPHVVADLQGSKNLKYTRGDMFEAVPPADTVLLKWILHDWNDQECIKILKRSRVAITSKDKKGKVIIIDMMMENQKGDEESIETQLFFDMLMMALVGGKERNEKEWAKLFTDAGFSDYKITPIL

SEQ ID NO: 10276 - protein, 313 aa, Oryza sativa (japonica cultivar-group)
MERRPELRRTMTLSEQLSAPDQAIRDFLKIPHDGLGGGDGEGGRIPAAAGASGGGGGVGGMINWKPLRDRLRLRRAASAWMSASPKPAASNSGGGGGGGATLSSSNSGSNHSNKYNYSPGEAAAAFSRTFSRTRSLRPTPTFSRATSTRLGATAFSSGSRRAAVDGGGHANEDDDEDHTDDDDDDDEEEQGKDDAPAAQMSLMALLEQSDSQWDSEDEDDQGHGGGGGGGGNGGGGGGGGARKNGDGDDDEDDGEGREEEMVHVCCVCMVRHKGAAFIPCGHTFCRLCSRELWVSRGNCPLCNGFIQEILDIF

SEQ ID NO: 10277 - protein, 285 aa, Xylella fastidiosa 9a5c
MTTNDSWFTEHFQATGSAIGFRITGKLDEVQSPFQKIEIYNSTDWGKLMVIDGALMLTSRDNFLYHEMISHPALFTHTAPKCVVIIGGGDCGTLREVLKHPDIEQVTQCDIDEQVTRMAEKHFPELCTSNNDPRATLLFSDGVAYMTDCPTNSVDVIIVDSTDPVGPAKGLFNRTFYESCFRALKNDGLLVQQSESPLALLELIKEMRHEMSKAGFKAFKTLPFPQPCYPTGWWSVTLSSKQPNANFAFRQTDAQTKPFDTLYYNAHLHHGVLVPPPFIAHALGE

SEQ ID NO: 10278 - protein, 359 aa, Pirellula sp.
MNSSIVLLPGDGIGPEIVEQARLVLVKVAERFGHTFDFSSHQIGGIAIDETGDPLPQPTIDACRNAAAILLGAVGGPKWDDPSAKTRPEAGLLKIRKELGLFANLRPIKLFDELADASPLRADIVKGTDILFFRELTGGIYFGESGTSGSGEEETAFQSMTYSVGEVKRIVRMAAQAARGRSNRLTSVDKANVLEPSRLWRRVAAEVMANEFPDVQYDVVLVDSMAMHLINRPSEFDVVVTGNMFGDILTDEASMLPGSLGMLPSASLGDGGPGLYEPIHGSAPDIAGKSVANPLATILAAAMMLRHSLGLTDEAEAIEKAVAGVITDGLRTPDLARGDQSKSVSTEEMGAAVVAKLAS

SEQ ID NO: 10279 - protein, 346 aa, Rosa gigantea
QKWSNGEHSNELLHAQAHIWNHIFSFINSMSLKSAIQLGIPDIINKHGYPMTLSELTSALPIHPTKSHSVYRLMRILVHSGFFAKKKLSKTDEEGYTLTNASQLLLKDHPLSLTPFLTAMLDPVLTKPWNYLSTWFQNDDPTPFDTAHGMTFWDYGNHQPSIAHFFNDAMASDARLVTSVIIDDCKGVFEGLESLVDVGGGTGTVAKAIADAFPHIECTVLDLPHVVADLQGSKNLKYTGGDMFEAIPPANTVLLKWILHDWNDEECVKILKRSRKAITSKDKKGKVIILDMMMENQKRDEESIETQLFFDMLMMALVTGKERNEKEWAKLFTDAGFSDYKITPIL

SEQ ID NO: 10280 - protein, 346 aa, Rosa gigantea
QKWSNGEHSNELLHAQAHIWNHIFSFINSMSLKSAIQLGILDVINKHGYLMTLSELTSALPIHPTKSHSVYRLMRILVHSGFFAKKKLSKTDEEGYTLTNASQLLLKDHPLSLTPFLTAMLDPVLTKPWNYLSTWFQNDDPTPFDTAHGMTFWDYGNHQPSIAHFFNDAMASDARLVTSVIIDDCKGVFEGLESLVDVGGGTGTVAKAIADAFPHIECTVLDLPHVVADLQGSKNLKYTGGDMFEAIPPANTVLLKWILHDWNDEECVKILKQSREAITSKDKKGKVIIIDMMMENQKGDEESIETQLFFDMLMMALVTGKERNEKEWAKLFTDAGFSDYKITPIL

SEQ ID NO: 10281 - protein, 169 aa, Triticum aestivum
MAPTVMASSATAVAPFQGLKSTATLPVARRSTTSFAKVSNGGRIRCMQVWPADGNKKFETLSYLPPLTEEQLLKQVDYLLRNNWVPCLEFSKEGFVYRENSTSPCYYDGRYWTMWKLPMFGCTDASQVYKELQEAIASYPDAYVRILGFDNIKQTQCVSFIAYKPAGSE

SEQ ID NO: 10282 - protein, 274 aa, Triticum aestivum
  misc_feature (260)..(260): Xaa can be any naturally occurring amino acid
HASADAWGVVGVITAFNFPCAVLGWNACIALVCGNCVVWKGAPTTPLITIAMTKIVASVFEKNNLPSAIFTAFCGGAEIGQAIALDTRIPLVSFTGSTKVGQMVQQQVSARFGKCLLELSGNNAIIVMDDADIPLAVRSVLFAAVGTAGQRCTTCRRLLLHESIYQTFLDQLVEVYKQVRIGDPMEKGTLLGPLHTTASKESFLKGIQNIRSQGGKILLGGSAIESEGNFVQPTIVEISPAAPVVKEGMVLVPVLYAMEXQTLEEAIEITNFCS

SEQ ID NO: 10283 - protein, 346 aa, Rosa gigantea
QKWSNGEHSNELLHAQAHIWNHIFSFINSMSLKSAIQLGIPDIINKYGYPMTLSELTSALPIHPTKSHSVYRLMRILVHSGFFAKKKLSKTDEEGYTLTDASQLLLKDHPLSLTPFLTAMLDPVLTKPWNYLSTWFQNDDPTPFDTAHGMAFWDYGNHQPSIAHLFNDAMASDARLVTSVIIDDCKGVFEGLESLVDVGGGTGTMAKAIADAFPHIECTVLDLPHVVADLQGSKNLKYTGGDMFEAVPLADTVLLKWILHDWNDEECVKILKQSREAITSKDKKGKVIIIDMMMENQKGDEESIETQLFFDMLMMALVTGKERNEKEWAKLFTDAGFSDYKITPIL

SEQ ID NO: 10284 - protein, 506 aa, Brucella suis 1330
MVMSTIVKPQPLTGLEVREFSMLIDGKWVGSDSGKSIERVAPGHGVTVSRYPAGNKADVERAVSAARKAFDDGRWSSTTASQRSLVLLKAADLIEARAEELAYLDAIEAGKPISQVRGEISGSVDIWRYAAALARDLHGESYNTLGDGTLGVVLREAIGVVSIITPWNFPFLIVGQKLPFALAAGCTAVVKPSELTSGSTLLLGEILAEAGVPDGVVNIVTGTGADVGQHMSTHPHVDMVSFTGSTGVGKLTMANAAQTLKKVSLELGGKNPQILFPDADMDAFIDAAVFGAWFNAGECCNAGSRLIVHRSVVDAIVGRVADLSKKVIVGDPLDASTQVGAIITPQHLTKVGAYVDQARKAGAAIAHGGEVLDLGLGQYMGPTILAGVKADMAVAREEVFGPVLSVLSFDTVEEAISIANAVDYGLSAGVWSRDFDTCMTIGRKVRAGTVWMNTFMDGTPELPFGGYRQSGLGRELGRHAVEDYTETKTLNMHIGARTGWWMPQAK

SEQ ID NO: 10285 - protein, 428 aa, Zea mays
  misc_feature (389)..(389): Xaa can be any naturally occurring amino acid
MESTLKGIRGSDAPCVLDLDDAATVAGGVEDTYGEDRATEEQLVTPWTVSVASGYNLLRDPRYNKGLAFTERERETHYLRGLLPPAIVSQELQERKIMNNIRQYQLPLQRYMALMDLQEGNERLFYKLLIDNVEELLPIVYTPTVGEACQKYGSIFSRPQGLYISLKEKGKILEVLKNWPERSIQVIVVTDGERILGLGDLGCQGMGIPVGKLSLYTALGGVRPSACLPITLDVGTNNEELLNDEFYIGLRQRRATGQEYTDFLQEFMSAVKQNYGEKVLIQFEDFANHNAFDLLARYGTTHLVFNDDIQGTASVVLAGLIAAQTLLGGSLADHTYLFLGAGEAGTGIAELIALEISRQTKAPIEECRKKIWLVDSKGLIVSTRKESLXHFKKPWAHEHKPLINLLDAVNAIKPTVLIGTFRKVQTFT

SEQ ID NO: 10286 - protein, 146 aa, Brassica napus
RPTRPPTRPPTRPPTRPVLTCRIFCNVRWDERSSAVTPDEEVFYLVALLRSALSDGEETQKLEYLKDQNRRILEFCEQAKINVKQYLPHHATQEEWVDHYGDRWDQFRSMKTEFDPRHILATGQKIFQNPSLALFPPSPSSSSASW

SEQ ID NO: 10287 - protein, 448 aa, Burkholderia cepacia R1808
MSTPATDDWVARSLRAVWHPCTQMKHHERLPLVPVARGAGVWLYDRDGRRYFDAISSWWVNLFGHANPHINAALKDQLDTLEHAMLAGCTHEPAIELAERLHALTARTLGHAFFASDGASAVEIALKMSFHAWRNRGQGDKREFVCVANSYHGETIGALGVTDVALFKDAYDPLIRNAHVVASPDARGAQPGETAADVAQRALGDVRRLFAERAGQIAALLVEPLVQCAAGMAMHDPSYVRGLRALCDEFGVHLIADEIAVGCGRTGTFFACEQAGVWPDFLCLSKGISGGYLPLSLVLTRDDVYAAFYDDDTTRGFLHSHSYTGNPLACRAAVATLELFARDDVLAANARKSAALRAALAPLDAHPQVRHLRERGTLFAFDVALDGDAARGFSRRFFERALERELLLRPIGTTVYLMPPYVMTDDDIAWLAQRTRDTLDATLAEAAR

SEQ ID NO: 10288 - protein, 456 aa, Rhodococcus opacus
MVVDVTELRARARRHLGPHFTRKDTWESDFPVFVRGEGSYLIDTEGDRFLDGLAGLFCVNIGHGRDDIAKAASEQIGTLAYASNWGSAHIPAIEASALIADLAPGDLGTTFFVNSGSEAVETAVKFARQYHRSQGNPQRTKIISREMAYHGTTLGALSVTQLPKIKDPFGPLLPGVRSVPNTLGYLGDCGPANELDCIAAIEAVIEEEGAETIAAVFAEPVQNGRGALVPPDGYWAALRALCDKHGILLVSDEVICSFGRLGHWFGHGLTGVVPDMITFAKGSTSGYAPLGGLIVREQLVRELYDSPKGGVFTHGATWGGHPVSTAVAVANITAMRDENVLGNVSARGPKLRSALDSLMSSHRCVKDVRGTGFFYAIELMADSDSGREFTEQESLTVLRKVLPEAFARTKVILRGDDRGATMLMISPPLVADDEVLSELLHGIDSMLTDIEKAIQP

SEQ ID NO: 10289 - protein, 486 aa, Comamonas sp. JS765
MLAKQILNFINGEFVATGKWFDNRTPISNAVIGQVAEAGQAEVDAAVAAARAALKGPWGSMTLAQRVELLEALVAEITRRFDEFLEAECADTGKPRSLASHIDIPRGAANFKVFADVVKNVPTEFFEMATPDGRGAINYGYRKPVGVVGVICPWNLPLLLMTWKVGPALACGNTVVVKPSEETPRTAALLGEVMNHVGIPKGVYNVVHGFGPGSAGEFVTSHPGIDAITFTGETRTGEVIMKAAAKGARPVSLEMGGKNAAIVFADCDFDAAIEGTLRSAFVNCGQVCLGTERVYVERPIFDKFVAALKQQVEGWKIGVPEGADTQLGPLISKEHQAKVLSYYQLAVQEGATVVTGGGVPDMPGELKDGCWVQPTIWTGLPETARVIKEEIFGPCCHIAPFDTEDEVLAKANDNEYGLATAIWTRDLSRAHRVAQRMEVGISWVNSWFLRDLRTPFGGSKQSGIGREGGVHSLEFYTELKNVCIKL

SEQ ID NO: 10290 - protein, 462 aa, Methanosarcina barkeri str. fusaro
MSGGIEIKNRHSASELETDLKKNSRKDLKINSEKNLEKNSENNLEKDSGQGLEKHQEKSGDEHTSLYQESLAVHRRFGGVLEVASKVSLQTIHDLSVAYTPGVAEPCRKIIKDPELVYLYTMKRNTIAVVTDGSAVLGLGNIGPYAALPVMEGKAIIFKEFAGIDAFPICLDTQETEEVIKAVKHLAPAFGGINLEDISAPRCFEIEGRLREELDVPVMHDDQHGTAIVVFAGLLNALKIVNKKLNELHIVISGMGAAGVAIFRFLVRAGANPARILVCDSKGLVYEGRKNGMNPVKEEVARLTNPEKLKGGLENAFPDADLFIGVSVGGIVNEEMVRSMAKDAIVMAMANPLPEIMPDAAKRAGARVVATGRSDFPNQLNNCLSFPGVFKGALSTCARKITPEMEMAASHALAEVVTLNELSEDRIIPDPLDRRVVPAVAKAVASASLESCVARKSHEDMA

SEQ ID NO: 10291 - protein, 432 aa, Burkholderia cepacia R18194
MPVAVAGDGIEIIDSTGKRYIDACGGAAVSCLGHSNQRVIDAIKRQAQQLAYAHTSFFTTDVAEELADRLVAAAPAGLEHVYFVSGGSEAVEAALKLARQYFVEKGEPQRRHFIARRQSYHGNTLGALAIGGNAWRREPFLPLLIEAHHVSPCFAYRDQQAGETDEAYAQRLADELEQKIVELGADNVAAFVAETVVGATAGAVPPVRTYLKKIRAVCDKYGVLLILDEIMSGMGRTGYLYACDEDGVAPDLLTIAKGLGAGYQPIGATLVSDRIYRTIVDGSGFFQHGHTYLGHATACAAALEVQRVIAEEKLLDNVKARGEQLRASLRDHYGAHPHIGDVRGRGLFVGVELVRDRDSKATFDPALKLHAAVKREAMQRGLMVYPMGGTIDGVHGDHILVAPPFICTAQQIDTIVERLSGAIGAALASAGA

SEQ ID NO: 10292 - protein, 202 aa, Glycine max
  misc_feature (146)..(146): Xaa can be any naturally occurring amino acid
  misc_feature (155)..(155): Xaa can be any naturally occurring amino acid
  misc_feature (174)..(174): Xaa can be any naturally occurring amino acid
MLTAGDYSNHGRPLQPETSLAELNLPRVLCVLSSMLEKLVARNEKLIDILSQELDGLNSGSVRLGNSLNTFHGVRAPSISIPKYLERIYKYTNCSPSCFVVGYVYIDRLTHRHPDSLVTSLNVHRLLVTSVMVASKMLDDEHYNNXIYAPSRGGXSNAELTKLELELLFLLDFXVMVSSRVFESYCFHLEKEIGCQWHGHED

SEQ ID NO: 10293 - protein, 278 aa, Oryza sativa (japonica cultivar-group)
HASDGRTQLASWARIAMDRGDHHHLQQQHQFLMPPPAPVVPPQLCMPAMMADEQYMDLGGGGAAAAPGRGGAGERKRRFTEEQIRSLESMFHAHHAKLEPREKAELARELGLQPRQVAIWFQNKRARWRSKQLEHDYAALRSKYDALHSRVESLKQEKLALTVQLHELRERLREREERSGNGGAATTAASSSSCNGSGSEEVDDDDDKRNAAAGCLDLEPPESCVLGGATCATPADVSVESDQCDDQLDYDEGLFPESFCATPELWEPWPLVEWNAVA

SEQ ID NO: 10294 - protein, 446 aa, Oryza sativa (japonica cultivar-group)
MVGGGALRRVGKYEVGRTIGEGTFAKVKFAQNTESGESVAMKVVDRSSILKHKMADQIKREISIMKLVRHPNVVRLHEVLASRKKIFIILEFITGGELFDKIIRHGRLNEADARRYFQQLIDGVDFCHSKGVYHRDLKPENLLLDSQGNLKISDFGLSAWPAQGGALLRTTCGTPNYVAPEVLSHKGYDGALADTWSCGVILYVLLAGYLPFDEVDLTTLYGKIESAEYSFPAWFPNGAKSLIHRILDPNPDKRIRIEEIRNDEWFKKNYEPTREIESEEVNLDDVNAAFDDPEEDADHTLDDEAGPLTLNAFDLIILSQGLNLAALFDRRQDYDKLQNRFLSRKPAKVIMSSMEVVAQSMGYKTHIRNYKMRVEGLNANKTSHLAVMLEIFEVAPSIFMIELQRAAGDTSDYNKFINNYCSKLDDIIWNFPIEKSKSRISRLSKR

SEQ ID NO: 10295 - protein, 343 aa, Bradyrhizobium japonicum USDA 110
MRAVVIHAPKDLRIDSYPDPAPGPGEVRVKIANGGICGSDLHYYHHGGFGVVRIQQPMALGHEIAGVVAAVGDGVTSVKPGTRVAVNPSKPCGKCLHCQEGMRNQCLDMRFLGSAMRFPHVQGGFREFLTIDATQAVPIADELSLAEAAVAEPLAVCLHAGKQAGPLLGKRVLITGCGPIGALMILVSRFGGASEIVVTDVADAPLAVARKLGATHAINVATHATALDPWRAGKGVFDTLFEASGNQAALRTALDVLRPGATLVQLGLGGEMTLPINSIVAKELQLRGTFRFDPEFELAVRLMGEGLIDVKPLITATMPFENAVAAFELASDRSQSMKVQLSF

SEQ ID NO: 10296 - protein, 420 aa, Zea mays
  misc_feature (80)..(81): Xaa can be any naturally occurring amino acid
  misc_feature (142)..(142): Xaa can be any naturally occurring amino acid
INTGRVTFLRSIGLREYSRYLTFNHPCSHEKPLLSHLRFFPWVVNEVYFKVWRQGRTGYPLVDAGMRELWATGWVHDRIXXVVVSSFFVKVLQLPWRWGMKYFWDTLLDADLESDALGWQYISGSLPDGRELDRIDNPQFEXRVDPRVRYKFDPHGEYVRRWLPELARLPTEWIHHPWDAPESVLQAAGVELGSNYPRPIVELDAANSRLQDALSEMWELEAASRAAMENGMEEGLGDSTDEPPIDFPQELRMEVDRQPVQPAIHAPGVTGRRREDQMVPSMTSSFIRAETELTADFGHTSEDSRPEVPSNIHHLQARPEREETVDGGTGNAVRVHGNHHQQNLQNNMHRVLGIAPSISEASSSWTGRDGGVVPVWSPPAASGHSDSYAADEADISSRGYLDRHPQSHTMMNWSQLSQSL

SEQ ID NO: 10297 - protein, 268 aa, Zea mays
  misc_feature (224)..(224): Xaa can be any naturally occurring amino acid
MEAEAAAKRAREGGEDATAPVAGAEAAVAGAGEQAGISAVIPGWFSEISPMWPGEAHSLKVEKVLFQGKSDYQNVMVFQSSTYGKVLVLDGVIQVTERDECAYQEMITHLPLCSIKDPKKVLVIGGGDGGVLREVSRHISVEQIDICEIDKMVVDVSKQFFPHLAVGFEDPRVSLHIGDGVAFLKNAPEGTYDAVIVDSSDPIGPAQELFEKPFFQSVARALRXPGGVVCTQAESIWLHMHIIEDIFVNCRQVFKGSVNYAWTTVPTY

SEQ ID NO: 10298 - protein, 364 aa, Arabidopsis thaliana
MGKGGMSQGEGSKVEEENMAAWLVGINTLKIQPFLLPSVGPHDVRVRMKAVGICGSDVHYLKTMICADFVVKEPMVIGHECAGIIEEVGEEVKHLVVGDRVALEPGISCWRCNLCREGRYNLCPEMKFFATPPVHGSLANQVVHPADLCFKLPENVSLEEGAMCEPLSVGVHACRRAEVGPETNVLVMGAGPIGLVTMLAARAFSVPRIVIVDVDENRLAVAKQLGADEIVQVTTNLEDVGSEVEQIQKAMGSNIDVTFDCAGFNKTMSTALAATRCGGKVCLVGMGHGIMTVPLTPAAAREVDVVGVFRYKNTWPLCLEFLTSGKIDVKPLITHRFGFSQKEVEDAFETSARGSNAIKVMFNL

SEQ ID NO: 10299 - protein, 468 aa, Sulfolobus tokodaii str. 7
MSEVIEIKSPSNLKVIGTVKRMSKDEVRGEIEEAYKGFETISRMPLYKRTAILRKVSEILEREQERLARLLAMEAGKPIKDSRVEVMRASRLFRQAAEEAAIVLEGKNYRVDAYEYPPGNENRIVISTREPIGVVTAILPFNFPINSFAHKVAPAIAVGNSVVVKPSISTPLSAIEMKKILVEAGLPDSAVRIVTGYSNEIGDELITHPLVGLITLTGSTQTGLAIASKAVSLGKRIIMELGGSDPIIVLEDANIDRASSIAVRARYEYAGQNCNAGKRIIVREEIYDKFVKAFKEKVKALKVGDPLDESTDIGPVINQESVEKLNKALEDAQSKGGNVEVLNKGPETGYFFPLSLVTNPSLDMLVLKTEIFGPIAPIVSVKSDEEAINIANSTEYGLQSAIFSNDVNRALKIAKELKFGAIIINDSTRLRWDSLPFGGFKKTGIGREGVRDTMLEMTENKLIAITLL

SEQ ID NO: 10300 - protein, 238 aa, Glycine max
  misc_feature (129)..(129): Xaa can be any naturally occurring amino acid
  misc_feature (230)..(230): Xaa can be any naturally occurring amino acid
WTRAKSLTPLIAPPSSYCFHYYFLVSRGGSGALGAGLSKFSTAAAIEEPIKPPLKVEHTQLLIDGKFVDAATGKTFPTLDPRTGDVISHVAEGDHEDVDRAVAAARKAFDRGPWPKMTAYERQRILLRXADLFEKHNDDLAALETWDNGKPYEQSAQIEIPMLVRLFRYYAGWADKIHGLTVPADGPYHVQTLHEPIGVAGQIIPWNFPLVMFAWKVGPALACGNTIVLXTAEQTPLS

SEQ ID NO: 10301 - protein, 223 aa, Arabidopsis thaliana
MAFAGTTQKCMACDKTVYLVDKLTADNRVYHKACFRCHHCKGTLKLSNYNSFEGVLYCRPHFDQNFKRTGSLEKSFEGKLPKTDQNVKSFVSGDFKFGIIYLKFDSYICTGTPKIGKPDRPLEGERPAGTKVSNMFGGTREKCVGCDKTVYPIEKVSVNGTLYHKSCFKCTHGGCTISPSNYIAHEGKLYCKHHHIQLIKEKGNLSQLEGGGENAAKDKVVAA

SEQ ID NO: 10302 - protein, 168 aa, Zea mays
VDEVLTCSGASTLQTDLIQFKPQLPFWKIAAIYSFDMGVYTKIFLKFPERFWPVGEGKQFFMYASSRRGYYALWQSFEREYPGANVLLATVTDDESRRIERQSDDQTKAEVAEVLRDMFPAADVPGPDQIDVYVPRWWSDRFFKGSYSNWPVGVSRYEYDQLRVRMPV

SEQ ID NO: 10303 - protein, 483 aa, Rubrobacter xylanophilus DSM 9941
MRVLENFIGGEWVEARGERAREVVSPVTGERLAEAPEASAEEISRAARAAREAQPRWAALSAWERAEVCHAVADLLEERKEELARQLSLEQGKPYRSEAIPDIEETAENFRVAAEDVKRLETAVIPSQDANKRIFTFREPNGVYACITPWNFPTVIPSELIAPAIAAGNAVVAKPSEWTPISMANLVQTMADAGLPGGVVNLVYGAGEVGERLVTDPAVDCVAFVGSHQTAERIVRSAGLRRTLIEASGNGPVIVCADADLRRAAKGAVFGGFYCSGQVCCATERVLVDRSVHEDFLRAVVEEARSWKLGDPFEEDTLVGPMNNEPTAAKMDRHLEDAVGKGASVVLGGGREEGRPTSLYYRPTVLDNVGTDTLINRDETFGPIVPLIPVSGDEEALAVANDSHLGLQAAVYTSSLRRAFAYLRNLRVGNVVINDSTDYWEALEPFGGAAGTRTGWGRVGGRYSLLEMTDLKTVVLDFGSLEG

SEQ ID NO: 10304 - protein, 213 aa, Brassica napus
  misc_feature (186)..(186): Xaa can be any naturally occurring amino acid
MGKGGMSQGEGSKVEEENMAAWLVGLNTLKIQPFPLPTLGPHDVRVRMKAVGICGSDVHYLKTMRCADFIVKEPMVIGHECAGIIEEVGEGVKHLVVGDRVALEPGISCWRCNLCKEGRYNLCPEMKFFATPPVHGSLANQVVHPADLCFKLPENVSLEEGAMCEPLSVGVHACRRAEVGPETNVXLVMGAGPIGLVTMLAARCFWCAKKLGI

SEQ ID NO: 10305 - protein, 484 aa, Synechococcus sp. PCC 7002
MTFSFDSWFRGLSPRLSYPFRRQGRLLLLACMLPLLWQGVAIAQGSLGEIPPAVQVTLDTLWVVFAAMLVFFMNAGFAMLESGFCRAKNTVNILAKNLIVFALSSLAFWAIGFALMFGDGNAVLGWNGFFLTGADNSPLTGSAYSGIFSSLSWAGIPLYTKFFFQLAFAGTAATIVSGAVAERIKFASFVIFSLFLVGFSYGITGHWVWGGGWLATLGFYDFAGSTVVHSVGGWAALMGVILLGPRLEKFAGDRINAIPGHNMSTATLGGLILWLGWFGFNPGSTMAADPDAISHIIVTTNMAAAAGAIAATITSWIQFGKPDLSMIINGVLAGLVGITAACAYVNVPSAIVIGAIAGVIVVFSVLTFEGLRFDDPVGALSVHLVCGIWGTLAVGLFSVGGDIYPWYAADAGPSAGLLFGGGVAQLLSQFIGVVVVGMFTAGFSFAIWLVLELSMGLRVSKEEELEGLDIGEHGMEAYHRFFRE

SEQ ID NO: 10306 - protein, 329 aa, Triticum aestivum
  misc_feature (260)..(260): Xaa can be any naturally occurring amino acid
MDPMDIVGKSKEDVSLPKSTMTKIIKEMLPPDVRVARDTQDLLVECCVEFINLLSSESNDVCSRDDKKTIAPEHVIRALQDLGFKEYVEEVYAAYEQHKLETLDSPKATKFTGIEMTEEEAVAEQQRMFAEARARMNNGAAKPKEPALEPQNQPQQPPQPHLQLHPQAQQPPQPQPQLHHPQSQQPLHPQLQPYTQAPPQQPLHPQLQPYTQAPPQQPLQPPLQLYPQAQPEQPLQPQSSGSTTGTCVISTAAPSATGTXLLLQPPPQQSPQSQLQLHQQPQPMQVPLPPLPQPQPQPPELQQPQPLTQLQAEHGLNWTVSGSEHVASL

SEQ ID NO: 10307 - protein, 118 aa, Brassica napus
MTSASELFSTRRSRRGRSVPDLESDSFLYRYHSDHHHRRHGIHHLNHRHDSNGCDPPRRAPPRLRRFCLSERRPVHDVQGTSQYLNTNGADLETEGNSFGNLERLPGAVLLARERLFE

SEQ ID NO: 10308 - protein, 466 aa, Lactococcus lactis
MLYGKENRDEAEFLEPIFGSESEQVDLPKYKLAQQSIEPRVAYQLVQDEMLDEGNARLNLATFCQTYMEPEAVKLMSQTLEKNAIDKSEYPRTTEIENRCVNMIADLWNASEKGKIYGTSTIGSSEACMLGGMAMKFSWRKRAEKLGLDINAKKPNLVISSGYQVCWEKFCVYWDIEMREVPMDREHMSINLEKVMDYVDEYTIGVVGIMGITYTGRYDDIKALDNLIEEYNKQTDYKVYIHVDAASGGLYAPFVEPELEWDFRLKNVISINTSGHKYGLVYPGVGWVLWRDKKYLPEELIFKVSYLGGELPTMAINFSHSASQLIGQYYNFVRYGFDGYKAIHERTHKVAMYLAEEIEKTGMFEIMNDGAQLPIVCYKLKENSNRGWNLYDLADRLLMKGWQVPAYPLPKNLENEIIQRLVIRADFGMNMAFNYVQDMQEAIDALNKAHILFHQEPENKTYGFTH

SEQ ID NO: 10309 - protein, 330 aa, Gibberella zeae PH-1
MSADDSYAPKSPDLSSFYSNGPTQEEVHHPQTDSHFRPGYEYKAESPTYTRSASFSSYVPPSPHFDNTTRVSADSTFHHLEFDYQQRSAQPRTSRPEYQPYPSRHSSIPEHYIYSTPDQPRLSGHGYECDPTSSHSYPRQPQVRQASLGGQVYPEQASNHNATTYDPSYTPLTAAGGLERTSTFGAAQFDTNMPPRKAAPPAAPAIDPSPVRTKFPTARIKRIMQADEEVGKVAQQTPIAVGKALELFMIQLVTKSADVAKDKGSKRVTASMLKQVVETDEQWDFLRDIVSRVENEKEGSRSKAKQESSSDEEIEEPKKRTRGGRKKKAA

SEQ ID NO: 10310 - protein, 497 aa, Azotobacter vinelandii
MTTPTRNDWEERARSLIIEGRAFVDGQYLPAADGATFDCLSPIDGRLLAQVASCAAADADLAVAAARRSFESGRWSRLAPAKRKAVMIRLAELLEIHREELALLETLDMGKPIKYSLSIDVPAAARALRWSGEAIDKLYGEVAATPDDELGLVTREPVGVVAAIVPWNFPLLMACWKLGPALASGNSVVLKPSEKSPLTAIRLAQLAFEAGIPPGVLNVLPGYGHSVGRALALHMDVDCLVFTGSTRVAKQLMVYAGESNMKRIWLEAGGKSPNIVFADAPDLAAAAEAAASAIAFNQGEVCTAGSRLLVERSIKEAFLPLVLEALKTWQPGHPLDPATNVGALVDRQQLDTVLGYIEAGLGEGASLLAGGRRILEETGGTYVEPTVFDGVSNAMKIAREEIFGPVLSVIVFDTPEEAVQIANDTSYGLAAAIWTRDLSKAHRTARALRAGSVWINQYDGGDMTAPFGGFKQSGNGRDKSLHAFDKYTELKATWIKL

SEQ ID NO: 10311 - protein, 420 aa, Rubrivivax gelatinosus PM1
MAKQKRNAFYAQSGGVTAVINASACGVIETARRHKDRIGKVYAGRDGIIGALTEDLIDTGKESATAIAALRSTPSGAFGSCRYKLKSLEANRREYERLIEVFRAHDIGYFFYNGGGDSADTCFKVSQLSEAMGYPVQAIHVPKTIDNDLAFTDCCPGFGSVAKYVAVSTLEASFDVRSMAKTSTKVFVVEVMGRHAGWIAAAAGLVEEQGIPVVILFPEIVFDEPEFLARVDQLVRQHGYCTVVVSEGCHHADGSFLAEQGARDAFGHAQLGGAAPVVANLIKQALGHKFHWAVADYLQRSARHIASKTDVTQAYALGRKAVELALQGHNAVMPTIERLSDAPYKYRIGMAPLAKVANVEKFMPRDFISKDGFGITEKCRRYLRPLIQGEDYPRFTNGLPRYVSLKNVAVPKKLAAFDLK

SEQ ID NO: 10312 - protein, 585 aa, Triticum aestivum
MCGILAVLGCADDTQGKRVRVLELSRRLKHRGPDWSGMHQVGDCYLSHQRLAIIDPASGDQPLYNEDKSIVVTVNGEIYNHEQLRAQLSSHTFRTGSDCEVIAHLYEEHGENFIDMLDGVFSFVLLDTRDNSFIAARDAIGVTPLYIGWGIDGSVWISSEVKGLNDDCEHFEIFPPGHLYSSKQGGFKRWYNPPWFSEVIPSVPYDPLALRKAFEKAVVKRLMTDVPFGVLLSGGLDSSLVAAVTVRHLAGTKAAKRWGTKLHSFCVGLEGSPDLKAAKEVANYLGTMHHEFTFTVQDGIDAIEDVIYHTETYDVTTIRASTPMFLMSRKIKSLGVKMVISGEGSDEIFGGYLYFHKAPNKEELHRETCQKIKALHQYDCLRANKATSAWGLEARVPFLDKEFINEAMSIDPEWKMIRPDLGRIEKWMLRKAFDDEEQPFLPKHILYRQKEQFSDGVGYSWIDGLKAHAESNVTDKMMSNAKFIYPHNTPTTKEAYCYRMIFERFFPQNSAILTVPGGPSVACSTAKAVEWDAQWSGNLDPSGRAALGVHLSAYEQEHLPATIMAGTSKKPRMIEVAAPGVAIES

SEQ ID NO: 10313 - protein, 336 aa, Acinetobacter sp. YAA
MNTLKFRVIDKIAETKESFSFVLKPLDGVLAEHSPGKYLPIKIRTEKGLLFRSYSLSSSASANEDFKITVKRERGGRGSNWLCDNVKVGDFIETLPPAGSFHPQNWDRDFVFFAGGSGITPVISIIKTALNRHKNRIKLFYANSSESSIIFHKELKDLCLQFPDRLDIQFWLDDEKGIPTSIAFEQYIDDALEVEYFLCGPAPFMGGVENFLIESKVPPGLITKESFAGSVSDDNGDTVESSAEKDVTVNFMLNGIKNSVMCSEDDFILNEIIKAGINVPSSCCAGNCGSCMCLLVSGDVILESNTVLDASDEEDGWILACRSKPRSKNIEISFDQ

SEQ ID NO: 10314 - protein, 486 aa, Azotobacter vinelandii
MKEIKHFINGEYVGSASGKLFDNVNPANGEVIARIHEAGEAEVDAAVKAARAALKGPWGKMSVAERTEILHRVAAGITARFDEFLEAECQDTGKPKSLASHIDIPRGAANFSVFADLVKNVPTEAFEMATPDGSGALNYGVRRPKGVIGVISPWNLPLLLMTWKVGPALACGNTVVVKPSEETPSTTALLGEVMNAAGVPAGVYNVVHGFGGNSAGAFLTAHPDVDGITFTGETGTGETIMRAAAKGVRQVSLELGGKNAGIVFADADLDKAIEGTLRSAFANCGQVCLGTERVYVQRPIFDAFVARLKAGAEALVIGEPNDPKANFGPLVSHKHREKVLSYYQKAKDEGATIVTGGGVPDMPQHLAGGAWVQPTIWTGLKDDSPVVTEEIFGPCCHIRPFDTEEEAIELANSLPYGLASAIWTENASRAHRVAGRIEAGIVWVNSWFLRDLRTAFGGAKQSGIGREGGVHSLEFYTELKNICVKL

SEQ ID NO: 10315 - protein, 434 aa, Desulfitobacterium hafniense DCB-2
MWWIKNAQVVDPAQGLSGVYDVLIGEGKVLQLKKGLTEAEVKGECGETGWQEIDAAGSYLFPGLIDVHTHLREPGREDKEDIASGSRAAVRGGFTTILAMPNTTPILDQKALVEYVVNQGKKVGLAKVHPIAAITKGQAGKELVEMVELAAAGAAGFSDDGRGVQQGEMMRLALEYAKLTSCPVISHCEDESLAHKGVMHRGIVSTRLGLKGIPSSSESVMVARDILLAEESGGKLHLAHISAKESVALIREGKKRGVDVTAEVNPHHLLFTDEAVARTPYGTSYKVNPPLRREEDRQALIEGLLDGTLDMLATDHAPHTWEEKTNPFDQAPFGISGLETALAAVWQELVTTGILPIELLIKAWSMNPAQRFQLPGGTLKVGGPADLILFDPEHTELIDTEYLASKGKNTPFLGQRLQGFPVKVWVDGRLVHEI

SEQ ID NO: 10316 - protein, 159 aa, Escherichia coli
  misc_feature (2)..(2): Xaa can be any naturally occurring amino acid
  misc_feature (24)..(24): Xaa can be any naturally occurring amino acid
  misc_feature (88)..(88): Xaa can be any naturally occurring amino acid
  misc_feature (139)..(139): Xaa can be any naturally occurring amino acid
  misc_feature (157)..(157): Xaa can be any naturally occurring amino acid
AXKLISNDLRDGDKLPHRHVFNGXGYDGDNISPHLAWDDVPAGTKSFVVTCYDPDAPTGSGWWHWVVVNLPADTRVLPQGFGSGLVAXPDGVLQTRTDFGKTGYDGAAPPKGETHRYIFTVHALDIERIDVDEGASGAXVGFNVHFHSLASASITAXFS

SEQ ID NO: 10317 - protein, 303 aa, Sulfolobus tokodaii str. 7
MIDPKIKKLLESTIQLPIGKASVEEIRSLFKQFSSLTPREEVGKIEDITIPGSETNIKARVYYPKTQGPYGVLVYYHGGGFVLGDIESYDPLCRAITNSCQCVTISVDYRLAPENKFPAAVVDSFDALKWVYNNSEKFNGKYGIAVGGDSAGGNLAAVTAILSKKENIKLKYQVLIYPAVSFDLITKSLYDNGEGFFLTREHIDWFGQQYLRSFADLLDFRFSPILADLNDLPPALIITAEHDPLRDQGEAYANKLLQSGVQVTSVRFNNVIHGFVSFFPFIEQGRDAIGLIGYVLRKVFYGK

SEQ ID NO: 10318 - protein, 321 aa, Oryza sativa (japonica cultivar-group)
MSDGGAGAKGAGFGMPRVGMGTAVQGPRPEPIRRAVLKAIEAGYRHFDTAAHYETEAPIGEAAAEAVRSGAIASRADLFITSKLWCSDAHRDRVLPALRQTLWNLQMEYVDLYLVHWPVSMKPGRYKAPFTADDFVPFDMRAVWEAMEECHRLGLAKAIGVCNFSCKKLDTLLSFATIPPAVNQVEVNPVWQQRKLRELCREKGVQICAYSPLGASGTHWGSDSVMASAVLRDIAQSKGKTVAQARHVCLRWVYEQGDCLIVKSFDEARMRENLDIVGWELTEEERQRIAGIPQRKINRALRFVSDHGPYKSLDDLWDGEI

SEQ ID NO: 10319 - protein, 341 aa, Mycobacterium vanbaalenii
MEAIVLNGTNDVGLTSVPDPAPQDGEVIIEVAATGLCGTDLHEYVAGPTFSQPPVVLGHEVSGRIVEVGAGVDQSRIGQGAAVIPMDFCGSCHYCHRSLYHLCQRPGWIGFTRNGGLANYVAVPSRLAVRVPDVVDLEEAALTEPTAVAFHAVRRAELLLGETVMVLGAGALGLTVIQCARAAGAARIFVTEPSGVRASLARDLGATLVLDPHDPGTTACILEETRGVGVDVVFHVAGSAEAFTQGLDCLRKQGRFMEMSSWAGAASLDVNRHLLKEIQLRMVFGYDMFDDFPAVLALIADGKLALAPQITARVPLDRAVKEGLGGLLEGREGLVKVLVKP

SEQ ID NO: 10320 - protein, 350 aa, Thermoanaerobacter tengcongensis MB4
MSIMDGLMTAVVKQYHKEGADIVKKEIPKIGPDEVLIKVKATSICGTDVHIYVWNEWAKSRIKPPKTMGHEFVGEVVEIGENVTSVKVGDLVSAETHIVCGKCRACRTGNAHICENTLILGVDTDGAFAEYIKVPESNVWINDKNIPLEILSIQEPLGNAVHTVFSGDVVGKSVAVIGCGPIGMMAIPLLKRTGAAAIFAIEPADYRRELAHKLGATRVINPLREDVVSIIKSETEGYGADVVLDFSGNPTAIRQGLEYIAKGGRMSILGLPDNEVPIDITNNVVFKGITIQGITGRRMYDTWYTVKGLLKSGLAEDLKPIITHTFPLTEYQKGMELMIKGQCGKVVLYP

SEQ ID NO: 10321 - protein, 166 aa, Escherichia coli
  misc_feature (146)..(146): Xaa can be any naturally occurring amino acid
AEFQVTSNEIKTGEQLTTSHVFSGFGCEGGNTSPSLTWSGVPEGTKSFAVTVYDPDAPTGSGWWHWTVVNIPATVTYLPVDAGRRDGTKLPTGAVQGRNDFGYAGFGGACPPKGDKPHHYQFKVWALKTEKIPVDSNSSGALVGYXLNANKIATAEITPVYEIKLE

SEQ ID NO: 10322 - protein, 416 aa, Arabidopsis thaliana
MAKMRPSVSLDTWREYFRRGDSDIFGIIDHAIMVAAADWPKEFKSRSDRIAELLFSCKVSRCIGCDHLELSIAGDEAAVEIVGVGGGGDRGDSGVATGEGEEASVSVDEVMRIRDILSNKDDEKDSVLLESLRKLESMSMSVDILKDTEIGKAVNGLRRHSSDKISKLAKTLFAEWKRLVDQWMNTPEEMAGTEGTPESLNLSVIDEEEAFPSPPHDLDIYAPEPNGFELSQTKCYPDKFPPSSLFHNVLGHLKILDCLDCDGNPRHSVESKHERKSQSSAGRRPKGTNDANVVGRYCNDQQTRREEADVRPMKHSATDVVEPKRQTKQSREQMVSAIQRKPTAVTEQKRKLAGPQQDKLKALDPDSKFEFAKRKLQESYHQHENAKRQRTIQVLETIPKQNKVQKPQLKRPATRR

SEQ ID NO: 10323 - protein, 479 aa, Escherichia coli CFT073
MSVPVQHPMYIDGQFVTWRGDAWIDVVNPATEAVISRIPDGQAEDARKAIDAAERAQPEWEALPAIERASWLRKISAGIRERATEISALIVEEGGKIQQLAEVEVAFTADYIDYMAEWARRYEGEIIQSDRPGENILLFKRALGVTTGILPWNFPFFLIARKMAPALLTGNTIVIKPSEFTPNNAIAFAKIVDEIGLPRGVFNLVLGRGETVGQELAGNPKVAMVSMTGSVSAGEKIMATAAKNITKVCLELGGKAPAIVMDDADLELAVKAIVDSRVINSGQVCNCAERVYVQKSIYDQFVNRLGEAMQAVQFGNPAERNDIAMGPLINAAALERVEQKVARAVEEGARVALGGKAVEGKGYYYPPTLLLDVRQEMSIMHEETFGPVLPVVAFDTLEEAISMANDSDYGLTSSIYTQNLNVAMKAIKGLKFGETYINRENFEAMQGFHAGWRKSGIGGADGKHGLHEYLQTQVVYLQS

SEQ ID NO: 10324 - protein, 482 aa, Burkholderia cepacia R18194
MRHYIDGAFVETARTFADTSPVDGREIARVCEADEASVDAAVRAARAAQAAGWRDTTPAQRADWLHRIADGIQARFDDFVAAEVADTGRPLAQARTLDIARGIANFRTFADLVRTAGDDCFESQTADGAQYLNYVTRKPLGVVGIISPWNLPLLLFTWKVAPALAMGNCVVAKPSEETPGSATLLAEVIDAVGLPRGVFNLVHGHGPAAAGEFLTRHPGIDAITFTGESRTGSAIMKAVADGVKDISFELGGKNAAVVFADADFDAAVDGIVKSSFTNAGQVCLCSERVYVERPIFERFVAALKTRTEALQVGAPDDPATTMGPLISRGHRDKVLSYFRLAVDEGATVVTGGGVPAFGDARDDGAFVQPTIWTGLPDTARCVTEEIFGPVCHVAPFDSEDEVIRRVNDSAYGLAASVWTTHLARGHRVAKRIETGIVWLNAWFVRDLRTPFGGTKLSGIGREGGRHSLDFYSETTNVCVRVA

SEQ ID NO: 10325 - protein, 253 aa, Triticum aestivum
  misc_feature (63)..(63): Xaa can be any naturally occurring amino acid
  misc_feature (81)..(81): Xaa can be any naturally occurring amino acid
  misc_feature (213)..(213): Xaa can be any naturally occurring amino acid
  misc_feature (243)..(243): Xaa can be any naturally occurring amino acid
MKTLLIVTILAMATTIATANMQVDPGYQVQWPQQQPFPQPQQPFCQQPQQTIPQPHQTFHHQXPQQTYPHQPQQQFPQTQXQPQQPFPQPQQTFPQQPQLPFPQQPQQPFPQPQQPQQQFPQSQQPQQPFPQPQQQFLQPQQPQQSFPQQQQPLIQLSLQQQMNPCKNFLLQQCNPVSLVSSLISMILPRSDCQVMQQQCCQQTGTEIPQQLXRCAAPHKGRASIIMQQEQRQGVQIRGPLVXLVQGQGIIQP

SEQ ID NO: 10326 - protein, 475 aa, Triticum aestivum
  misc_feature (186)..(186): Xaa can be any naturally occurring amino acid
MGATGDSEVAAAEGAAAGCRARAALLGAYELGRTLGEGNFGKVKQARHRATGEHFAVKILDRGRVLSLRGADDQVRREIATLTMLAHPNVVRLHEVAASKTKIYMVLEFVNGGELFDRIAIKRKLSEREGRRLFQQLIDGVSYCHGKGVYHRDLKPENVLIDRKGNIKISDFGLSALPQHLGQVAXNDGLLHTTCGSPNYIAPEVLQNRGYDGSLSDIWSCGVILYIMLVGHLPFVDRNMVVLYQKIFKGDTQIPEWLSPGAQNLLRRILEPNPMKRINMAEIKLHEWFQKDYIPAAPYDDDDEDVRLGAILPIKQQISEAPGDKSTHQMNAFQLIGMASSLDLSGLFEEEGVSQRKIRFTSAHPPKDLFDKIEVSATQSGFHVQRAHSKLKITGNCNGPNNPTPFLVCAEVFVLGPSLHVVELRKSHGDTAVYKKLCDRISSDLGIDKTFGMGSLFDDNLPGFDSRATTPLVAL

SEQ ID NO: 10327 - protein, 147 aa, Aspergillus oryzae
MPLSPEQIQLIKATVPVLQQHGTTITTVFYNNMLTAHPELNAVFNNANKVNGHQPRALAGALFAYASHIDDLGALGPAVELICNKHASLYIQPEQYQIVGKFLLEAMGEVLGDALTPEILDAWATAYWQLADLMIGREAELYKQADG

SEQ ID NO: 10328 - protein, 297 aa, Actinobacillus actinomycetemcomitans
NRDHYRIFNDDMQGTGAIVMAAVFSGLKVTKQNFAEQRLVVYGAGTAGTGMADQISAAMQRDGLSREEAKKRVWLIDINGLVTDDMPNLPDYQQEYARPAAEAAAWAKTDGKIGLLEVVKQVKPTILIGTSTDHGAFTEDVVKALCAGVERPILLPLSNPTERIEVMPTDAVQWSDGKALISVGIPVPPVPYKGVNYQIGQANNAMLYPGLGLGVIVSGAKQVTDGMLLAAAEAVASQVNPQDEGASLLPPVDNLRASSATVAVAVAKQAVKDGVAANTSDNWVQAVQDAMWQPEYR

SEQ ID NO: 10329 - protein, 147 aa, Aspergillus niger
  misc_feature (29)..(29): Xaa can be any naturally occurring amino acid
MPLTPEQIKIIKATVPVLQEYGTKITTAXYMNMSTVHPELNAVFNTANQVKGHQARALAGALFAYASHIDDLGALGPAVELICNKHASLYIQADEYKIVGKYLLEAMKEVLGDACTDDILDAWGAAYWALADIMINREAALYKQSQG

SEQ ID NO: 10330 - protein, 412 aa, Aspergillus niger
  misc_feature (29)..(29): Xaa can be any naturally occurring amino acid
MPLTPEQIKIIKATVPVLQEYGTKITTAXYMNMSTVHPELNAVFNTANQVKGHQARALAGALFAYASHIDDLGALGPAVELICNKHASLYIQADEYKIVGKYLLEAMKEVLGDACTDDILDAWGAAYWALADIMINREAALYKQSQGWTNWRQFRISKKVPESDEITSFYLEPVDGKPLPAFRPGQYISVSVQVPEEDPQARQYSLSDTSRSDYYRISVKKETGLDPRAPGAKRHPGYVSNVLHDMIKEGDLIDVSHPYGDFFLSTAEATHPIVLLSAGVGMTPMMSILNTITKKSNRKIHFIHGSRTTEARAFKSHVQKLEKEIPNMQVTYFLSRPGDSDQLGVDYHHAGRIDLQKLDGPSHLYLDNPSTEYYICGPDTFMTQMEEALKAYGVGDDRIKMELFGTGGVPHN

SEQ ID NO: 10331 - protein, 105 aa, Arabidopsis thaliana
MDNTDRRRRRKQHKIALHDSEVSSIEWEFINMTEQEEDLIFRMYRLVGDRWDLIAGRVPGRQPEEIERYWIMRNSEGFADKRRQLHSSSHKHTKPHRPRFSIYPS

SEQ ID NO: 10332 - protein, 498 aa, Pirellula sp. 1
MSSISAFTTQELSGGPTGFRFAWLTMVLLVGMMGIGGSLASVASAQDEPAAATDTAEVADAGDADSEEPAADAGVGYAFDNGFLFLCAVLVLFMQAGFAMVEVGLNSSKNTVNILSKNLMDLSVGALLFFFVGFGLMYPGSYGDVTNGYFAFGGTGIYDSSPDQTFSPQVDWFFQAVFAATAATIVSGAVAGRMKFNAYLIYSAILTGLIYPISGFWKWGGGWLMQFGEQAADGSFAMGFQDFAGSAVVHAVGGFAGLAGAIFLGPRLGRYTAEGKSVPLPGHNVAFAALGVFILWVGWYGFNPGSQLAFQSSADIDATVFIAVNTTLAAAAGVIVATAVSWGLFGKPDLTMGLNGALGGLVGITACCDAMSNSMSIVVGAVAGALVVLSIVVLDKVKIDDPVGAFPVHGVCGVWGCMALGILPNAHLESESTNFMIQLIGTASICAWAFISMSVVFGVLKAVGMLRVSPQEEQAGLDISEHGMHAYPSDAVAGGSVI

SEQ ID NO: 10333 - protein, 268 aa, Glycine max
MSEALEEVVPSMKGGCEEEGLNLKATELRLGLPGCESPEREGVFKSVVVSGAKRGFSDAIDGNWNGGGSEKDAAALFSPTSRGAVSVSVSAAKSLTLTATDCTNQPTALGASVLKETVPHSPKPLHENKPQISAPAAKAQVVGWPPIRSFRKNSMASQPQKNDAAADAEAKSGCLYVKVSMEGAPYLRKVDLNSFTTYKDLSLALEKMFSCFTLKYVLTYEDKDGDWMLVGDVPWEMFTESCKRLRIMKSSEAIGLAPRAMEKCKSRY

SEQ ID NO: 10334 - protein, 505 aa, Zea mays
MASQAMVPLRQLFVDGEWRPPAQGRRLPVVNPTTEAHIGEIPAGTAEDVDAAVAAARAALKRNRGRDWARAPGAVRAKYLRAIAAKVIERKQELAKLEALDCGKPYDEAAWDMDDVAGCFEYFADQAEALDKRQNSPVSLPMETFKCHLRREPIGVVGLITPWNYPLLMATWKVAPALAAGCAAVLKPSELASVTCLELADICKEVGLPPGVLNIVTGLGPDAGAPLSAHPDVDKVAFTGSFETGKKIMAAAAPMVKPVTLELGGKSPIVVFDDVDIDKAVEWTLFGCFWTNGQICSATSRLLVHTKIAKKFNERMVAWAKNIKVSDPLEEGCRLGPVVSEGQYEKIKKFILNAKSEGATILTGGVRPAHLEKGFFIEPTIITDITTSMEIWREEVFGPVLCVKEFSTEDEAIELANDTQYGLAGAVISGDRERCQRLSEEIDAGIIWVNCSQPCFCQAPWGGNKRSGFGRELGEGGIDNYLSVKQVTEYISDEPWGWYRSPSKL

SEQ ID NO: 10335 - protein, 275 aa, Bacillus cereus ATCC 14579
MELWFTEKQTKHFGITARINRTLHTEQTEFQKLDMVETEEFGNMLILDGMVMTTEKDEFVYHEMVAHVPLFTHPNPENVLIVGGGDGGVIREVLKHPSVKKATLVEIDGKVIEYSKQYLPSIAGALDNERVEVKVGDGFLHIAESENEYDVIMVDSTEPVGPAVNLFTKGFYAGISKALKEDGIFVAQTDNPWFTPELITTVFKDVKEIFPITRLYTANIPTYPSGLWTFTIGSKKHDPLEVIEERFHEIETKYYTKELHNAAFALPKFVGDLIK

SEQ ID NO: 10336 - protein, 452 aa, Neurospora crassa
MSAANGRQPEVQPCRYKVGKTLGAGSYSVVKECVHIDTGRYYAAKVINKRLMAGREHMVRNEIAVLKKVSMGHQNILTLVDYFETMNNLYLVTDLALGGELFDRICRKGSYYESDAADLIRATLSAVAYLHDHGIVHRDLKPENLLFRTPEDNADLLIADFGLSRIMDEEQFHVLTTTCGTPGYMAPEIFKKTGHGKPVDIWALGVITYFLLCGYTPFDRDSDFEEMQAILNADYSFTPLEYWRGVSDNAKDFIRRCLTIDPAKRMTAHEALQHPFVAGWARGTDGAEADKGANLLPTVKKNFNARRTLHAAIDTVRAINKLREGQFMNGGRSREPAKKAAAALGPTLGKEASMVSTASSNVTKDSGYATQPEGEGGSRDGDDVLMKDASVPAPTSSSPAPCRVSYGRAVSRIRLSRLVKACGMGLVLSDDQFLGLSSLTNGGWFCSIVIIF

SEQ ID NO: 10337 - protein, 512 aa, Thermoplasma acidophilum
MKALVEDDLFSKIGLDDVNSGVYDGEWVKPSGKMLTVKSPIDGSEVAKISLATRADYDRLVSRAIEEFKKWRMIPAPKRGLIIREIGDELRKEKKNLGKIVTIEAGKTPSEGEGEIQEMIDISDLALGLSRQLYGLTIASERPYHRMYEQWVPLGPVAVITSFNFPASVWSWNAFIAAVDGDVVIWKPSSKAALTAVAVMKVIERVLKRNNAPNIFFLMVSSGSEGGDWITNDPRIPLVSFTGSVPVGKKISENVAKRLGKSILELGGNNGAIVSDKADIDLALRGVVFGALATAGQRCTTTRRVIVQEKIYDQFLEKLKNAYSTIKVGDPREKGVLVGPLIDEDAVKDYEHAIDLAIKQGGKLIFGGKRITIKGLEGGHYVMPTIIEAKPDMPIVKEETFASILYVMKYRTIEEAIEIHNSVPQGLSSSIFTTDLREEEAFLSPYGSDCGLANVNTSTAGAEIGGAFGGEKDTGGGRESGSDAWKYYMRRQTVTKNWGQTLPLAQDVVFEF

SEQ ID NO: 10338 - protein, 486 aa, Acinetobacter sp. YAA
MKDIKHYINGQYVGSASGKLFDNVNPANGKLISKVHEAGREEVDAAVNAAKAALRGPWGKMTLEERTSILHKVADGINARFDEFLKAECLDTGKPKSMASHIDIPRGAAHFKVFADMIKNVPTESFEMPTPDGTGALNYAVRRPKGVIGVISPWNLPLLLMTWKVGPALACANTVVVKPSEETPTTTALLGEVMKEAGIPTGVYNVVHGFGGDSAGAFLTEHPQVDGFTFTGETVPGEVIMKAAAKGIRDISLELGGKNAALVFADCDMDKAIEGTMRSAFANCGQVCLGTERVYVERSIFDEFVGRLKEAAEGLKIGPPDDAEANLGPLVSLKHREKVLSYYQKAVDDGATVVTGGGVPEMPEELAGGAWVQPTIWTGLPKDSAVITDEIFGPCVHVCPFDTEEEAIELANSLPYGLASAIWSENITRAHRVAGQIEAGIIWVNSWFLRDLRTPFGGSKQSGIGREGGVHSLEFYTEMKNICVKL

SEQ ID NO: 10339 - protein, 321 aa, Bacillus halodurans C-125
MDRQTIAQKFQERILGLLFYPYHSRILQTFTQKWRDRIDRDRSNALEPSTIPFVQREEKILPTSYGGTRVLIYRPDKTLNSSIPVYVNMHGGGFVMGNAEMDDVWCRVIADRANCVVVNIDYRLAPQHKFPTAVYECYEVVKWLVDHPEQFSITPQKVAIGGHSAGGNLATAVCLLNLERGNELPIIYQIIDYAPLDLHTDPALKPSFKDAIPVKMARLFNASYVETEEDARNPLASPLFAESLQGLPDALVITAERDSLAAEGEQYAERLKQAGVKVTYKDYKGMPHGFTHAGDLAVAEHAWHLMCDKLKEAFSESCGPM

SEQ ID NO: 10340 - protein, 485 aa, Burkholderia cepacia R1808
MAILIRGGTVVDAERTYRADVLCADPQDGGTILQIAEKIDAPAGADVVDAHDQYVMPGGIDPHTHMELPFMGTTASDDFYSGTAAGLAGGTTSIIDFVIPSPRQPLMDAFHQWRGWAEKAAADYGFHVAVTWWDESVHRDMGTLVNEHGVSSFKHFMAYKNAIMADDEILVNSFSRSLELGALPTVHAENGELVFRLQQALLARGMTGPEAHPLSRPPEVEGEAANRAIRIAQVLGVPVYIVHVSAKDAVDAIARARSEGLRVFGEVLPGHLVIDEAVYRDPDWTRAAAHVMSPPFRSAEHREALWRGLQAGQLHTTATDHCVFCASQKAMGRDDFTKIPNGCGGVEDRMSVLWHHGVNRGRITPNEFVRITSTNAAQIFNLHPRKGAVQVGADADLVVWDPAATKTISVKTHHQQVDFNVFEGMTVQGVATHTLTRGALAWADGDLRAQRGAGRYLKRPPAASYYEAARIANRLREPHPVERSR

SEQ ID NO: 10341 - protein, 112 aa, Arabidopsis thaliana
MSGVWVFNNGVIRLVENPNQSGGVSTQSHGRRNVLVYLPTGEAVSSYSSLEQILRSLGWERYFSGDSDLIQYHKRSSIDLISLPRDFSKFNSVYMYDIVVKNPNSFHVRDFN

SEQ ID NO: 10342 - protein, 335 aa, Xylella fastidiosa Temecula1
MTQTITVIRGDGIGPEIMDATLSVLNALQANLNYEFADAGLSALEKHGDLLPESTLNSISKNKIALKSPLTTPVGEGFSSINVALRRKFDLYANVRPAKSFPNTKSRFSDNVDLITVRENTEGAYLSEGQTISPDGEVATSSARVTRKGSERIVRYAFDLARTTGRKKVTAVHKANIIKSTSGLFLKTARDVASQYPEIDFQEMIVDNTCMQLVMRPEQFDIIVTTNLFGDILSDLCAGLVGGLGLAPGANIGNEQAIFEAVHGSAPDIAGQGKANPCALLLGAVQMLDHIGQPQNAERLRNAIVATLNAKDSLTPDLGGNGNTMGFAKAIASRL

SEQ ID NO: 10343 - protein, 259 aa, Zea mays
  misc_feature (247)..(247): Xaa can be any naturally occurring amino acid
MALSISAPTSSPFLPAPRQVGRWSSSPSSAKPAVFSLRRPVVVARAAAGNAPSSPAGAVVTEFDVVSSFSEIVPDTVVFDDFEKFAPTAATVSSSLLLGIAGLPDTKFKSAIDTALVDGECNTMEKPGDRMSCYLTKALGNVGAELAHQVPGRVSTEIDARLAYNTQGIVQRVHELLQIYNEHDIPSERLLFKIPATWQGIEASRLLESEGTQTHLTFVYSFAQAAAAAQAGASVVQIFGEVVFGDXAKNHSGEPEIDE

SEQ ID NO: 10344 - protein, 474 aa, Oryza sativa (japonica cultivar-group)
METTSQDSQVIMGRYKLGRLLGRGTFAKVYKAYKLATGEAVAIKVFDKEAVQRSGTVEQVKREVDVMRRVHHRHVIRLHEVMATRSRIYFVMEYASGGELFTRLSRSPRFPEPVARRYFQQLITAVEFCHSRGVYHRDLKPENLLLDARGDLKVTDFGLSALDGGLRGDGLLHTTCGTPAYVAPEVLLKRGYDGAKADIWSCGVILFVLLAGYLPFNETNLVILYRNITESNYRCPPWFSVEARKLLARLLDPNPKTRITISKIMDRPWFQQATCPLGDMSLVASAPSVLLARKEASQQHDDEEDDGFAREKKKRSNVIMSSPVIDVRPSSMNAFDIISRSRGLDLSKMFDAEERRSEARFSTRETTTAIVSKLEEIAEAGRFSFKLKEKGRVELEGSQDGRKGALAIEAEIFKVAPEVHVVEVRKTGGDSPDFRDFYKQELKPSLGDMVWAWQGGDSPPLVPAAGRRPITKRS

SEQ ID NO: 10345 - protein, 509 aa, Glycine max
  misc_feature (66)..(66): Xaa can be any naturally occurring amino acid
  misc_feature (128)..(128): Xaa can be any naturally occurring amino acid
  misc_feature (267)..(267): Xaa can be any naturally occurring amino acid
MGSDNHQNLEFLKEIGLGSSNIGSYINGQWKATGSSVTSVNPSNNQSIAQVTEATLQDFEEGLRAXSEAAKTWMTIPAPKRGEIVRQIGEALRAKLDPLGRLVSLEMGKILPEGIGEVQEIIDMCDYXLGLSRQLNGSIIPSERPDHMMFEVWNPLGIVGVISAFNFPCAVLGWNACIALVCGNCVVWKGAPTTPLITIAVTKLVAEVLERNKLPGAIFTSFCGGADIGQAIAKDTRIPLVSFTGSSKVGLMVQQTVNERFGKCLLXLSGNNAIIVMDDADIKLAVRSILFAAVGTTGQRCTTCRRLFLHESIYTDVLDQLVEVYKQVKIGNPLEKGTLVGPLHTRTSVENFQKGISVIKSQGGKILTGGSVLESGGNFVQPTIVEISPDAPVVKEELFGPVLYVMKFQTLEEAIALNNSVPQGLSSSIFTQRPGTIFKWIGPRGSDCGIVNANIPTNGAEIGGAFGGEKATGGGREAGSDSWKQYMRRSTCTINYGSELPLAQGINFG

SEQ ID NO: 10346 - protein, 511 aa, Streptomyces lavendulae
MKAMDRVDRAVERFPMYIDGQAVQAHDGAVLRTFEPATRRHLADLPSGGAEDVRRAVSAARRAFDEGPWPRMAPGERAGLLRKAAQRLREEAEPLAELEARDNGSTLRKALGADVPGAAAAFEWSAWWAEHVPERQPEAPGSGSYVVWRPVGVVAAIVPWNLPLLLAAWRIAPAIAAGNTCVIKPASFASLSTLRLVELLHECGLPPGVVNVVTGPGGVAGEQLVRSPGVDLVAFTGSDETGAAVREGAAAAGTSARLDLGGKSPNIVLADADLDRAVTGVTWGAFLHNGQVCMAGTRAVVHADVHDDFLRLLSERVGRLRVGDPLDPATDLGPLVSRNQARTARRFTELGLSQGAELVCGGRAPAADELPPGLDAGAYFLPTVLASVGADDAVAQEEIFGPVLAVVRAGSDDDAVRIANGSRYRLSAGVWSADPARARAVAERLRADRVWINDYRLVDLELPGTAGPRSAVWDRLTNELDAYRHKHVVHGGGAGAGGVPAPPTPYALLGG

SEQ ID NO: 10347 - protein, 507 aa, Candida tropicalis
MIEQVLHYWYYVLPAFIIFHWIVSAIHTNSLRRKLGAKPFTHTQLDGFYGFKFGRDFLKAKRIGRQVDLINSRFPDDIDTFSSYTFGNHVIFTRDPENIKALLATQFNDFSLGGRIKFFKPLLGYGIFTLDGEGWKHSRAMLRPQFAREQLPMSPSLEPHFNVKAYPQEQRWVFDIQELFFRFTVDSATEFLFGESVNSLKSASIGCDEETELEERKKFAEAFNKAQEYISTRVALQQLYWFVNNSEFKECNEIVHKFTNYYVQKALDATPEELEKQSGYVFLYELVKQTRDPNVLRDHHSISLLAGRDTTAGLLSFAVFELARNPHIWAKLREDVESQFGLGEESRIEEITFESLKRCEYLKAVMNETLRLHPSVPRNARFALKDTTLPRGGGPDGKDPILVRKMSCSIFISGTQIDPKHYGKDAKLFRPERWFESSTRNLGWAYLPFNGGPRICLGQQFALTEAGYILVRLAQSFDTLELKPDTEYLTKISHLTMCLFGAFVKMD

SEQ ID NO: 10348 - protein, 388 aa, Bacillus sp. KSM-K16
MEMFSKSVKKGVAVFALAAVTISLISIFFVQSWRYTEAGKVPPKTAVLLHAVNNRLLPEGKLEAPAFLAVKAPPTIERHQVTVPTRDGEDIPATVYQPIAAGPHPIIVYYHGGAFLEGYGDLDTHDNIIRSLAARTGAIVVAPAYRLAPTYAFPTAVNDSYDALTWAYEHADVLDGDRDRLAVAGDSAGGNLAAAVAIMSGEEGGPALSGQALLYPLATFEDTKFPSRDMYASGFYFLSRAVMEMAQQSYAPNEADWTSPYTSPLNAEDVSMMPSTLVITGEFDPLRDEGEALAKRLYNEGIYVQAQRFNGVMHGFISFYEVMERGDKGLQSAAAFLKEALNKELPEPQNSQPFAVEVIDGRDSWRDEAEAYVIGVYLLFKHMIQVFE

SEQ ID NO: 10349 - protein, 335 aa, Nicotiana tabacum
MVHEKQVIEEVSGWLRVFEDGSVDRTWTGPPEVKFMAEPVPPHDYFIDGVAVKDVVADEKSGSRLRIYLPERNDNSASKLPVILHFQGGGFCVSHADWFMYYTVYTRLARAAKAIIVSVFLPLAPEHRLPAACDAGFAALLWLRDLSRQQGHEPWLNDYADFNRVFLIGDSSGGNIVHQVAVKAGEENLSPMRLAGAIPIHPGFVRSYRSKSELEQEQTPFLTLDMVDKFLGLALPVGSNKDHQITCPMGEAAPAVEELKLPPYLYCVAEKDLIKDTEMEFYEAMKKGEKDVELFINNGVGHSFYLNKIAVRMDPVTGSETEKLYEAVAEFINKH

SEQ ID NO: 10350 - protein, 185 aa, Xanthomonas axonopodis pv. citri str. 306
MLLNRLLALVLTGFFATPAFAAGTPVLDVEYRPLAGKTPINLNRTYGGKVVMVVNTASKCGFTPQYEGLEALNHRFGSRGFTVLGFPSNDFQGQEPGSEKQIQEFCTLTYGVKFPMFEKVHVLGAEATPLYQRLTQATGVAPGWNFHKYLIGRDGRVVAQFPSKIKPDDPSVLAAIERELKAPAR

SEQ ID NO: 10351 - protein, 506 aa, Candida tropicalis
MSLTETTATFIYNYWYIIFHLYFYTTSKIIKYHHTTYLMIKFKASPPLNYINKGFFGIQATFTELKHLICHTSIDYAIDQFNNVPFPHVHTFVTKVLGNELIMTKDPENIKVLLRFPVFDKFDYGTRSSAVQPSLGMGIFTLEGENWKATRSVLRNMFDRKSIDKVHDFEPHFKTLQKRIDGKVGYFDIQQEFLKLGLELSIEFIFGQVVSEDVPHYDDFTQAWDRCQDYMMLRLLLGDFYWMANDWRYKQSNQIVQAFCDYLVQKSLENTCNDKFVFVHQLAKHTTNKTFIRDQALSLIMASRDTTAELMAFTILELSRKSHHLGKLREEIDANFGLESPDLLTFDSLRKFKYVQAILNETLRMYPGVPRNMKTAKCTTTLPKGGGPDGQDPILVKKGQSVGFISIATHLDPVLNFGSDAHVFRPDRWFDSSMKNLGCKYLPFNAGPRTCLGQQYTLIEASYLLVRLAQTYETVESHPDSVYPPRKKALINMCAADGVDVKFHRL

SEQ ID NO: 10352 - protein, 505 aa, Candida tropicalis
MYQLFCFLAGIIVVYKAAQYYKRRTLVTKFHCKPARISPNKSWLEYLGIASVVHADEMIRKGGLYSEIDGRFKSLDVSTFKSITLGKTTYVTKDIENIRHILSATEMNSWNLGARPIALRPFIGDGIFASEGQSWKHSRIMLRPVFAKEHVKQITSMEPYVQLLIKIIKNHEGEPLEFQTLAHLFTIDYSTDFLLGESCDSLKDFLGEESNSTLDTSLRLAFASQFNKTQQQMTIRFMLGKLAFLMYPKSFQYSIQMQKDFVDVYIDRVVGMSEEELNNHPKSYVLLYQLARQTKNRDILQDELMSILLAGRDTTASLLTFLFFELSHHPEVFNKLKEEIERHFPDVESVTFGTIQRCDYLQWCINETMRLHPSVPFNFRTAANDTVIPRGGGKSCTDPILVHKGEQVLFSFYSVNREEKYFGTNTDKFAPERWSESLRRTEFIPFSAGPRACLGQQLPRVEASYVTIRLLQTFHGLHNASKQYPPNRVVAATMRLTDGCNVCFI

SEQ ID NO: 10353 - protein, 100 aa, Glycine max
MSGVWVFKNGVVRLVENPGSERKVLVHTASNEIITSYAVLEHKLSSLGWERYYDDPDLLQFHKRSTVHLISLPRDFNKFRSMHMYDIVVKNKNYFEVRDM

SEQ ID NO: 10354 - protein, 109 aa, Glycine max
  misc_feature (10)..(11): Xaa can be any naturally occurring amino acid
  misc_feature (61)..(62): Xaa can be any naturally occurring amino acid
TLDSCGSTPXXTGDGEGGSGFAAGSVSGFEFGVDPNLDPELALALRVSMEEERARQEAAAXXAAEDAAKQEKDGEQQASPQDTTMTKGVSAAASEAETKNDSCTDYDEL

SEQ ID NO: 10355 - protein, 334 aa, Bordetella parapertussis 12822
MTTAALPYPLDPQIQRFVERMQADSAAHPRRDLVPVEQARAISEAVRRPWAEGGPQMARTREIHAPTPHGPVRLRVYTPRAARPGPAMLYVHGGGWVLFSLDTHDRLMREYAERAGLTVIGVDYTRAPEARYPRAIEEIVGVIDWLDANGAELEVDRARLCIGGDSAGANLSVAACLTLRERGAAPLAGMVLNYGVYDANLFRDSTVKYGGGEYLLSTQQMVWFYWNYLRAGDDPRDPRISPVHADLRGLPPAFMAITELDLLHDANQDMAARLREAGVDVQAKVYPGTVHSFLEAVSLAQVSVAAFDDTAAWLRAVLRPAAAAAAIHTGEHQP

SEQ ID NO: 10356 - protein, 141 aa, Brassica napus
MSGENDNGGAKRRGSVKWFAAEKGFGFITPEDGGEDLFVHQSSIRSEGYRSLAEGESVEFLVEVDNNSGRTKAIEVTGPDGAPVQGTSRGSSGGRGGFGGDGYGGRGGGRGSYGGRGGGGGCRGGGRDRYTCGGPRGIAGH

SEQ ID NO: 10357 - protein, 347 aa, Halobacterium sp. NRC-1
MRAAVYQGPGEIAVEEVPKPDIESPEDAVIRVTHTAVCGSDLWFYRGDSDREAGSRVGHEPMGIVEEVGDDVTSVAPGDRVIAPFAISCGECEFCRQGLYTSCVEDESWGSEANGGGQGEYVKCPFADGTLVRVPDRYADDEDVLESLLPLTDVMGTGHHAAVSAGVGEGDTAVVVGDGAVGLCGVLAAQRLGAERIIAMGHHEDRLELAAEFGATDTISARGDDAIERARDLTHGGANHVMECVGAASAMDSAIAIARPGGTVGYVGVPYGVEDGGLDVFTMFSDNITIRGGVAPVRAYAEELMADVLQGTLDPSPIFTKTVDLDGVPEGYAAMDDREAIKVLVKA

SEQ ID NO: 10358 - protein, 201 aa, Chlamydomonas reinhardtii
MLLTRKNVAVRPARAARRDVRAMSLLGNLFGGGSKPTSSTSNFHQLSALDIDKKNVDFKSLNNRVVLVVNVASKCGLTAANYKEFATLLGKYPATDLTIVAFPCNQFGGQEPGTNAEIKAFASARGFSGAGALLMDKVDVNGANASPVYNFLKVAAGDTSDIGWNFGKFLVRPDGTVFGRYAPTTGPLSLEKYIVELINSR

SEQ ID NO: 10359 - protein, 343 aa, Vibrio parahaemolyticus RIMD 2210633
MKIKALSKLKPEQGIWMTEVDKPEVGHNDILIKIKKTAICGTDVHIYNWDEWSQKTIPVPMVVGHEYVGEVVAIGQEVRGFEIGDRVSGEGHITCGHCRNCRGGRTHLCRNTIGVGVNREGAFAEYLVIPAFNAFKIPDEISDDLASIFDPFGNAVHTALSFDLVGEDVLITGAGPIGIMAAAVAKHVGARHVVITDVNEYRLELARKMGVTRAVNVAEEKLEDVMAELGMTEGFDVGLEMSGNPAAFNSMLTTMNHGGRIALLGIPPSDMGIDWNQVIFKGLVIKGIYGREMFETWYKMASLIQSGLDLSPIITHHYKIDDFQEGFDVMRSGMSGKVILDWE

SEQ ID NO: 10360 - protein, 124 aa, Hordeum vulgare subsp. vulgare
MASRRAHAAATMALLVVALVLSGAPAPAEGAVASCGQVVSYLAPCIGYAMGRERAPGGGCCTGVRSLNAAAATPADRQATCTCLKQQTSGMGGIKPDLVAGIPSKCGVNIPYAISPRTDCSKVR

SEQ ID NO: 10361 - protein, 122 aa, Glycine max
WINCVATFCFIVNHVDSRHSVVVPDSNIFYIIALLRFIPPPPKGPPTELLVEQNHEIIQLCYNRGFDFKLYLPHYQSQENWMRHYGDKWTRFVERKANFDPLAILAPGQKIFSRIPQTLSIT

SEQ ID NO: 10362 - protein, 343 aa, Agrobacterium tumefaciens str. C58
MKAIVAHGAKDVRIEDRPEEKPGPGEVRLRLARGGICGSDLHYYNHGGFGAVRLREPMVLGHEVSAVIEELGEGVEGLKIGGLVAVSPSRPCRTCRFCQEGLHNQCLNMRFYGSAMPFPHIQGAFREILVADALQCVPADGLSAGEAAMAEPLAVTLHATRRAGDLLGKRVLVTGCGPIGILSILAARRAGAAEIVATDLSDFTLGKAREAGADRVINSKDEPDALAAYGANKGTFDILYECSGAAVALAGGITALRPRGIIVQLGLGGDMSLPMMAITAKELDLRGSFRFHEEFATGVELMRKGLIDVKPFITQTVDLADAISAFEFASDRSRAMKVQIAFS

SEQ ID NO: 10363 - protein, 439 aa, Arabidopsis thaliana
MNRPKVQRRVGKYEVGKTLGQGTFAKVRCAVNTETGERVALKILDKEKVLKHKMAEQIRREICTMKLINHPNVVRLYEVLASKTKIYIVLEFGTGGELFDKIVHDGRLKEENARKYFQQLINAVDYCHSRGVYHRDLKPENLLLDAQGNLKVSDFGLSALSRQVRGDGLLHTACGTPNYAAPEVLNDQGYDGATADLWSCGVILFVLLAGYLPFEDSNLMTLYKKIIAGEYHCPPWLSPGAKNLIVRILDPNPMTRITIPEVLGDAWFKKNYKPAVFEEKEEANLDDVDAVFKDSEEHHVTEKKEEQPTSMNAFELISMSRALDLGNLFEEEEGFKRETRFAAKGAANDLVQKIEEASKPLGFDIQKKNYKMRLENVTAGRKGNLRVATEIFQVSPSLHMIEVRKTKGDTLEFHKFYKKLSTSLNDVVWKSGESSGLSK

SEQ ID NO: 10364 - protein, 115 aa, Zea mays
QPNGPATPVDMVVDYYKFDYEFAEPPRVTSLQNTRGYEAVVYYLAGQYLKTDDRSGKIVDPRLQLNKVVREIKYSPGGVTVKTEDNSVYSADYVMVSASLGVLQSDLIQFKPKLP

SEQ ID NO: 10365 - protein, 174 aa, Glycine max
  misc_feature (37)..(37): Xaa can be any naturally occurring amino acid
  misc_feature (86)..(86): Xaa can be any naturally occurring amino acid
  misc_feature (143)..(143): Xaa can be any naturally occurring amino acid
MVPSVISSPAETTVNRAGAGMADPLTALKSMDGCPTXNTLIDFTSFASNGGRAQNMQAWPPVDNKKYETLYYLPDLDPAQPAKDGXYLLRTGWTPRLELELEHGFWCREHNRPPEHYDGRYWTMWKLPIMTYTDAYHASKDLXEANTAYPNGFIRIIRFNTVRQVHHMNLIDYK

SEQ ID NO: 10366 - protein, 157 aa, Leuconostoc mesenteroides subsp. mesenteroides ATCC 8293
MSIYDYFATLENGETYSLNKLANHPVVIVNTATKCGYAPQFGELEKLYKKYKDKGLVILGFPSNQFKQELETASQAAQACQLTYGVTFPMHQLVAVNGKNTDPLFKYLKENSKGMLGSSTIKWNFTKFLVDKEGNVVKRYAPKTEPKDLEEDIEDVL

SEQ ID NO: 10367 - protein, 436 aa, Psychrobacter sp. 273-4
MTTVSTNDFDQQHLWHPYASLPPRYPNIMIDHADGIHIVTQDGTRLIDGMSSWWASVHGYNHPKLNAAIIEQLGKMAHVMFGGLTHQPAIDLGKKLLSIVPAGIDAIFYADSGSIAVEVALKMALQYQIAAKRPNKQQFASTHSGYYGDTWHAMSVCDPINGMHSLYGKQLPMQHFVAAPPMGFERDITQNERDELTAFFAKNSHQLAGFIIEPIIQGAGGMRFYSPEYLQLLRQLCCEHDVLLIADEIATGFGRSGKLFACEHANISPDIMTIGKALTGGYMTFAATLCTRSIADTISQSDYSALMHGPTFMGNPLACAVACASIDLILSYDIEARTENMHALMVEQLASAAKLEGVKEVRCLGAVAVIELDDAVDMPTFQSLLIEHGIWVRPFGKLVYIMPPYIITDSELITLCQALLKVVSIYLTQTSLSAKG

SEQ ID NO: 10368 - protein, 277 aa, Arabidopsis thaliana
MAETLKEDSIMIREVWDYNLVEEFALIREIVDKFSYIAMDTEFPGVVLKPVATFKYNNDLNYRTLKENVDLLKLIQVGLTFSDENGNLPTCGTDKFCIWQFNFREFNIGEDIYASESIELLRQCGIDFKKNIEKGIDVVRFGELMMSSGIVLNDAISWVTFHGGYDFGYLVKLLTCKELPLKQADFFKLLYVYFPTVYDIKHLMTFCNGLFGGLNRLAELMGVERVGICHQAGSDSLLTLGSFRKLKERYFPGSTEKYTGVLYGLGVEDGTTTTVAN

SEQ ID NO: 10369 - protein, 329 aa, Triticum aestivum
  misc_feature (250)..(250): Xaa can be any naturally occurring amino acid
MASPLSAPSLIMEEEGRFEAEVAEVGAWWNTERFRLTKRPYTVRDVVLLRGTLRQSYASGEMAKKLWRTLKAHQAAGTASRTFGALDPVQVTMMAKHLDTIYVSGWQCSSTHTSTNEPGPDLADYPYDTVPNKVEHLFFAQQYHDRKQQEARMSLPRAERTHAPFVDFLKPIIADGDTGFGGATATVKLCKLFVERGAAGVHLEDQSSVTKKCGHMAGKVLVAVSEHVNRLVAARLQFDIMGVENVLVAXTDAVAATLIQNNIDAREHQFILGATNPRLKNRSLTGMLSDAMSARKNGRSCRHRGRVDATAHSNLLEVVKTPSEPHATI

SEQ ID NO: 10370 - protein, 351 aa, Streptomyces lavendulae
MTVEQTPENPGTAARAAAEETVNDILQGAWKARAIHVAVELGVPELLQEGPRTATALAEATGAHEQTLRRLLRLLATVGVFDDLGHDDLFAQNALSAVLLPDPASPVATDARFQAAPWHWRAWEQLTHSVRTGEASFPSTWPTAPRSGSSPTRDPKARELFNRAMGSVSLTEAGQVAAAYDFSGAATAVDIGGGRGSLMAAVLDAFPGLRGTLLERPPVAEEARELLTGRGLADRCEILPGDFFETIPDGADVYLIKHVLHDWDDDDVVRILRRIATAMKPDSRLLVIDNLIDERPAASTLFVDLLLLVLVGGAERSESEFAALLEKSGLRVERSLPCGAGPVRIVEIRRA

SEQ ID NO: 10371 - protein, 128 aa, Brassica napus
  misc_feature (2)..(2): Xaa can be any naturally occurring amino acid
  misc_feature (10)..(11): Xaa can be any naturally occurring amino acid
  misc_feature (22)..(22): Xaa can be any naturally occurring amino acid
  misc_feature (26)..(26): Xaa can be any naturally occurring amino acid
  misc_feature (35)..(35): Xaa can be any naturally occurring amino acid
  misc_feature (53)..(53): Xaa can be any naturally occurring amino acid
  misc_feature (65)..(65): Xaa can be any naturally occurring amino acid
  misc_feature (71)..(71): Xaa can be any naturally occurring amino acid
  misc_feature (83)..(84): Xaa can be any naturally occurring amino acid
  misc_feature (86)..(86): Xaa can be any naturally occurring amino acid
  misc_feature (93)..(94): Xaa can be any naturally occurring amino acid
  misc_feature (99)..(99): Xaa can be any naturally occurring amino acid
  misc_feature (101)..(102): Xaa can be any naturally occurring amino acid
  misc_feature (105)..(107): Xaa can be any naturally occurring amino acid
  misc_feature (111)..(111): Xaa can be any naturally occurring amino acid
MXSSMLSSAXXVTSPDQATMVXPFTXLKSSAAFPXTRKANNDITSIASNGGKXSCMKVRTPVGKXKFETLXLTFPDLTEVELXXEXDYPSPHXXIPCVXFXXEHXXXHRDXREAPPYAHVEFPTPSRF

SEQ ID NO: 10372 - protein, 421 aa, Triticum aestivum
  misc_feature (397)..(397): Xaa can be any naturally occurring amino acid
MPALAVDAAAPVAHAFAASCDASPRFAAPLLGPAAAVVAATAAEKPEMAAWSADLSSALYNVDGWGAPYFFVNDDGDVAVRPHGAATLPGQEIDLAKVVARAAGARAGGGLGLALPLLVRFPDVLRHRVETLNAAFAYAVRSTGYAGRYQGVYPVKCNQDRYVVEDIVEFGAPFGFGLEAGSKPELLLTMSCLVARGSPDALLVCNGYKDLEYVSLALIARTMGLNTVIVLEQEEELDIVVEASRRLNIRPVVGMRAKLRTKHAGHFGATSGEKGKFGLNAAQILSVVAKLKALAMLDCLQLLHFHIGSQIPTTALLADGVGEAAQIYCELARLGAAMRVIDVGGGLGIDYDGTHSAQTDMSVAYSLEEYAAAVVAAVGRVCDRKGVQHPVICSESXGRPLVSHHSVLIFRAFPEGGRVPK

SEQ ID NO: 10373 - protein, 136 aa, Zea mays
ETGSSGSIVAAVLFYLLSFVGVLPGERLVLLGPAAGERLVLPGPLKRSHGIGGLCRLLPALQMSVQDANMSSDTDMSKVFEDRTFVSSILNSLPGVDPNDPSIKDLLASLHSQGEEEKKEDKSDKTEDEKNCFKLE

SEQ ID NO: 10374 - protein, 494 aa, Oryza sativa (japonica cultivar-group)
MTRASTIDFGRKTHNDVLWSGPLRPANFIRNKFPTYKKSLNGIVIKLTDDQEMPSLKEAVAKETADLLHRSQRLSVRELAMKFEKGLNTATLLSNEVKWRQAALLERDILLKNLKSVLESLRSRVAGKHKDEIEESLSMVDVLTVQLSKREDELLQQKAEVAKIATSLKLASEDARRIVEEERSNARIEIDNARAAVQKVEQLVKEQEIDPQINGKQDEDELKEKAQEARRVKMLHCPSKAMDIENEIEVLREQLAEKSSNCVHLLKELHLHQSYEENDVSSYELEGLESLGSMLRIVSQSDGYVDLSRSTIQWFRVQPEGNKKEIISGAIKQAYAPEPHDVGRYLQAEINHCGEISVVKTAGPVDPAAGLVDYVETLLRNPETEYNVVVLQVNGIKQPTDSIHVLSIGKLRMRLAKGKTVIAKEFYSSTMQLCGMRGGGDAAPQAMYWQPRRDLSLVLGFETARERNSAIMLARRFAIDCNIILAGPGDKTHW

SEQ ID NO: 10375 - protein, 505 aa, Helianthus tuberosus
MEIPYLLTTTLLLLFTTLYLLLRRRSSTLPPTIFPSLPIIGHLYLLKPPLYRTLAKLSAKHGQILRLQLGFRRVLIVSSPSAAEECFTKNDIVFANRPKMLFGKIIGVNYTSLAWSPYGDNWRNLRRIASIEILSIHRLNEFHDIRVEETRLLIQKLLSACNSGSSQVTMKFSFYELTLNVMMRMISGKRYFGGDNPELEEEGKRFRDMLDETFVLAGASNVGDYLPVLSWLGVKGLEKKLIKLQEKRDVFFQGLIDQLRKSKGTEDVNKKKTMIELLLSLQETEPEYYTDAMIRSFVLVLLAAGSDTSAGTMEWVMSLLLNHPQVLKKAQNEIDSVIGKNCLVDESDIPNLPYLRCIINETLRLYPAGPLLVPHEASSDCVVGGYNVPRGTILIVNQWAIHHDPKVWDEPETFKPERFEGLEGTRDGFKLLPFGSGRRSCPGEGLAVRMLGMTLGSIIQCFDWERTSEELVDMTEGPGLTMPKAIPLVAKCKPRVEMTNLLSEL

SEQ ID NO: 10376 - protein, 348 aa, Burkholderia cepacia R18194
MKIVKPLLIAAAVAAALSVTTTAFAAGAGAGVEAVRPDATTSAFLAALNGQKGPGLETLSPAKARQVLVDAQNGTKVDLSGIDVSNRTIEQDGLSVPVTIVRPQGATGTLPVFMFIHGGGWVLGDFPTHERLVRDLVVQSGAVAVFVNYTPSPEAHYPVAINQAYAATKWVAAHGAEIGVDGSRLAVVGNSVGGNMAAVVALMAKDKGGPAIRFQGLMWPVTDHNFNTGSYNAYQQGHFLTRPMMKWFWDAYTKNEAQRNEIYASPLRASTAQLKGLPPALIQVAQFDVLRDEGEAYGRKLDAAGVDATTTRYDGTIHDFGLLNALAMDAPTKAATKAMANEIATRLK

SEQ ID NO: 10377 - protein, 514 aa, Glycine max
  misc_feature (446)..(446): Xaa can be any naturally occurring amino acid
MDQFLWRVLPLLTILVSFGVFFYLQDSYTAQLFPLIKLPRDKCSLLPHRHFWISSKRIVTPQGIISGSVEINDGKIISVVEGHAIQGKPKQEEVIDYGDAVIMPGLIDVHVHLNEPGRTEWEGFDTGTRAAAAGGVTTVVDMPLNCYPTTVSKEKLKLKLDAAEDKIYVDVGFWGGLIPENALNTSILDGLLSAGVLGVKSFMCPSGIDDFPMATIDHIKAGLSVLAKYRRPIVVHAEIQQDFENHLELNEDNLDPRAYLTYLNTRPPSWEEAAIKQLVSVTKDTRKGGPLEGAHVHIVHLSDSSASLDLIKEAKSHGDSISVETCPHYLAFTSEEIPNGDTRFKCSPPIRDAYNKDKLWEAVLEGHIDLLSTDHSPTVPELKLMEEGDFLKAWGGISSLQFNLPVTWSYGKKYGLTLEQLSLLWSKKPATLAGLESKGTIAVGKXHADIVVWQPELEFDLDDDYPVFIKHSELSAYMGRRLSGKVLETFVRGNLVFKDGKHAPAPCGVQILAK

SEQ ID NO: 10378 - protein, 443 aa, Anabaena variabilis ATCC 29413
MQLVQWIYQPLQLMEASAKAHGDCFTLWLTNKRPIVFLSNPQAIQELFTTPLEQLDARGTAQVLQPLLGENSLLLLSGETHQRQRKLLTPPFHGDRMRAYGDIITNITQEVISKWQLGEPFSVRDSMQEITLRVILQAVFGLREGERYTQLQKRLCDILDLSGSALRSTLSFLPALQIDLGSWSPWGHFLRQRAAIDQLLYAEIQDRRDHPDPSRTDILSLMMAARDENGEAMTDIELRDELMTLLVAGHETTASALTWALYWIHKLPQVREKLLAELDNFGDNGDVNEITRLPYLTAVCQETLRIYPIAMVTIPRIVKTTLEIGGHQFAPGTMLVGCIYLMHRRPDLYPQPQEFKPERFLEKQYSLYEYLPFGGSNRRCVGMAFALYEMKLVLATVLANMDLALVDNYPVKPTRRGVTLAPSGGKWLIATGQHQKVKSPVEV

SEQ ID NO: 10379 - protein, 474 aa, Escherichia coli CFT073
MQHKLLINGELVSGEGEKQPVYNPATGDVLLEIAEASAEQVNAAVRAADAAFAEWGQTTPKARAECLLKLADVIEENGQVFAELESRNCGKPLHSAFNDEIPAIVDVFRFFAGAARCLNGLAAGEYLEGHTSMIRRDPLGVVASIAPWNYPLMMAAWKLAPALAAGNCVVLKPSEITPLTALKLAELAKDIFPAGVINVLFGRGKTVGDPLTGHPKVRMVSLTGSIATGEHIISHTAPSIKRTHMELGGKAPVIVFDDADIEAVVEGVRTFGYYNAGQDCTAACRIYAQKGIYDTLVEKLGAAVATLKSGSPDDESTELGPLSSLAHLERVSKAVEEAKATGHIKVITGGEKRKGNGYYYAPTLLAGALQDDAIVQKEVFGPVVSVTLFDNEEQVVNWANDSQYGLASSVWTKDVGRAHRVSARLQYGCTWVNTHFMLVSEMPHGGQKLSGYGKDMSLYGLEDYTVVRHVMVKH

SEQ ID NO: 10380 - protein, 144 aa, Zea mays
  misc_feature (48)..(48): Xaa can be any naturally occurring amino acid
  misc_feature (63)..(63): Xaa can be any naturally occurring amino acid
MSAGPEDTQQLINSAAASPNRSAPSAAPSDMERGSGTAASSSRASTTXPLPPEGHPQGGGGGXEEPSSSRGAGSLCSGYLSLPALLLVGVTASLVILPLVLPPLPPPPSLLMLVPVAMLLLLLVLAFMPTSSTGGRGGTGPTYM
